United States Patent Application Publication US 2007/0161031 A1 - sequence listing, part 17

SEQ ID NO: 20896 - DNA, 2300 bp, Homo sapien
ccgactcccaggttcaagagattctcctgcctcagcctcctgagtagctgggattacaggcatctgccaccatgcccagcaaatttttgtatttttagtagagacgggtttcaccgtgttggccaggctggtctcaaactcttgacctcaagtgatccgtcctcctcagcctcccaaagtgctgggattacaggcatgagccaccatgcccggcctcaattttttttttttttagacaaggtttggctccgttgtacaggctggagtgcagtgatgcaatctcagctcatggcagccttgaacgcttaggcaaaagtgatcttcccacctcagcctcctgagtagctgggatcacagatgtgtgccaccacacctggctaatttttacattatttgtagaggtggggtttcacctgttgcccaggctggtctggaactcttgggttcaagcaatcctcctgccttggctgcccaaagttccggaattacaggcgtgagccatcattcccagcctctcaatatatatatttttattttattatgatgatgatgattattttttgtgacaaagtctcactctgtcgcccacgctgatgcacagtggctcaatctcggctcactgcagactctgcctcctgggttcaagtgagtctcctgcctcagactcctgagtaactgggattacaggcatgtgccaccatgcccagctaatttttgtactattagtagagatggggtttgaccatgtcggccaggctggtctcgaactcctgacctcaagtgactcgcccgcctcagctgcccaaagttctaggattacaggcatgagccactgtgcctggccactgccactaattttacattatggtgagttgtatgattatttcaatatacaactacagtataataataatagaaataaagtgcacaataaatgtgatgcgcttggccaggcgcggtggctcatgcctgtagtcccagcactttgggaggccgaggtggacggatcatgaggtcaagagatcgggaccaacctggacaacatggtgaaacctcgtctctactaaaaatacaaaaattagctgggcgtggtggcatatgcctgtagtcccagctactcggaagctgaggcaggagaatcgcttgaacctgggaggcagaagttgcagtgagccaagattgcgccattgcactccagcctggtgacacagcaagactccatctcaaaaaaaaaaaaaaaaaaaaaaaaagtgatacgcttgaatcatcccgaaaccatccacttgacactccatccatggaaaaattgtcttccacgaaaccggtttctggcgtcaaaaacgttaggatctgctgcctcaggacacccttctgtgtctccgtttcctcatttgtaatatgagaattatcttagtcctgaattcataaccccatgctcttaaaagtgtggtttccgccgggcgcagtgtctcacgcctgtaatcccagcactttgggaggtcgaggcgggcggatcacgaggtcaggagatcgagaccatcctggctaacacagtgaaaccccgtctctactaaaaatacaaaaaattagccgggcgtggtggcgggcgcctgtagtcccagctactcgggaggctgaggcaggagaatggcgtgaacctgggaagtggggagcttgcagtgagccgagatcatgccactgcactccagcctgggcgacagtgcgagactccatctcaaaaaaaaaaaaaaaagaaagaaagaaactgtggtttctgggctgggcgtggtgctccaggctggagtgcaatgacacaatcttggctcactgcaacctctgcctcctgggttcaagcgattctcctgcctcagccttctcagtagctgggattacaggcacccgccaccatgcccggctaatttttatatttttaatagagacagggtttcatcatgttggccaggctggtctcaaactcctgacctcaggtgatccacccgcctcgacctcccaaagtgctgggattacaggtgtgaaccactgtgtccagccaatcccagcacttcgagagtctgacgcatttgggtcccttgagtccaagagtttgagaccagcccgggcaacattgtgaggtctcatctctacaaaaaatacaaaaattagctgagcatggtggtacacacctgtagtcccagctacttaggaggctgaggtgggaggatcatttgaacccgggaattcaaggctgcagtgagctatgttgccaccactacaatccagcctgggcaacatagccagac

SEQ ID NO: 20897 - DNA, 2300 bp, Homo sapien
cggatcacgaggtcaggagatcgagaccatcctggctaacacagtgaaaccccgtctctactaaaaatacaaaaaattagccgggcgtggtggcgggcgcctgtagtcccagctactcgggaggctgaggcaggagaatggcgtgaacctgggaagtggggagcttgcagtgagccgagatcatgccactgcactccagcctgggcgacagtgcgagactccatctcaaaaaaaaaaaaaaaagaaagaaagaaactgtggtttctgggctgggcgtggtgctccaggctggagtgcaatgacacaatcttggctcactgcaacctctgcctcctgggttcaagcgattctcctgcctcagccttctcagtagctgggattacaggcacccgccaccatgcccggctaatttttatatttttaatagagacagggtttcatcatgttggccaggctggtctcaaactcctgacctcaggtgatccacccgcctcgacctcccaaagtgctgggattacaggtgtgaaccactgtgtccagccaatcccagcacttcgagagtctgacgcatttgggtcccttgagtccaagagtttgagaccagcccgggcaacattgtgaggtctcatctctacaaaaaatacaaaaattagctgagcatggtggtacacacctgtagtcccagctacttaggaggctgaggtgggaggatcatttgaacccgggaattcaaggctgcagtgagctatgttgccaccactacaatccagcctgggcaacatagccagaccctgtctctgaaaaaaagaaaaaaaaaaaagtctggtttctgaaccagcaggatcaatgtcacctgggaactggttggaaatgcagattcttagatatgttccatacctgttgagtcaggagctctgcaggtaggacacaaagatatgtgttttgtttgtttgtttttgagacagagtctcactctgttgcccaggctgaagtgcagtggcgccatctcagctcactgcaacctccacctcccaggttcaagcaattctcctgcctcagcctcccaaggagctggggctacagacatgagccaccacacccggctaattttttgtatttttagtagaggcggggtttcaccatgttggccaggctggtctcgaactccggacctcaggtaatcctcctgccatggcctcccaaagtgctgggattacaggcgtgagccaccgcgcctggcctgatttctgttttaacaagcctacccaaagattctgaagctcactcacatttgagaaccattaccctgggttgttgggagaatcaaatacattacagagatataaaatgctttgagcagctgagggctgtggctcatatctgtaatcccagcactttgggaggctgagacaggcggatcacctgaggccaggagttcgagaccagcctggccaacgtggtaaaaccccgtctctactgaaaatacaaaaattagccaggtgtggtggtgggcgcctgtaatcccaactacttgggaggctgaggcgggagaatttcttgaatctgggaggcggaggttgcagtgagccaagattgtgccattgggactgtacctctagcctgggtgacagagcgagactccatctaaacaaacaaacaaacaaataaacaataaaatgcttacagtagtgtgcctggcctcgtagcacatactgcactgggcgttcactgctattatgatcttcgaagaggtccaggaccctaacgttgtggggatctggttgtgtcaccttaccccgccttttgggattatgcgtttctggtctctgcaggttggagaccttctcgcctctctgtcaatgatgttgacaataagctgggccacatcaccctgtccctagcgaaaggttatcacttcgctggggacatgagaaaggtcgggttgggggggccgtgcctgtctcccctctgctggagaagataagggaggcactcagctttcttcaggcagagtgtgggggagccacgatgtataaatggggggccaagaggcagcagagacactggcccactctcacgttcaaagcatctccgtccagcatggccaggtacatgctgctgctgctcctggcggtatgggtgctgaccggggagctgtggccgggagctgaggcccgggcagcgccttacggggtcaggctttgcggccgagaattcatccgagcagtcatcttcacctgcgggggctcccggtggagacgatcagacatcctggcccacgaggctatgggtgaggctgg

SEQ ID NO: 20898 - DNA, 2300 bp, Homo sapien
ctactattttttttttttttgagacagaatctcattctgttgcccaggctggagtgcagtggtgcaatcttggctcactgtaacctccatcacctgggttcaagcgattctcgtgcctccagcctcccaagtagctgggattacagatgtgtgccaccatacctcgctaatctttttatttttagtagagacagtttcaccatgttggccaggctggtctccaactcctgacctcaggtgatcctcccacctcagcctcccaaagtgctgggattacaggcatgagccaccgcgcccagccatgcaaattctttactgagtcctgcctcagtggtctcctctggaaaatacgggtgataactgcacccacctcaactggttatcactgagaagaataaagaagttaacctgctaaagcacttaaaacgttgtttgacacaaagtaagtgatcaataaattattattattattattattattattattattatttttgagacagggtcttgctctgttgcccagactggagtgcagtggtgtgatcacagctcactgcagcttcaacctcttgggctcaagcaattctcctgcctcagcctcctgagtagctgggactacaggcttgtgccaacatgtctaactttttattatttgtagagacagggtagtgctgtgttgtccaggctgttcttgaactcctggttctggtgatcctccagcatgtgcccctggaagtgctgggattacaggtgtgagacaccgtgcccggactcaatagtcatttttgagtgctcatcatgttccagacattgttctaagtttttttttttaatgaatattaactccttataaaacttgagaaggttggagtaattatttttttccactttgcagaaaagaacattgaggctccaagaagtaaatttacttgctcacgattagagaagctggattcatgctcagtcagcccagctcccaaatgtaccaggtcctcaattaataaagagtaaggagaaataaatgacagggctgggtgcggtggctcacgcctgtaatcccagcactttgggtggctgaggtgggcacatcacttgaggtcaggagtttgcgaccagcctgaacaacatggtgaaccccatctctataacaatacaaaaatcagccaggcctgctggcagacacctgtaatcccacctactctggcagagccagaatttgaacccaggactgggtggaataaaaactctgaactatgtctatgactgttgtcacaagatcagagctagactggccaggagccatgactgtgggtgcagcagcagctgagccctgatcactaactctgttcatcttttgcaggagataccttcccggatgcagatgctgatgaagacagtctggcaggcgagctggatgaggccatggggtccagcgagtggctggccctgaccaagtcaccccaggccttttacagggggcgacccagctggcaaggaacccctggggttcttcggggcagccgagatgtcctggctggcctttccagcagctgctgcaagtgggggtgtagcaaaagtgaaatcagtagcctttgctagtttgagggctgggcagccgtgggcaccaggaccaatgccccagtcctgccatccactcaactagtgtctggctgggcacctgtctttcgagcctcacacattcattcattcatctacaagtcacagaggcactgtgggctcaggcacagtctcccgacaccacctatccaaccctgccctttgaccagcctatcatgaccctggcccctaaggaagctgtgcccctgcctggtcaagtggggacccccccatcctgacccctgacctctccccagccctaaccatgcgtttgcctggcctacacactccactgccacaactgggtccctactctacctaggctggccacacagagacccctgcccccttcccagtccaaactgtggccattgtcccctgaccagctaaaatcaagcctctgtctcagtccagcctttgcacgcacgcttcctttgccctgctttccatcccctctccctccaactcccctgccagagttccaaggctgtggaccccagagaaggtggcaggtggcccccctaggagagctctgggcacattcgaatcttcccaaactccaataataaaaattcgaagactttggcagagagtgtgtgtgtgtgtgtatggttgttgggcgtaggacaggtttcggggatgcgcggtacgcggtaccacccctcggaggcccccacccccag

SEQ ID NO: 20899 - DNA, 2300 bp, Homo sapien
ccgcagacccagcacgtgtctcctatgcgccaagtggagtccccggccaagaagccagcctcaccagcagaggatgacgaggatgatgacatcgacctgtttggcagcgacaatgaggaggaggacaaggaggcggcacagctgcgggaggagcggctacggcagtacgcggagaaggccaagaagcctgcattagtggccaagtcctccatcctgctggatgtcaagccttgggacgatgagacggacatggcccagctggaggcctgtgtgcgctctatcgagctggacgggctggtctgggggacctccaagctgatgcccgtgggctacggtatccggaagctacagattcagtgtgtggtggaggacgacaaggtggggacttacttgctggaggaggagatcactaaatttgaggagcacgtgcagagtgtcgatatcgcagctttcaacaagatctgaagcctgagtgtgtgtatgtgtgcgcgtgcgtaaggccctgccacgattaaagactgagaccggcaaaaaaaaaaaaaaaaaaaaaaaagaaaaaaaaaagaaagaaagaaaagaaaaagaaaaagaaaaaaatgttcccgtgaaagggggccaagaacccagcccagttggcatggctggaggaaggaccaggagatgatgcagtggggaaggtgctatagagaaaactttttcccagaagtatacagcttatttatttatttatttatttatttattttgagacagagttttgctcttgctgcctaggctagagtgcagtggcgcgatcttggctcactgtaacctccacctcccaggttcaagtgattctcccacctcagcttcccgagtagctgggattacaggcgcccaccaccaggcctggctaattttttttttgtatttttagtagagacggggtttggccatgctggccaggctggtttcgaactgctgacctcaggtgatcctcccgcctcggcctctcaaagtgctggcatcacgggcatgagcctccatgcccggccggtaactgtatttttccttctgggcaccccagaatggtggggttgggggcaggttctgggaagagtctgcttccattagggggaaagtggaaaacgtccctaggggagggtggcccgcgcaagggcatcgatcctgcccttgaaccgcatgatccggccccagctgctctttccccctaccctggacgcctcctgtttcctgtctgggcctccccaggcgcccgggcccaaggtgaccgcctttcaactgcaaccgctaagctgcgcccacggcgcactgtgtccgtctctccctcctccctcaatccgggagtgcccttggcagcggacacctcccggatttttccgggaggagaggggaagccgcttctcggcttggcgtgggggcagtggtgcgcggctgggaacctcgctgagcccaagcattggtagggagaccccagcggccagtaaggcggctcctggcgccccctcgggccggagctgtgcgctgcaaggctggatcggagggagggcccaggggcctgaggagtcgctgcctgccggctggcacgaccaagcgggactgcccgggtcccgaaaatacggcttcgggggacacctcaccaagcggctagtggttcagaaccccagtccgacgcgctgctgggcccagtctccgggacgatgacggggacatggctctgaaaaagtgccagggtgcgctcagtagaacccagcacccagaatggccccccagagagcggggccgggtctagggaagccctcttccaagaagtcccgtgccctgaggtgactgggcgcgctagttgatgaaactgagtgccccaccgaggcgcccctgtcccgagggcggggccagggcggggcgggagtcctcctggcaggtgccgggggcggtgcccggccctgcccccgggggccgttcctggaggccagaggcgggtcagagaagccgccggtgcgggcgacgccttggaacccacggccgccactgccgccacaggtgcctcacagtgccctctgtcctcgctctgggaatcaaaaccccggttgggaactgaggcttccgaactgcttccaaccctggacacgaaggcccccaccggccggagaacgaaaccctggggtcgtctgaagaggagggccaggagtccccagggccagacagcgaagccccagagctgctgcggagctgaacaccgaggtccccaagccctccgcaaaggacgtggagatcctggagcaagagagcgaagtcctcgag

SEQ ID NO: 20900 - DNA, 2300 bp, Homo sapien
tgcttttttctctcgtaatagaaaagtggggagccgctggggagccaccccattcatccccgtatttccccctctcataacttctccccatcccaggaggagttctcaggcctggggtggggccccgggtgggtgcgggggcgattcaacctgtgtgctgcgaaggacgagacttcctcttgaacagtgtgctgttgtaaacatatttgaaaactattaccaataaagttttgtttaaaaaaaaagtgtcgctggtgttctcgacttcgatcacccacccacacacccccagggggttggaaagggaatttcggaccccagcgtgcaggccgatcaggtcctggcttgaagtccttgtaaccagggtttagctgaaattccggcactccttcggccccgcaggagaaacgagcgtcaaactgccctttgaccccagattcggggtccccaaatctgcggcgcgccccctcggcgtccagcccgggaccgagagggcgctctagggaggcgctggggctggcgcgccaggaggccgagcggcggcgggggcggccctggcagggggagtagaagggggagagggtgcgcgccccccttcccgcatcctcagcgccgggccaggcgcgcctgagggacgcgggggcggcggcagcaggagggtccccgcagcaccctgcgagcgcggcagccccggcccgcgggcggcgagttcccggtaagtgcggtcccgagagcggagcgcgctggagaggcgtggagaggggggctgggcgccggggacgtctgggtcccgcgcccaatggctggagggcggccgagcgccgcccgcccgccctgcccgccccctctccactccccccggcactcccctccccctcccccgcccgccgctttcccccgcccccgccccgggccaactccgcggcgcctccttaaaaagcgcgcgggagttgtaagggggggccggagcgagccggagtgagcgagagcgcagggtaaagggggcgggcggggggcccgggctccaccttaaaagcgggcgcgtgggggtgggagggaggaaggcgggcggcggggaggagggagggagggaaggaaggggggccggagtgtcccgggcgcagggcgcgcgtgcggcggcggcggcggcggggaggggccggccgcgccgcgctcccctcctccccctcgcatccccggccccgcgcgcgcccagcagaagcgggtctgtgtgtgcgtgcgtgcgagtgagtgagtgtgtgcatatttttttctctcttttctttctctctcactgttttttcctctctctctctctccctctctctctcttttttttttttttttttttgcaaagaaacagcagcgccgccgccgctccgccgaggcgctgcgccccccggggggggaggcggaggaggcgggcagcggcggagggaggggagccggggaggggggcgccgcgctgggagggaggcagcgcgcacggtgcagccgggccgggcgggaggcatggcggggcccccggccctacccccgccggagacggcggcggccgccaccacggcggccgccgcctcgtcgtccgccgcttccccgcactaccaagagtggatcctggacaccatcgactcgctgcgctcgcgcaaggcgcggccggacctggagcgcatctgccggatggtgcggcggcggcacggcccggagccggagcgcacgcgcgccgagctcgagaaactgatccagcagcgcgccgtgctccgggtcagctacaaggggagcatctcgtaccgcaacgcggcgcgcgtccagccgccccggcgcggagccaccccgccggccccgccggcgccgccacagcagcagcagccgccgccgccgcagccacagccgccgccggaggggggcgcggtgcgggccggcggcgcggcgcggcccgtgagcctgcgggaagtcgtgcgctacctcgggggcagcggcggcgccggcggtcgcctaacccgcggccgcgtgcaggggctgctggaggaggaggcggcggctcgaggccgtctggagcgcacccgtctcggagcgcttgcgctgccccgcggggacaggcccggacgggcgccgccggccgccagcgcccgcccgtctcgcagcaaggtgagcgcgccggggagcgggggcgccgcgcggtgggcaggtgcgggcgaagttggtggcgggggcgcgagtcccgggaggaactgggtggcgggtggctggggctttgcgcgcgtttcctgcgggctcggtgcgtggtgaccttggcaagt

SEQ ID NO: 20901 - DNA, 2300 bp, Homo sapien
ctctactcccacccctcccatgtccccccattcctcaaatccattttaaagagaagcagactgactttggaaagggaggcgctggggtttgaacctccccgctgctaatctcccctgggcccctccccggggaatcctctctgccaatcctgcgagggtctaggcccctttaggaagcctccgctctctttttccccaacagacctgtcttcacccttgggctttgaaagccagacaaagcagctgcccctctccctgccaaagaggagtcatcccccaaaaagacagagggggagccccaagcccaagtctttcctcccagcagcgtttccccccaactccttaattttattctccgctagattttaacgtccagccttccctcagctgagtggggagggcatccctgcaaaagggaacagaagaggccaagtccccccaagccacggcccggggttcaaggctagagctgctggggaggggctgcctgttttactcacccaccagcttccgcctcccccatcctgggcgcccctcctccagcttagctgtcagctgtccatcacctctcccccactttctcatttgtgcttttttctctcgtaatagaaaagtggggagccgctggggagccaccccattcatccccgtatttccccctctcataacttctccccatcccaggaggagttctcaggcctggggtggggccccgggtgggtgcgggggcgattcaacctgtgtgctgcgaaggacgagacttcctcttgaacagtgtgctgttgtaaacatatttgaaaactattaccaataaagttttgtttaaaaaaaaagtgtcgctggtgttctcgacttcgatcacccacccacacacccccagggggttggaaagggaatttcggaccccagcgtgcaggccgatcaggtcctggcttgaagtccttgtaaccagggtttagctgaaattccggcactccttcggccccgcaggagaaacgagcgtcaaactgccctttgaccccagattcggggtccccaaatctgcggcgcgccccctcggcgtccagcccgggaccgagagggcgctctagggaggcgctggggctggcgcgccaggaggccgagcggcggcgggggcggccctggcagggggagtagaagggggagagggtgcgcgccccccttcccgcatcctcagcgccgggccaggcgcgcctgagggacgcgggggcggcggcagcaggagggtccccgcagcaccctgcgagcgcggcagccccggcccgcgggcggcgagttcccggtaagtgcggtcccgagagcggagcgcgctggagaggcgtggagaggggggctgggcgccggggacgtctgggtcccgcgcccaatggctggagggcggccgagcgccgcccgcccgccctgcccgccccctctccactccccccggcactcccctccccctcccccgcccgccgctttcccccgcccccgccccgggccaactccgcggcgcctccttaaaaagcgcgcgggagttgtaagggggggccggagcgagccggagtgagcgagagcgcagggtaaagggggcgggcggggggcccgggctccaccttaaaagcgggcgcgtgggggtgggagggaggaaggcgggcggcggggaggagggagggagggaaggaaggggggccggagtgtcccgggcgcagggcgcgcgtgcggcggcggcggcggcggggaggggccggccgcgccgcgctcccctcctccccctcgcatccccggccccgcgcgcgcccagcagaagcgggtctgtgtgtgcgtgcgtgcgagtgagtgagtgtgtgcatatttttttctctcttttctttctctctcactgttttttcctctctctctctctccctctctctctcttttttttttttttttttttgcaaagaaacagcagcgccgccgccgctccgccgaggcgctgcgccccccggggggggaggcggaggaggcgggcagcggcggagggaggggagccggggaggggggcgccgcgctgggagggaggcagcgcgcacggtgcagccgggccgggcgggaggcatggcggggcccccggccctacccccgccggagacggcggcggccgccaccacggcggccgccgcctcgtcgtccgccgcttccccgcactaccaagagtggatcctggacaccatcgactcgctgcgctcgcgcaaggcgcggccggacctggagcgcatctgccggatggtgcggcggcggcacggcccggagccgga

SEQ ID NO: 20902 - DNA, 2300 bp, Homo sapien
gaacaatcctcccacctctgcctcctgagtagctgggactacaggtgcataccaccacacctggctaatgtttttattttttgtagagggttttgatgttgtccaggctggtctcgaattcctgtattcaagcaatccccccaactcggcctcccagagtattattatttttttgagaaagagtctcactcttgctcaggctggagtgtagtggtgtgatcatagctcactgcaacctcaatctcctgggctttaagcaatcttcctgcctcagcctcctgcttagctgaaactgcgggcatgggccactatgctcagctaattttttaattgttttattttttgtagagattgggtcttgctatgttgccaaggctggtctctaattccaggcctcaagcgatcctccaacctcggccttctaaagcactgggattacaggcatgagccaccgttcccggctctccctatgtgtgtgtgtgtgtgtgtgtatatatatatatatatatatatatatatatatatttttttttttttttttttttttttttttgagacagagtctcactctgtcgcctaggctggagtgcagtggcatgatctcagctcactgtaacctctgcctcccaagttcaagagattttcctgccccagcctcccaaatagctgggattacaggcatgcgccaccgtgcccagctaatttttgtatttttagtagagacggggtttcaccatgttggccaggctggtttcaaactcctgacctcaagtgatctgcctgcctcggcctcccaaagtgctgggattatagacgtgagccaccatgcccgatcgctccccatattttcttttcttttttcttttttttttcttagacgagtcttgctctgtcacccaggctggagtgcagtggtgcaatctcggctcactgcaacctcagtctcccggattcaagcaattctcctgcctcagcctcccaggtagctaggattacaggcacacatcaccaccacgcctggctaatttttttgttttgttttggagacagagtctcgccccgtcgcctaggctggagtgcaatggcatgatctcagctcactgcaacttctgcctcccgggtcgaagcgattctcctgccaccatgcccggctgatttttttgtacttttagtagaaacggggttttaccatgttgaccacgctggtcttgaactcctgacctcaagtgatctacccgccttggcctcccaaagtgctgggattataggtgtgacccaccgtgcctggcctcatttttttatttttagtagagatggggtttcgccatgttggccaggctggtctcgaactcctgaccttgtgatccacccaccttggcctcccagagtgctgggattacagacgtcagccacctcacccagcctctctccccatattttatacctcaatttagaaaataataggctgggcacggtggctcatgcctgtaatcccagcactttgggaggccaaggtgggcagatcacctgaggtcaggagttcgagaccagcctagccaacatggcaaaaccctgtctctactaaacataccaaaattagctgggcgtggtggcaggtgtctgtaatcccagctactcaggaggctgaggcaggagaatcatctgaacctgggaggcggaggttgcagtgagctgagattgtgccactgcactccagcctgggcaacaaagtgggactccatctcaaaaaaaaaaataataataattaaaaaaaataaattggccgggcatggtggctcacgcctgtaatcccagcactttgggaggccgaggcgggtggatcacgaggtcaggagatcgagaccatcctggctaacacggtgaaaccccgtctccactaaaaaaaatacaaaaaattctctgggcgtggtggcaggcgtctgtagtcccagctactcaggaggctgaggcaggagaatggcgtgagcacgggaggcggagcttgcagtgagcggagattgcgccactgcattccagcctgggcgacagagggagactccgtctcaatcaatcaatcaatcaatcagtcaatagatagataaataaaaaataataatagctgacatttatctggcactatcatcacacggggccactgttcaactccctttgtcaagatgaactcattcattcctcaaaaccaccccactttacagatgaggaaaactgaggcctagagaggtgagatcagttacccaaagtcacagagttcatcagagaccaggctgggctctgaactg

SEQ ID NO: 20903 - DNA, 2300 bp, Homo sapien
agtgatttgctttgacgtctagtgattctgatcattcccagggctcagccagagagagacctgtttcacccacttgcccacacattaggttggtcttttccagccagccagagaaagagattctctatctggaaataccatcagaaatggtcttgaaccccattcccaatttttacagctcttaaattgttgtcactccagtctgaaagctggaaggcagctgggatcccctgtccacttacccagaaatagtcggaactattggtcgaaaaggaaggccagtttttggtctcaaaccccagcatctgagtttcctgaatgccccctcccagaaaggtatgaaagccagggaactttattcccatacggattcaaatagcagaactcagagtcacagagcgatcatgaagaggcctgacatgtcaccaatgggtgggggctggggagggaaatgcctgtagctgagtgcctgatgacagaggagcaggtgggtagtgtccaaaaaaggtctgggcatgagcttggaggggacttggccggggggggaggagtcaggcccccagcaggtgaggccagctgggaggtggaaggtagaggcaggcagctatatattgcggtagctcagttgaaagttggggagatgacagtcctggaaaaccttcaaggctatcagacacatgtggtggggggtggaaagccacacaagaaaaaggatcccaagaaaaagatcagaggctctggaaggaaccactgattctctcagagcacaggtcagacacccaggaatgaatgatcatggtaaaatagagctactatttattgggcatctaggctgtgccacaggctaaatggccaggcggatagagatacctactctggtgactttcataacgggctgttatccaaattttccaaaggagccctctggtagaaatgacatccatgacatagatgatgtcacagaggcaggattcacatccagatccatctaccagcaaacttcttggaccccagaattccccgactttgacatttttcagcagcctcccagatttttactctatcatattttcttaatttaaaataataaaagttttactcacttgtgttcagatgtaaacttggagctcattctaaacaataatataaatgaaatcatgggattgccatgccagttatattttctctgatacgcattaaatacagtgtaactagataaatgaaacatcccgaaaatcatgtcatgttctgccaatgggactatgtcacacgttgagaaacgcccgaagctgtacttcctcccagaggctcccagagaaggaaataagatgaggaaggaagtccctctttgctttgaggcgctctgattctgagaggatggagttagacaaaatttgccctcttagaagggtggggcaggggcaggggcagtagccaggccagcctgcagggggcacctggatttcatctgccagacgccggcccgactggggtcaggaaaatgcccaggccttgggaggcaccagttaagcatcctgcagtcccctgtggtaccatctctgtgccagggcaggacagagtccgcctcctcccaagaggccagggatccagaatgaaccctggagtggagttgggggaatctacacccaaagatggcaaagccattgggagagctgagagggccaagaaaaaagactaaggcccaggctctggccaagttggaagaatggagagggagcagcggccccagggggcaggcgcccaggtcagacagccaagtggggctcaggtcgtggctggcactggctgaagatacccctgggagctggcccacaggggaaggggcagagctagtaaaagggagcccccgatccccaggacacaagcagatcctggcaaagagagaaaagcaccccccaagaagaccctagatgggaagaactagtgccgtgtaacatcctatggatgcctaagacggccaaacaccttctgtgccttggcagttgtatgggtgcccaagaggtcttatcaaggcagctctccccttagcgcaaccgcgtctacagaaactcggagggccctatctgtccctcctccacacccagtggcctctgggttgggtttctcttcctgctcccaccccacggctccctagctccccctgcaggcagggttctggggacagacagccgaacagacacggcaggtctcatgagccttcccagccaccgtagtgccggtgccctgagaacaggactgagtgatggcttccaactccagcgatggtgaggctgagtcct

SEQ ID NO: 20904 - DNA, 2300 bp, Homo sapien
tcctgttatctcctaaatggatctggcttttcctggaggctgccatggttggaagatggtatcagagggcctgcctgggcagtctgtctccgggccagggtcagggaccctctgcctctggcagccttaacctgtcctctgctaggaccagggtgatttcaagccagggaagcaactgggaccctgaaaactgtccctccccagcccgctccccctctctgtgccctggtccccttgctgccatgtggatgctgttgtgattgctgtttgtatattatcaaaatgtttttatattaaaaatgtttggtctgaaaattaaaagcacttcatttagaatgattgtttgtgcttttgtctctggtggactgaagcaactttgtccactctcccccagaagtggcctcttgccctgtccagtgggttggctgtcccacgtcttctttccagcttcctactccagtcttaattggttctacagttgtattccagactgaggttccaggaggggtttttctttgtcaaaacttaaaccagctgtcctgcagatagattataatgagtgatttttcagactttgcccttgacccacaggaaattaacatcgtgatcccaacacacaaacagcaatgcttttattaaattttactaaaccttaccatgtatctatccatccagaggcggagtggtcagccatttccccatagttcacagaaaggctctgactctccctccctggaactgtggttgatctgggaacatgggggcagacagcagctggagaaggtggaggctattcaagtcgaagcagcagatcggcttgtagttaagcccagctagcccttccgagtcggggtgacctggcttctcccctcccctgaccctctcttaagtgcttctcaatcaggagcagttcggccccgcaagagcacattcaccaatgtcaggagacagcggttgccacagccagcaggaagatagaggaggggctactggcatccagtgggtagaggcgggggatgttgctcaacacccagtggtgcacaagacaccccccagcagaaaatgatccagcctcaccgtcagtagtgtcgcagttgggaaaccccgactgtcctctgctaagtgtgtactgaaagaggatcctgaaggaaggggcaggttcccttcgcattgcccagacaggaaatacagacggggaacaggagcagggaatctgcctggctgtaccccagattcctcatctgtgcaatgggagtgatgatggtagcacctacgcgatgggagtgtggtgcgaaggagcgttaagtgggtgccagctcttactactggcaggagcccagggctagggcccagcaaaggggtggacactgagcgccccttcccagccaccccttgcgccgggcccggcatcctcctgagtgcggctgggaaaacccaggaggccccgcggcctggcccccaagcaggcctggcctcggccgcccagcgccaggccttatgaatgacgccggcggcggccgggcgacctctgacccgcgcgccggccgcgcccctcccccgctggcaggtggacagcggctgcgccgggcaggccgcggcgccaactccggctggccgacagccgctgccgcactgagcgggggcgggggactgcggcgcgcgcggggccggccgggcgcccgccggggccgcctcctgagcctcggagcgctgcgcggccgccagccagcctccgccgccccgccccgccggcccgggcccgcagactgcgtctccgccccgccctctcacccccggattgacactgagcgttctgctggggggcttggcggacccggcacctccgccaatcggcggcctcgcagggcggaccccgggcccagtccagcgtctcggccaatcggacgcgtctgcccgcccagctgcggcctcgcgagcgagtgaatggccgagagtccgcggtgcgtgtcccgaggctgagagcctatagtggcgcgggaaggtcgcgggagggccaatgggaggcggcgctgagccgtcagtcagggcggcctaggccaatgagcggcgggctgcgggggcgtcacagacagcggcagagatcttgggctgaggttcccgggcgggcgggcgcggagagacgcgggaagcaggggctgggcgggggtcgcggcgccgcagctagcgcagccagcccgagggccgccgccgccgccgcccagcgcgctccggggccgccggccgcagccagcacccgccgcgccgcagctccgggaccggccccggccgccgccgccgcg

SEQ ID NO: 20905 - DNA, 2300 bp, Homo sapien
ctgggcgtggtgacaggcgcctgtagtcccagctactcgggaggctgaggcagaagaatcgcttgaactcgggaggtggaggttgcagtgagccgagatcgtgccattgcactccagcctgggcaacagagtgagactgtctcaaaaaaaaaaaaaaaaaaaagaagaggaagaagaagaaagaaaaagtgacagaaaaattgctgcagtaactcagctggaaacgggtgggcaaacctggagaactagctaatgcctgcctggctatgccacccctcggatctcagtgtgtttatccaagcccacagagaaaggtggggaaggggagctggggagacaaagttcccctcaaagacggtagcatcctttcccagggagagctcaagcataggggggttgggccccaacgaaggagagaaaccaggttccagggtatgtgcattggggcagaaaagcggcagcaactggtgggcgtggggttattgaaatattggcaggttggggaggggactggtgggacacaaatgggaagatggggttgagagaggtcctgaaaaggggttgaggggttttcacaggaaaaaaaggttactggaggggagggtcttcacggcaaggagagaggagcttgggtgagaggtctccatagggaaaataggagatggctgggatttcccccggggaaaatgggaaggggctggatattgggggtctccagagggaaaatgggaggtgtgagtatctcactacaggaaagagggaataagtgggcaaaaatgggtgggtggttgaagcgggggtcttgccacagggaaaccacggtggctgaagatctccgtgggttaagaaatggaggccgagaaggtctccccatgaaaacgggtacctaggaagagctccagagaaaaaagatggatgaggttccccacgcgggaaatggggcttggagggggttaatctctatggggaggtcggggcgggcagtgggggaagaggccactgggaggtccgagttagctggcggggggtctccacccgggaggtcaaggcgggcagtgggggaggaggtcacggggaggtccgtgttggctggtggcggggggtctccaccgggagatccggttgactggcgggctgggggagatcggggttggcggaagggggacgaggggtttcatgggggagatcaagttggccatgggagcggttctctgaggggaggccggggtcggcccgggggtgggggtccccgcacaggcccagcctcaccgtccgccagggcttcactgcactcgaagctgatctcgaaccggaaggggctgtggaaagggctcgggttctccaggaccgccacgttcagcaccgacaccttggccatcgcctcgcctcgccgcgccgcagcaggggcaggggctgtggctgtggcggaggccgcgcctgggtccggtggggtcagtggggtagggctgaccaggtccactcccgcctcttctctccgagaactgaagtgcgcacctagtccgcgcgccgccttcaaatagccggcctccgccctctggccaatcaccgccaacgctccctggcggcgcgcgcaccccctcagccagtcctggagcgccgatcggcgcgcgcccagactcctcggaccaatcagcggagctccctctccgcagcgtgtgaggagggcgaaactatctccaagcttcttagcgtgtccgctggaaaccaatccccagcgtctccgacttggatgtcaacggcgggaatggacggagtcacagcgccggcctccttctggccaatcctgagggttcccgcaccggcgtggcccgcccctcgcctcgcttttccgggagatgcatcccgcagcgcgcagcgccgccacccgccgagcggtggcgcgcggcgctcgctaaagaaggcgggaagggcggtgctcgcacccgaagtgattggcaggagggagtggggcggagataaagagggttttctgagagtttattggctggattggtaatggtggcgggagcagaaggaggctcagctggggattcgctggagagaagcggaagtcgagcgccaccgcggtgttggcgagtgtgaagagagaggaggagcgtttgcggcctcagcgtctgtcaacaggtgagcgtttcctggagcttttctgagtggctcctgacccttgaggtccagcggcgcgggagtccgttgtgaacgttgcgaacgttcggagtggcggtcacgaggcgcgctcagacctcgggaatccggccgggttcggatcccgctttcgcccc

SEQ ID NO: 20906 - DNA, 2300 bp, Homo sapien
ggacatttgaacagagacttgaatgacaagaaggcataagccatgccaagagcctaggagaagaggttctgggcagaggctttgcactgggagtggcttgtcagaattttaacaaaaagagggttacttagcctggtttgaagttggagctgggtggttaacaggagacaaagcatagagtttcaaagacaatgctctcatccggagaagtgacctggtcaaatgtgtttctgaccttcgctgtccagtaatacaggagccacttgtcacacgggctcaggagcactcaactgcggctatcaagacagctaaactgaactttcttttttaaaatttaattttaatttttagagacagggtctcactctgacactcaggctggagtgcagtggctggagcattctgggctcaagagatcctcctgcctcagcttcaggagtagcagacactacaggtatgcactaccacacctggcttattcttttattttttgtagatatgaggtcttgttatgttgcccaggctgatcttgaactcctggcctcaagaaatcctccatgaccagcctctaaaattacaaataataataaaaaaagatatggccgggcacagtggctcacgcctgtaatcccagcactctggaaggccgaggcgggcggatcacttgaggtcaggagttcgagaccagcctggccaacatggtgaaaccccgtctctactgaaaatacagaaaaaaaattagctggttgtggtggtgggcacctgtaatcccagctactcaggaggctgaggcaggagaatcgcttgaacccgggaggtagaggttgcagtgagccgagatcgcgccattgcactccagcctgagtgacagcgcgagattccatctcaaaaaaaaaaaagtggcttccaaaaaatgttaattttacacctaattttggtgcgcggctggcattatttttccactgggcagcactgatcgcccgtgggggcagagactctgagacctggagtctcccaggccgggggcgacggcccagacgggaggcggtggagagaagtttccggatgtattatgtggtcatgaatcatgtcagggaattgccacggcccccgttgaatggggaggcgctgcctcgggcgctgagtagcagagcccggactctgaacactggtctgcccccgaactggaactcccattttcagtaccgtccgcttgaaacctcccaagagccctcaagggggcgagagagggatccaaacccctcgggggcgagagcgggatccgaacccctcgggggcgagagcgggatccgaacccctcgggggcgagagcgggatccgaacccctcgggggcgaaagcgggatccgaacccggccggattcccgaggtctgagcgcgcctcgtgaccgccactccgaacgttcgcaacgttcacaacggactcccgcgccgctggacctcaagggtcaggagccactcagaaaagctccaggaaacgctcacctgttgacagacgctgaggccgcaaacgctcctcctctctcttcacactcgccaacaccgcggtggcgctcgacttccgcttctctccagcgaatccccagctgagcctccttctgctcccgccaccattaccaatccagccaataaactctcagaaaaccctctttatctccgccccactccctcctgccaatcacttcgggtgcgagcaccgcccttcccgccttctttagcgagcgccgcgcgccaccgctcggcgggtggcggcgctgcgcgctgcgggatgcatctcccggaaaagcgaggcgaggggcgggccacgccggtgcgggaaccctcaggattggccagaaggaggccggcgctgtgactccgtccattcccgccgttgacatccaagtcggagacgctggggattggtttccagcggacacgctaagaagcttggagatagtttcgccctcctcacacgctgcggagagggagctccgctgattggtccgaggagtctgggcgcgcgccgatcggcgctccaggactggctgagggggtgcgcgcgccgccagggagcgttggcggtgattggccagagggcggaggccggctatttgaaggcggcgcgcggactaggtgcgcacttcagttctcggagagaagaggcgggagtggacctggtcagccctaccccactgaccccaccggacccaggcgcggcctccgccacagccacagcccctgcccctgctgcggcgcggcgaggcgaggcgatggccaaggtgtcggtgctgaacgtgg

SEQ ID NO: 20907 - DNA, 2300 bp, Homo sapien
ctctccaggcccagccacttccccacccctcagcacgaccaccacagccaggcccacgcccctcaccagcacagcctcgcccgcagccaccaccccgctccgccgggcacccctcaccacgcacccagtgggtgccatcaaccagctgggacctgatctgcctccagccacagccccagtccccagcacccggcggcccccagccccgaatctacacgtgtcccctgagctcttctgcgagccccgagaggtacggcgggtccagtggccggccacccagcagggcatgctggtggagaggccctgccccaaggggactcgaggtgagtacagaggctgcagccaggggagggatgggggccatgcccccagcagcttagcacagatgcatgtgtgggtgggggtctctactgcggagcagaggttttctgagggcaggggtcatccccagtgaccagcagagctctcagggcacaggagccactcagtgcccctggccccacctgcagaacctgcagggagtccgcaggaggtgacctggctcccggcctcaggctgacctgccacagccccaggcacagtcagcttcacatggatggccagctgaagtgcaaaaagggcagggccgtgtgtcctggagatctgaggggagggttggcaggtgcttcgtggagagggggcgttcaagatgggccttgctggaaggttctaactctggaggcaaagacagaagggggcaggagggagagctcaggggaagtgagtggcgcctctttcgactgtccagcccgcttcatgtctgtttctccgtgtttccctcacctccctcttcgcccgctcgtcccccactctctgtcatctcctttccccctctctgtcccatccttctcttcttccctttggctcccttgtctgttcctgtctgtctgtccctgcaggaattgcctccttccagtgtctaccagccttggggctctggaacccccggggccctgacctcagcaactgcacctccccctgggtcaaccaggtggcccagaaggtaccagccaccacccctcgcaggcaggcacatgtgctcgggcccagggcccagggcccagcgggggtcgtggagcagctggggagacatgggctggcaggtctggaaggcaggactgtggggtcacctccctggcctacaaagggagcagggacagatggggtgggaaggggcagatggcgatggggaagtggagagagagataggagaggctgcacaggccagggaagccggggagggcaggatggtccctgacagtcctgggattcccccttcccgcccccacctcatgcagatcaagagtggggagaacgcggccaacatcgccagcgagctggcccgacacacccggggctccatctacgcgggggacgtctcctcctctgtgaagctgatggagcagctgctggacatcctggatgcccagctgcaggccctgcggcccatcgagcgcgagtcagccggcaagaactacaacaaggtggggcctggcggtggcgctgacctggtatggggagggcgcctgcccccaggggcttgggaagtacctgacctggtacctcccagccaggctgccacctccactcctttcctcagagaggaaggacccccccctctccgccaaggactgccgggtctcactcctgtgctgccccggatggtcctgggggttggggatccctgaggaatgtcttgctgatagcccagccctgggtcagtggtaaccgcagacgagagagctatccagatgtgacagtattagggtgagggaaccggcacccagaggcctggcctgacatcacctccatctctttctagatgcacaagcgagagagaacttgtaaggattatatcaaggtgagacccagggggtcccagtgtaaggaccgtgggctccagctgatggggggattaggggtggaggttgagaagagggcatgcagagcccacccccaggaattagagggtgttggggggctcacagcaccatgccctctgcctgtgcaggccgtggtggagacagtggacaatctgctccggccagaagctctggagtcctggaaggacatgaatgccacggagcaggtgcacacggccaccatgctcctcgacgtcctggaggagggcgccttcctgctggccgacaatgtcagggagcctgcccgcttcctggctgccaaggagaacgtgggtgagtgccacagtcacccagggcaaactcagatacgaaccttaaaccacggggttctggcctgga

SEQ ID NO: 20908 - DNA, 2300 bp, Homo sapien
ggctggacataagagatttgaaagtgctggctcaatgatggtactgagagcccaggacagcctgagatgggacaggctgggatgacagctggatatgacagagcaggggttcccacgcttcagggcctgcctcagagaatgtgtgtttctggccagcacagtggctcacgcctgtaatcccagcactttgggagactgaggtgggaggatcatttgaggccaggagttcaagaccagcttgggcaacatagcaagatcctgtctctataagacattttaaaattagctgggcgtggtggcgagagcctgtggtcccagctactcgaaaggctgaagtaggagcatcacttgaacccaggatctggaggttgcagtgagccgtcattgtgccactgtactccagcctgggcaacagagcaagaccctgtctcttaaaaaaagaaagagagagagagaatgtgtgtttctaccaagttcctggcaaggctgatgccagtgtgctgggaccacacctggagaaccagggtgtagataaagcaaagagctgaggacagacatttgagcgtgcaagcctgagaggatttggggagactgaggcggggagagaggtgagaaggagcagccataaggcaggaagaaaccagttagaaccgagtcctggactgggcacagtggctcactcctgtaatcccaaagttttggggggcccaggcaggaagatcccttaagcccaggagtttgagatcagtctgggcaacatagcaagacctcctctctgcagcaaatttaaaaattagctggtggtgctgggcgctgtggctcacgcctgtaatcccagcactttgggaggccgagacgggcggatcacgaggtcaggagatagagaccatcctggctaacacggtgaaaccccatctcgactaaaaatacaaaaaattagccgggcgtgttggtgggtgcctgtagtcccagctactcgggaggctgaggcaggagaatggcgtgaacccaggaggcggagcttgcagtgagctgagtctgtgccactgcactccagcctgggggacagagcacgactccgtctcagaaaaaaaaataaataaataaataaataaataaataaataaataaataaaataaaaattagctggtggtagtggtgcaagcctgtgatttcagctacttgggaggctgaggtgggaggattccttgagtctgggaggttgaggctgcagtgagctgtgattatatcattgcactccagcctgggcaacagagtgagacctggtttctaaaatttaaaaaaataataataatgaaaaaaaaaactgagccgctgtgcctggggacagagcaggtggggaggatggcaggggacagcacacaattctcacccctcccccatctcccctggcccccccagagggggaggcagtgtccgcctcccaccccgcctgcctgtctccagcttaccctgaaggtcccccagagaggaaagaggggactcgggcgtccctggttcccgatctgtggcgccagctggattctaattagccaccagagcttgagagacaggaagcagggggctgggggcgggggcttggatttctgcccaagacggggaggctgcaagttgggttgcaatgagtccctcacttgggaggacactcattacctccttgctcatggtgaggatgcgagtaggggagatgagtgggcagggtcaggacaggggcatggggaagaggcttccagagggtccaaggcctgcctgggatctccccgtgagctgtcccaggaggttccagtggggaagagttggcagtctctttgcccagaggtgcccagatagctgggtctggctgctgggtgtaagggtggggggtgtggtgtgagctgcagaccccggagggggccctacagatagggctggctcgagggacgtgctggacctcagcctctcagagctactcagccaccagcaggaggagaggggagcggcctggaggccctatccccacctcagtctccctgtcctcccccaggctggtggtccaggccgtggtgcctgccaggtgatgtggggcaaagccccccgcacaggccactgagagctccggacacgcacccggctgccaccatggcccgcctagccgcagtgctctggaatctgtgtgtcaccgccgtcctggtcacctcggccacccaaggtaggtgctgctggggccggggaggggccgcggctcccaaacccttctggggggggcagataaaatgttgaaaaccctcctgatcactca

SEQ ID NO: 20909 - DNA, 2300 bp, Homo sapien
tgttaccccgccgccgccaccagcccctatccgcatctcccccacatctgtgactagacatggccggtgtcactttcaaatcattttccagcatgttaccttgggaatggggagtggcttccttatttcaacttcctcatttctcccccaactgcccagccacagaaaggttcaggggaggcagtgtccccaagctgaggatactcccctcccagggtctccaagcgctttctttcccactgcaacaggcatccgagcagaggaactggttagagggagtaaaaatggctggcttggtacggtgactcgtgcctgtgatcccagtgctttgggaggctaaggtgggtggatcacttgagcccaggagtttgcaaggctgcagtaagctatgatcctgccactgcactccagtctgggcaacagagcaagaccctctcttaataaaaataaataaataaataaatggcagggaagccactcgatgccaaattgtgtgggcagcgaatccacatgggtctagatcccaattttgccttatacatgccctgtgtgaccttgagctggtctcctcacctccctggccctggttccctctgcgctgctattctgcagggttctggtaaggagagcagtacacgtacacgctgggccaatacaggccccatcagagggtgctgtgcacagcctggtgccagtcagggcacaaagacacccacggaagaggcagtccctctcttcctcccaggctgcaccctagaatgctaagactccagagtggaccccccagagccatgtatacttccaccgggaactccaaggcaccttcagcccaaccagaccaaaataagcccctacatcagtgcacggtgccaccatcctcccaggccctccagccagaaccccaggagctgaaacccttgactcctctctcacccctaaatccagttcaagagtaagtctttgggctgtgtatacttccagaacaccccagtgttggtccacacatctgtcttcagcatctgcccctctagtcctgggccctggccactccccaagtgccctctggctcctttgcctccgacgtccaggctctcctggcagccagaggcaccacctccttttttttctttttttgagacggagtctcactttgtcaccggggctggagtgcagtggcacaatcttggctcactgcaacttccacctcccgggttcaagtgattctcctgcctcagcctcctgagtagctgggattataggcgcccaccaccacgagcagacacggggtttcaccatgttggccaggctagtctggaactcctgacctcaagtgatccacccgcctcggcctcccaacgtgttgggattacaggcatgagccatcgtgcccagcctccaaaacttttttatcaccccacatagaaactccgtacccactaaacaataatgcccactccccttgtcgcccagccctggtaacttataatctactttctgtctccatggatttacctattctagacatttcatacaaatggagtcacaggctatgtggcctttttttttttttttttcccagttagatgggggtctcactctgttgcccaggctggagtgccgtggcccaatctcggctcactgtaacctccacctcccaggctcaagtgattctcccatctcagcctcctgagtagctgggactatagtcacatgactcctctaaatgaactcctggctaacttttgtattttttgtagaggcaggatttcgtcatgttgcctaggctggcctcaaactcctggactcaagtgatctgcccatcttggcctcgtaaagtgctgggattacggctgtgagccaccattcctggccttattttgtgtccagcttctctcactcagcgccacgtttccaaggctcacctacgttctagcctggatccgagcttcattccgttttatggctgcgtagtattccactgcatgggtggagcacgttttctttatccagtcatcggtaatggacatgcgggctgttgcacagaaggatcctttttattttctccctagctttgctgaggcatcattgacaaatagaaattacatctatttaaggttacatgatattttgatatccattatgtgttgtgaagtgattaccacaaccaagctaacaacacatccaacacctcacctagacacctttctggtgtgtgtggtgagaacacttgagtctaattcctcagcaagtttcaagaaaacagtatgctataataattattattattttgagacggagtc

SEQ ID NO: 20910 - DNA, 2300 bp, Homo sapien
ttgaatggattcccttccctgaggattccaagccctccccagccatcagtcttcccatctttcataaaatggagccagcagccccgcttcagggactccccccctcccccctgttccctccactccaggattcttcccacttccatttccctccagcccccaccctgcacaaagttgcctgttctgccgaagtgcctatttttggcttggggcccagttttatagccccagctataggtcttggcagtcataactttcgctctccagagagccaagccgggtccaacagccttccccaccccagagagggggtgcgggggctccctctgcagcctcaacccgaaacctgcccctcgcctcacttggtctgatgcctgggaacccaagcctgcttcttgccctacttcttagagtccaccagctgcaatggagttgttaggtgttgaaaatccatgccgggtttttactcttttagagaacataaaattcaatttttcccctcgcaccccctccccaaaagcaagactttgaggcgtttacaggtacaaacctccccctaacgcttccctccgcccctgctgcccggtcagctccaagcccctgtcccggtggcccaggatcttctgctgagggtctcatcccgtcccgcgctccagtcctggctttgcgtgcctccctcgccttttattgtaggtctggtctcccagggtagcggcctcatcgcattcccttcgcagcgcccctggatccagaaaccgcttttacctgtccgctccggtgcagccagcgcgccaaatcccttcgtacccgagtccagtcctccttttgcccgtcccccttgcacgtcgctgccaggaagatgagggcagcccaagtcgcctcagccactaagcatcccccttccagaaccccccaccatgcgaacccaggtcccgggagttccgggccgggtcttgcttgtttccactgcgttaggcctgacgcattactccgtctcccgagaaagaatccggcccgaaatttgcgtgccccgggtgcatttggccatgtcgcatctaccccccaaccccccgctccaacaccgttcctcccatctttatctaatccaactcgggttttgcacaacccttccagatctccccatttgcgccctccttccccgggctcggcgcctttccttatacttcactggaaaatccgctccgggtcttccttacgcctgtctcccttcccccactccccgctccaacgcggggctccagcacgtcgctttccctctccctgcttttccagggaggaggcgagaggaggcgaaaggaaggaaagtccagcccgggttttcgggccggctcctggggcgctcaagcgggttgcggcggccagtcccgggcggcgactccgggccgggttttgcgcgcgcccaccgcccccctcccggagcgggtgcgccggggagcggggcgagcaggcggcttgtcattgctggtgcccggcgccggctcggtccgcgcgtcctgcggtgcccacgggcccggcccggcgccccccctccggccgcaccgggggcgcgacgccgcggcacccgcctccagccgcgccgcccccctccgccagctccgcgccgcccgcccccaacccgagctccccgcggccactgcggggagcccgagccgtcggcgcgggagctgtcggcgctgcggtgcccccgccccgccgtctgccgaggaggccccggctgatggggccgcgcgggccccggagcggcgccgccgggcggcgggggcctgcaggggcgccccggctgccccgttaacccctcgtccaccgccggcgtcggagggggctgggaagtcgcctgggcgcacacgtgccgcctccgtcggggccgcggagctgcgggggagatgcgggccgctgccggcgccgcctcggggcgctccgcctcgccccagcccccggcgctctgacgccgcccccgccccaccgcctccctccccgggaggggcgcagacccgatcgcccccagtcccgagcctccgccgccgcgagggggccgcctttggatccgtgtaatccgcctcttttttttcttttcttttctttttttttttttttcctaatttttggtcggcggcggtgctgggccaggggaaggaagggacacggaggccgccctcgtcccgccacctcctacccgcttccccccagccccggctccgggagatgtgccgggcggggggcccgggttcgccgagccgcaggagagacacgctgggccgaccccagagaggcgctggaca

SEQ ID NO: 20911 - DNA, 2300 bp, Homo sapien
aattttaaaaaataaagttagacttaccattcatcccagcaattccattgctatacatttacccaagagaaaagaaagaatatatccatataaagacttgttggcaaatgttcatagcagatttgttcaattattgctgaaaaactggaaacaatcaaaatatctacagacaggagaatataaattaaggcccatccataggatgtagtaattcttagcaacaaaaaggaacaaactactgattcacacaatgttgataaatctcagaatgcatgatgctgagtggaagagagaccacactgtgtgattttatttatctgaaattttgcaaaaggctcaactaatctaaggtgatagaaatcagaatagtagccaggtgcagtgactcacgcctataatcccagcactttgggaggccgaggtgggcagatcacttgaggccaggactttaagaccagcttggccaacatgtcaaaaccccatctttacaaaaaatacaaaaatcagcggggtgtggtggcgtgtgcctgtaatttcagctactttggagactgagacatgagaatcgcttgaccctgggaagtggagggtgcagtgagctgagatcgtgccactgcactccagcctgggcaacagagtgaaactgtcacacacacaaaaagaattcaggatagtgggccccaccctatggctcacacctgtaatctcagcactttgggaggctgagacaggaggatcgcttgaggccaggaattcaacatcagcctggataacagcaagaccctgtctgtctctacaaaaaatacaaaaattagctgggcttggtggtgagggcctgtagttccagctactcagaggctgagacaggagaattgcttgagcctaggaggtagaggcttcggtgagctatggttgcaccactgcactccagcctgggcaacagagcaagaccctgtttctaaaaagaaaagaaaagaggccgggcacggtggctcacgcctgtaatcccagcactttgggaggccgaggcaggcggatcacgaggtcaggagatcgagaccatcctggctaacatgatgaaaccccgtctctactaaataatacaaaaaacaattagccggacgtggtggccggcgcctgtagtcccagcttgtcgggaggctgaggcagaagaatggcgtgaacctgggaggcagagcttgcagtgagccgagatcgcaccactacactccagcctggctgacagagcgagactctgtctcaaaaaacaaaaaacaaaaaaaaaaagaaaagaaaagaaaaatcaggccgggcctggtggctcacacctgtaatcccagtgctttgggaggccgaggcgggcggatcatctaaggttgggagtttgagaccagcctgaccagcatggtgaaaccccatctgtactaaaaatacaaaaattagctgggcatggtggtgcatgcctgtaatcccaactactcaggaggctgaggcaggagaatcgctagaacccgggaggcagaggttgcggtgagcccagatcgtgccattgcactccagcctgggcaacaagagcaaaactccatctcaaaaaaaaaaaaaaaaaaaaaaaaaaatcagtggagtggctgtgggtggggaatggatgaagggacattgatttctgggccgtctgaatggaagtgttccttactttgatggggtggggacacggggtcgtgcatgcaaataatatgtgcaggcttgggacttcaccgcatgtaaattaactctcaataaagttccaggaaaagtaattccaattccagcaaccggattttgggctcagttcggaggctagcctgcaagccttgctggtgggtggcctgtaggggtgacaggaaaccccccgggcctccgctctttaggggagggggagcctcgcccttgcccccctccgggacgagcgggcagatctaaaagcttccctaccgccgcccaggcggtcgatagcagactcccaggctccgtttctgcctgcccggcagcccgggcccttcccgccagcccagcccctgggaggggacccgagccgggcggagcctcctccggagccgcacgccgggctcggctcaccctccccggatgccgctcctcctccatccccagaagtttcagccactgagattccccttgtcccggaggctggaggggaagacccaggcggctgcgctttggaggctggaccatcgtggggcttgtctgtgcccacttttcccccattcaagagttaccactgccaggcgcagttgctcaggcct

SEQ ID NO: 20912 - DNA, 2300 bp, Homo sapien
agtgactttttttccccatcgctgcaatctccccctttgaacaattgaactatattttgcttagcattcatcacttctgcatcttgaatttattcatgtaacaaggagacttgatttcggcatcctcactgaaaaaccctcctcattgccccaaatagtagggaaacctaaaaataaatgtgaatataaggaactcaaaaccaagtccttgaattctggctggacacagacgcctgctaagcctcagggtcacggaggcgctaaagacatgttagtgcccagtagagactttcccctgggctcattgtagggactctggggctgggctgcccgcctatggatcttctcagctgggtaggtcacttgtgcctcagtttcctcctctgtcaaatgggaatgacaacatcattgcagatgttttgaggagtaaatgagttaaaatagattaaaaaaaaaacaaacttatgaccaggcctggtgcagactaagtgctctataaataatagcattttcttggcagcatagcgagagcttgtcttaaaaaaaaaaaaaaaaaaacttaagaaaaaactagccaggcgtgatggtgcacagctgcagtcccagctcctcaggaggctgaggcaggaggatcctttgagccctggagtttgaggctgcagtgagctgtgatggtgccactgcactccagcctgggtgacagagtaagatctcttaaaaatatatatagcgtttgtttgtttgtttttagacagtttcactcttgttgcccaggcttgagtgcaagggcacaatctcagctcaccacaacctccgcctcctgggttctatcagtcctcctgcctcagcctcccaagtagctgggattacaggcatgtgccgccacacccggctaattttgtatttttagtagagacagggtttctccatgttggtcaggctgagtctcgaactcccgacctcaggtgatccacccacctcagactcccaaagtgctgggattacaggtgtgagccaccgcacccagccaaaaaatagcgttttaaaaaattatgaggtagctcaagagacaagctaatcatgtgatttatccagaaaggaaagaaccctcctatcacatgattctctgttgattaacgaagaggcctctgaaatataagtttcccacagggggaaactggcttagaaagatcagaaagatccaggaggtctgctctgtgcggtgaagcttctcttcttggcacctgcctggcatcggaagagggccccttctccctccctgggcttttatgtggacactgtaatgcctcagttttctttctttctttttgtttttgacacaggatctcactctatcacccaagctggagtgcagtggcaccatcatagctcactgcagcctcaaactccccagctcgggtgattctccccgcctcagcctcctgagtagtagtagctgggactacagatgtctgccaccagcctggattatttatttatttattttgtagaaacaagagtttcgccatgttgcccaggctggtgtcaaactcctgagctcaagcgatcctcctgcctcggcctcccagagtgctgagatcacaggtgcgagcctctgcacccgacctgtttcctcatctggaaaatggcagggaaacgttctgccagctgggacgcaggctctgccaactctggcatgccaaagctctgggcacagggcgagtcccaccagcgtgggcgtccagagctatttctgacaagacccctttgcgcctgcccagggaagagccaagtggccccaggcaagaccgccccgcccggctgccacaccttcccctcagagcagccagccccaacacagaggccaaagggttcgtcagagccacatggtggaaactctagcagagggtttttgaaagcaggttgcacttcattcttactgagtgcacgtgtgtgtgtgtgtgtgtgtgtgtgtgtgtgtgtgtgtgtatgcagcgcccctgggtctgtgtttttattgcactttcctgctggcttccagctgcaccgccagttccggggagggccctgggccagcggctgtccgccccccctccttcataaagtcctggcctcgggacagcctgcacagctgcctagcctgtggagacgggacagccctgtcccactcactctttcccctgccgctcctgccggcagctccaaccatgggaggccgcgtctttctcggtaagtactttggggccccgctgggaggggcgaggaagctccagcgggaccccttggctgcgtctgagaaa

SEQ ID NO: 20913 - DNA, 2300 bp, Homo sapien
ggactccctttcccgccccacccaaggtgactgtaacggttatcagggtagctcgttgcctaagcaacggggcaacaaagagagtgaagaaatgacatttggggcaaaaaccagaacttcctggaccacagggacacagcttccctgggccagccccaagtggcaggtgtcagctcagcaccccgccttggcttgagagtgagagacaagagcccaccttgggtttcttgggggcacacttgttgggggcagttgccaagacctggcttcccaagggttccacgccctggctgtctgtgtcaccagggccaagtcagagagcctctgcgcctcacttttctcatctataaaatggagcacaacccgtctccgtcttagattgttttaagggatgagtgagttaggacacaaactattcctggttcacagtaagaattaggtaaacagcattttaaaagtgttggctgggcacagtggctcacacctgcaatcccagcactttgagaggccgaggcaggtggatctcttgagcccagggactggagactagcctgggcaacacatcgagacgttgtctctaccaaaaacaaatttttttttttttttttgagacaaagtctcgctcttgtcgctcaggctggagtgcaatggtgcaatctcggctcactgcaacctccgcctcctgggttcaagcgattctcctgcctcgcccccatccaccccgagtagctgggattataggtgcctgccaccatgcccggctagttttttgttttagtttttgtgtttgtatttttagtagagacggggtttcaccatgatggccaggctggtctcaaactcctgacctcaggtgattcacccgcctccgcctcccaaagtgctgggattacaggcatgagccaccgcgcccagccaaaaaaaattttttttaattagtcgggcttggtggtgtgcgcctgtagtcctagtggctcaggaggctgaggtgggaggatcccttgagcccaggaggttgaagctgcagtgagctgtgtttgcaccactgcactccagcctgggtgacagagcaagatcctatctcaaaaaataaattaataataaggccgggtgcagtggctcacacctgtaatcccagcactttggtaggcccaggccagcagatcaccagaggtcaggagttcgagaccagcctggccaacatggtgaaactctgtctttactaaaaatacaaaaattacctgggtgtggtggcgggcgcctgtaatcccagctactcgggagcctgaggtaggagagtctcttgaacctgggaggtggaggttgcagtgagctgagatcacgccactgcactccagcctgggtgacagtgagaccctgtctcaaaataaatgaataaataataaattatgatgattattaaattctggtaagacactagtgggtctggggaattgtctcggggtccttaggaggaagcctaaagaaggggtgactgccccaccaccccccaccccaggatctcaatgcaggaaactgactacttagggctcagcccagagaatgcaaaccagaaggaactcaaaccagaacagcagcttctctcccggcttctgtttgggcaacttccaaggccccagatggaggcagctgggccctgtagcctcacggtgggagtagagaacccagctcagcccatgcagaggggatggggcacaaaggaaccctgcccagggccctgaggacctcaatccctcaattcctccttccccaacctcttctgtttattggattcctcctgatccttttctgggctccaagcctcagtttctctatctgtagaatgggcatcaacacagcccctgcctcctagagtggttctgagctttaaaggagttacctggggctttgggagttagagatgaatctgcctagatcctgtcctgccaggggaggtcattttgtggtctgttctgcaaagaggaactgggttctggccgagggaggaactagccaagccttgtggccagagaggaggaagaggggaatcctgacagaagtggggagtacgggcttgggctggggggtttcggccttggtttaacccagctggaaggagtgtggaggtgggagtggggatctctgccttccacccacctaaggggtactaaatttgaacacagtggctgagtggtccggggacctccaatctgcaccccaaacacccgccctctgaagctgtgctcataacagaccccaaaattcccctggaagcccctccagggttgaattggggcaaa

SEQ ID NO: 20914 - DNA, 2300 bp, Homo sapien
acaatgtgttattcatttattttagagactgggtctcactctttcacccaggctggagtgcagtggtgcaatcatagctcactgaagcctcaaactcctgggctcgaacagtcctcctgcctcagcctcccgagtagctgggagtacaggtatcaaccaccatgcttggctaatttttattttattttattttattttttgtagagatgaggtctcactatgttgcctaggctggtcttgaactcctggccttaggtgatcactcttgttgcccagtctggagtgcaatggtgcgaactcggctcactgcaacctccacctcccaggttcaagcgattctcctgcctcaccctcccgagtagctgggattacaggcatgcgccaccacgcccggctaattttgcatttttagtacagacggggtttctccatgttgtcaggctggtctcaaactcctgacctcaagtgaaccgccctccttggtctcccaaagtgctgggattataggcaggagccctggtgcccgctgatcctttctttacttggcattttctttttcttttcttttctttttttttttttgagacggagtctcgctctgttgccgaggctggagtgcagtggcgcgatctcggctcactgcaagctccgcctcccgggttcacgccattctcctgcctcagcttcccgagtagctgggattacaggcgcccgccaacacgcccggctaatttttctatttttagtagagacggagtttcaccatgttggccaggatggtctcaaactcctgacctcaggtaatccacccacctcggcctcccaaagtgctgggattacaggtgtcagccaccacgctcggcctgcaaaaccccacctttaccaaatttttaaaaattagctgggcatgataggtaacaagagtgacaccctgaagaaagaaagaagaaagtggagggaaagagggaggaaggatgataggaaaataaatctgccaggatctaataaagcttagtgaccatgccaccatgccactcctaagtatttaaaagaaatgaaaatttatcttccccaaaatactcttacagtacaagctctattaacagtggccaaagaccggaaacaatcaattggccaagaacaggtgagtgaaactatattggctacattatagtatagccacacaatgaaataccactcagcagtaaaaaataacgagctgttgatatccccacaacatggacaactctcaaaaacactttgctgcggccaggcagggtggctcatgtaatcccagcactttgggaggcggagatgggcagatcacatgaggccaggagttcgagaccagcctggccaacatggcgaaacccctctctactaaaaatatgaaaattagccaggtgtggtggcgggcgccagcagtcccagctactcaggaggctgaggcaggagaatcgcttgaacccgagaggcggaggttgtggtgagcagagatcgcgccactgcactccagcctaggtgacagagccagactccgtctcaaaaaaacagctttgttgagcaaaagtcagacacaaaagacaacctattgcatgcttctactaacgtgaaaatcaaggagacaaaactatcgtggagcgatagaaatccaaatactgcaaaatgttctgtccatttgagtcattccaagctccctattcttttcagagcctacactgtggaggacccccaggccgcagattgatagcaactgggacagttctggtttcagcgcccagcgcagacgccactcttcgaaaaggtggggcacacgccaaaacgcaatcatccggtcttcagttatcagtactaaacatggcggctcccaccgagcaccacacccagatcacgagaccgcgcgctgtcggagccagtctgtcggctcactggggcgcgcctacttttagattgaccaataaacgcgaggcgtaaggcacgccctctttcttcccgtctccgccaataatctcccggtcccttccacaggacccaatcaccgcttcggcctctcttgaatgaaaaggcagcggcccagtcagcagagcagcagcccgacgcaagaggcaggaagcgcagcaactcgtgtctgagcgcccggcggaaaaccgaagttggaagtgtctcttagcagcgcgcggagaagaacggggagccaggtgagcagcggatcccgggcgcggggccgcggtgtggggacgtctgaactgagagcgagaggacgaggggagacgttgggatctaaggggagggggagaaag

SEQ ID NO: 20915 - DNA, 2300 bp, Homo sapien
tctcctgcctcagcctccctagtagctgggactacaggcgcccgccgctttcaccatgttagccaggatggtctcaatctcctgacctcgtgatccgcctgcctctgcttcccaaagtgctgggattacaggcgtgagccaccacacctggccccctcttttttctttttttagatggaatcttgctctgtcgctcaggctggagtgcaatggcacgatctcggctcactgcaatctccgcctcttgggttcaagctattctcctgcctcagccacccgagtagctgggattacaggcatgcgccaccacgttcagctaattttatattttttagcagagatgggtttcaccatattggctaggctggtctcgaactcctgacctccagtgatccatccaccacccaccttggcttcctaaagggctgggattacaggggtgagccactgcacccagccgtttttttttttctttctttttttagacagggtctcgctctgtcacccaggctggagtgcaggggcatcatgatttctccccacagtgatgcattctcggcctcttgagctcaagcgatcctcccgcctcagcctcctggtagctgggactacaggcgtgcgccaccatgcccggctggatgggttctggatcagcataattctcctccttctctctttctgttgttagtatctcccaaagagttgctcagaggaaaaaataagagagaaaacatcgcgccctggtttctgggacgactgaaaccacgcagagccacgggtaaccaaggtacccgcagcccacggcgcttcctcgggtcccaaagggcgccaatgtgcaggcaccgccgccagggagcgctccctgccggagccccggagaccaaggtttggctccctcgcctggtttccgaaggagtgagggtccgacggcggccacgaacaaagctgcacgctctgcagaccccggagatcccctagaaattccgcagaggcctccactctccgcttgggcacgagtctgcatttatggagcgccatctgcatgcagcagccccgaaaaagaaggcgatgcccattttatagcggggaaaactgagactcagaggccacaggggtccccaggatgaacagcaagttgggattcaaacctcttttaataacaataacgataatagaggctgggcgcggtggctcaggcctgtgtaatctcagcactttaggagaccgaggcgggcggatcacctgagatcaggagttcgaggccagcctggccaatatgatgaaaccccgtctctactaaaaatacaaaaattagccgggtatggtggtgggcacctgtaatcccagctactcaggaggctgaggcagaagaatcacttgaatccgggaggcggaggttgcagtgagccgagatcgcgccactgcactccagcatgggcaacagagcgaaactccgtccaaaaatagcaaaacaacaaacaaacaattacgataacattaaaagtgacagcagctaacacttatggagcgtctagtgtgttctcagctcttggcctgcactgtcttattgaattttaccaacaccgaggaggtgagcgcatcattcccatttcacagatgaggtgcctggaagggtttgtctccctcaaggcgtaaagcgctaggatttgaatgcagatccgcccagagcttgtctccaggtaacggggaaacttccatgcccttgaataggggaccacagatgcaggcgtcccgagcttgcaaatgcaccggggtagggtggggtggggggttattctgtttgtttttttcaggggtcccgggaggcccaaaggcctccgccgctctcggcttgaacgcgtggaaccgttctcctcgggttcccgcgcgctccaatgggggacccctcggcagcgtgcggtcgtctcgggacccggaaagaggaaaggtggggagccgatggggatgctccgggctcgggagaccgagggggcggacgggcgggaccccgcagccccgggggcctctgggaacccgtcccccctcggccccgccccctccccgggcgccgacctccggggtcacgtgaccaggcccggcggccgctggggccggagggcgcggcgcggggacgcggcggcctggccaggcgaggcgggagccgagcaggccggagcgggccgcgcgccggggagggtcgcgccgcgcccgccccctccccgccacgcccggggcgcacgcgcgctcctctggccgcccctccctccgcgcggggacccctggcgggcggcaggaggaca

SEQ ID NO: 20916 - DNA, 2300 bp, Homo sapien
cgtttttgcccaactataggcttgggtaagtgttctgagcacatttaaggtaggccagggtgagctatgatgtttggtaggtaagatatattaaatgcatttttgacttatgatatttgcaacttatgatgagcttatcaggaagtaatgccatcataagttgttcttgaatgttactgtgtgcttagcaagtggttttgtaggctgctgatttggggcattctttttttttttttttttttttgagatagagtctcactctgtcgcccaggctggagtgcagtggtgtgatctcgactcactgcaatctccacctcctgggttcaagcgattctcatgcttagcctcccaagcagctgggattacaagcacgtgccaccatgcctggctaattttcatatttttagtagagacggggtttcatcatgttggccaggctggtcttgaactcctgacctcacgtgatctgcctcgctcatcctcccaaagtgctgggattacagatgtgagccaccacgcccggcgtgattttggaaattggaaattctttttttttttgagacggagtttcgctctggcgtgcaatggcacgatcttggctcacctcgacctctgcctcctgggttcaagtgattctgcttcagcctcccaagtagctgggattataggcatgcaccaccaaacccgactaattttgtatttttttttttttttcagtagagacggggtttctccatgttggtcaggctggtctcgacctcccgacctcaggtgatccacccacctcggcctcccaaaatgctgggattataggcgtgaggcaccgtgcccggcctggttttggaaattcttatcccagtcccccagtgctgtcccctaattgtgttggcctgagggaggtgccactgggctggctgggaccccgggcctctcagctatggtcaataacagttggcgactggactgagaggaagcaggaagttgggagggcccgtctgcaggaaaggggcctcacctctgaagaagtggctgttctgaccctgaaggggaagccggggacaaggggtggctgggagagtctggagggacatatgcaggtagtcgcagggctggaggtctgtgggagcatggatgtgctgcaggggcctcggggagcgtgcatatgtgtgtgagcatgtgcacacgcatgagcatgtgggccatgccctctcgggcaggtgggagtgtgtcttgtatgggttctagagggaagctcataagcacttgtatgtgtttgcaaataagtgcatatgtggtaggcatgggaatgggtacactgtgagcccattttccaggcacacacctgcaggtgtagaagtgtgcacctgtgtgtggatctttgtttcatccacacacacaggcatgggagtgtgcacacatgtgagcctgtgttgcaggcacacacctgcagccataactgtgcaaacacaggccaggcgcggtagctcacgtccagtaatcccagcactttgggaggctgaggggggcggatcacctgaggtcaggagttcgagaccagcctggccaacatggtgaaaccctgtctctactaaaaatacaaaaattagctgggcgtggcggcacatgcctgtaatcccagctacttgggaggctgaggcaagagaattgcttgaacctgggaggcggaggttgcagtgagccaagatcacaccagtgcactccagcctgggcaacacaaagggagactctgtctcaaaaaaaaaaaaaaaaaaaaaaaaaggaaagaaaaagaaagcgtgcaaacatttgtgagcctgtgttctgtgcatatccacatatgtatttgaaagttagtgcacactcaagtcagccctcggagcctgcgtcccctcatggatacaccatgagtgtgtgaatgtacaaactgcctgcaccttggacattctctagggacagggagcaaggactgtccctgggtttcatctagaggaacaggaggtcccttagatgccctggagttggccccgcgcgaggggtgctgggagttgacaggaaagaggaagtggcagccgagaggccctggtggggctgaggttcaggaagagggcggggccctcagcccggacccaggatggcggaggccaataacccctcggagcaggagctggaggtggggtccagggtccctgtgggggcaggcagaagggggccccaagtggcacaggccagtagtccttccccgggtacttctcagtttgggaacaaggagaggagatggggcactggcctcagagttctct

SEQ ID NO: 20917 - DNA, 2300 bp, Homo sapien
ctgtctgtttgggtgacagcccctgggtgacagtgtctgaatctagataatgtggctgtccctgggggccacaatgtgcctgcgtctgtccctgtgcaaatcactggaggtgaagagggaccgtgacaatgtgtgtgtcggtaagcgtggggtgacagtgtgcctgtgtgtcattgctcagactgtcccctgtaacagggtaactttttccctaggactggccctgtgagtgatggtgtttggataaaagagtctgggtggaagtgtggctgcctgcaggtgacagtgcgacagtgtcactgtgcctgccccttggatgaagcgtgatgcatcttcatgatggtttgtctgtggcccgtgcctgttcctgcgaatggctgtgtctgcgactaggttggtggggcgctgcaggctagcctcactgccctgtattccacgctcacagggagtcctgacctgggggctgtggagctgcgcatcgaagagctgcggcaccacttccgagtggagcacgcggtggccgagggtgccaagaacgtactgcgcctgctcagcgctgccaaggccccggaccgcaaggcagtcagcgaggtgaggggcggagctttcattagaggcggggcttcagcaaggggcggtgcttcagcaagcggcggggagttcaccaggaacacccacggtgaggggtggagcctcaaagggggtgggaccttcataaggggtggggcctcagccagggtagactactgtgaggggcagggcatcaggcaggaacagtgcaactgtgaggggcggggcctcagcgagggggcatggtttcaggcaggaatggccctcggtgaggggaggggcctctccaaggggcggggcctggttttcccagaggtgggaccaagttggtttgaggtttagccctctagggaggagctcagtgtgagactcagcctgggggtggggcctaggcctgcacttgggaaggggcaagcctggtcccgcccccagcccccacacttcccaccacaggcccaggagaaattaacagaatccaaccagaagctggggctgctgcgggaggctctggagcggagacttggggagctgcccgccgaccaccccaaggggcggctgctgcgagaagagctcgctgcggcctcctccgctgccttcagcacccgcctggccgggccctttcccgccacgcactacagcaccctgtgcaagcccgcgccgctcacaggtgggtctgagaccctaccccacccctgcagccctgggcctccgactcctctcatttccccattcctgtgacccccgacttcaatctccgctctccccaaccctggactcccattccaccactgtctcctcccctcctttgccctctgattctgggctcttgcccaccccccccacacctcagtttctccatctctcttcacctggcccagtatttttctcccagcccttgttccccagccccacctcggcctcacaacgctcagccatgagcctcctacccgcctgctgcagaccagccagccccaccttccacagacccctcagccatctacccctccagaccagccccaccgtagacccctagcccatcttagacctcagattgtccaccgagtcctcccctagaacccctagtcctaccctgttcctgcttgcctgggcctacggcctgtaccctgagcctacggcctgtaccctgagcctctcttctgcccctaaactcccgcatctgagcccctcctggaaggactgcttctctcatattctcctatcccagcacggacatcccggcctcatgccccatgctccattctggttgtccctcactggctcccacttgtaccatggctgcgtctggatgtgtcccctccccgctgtggtcccctccgctcagcctgccccagaagtggccccctgctgagctttcccctcctgcagggaccctggaggtacgagtggtgggctgcagagacctcccagagaccatcccgtggaaccctaccccctcaatggggggacctgggaccccagacagccgcccccccttcctgagccgcccagcccggggcctttacagccgaagcggaagcctcagtggccggagcagcctcaaagcagaagccgagaacaccagtgagtgggcatcgtgggccctgagaaacgaggtggcattggggacctggaatgccccatatttgtaaacctttaaaaaataagccaggggtcgggtgtggtggctcacacatgtaatcccagcactttgggaagccaaggtggacgga

SEQ ID NO: 20918 - DNA, 2300 bp, Homo sapien
cattgaaacctggcttggaaatagaaagatggaacctcaggcctgccagagccccacccctacaccgggaggttgggggcaggcgtgaggcagcccccaccccacccggcccaatgctggacacgcaggcgtccatggggcaccctgctttgtcctagacataaacccagcatacttgttttgacaacccactcatcttcgaggattgagggtgatcagggaaaggcggggtgggaccctggccagacctggagggaagggaagggattgaagcaaggggcgctgggccagaaggccccacaggaatgcttgggggtgagccgagaggctgtggggaagtccgaggccagcttgcaatcctcgttccaaaaggcgggcgggcactgggccaccaggaagaggggaagggggaaaaggggaagaccctgggggctgggtgttggtggacagacccgggtggagtcggggagccgcagtcctggtgactcagggcatccccgggcacctgtgggctcctcaggtgtctgtgctgggagccgcttgcggtggtgaaggggtgtggctatgtgtgtctcgggtgttgggtagcactgtgagtctatcaagagtgttgatggctcgtgacgcaatgagggagggctgtgtcgtgggtaagggatgtgataaccggctctgtgttccagggcaattgcaggtgtaactggcagtgtctggtggtggggagtgcaacggagtgactgtgtcttggggtgtcccggggtgtgggggtgtgtgtcttagggtgctgtttctggggcaaggaggggtgcttggctaggccttggggtgttcaggggtgtcagggtatgtctcggggtgttgctgtttcctgggtgggggtgctggctaggtctaggggtctctaggggtgcaggtgtgtgtgtctcagggcgttgctgtttctgggtgagggtgggggtggccagctaggtctctggtgtccagcggcggggggtgtcacttcttgtgccttgggtgtacggagtgtgctggtggggcctgtctgggattgttgaggggtcattgaaagtcaaacagagtgtggtcaggggcagttttggcaataaggagtgtgtgtgcgtgtgtgtatctctcggggtgccaagtgagaccctatttcccagcactaaggagggtggttcgggtgatcatctcagagggctgcattttggggtgttgggaggggctggaattgaggcagtaactctgggtgcgtcccggcgctgggggtaagaccctgagttcagggatgtggcggcagcaacctggctgtgctgagatggggacaggatgaaactgagtggtaagtgacaggattgtatgtcttagggtgtgaggctgtgccagtgtgaccctacttctcagggcaggaggcgagtctttgtgtcttaggacgtgtgtcacaggtgtcactcagcccatcttaaaggagccagtcactggggagagtccccaggtcgccaggcctcctggttcccctgccccctttcagcctcctcccaggatatgactcgctgtggccctagccggggcttaagcccctgtataaataggcggatcccctggccaggctgggcctgacccaagctggtctacccgaggccctgcccaccagcacccaccccgacatccacgaaggctttggcagggcagggggggcattgctggccccacagaattggagttagcctctctagctccaaagccccagggaggggggcagtggcaccccctgcagctgccccagcccgccccagacgacgctcacattttccagtgtttagattttatccgctttattaatgaggcaagaggcccgatcctgggggggaagggggctgctcccgccctgctgggaggagggggtcacatggggccagaccaactccagggagcctcactcctcgtggagggagccgctggggcccagagtggcccccgcccattgccaggagcagagaggggggtctctgccactccaggcccccagcgggcgtgcgcggggtggagcggcccctggaggccagcaagggcggcgggaggagctgaggagccgccccaggaagagggagggaggaagcggcttgccggagagccagggcgcagtgggcggcagggctgagcggccggtgatggggaccccacatcccaggcagtgccgggtaagggggttgcacatgagggtccctgattggggaggaggagggcatgaaggggtggggccatggccacctgctgtccgtcctgtgtccccgggctct

SEQ ID NO: 20919 - DNA, 2300 bp, Homo sapien
ctgccgaggtatccactggggagccgggcaccagggtccctgatggtggaccagaggtctgggcctgcatcctgttcatgagctggggctcagatgctgaagctgcagatgctgagcctgggccccactcagtggtgggggccaatggcctgggctggatgctgagtccccatgaggcactgggaggcttgtgcccctgtgaattgtggggaactggaggccagggctggatgctgagttcccatcaggcactgggagacctgtgccccagtggattgtgggagctgatggccagggctgcatgctgacatcccatcaggcattaggaggggtgtacccccagtagattgtgcaagactaggggtggatgctgagttcccaacaggcactgagagacctgagctccaatggactgtgggaggccagggctggatggattgattggatggatggattgagaggcctgcatcccagtcgattgtgcaaaactgacgaccagggctggacgctgagttcccatcaggcgttgggaggcctgcaccccagtagattgtggggagctgatggccacagttaaatgctgagttcccatcagacactgagaggcctgcacctctacagactgtgggagctgatggccagggctggatgctgagttcctgtcaggcattgggaggccagtgccccatgagatggtggaggctagaggccagatacgagatgcacttctccgtgatgccttggagaaactcaacgctgtgggaggcaggcttgcctggtgccaagcactgtggggatagatgggagggggtcaaggagggcaatagtgggtttgagcaagaagtagacgcaggggtctccctaagtgggatgagtttctgtgtcctccacaagcatttcctgagcactcactgtgtgccaggctccgttccctgaaagcagcaatgaattttttttttttttttttttttttttttgagatggagtcttgctctgtcaccaggctggagtgcagtggcacgatcttggctctctgcaacctccacctcctgggttcaaaccattttcctgcctcagcctcccgagtagctgggattacaggcgcccgccaccagacccagctaatttttgtatttttagtagagacaggatttcaccatgttggccaggttggtctcgatctcctgacctcgtgttctgcccacctcggcctcccaaagtgctgggattacaggcgtgagccaccgcacctggcacagcaatgaatttttgctaggaccgaaatcctagctgggtacagtggtgcacacctatagtcccagctacttgggaggttgagatggggggatcactggagctcaggagttccaggccagcctgggcaacataatgaggctcccatctctaaaaaaaattattttaactatgtgggtgtggtggcacgtgtctgtggtcccagctactcgggagactgagacaggaggatcacttgagcccaggagttggagaccagcctgtgcaacatagtgagaccccatatctccacaaaaaatacaaaaattagccaggcatggtggcgagcacctgtagttccagctacttgggaggctgaggtgggaggattgccggaatctgggaggttgtggctgcagtgactatgatggcaccactgcactccagcctgggtgacagagcaagaccctgtctcaaaaagagaaaggaaaactaaatcctagtcctagcagagctgacacgctaatgtgggccctgctgtggccctggctcaggctcagtgggtgatgagttactgggatggaatccccctagtcctctcccagctctctcccttcgccctccagtggtgattagaaaagggggagggagggggaagaggtttcagcgtctcccacccctgcaggtgatgttctgcaccctgaacacccacaaagtggacatggacaagctcctggggggccagatcgggctggaggacttcatcttcgcccacgtgaaggggcagcgcaaggaggtggaggtgttcaagtcggaggatgcactcgggctcaccatcacggacaacggggctggctacgccttcatcaaggtgcctggggagacggggcaccccggaggcctgggagtgagggtgggccatgggaccccggaaaccagggcagagccccaagggctgatgactccccgcccccgcagcgcatcaaggagggcagcgtgatcgaccacatccacctcatcagcgtgggcgacatgatcgaggccattaacgggcagagcctgctggg

SEQ ID NO: 20920 - DNA, 2300 bp, Homo sapien
aagcgattctctcgtctcaacctctcgagtagctgggattacagacgcccgccaccacggccagctaatttttgtatttttagtagagacggggtctcaccatgttggccaggctgatctccaactcgtgacctcaggtgatctgcccacctcagcctcccaaagtgctgggattacaggcgggcactatggctcattcctgtactcccagcacttttgagaggccgaggcaggaggattgcttgagtctaggagtttgagatcactctgggcaacatattgagacccctcatctctgcaaaaagtgttttttgttttttgttttttgttttctgtttttgagatggagtgtcattctgtcacccaggcaatggcacggtctcagctcactgcaacctccgcctcccaggtttcaggcaattctcctgcctcagcctcctgagtagctaagactacaggcacatgccaccacacccggctaatttttgtgtttttttggtagagacagggtttcactatgttggccaggctggtcttgaattcctgacctcgtgatccacccgcctcagcctcccaaagtgctgggattacaggcatgagccaccgcacccggcctgcaaaaagttttaaaacgtcagctgagcattaggcacagtggttcacgcttttaatcccagcgctttgggaggctgaggtgggcggatcacttgaggtcaggagttcaagaccagcctggccaacttggtgaaaccccatctctaccaaaaatgtagaaattaccccggtgtggtggcacagacatgtaatcccagcttcttgggaggctgagacaagagaatcgcttgtacccgggaggcaagagattgcagtgagtgagctgagattgcaccactgcactccagcctgggcaacggagtgagactcagtctcaaaaaaaaaaaaaaaaaaagagtcagggtctcttcttcaagaatcacttgaacctgagaggcagaggttgcagtgagtcaagatcacaccgttgcaatccagcctaggggacagagtgagactccatctcaaaaaaataaaataaaggttagctgagcttcatggcatgtgcctatgggcccagctatttgagagactgaggtgtgaggatcccttgagcctgggagatcaaggctgcagtgagctttaattataccactgcactccagtctaagtgacagagcaagaccctgtcacaacaacaaatgaaacacacaaggaaggtcacaaagcaataatcctagctggtattattattattattattattattattattattattattattattattattgagacagagtcttgctcttttgcccagggtggagtgcagtggtgtgatcttggctcactgcaacctctgcctcctgggttcaagcaattcttatgcctcaccctcttgaatcactgagattacagacatgcgccaccatgcctggctaatttttttgtgtttttggtagggatgggatttcgacatgttggtcaggcatctcgaactcctgacctcaagtgatcctcccgtctcagcctcccacagtgctgggattacaggtgtgagctttttattttattttattttatttatagacggagccttagtctgtcacccaggctagagtgcagtggtgcgatcttgggtcaccgcaacctccacctctccagttcaagctattcttgtgcctcagcctcccaagtagctgggattacaggtgcacaccaccacacccggctaatttttatatttttagtagaggtggggtttcaccatgttggccaagctggtttcaaagttttgacctcaagtgatccgcccacctcagccttccgtagtggtgggattacaggcgtgagccaccgcacccagccctattattacttttatataagtgtcctgtcactatacaagagatgaggatttcaaccgaggccaatttgttctctgagtatttccttgggcctgtatggttcgagtagtgtgggaggggcacccaaggcctctgcccaggccctgagccccacttcctgtcctgcagatcttctggtgaccccacttctcgctgctcatgccgctgggactggggcggcggaaaaaggcgccccctctagtggaaaatgaggaggctgagccaggccgtggagggctgggcgtgggggagccagggcctctgggcggaggtgggtcggggggcccccaaatgggcttgcccccccctcccccagccctgcggccccgcctcgtgttccacacccagctggcccat

SEQ ID NO: 20921 - DNA, 2300 bp, Homo sapien
ctactcaggagactgaggcgtgagaattgctcgaacctgagaagcggaggttgcagtaagctgagattgcaccactgcactgcagcctgggtgacagagtgaggctccgtctcaaaaaaacaaacaaacaaacaacaacaacaacaaaaattagccaggtgtggtggtacatgcctgtggtcccagctactcggtaggctaagatgggaggattacttgagcctaggaggtggaggttgcagtgagctgagatcctgccactgcattccagcctggccaacggagctagacactgtctcaaaaaaaaaaaaaaaaaaattcagaaaggaggtgcccagtgctgctctgtgtcttgagcaatcccacaatcccatcaccccttctccgggcacttcctcatcaggaaacaggagccagttggagtctggctcaggactctgcagcctcagtcatgctgtcccctgggctcagcatcccgtcctctccaagtgtgcagggggcagcttagatgccaggctcaagcagggcaggcagcacagtcccacagagggtactggccagcccaggcaactgattgctcagtgggatggcagaggtcagcagaacaggaagggacggacaatagctgtgcctgttgcctggcctgccacagcaatctcggtgtttgccagctgggtggggctggctaggcaatcctcagcagcaaagctcaaggttccatctcccattttagtttgcccctctgcaggtcctggtgggactgatatgcacaacatctcaccctgggaactgcaaagaaccagtctttctatggagcttgagcagggtctcagcacttagaggcttccaggaactacagttcccagaacacacagcattcagccccagttgctgtccaagtggctgggtttgaactagaacaaggaaatctcacttgtcccgggaactgagcgtcctggcctggtccaggtgcatttgtgactcttgtttcttggatctgtgtccacctgataaatcccccttccttataaactacatggtctatttgtccacacaggtttgctgagaacctgccgtgtggcagcctgaggtgggagtgaggggttgacaagagagactcagcctccaccctcacagtcagatggaggagacagatctatgaaaggctggctgggtaccttctgtgacctagcacataaacaaaccaacaagcagataaactatctcacccttgtctttcattgcatcttgcctttccacactgatttactagctcccacgatattgcagtatcctaaagcgtgctgtatctctctgtccggcttttgcacgctctgttacctctaccaggagcacattcagcttattcactgacgcgtcttcagaggtaggacagagtctggcacggagcagtctggcacattaaatatttgatgagtgagtgaacgaatgaatgaatgaatgcctttgtccattgtacagcccaggaagcagggaaactcgggaccctccctattcatctcgatcccccgcccgcccccagagattgaatgcatctttttatccgctccgaggatggccaggctggggcagaggaggccgggcagggaactgggttggggactgccattgacccccacccaggtctcctaaactgtccgctttcctggacgtcggaagttcgaatcctttccccgaaacctggcctaggtcacctgactcccccgcccctcaccacccagggcacccgagactgacactcagccgacagcacgtggttcaggggccccagcttccttcccattggccgcttgtctccttcctccctcgcgattggccggggcccagctgcagctcccccccctcctcagccctccggtggtacagccagccgcggcttaggcggggcggaacggtccactgcttcgcggcgaggggaggagtcgggaagagccgggcgaggcggagggatccctctggaatgtttccgtcgggtccacccgaagcggaagacgcggattggctgcgagcaccgagaggcagccgctgattggccggccgcgggcgtcggccccgccccccaggcgccgctgcgggagaggcccggtctggagtttgcggagggccgagccgggtgcgcacggggaggcggaggcagcggcggcggcggcggcggcggcggcggcggcggagcaggtgagtggcctctgcgagaaggatgtgtctgctccgggggcctcgggggtcgcgggcctgcgaggatccggccgatcctgcagggtggggccggcgccgtggac

SEQ ID NO: 20922 - DNA, 2300 bp, Homo sapien
atgaggctccgcgcccggcctgataggttctcttattgccatgttgtagatagaagggggcccctgggttaggcagacacaggttaggtagttcgtccggcgtcaccgggcgggagcccaccgcaggccccacgagacaagggcgagcaggttcatcgcctcccggggaaaggactgggtagtcccaggccccaccccttcctggaacagcaagttcgctgtgggtcccgacctactgacccaggcggagggcgggacgcagggtagctggggccgcgtagagagggaaagaaggtcgcgattggctcgtcccgaaaggtgggcggggcctcctccgacctgtgcgcgcgcgccgcggggaggtgttgccgagggcggagcgggagggggcgtggccccgcgcgggcggccgttgacggcgaggccccgccccggatgtcgcgtgtcgctgaaagggcggcggcgattggccggcgccgcgggggcgggcggggcggaaggttctggagggggctggcgggctctggaagcttccgccggacgggtatatagagtccgggactggtcggcggcggagccgggggacggcgacagcgggtcggcgggccgcaggagggggtcatgggtaaagactactaccagacgttgggcctggcccgcggcgcgtcggacgaggagatcaagcgggcctaccgccgccaggcgctgcgctaccacccggacaagaacaaggagcccggcgccgaggagaagttcaaggagatcgctgaggcctacgacgtgctcagcgacccgcgcaagcgcgagatcttcgaccgctacggggaggaaggtgtgtgctcgcggccaggggcgcggccccgccttttgacagacagggaaactgaggcacgctggcccctctcggcggccccccgggaaggacgccccgggccgtggggccgagctgccccgccctccggcctcgcgggcctccgccctcggattggcggccgcgcggtgggaggaggagccttggcccagccgctcggccagaagcttctagcatgtctggggctgcccctccccgggcgcctcctcccgcggccccgagcagccccggggtgcggtgcatgggggtgggggagccgggggtgacgacggggacggcgcggcggagcccgctgcggacccgggctcacctgggctcggccgccggggtccgcggggcggcgcctccggctcagctgcggggcgaggggttgtgaatgcaggagccgaccccgttcgtgggcttgggggctgggttgggataattcccgggaagtgatgacctggccccggcagggcacgcaggaggcagcggccgcccaggtccggagagcggggccgcctcggagggtaaggagagcagggctttttgttcctgtgcccgttgatgattcaggctggcttctgggcttgatctggagctgactttttgtgcaaggatggtggcagtgaatgctaatgtgtgaggatttaaaaactccctatttatttttgtttttttttttcttctcttcctacgcaccattagccctaaaacgttgagagtaaacacttaccgaaagccgaccctggaccatgtgtctttagccatctcttggtgatgttgccaggaggatgggtcagtccaggagtggcagggcctaggtggcacctggaggtgaacacctaaccgcatgagtccttttccactgtcaggctacgcggaaatactgttggtaggggggcgtctctgctgttggcagtgagaggtagaaacttggggttcttccttgctctcccctgacagacaaaaaagttcctcccccatggcttccaagctgtttccccctgtaagggaagctcgagagagagtctgctgttcagccatctgactgcttctaaatctgcttttcaggcctaaaggggagtggccccagtggcggtagcggcggtggtgccaatggtacctctttcagctacacattccatggagaccctcatgccatgtttgctgagttcttcggtggcagaaatccctttgacaccttttttgggcagcggaacggggaggaaggcatggacattgatgacccattctctggcttccctatgggcatgggtggcttcaccaacgtgaactttggccgctcccgctctgcccaagagcccgcccgaaagaagcaagatcccccagtcacccacgaccttcgagtctcccttgaagagatctacagcggctgtaccaagaagatgaaaatctcccacaagcggctaaaccccgacggaaagag

SEQ ID NO: 20923 - DNA, 2300 bp, Homo sapien
tcttgctgatgcagttacctcagagatcattgagtgggccaagagaaccagatctgcctgctggatgctcctgatagttatttatgtaactatccgccatgatgctcctgatagttatttatgtaacttttttatggggaggctgagggtctcactgtcacccaggctggagtgcagtggcacaatcatagctgcctgcagcctcaaattcctgggctcaagagatcctcccgcctcaggaggcaggaggatggtcttcttcttcaggagtccctgtctgcccaggggcagctgtcactggaatcttttagctgccaggaatgaggtgatggctgaagagcccaccactaagaaaatggttagtcacccctttgacaatgcttcctttgtgccatgcctgctctgagcactttgcaaatgttgactcatataaacttcaaagccctcatgatgtgggcacaactgctatcctcattcctcattgtgcagatgaggaagctaaggccagcaaaggcctagtaactaacccaaggttacccagccgggaaatgctggagctgggaatgaagcccagctgtctggttccagagccagtgttacatggctctgacctcccaggcagttcttccaggaacctcccccacttccctgggcccttcccaggtggaacccctttctgagcctccttttcccatcagctctgtccttgacagaggcaccccagactttcagagccaaacgcgatcgtgttgcctacaattgaggaaacagaggccttgaaaggtgtgtgacacacctatgtccccccaaattataaaggtagttggggaagaaaaagaagcacgtgtgtaagaacggggaatatttatgaggttctcactgcgttccaggcactggggacccagtgcagacaggacctggcccctgcccaggtggcgatgtcagactgggagggaagacacattgaaagccaagagacaagataaatttcaaatttagcggcaagtgatcttgagagggcagtaaagggaagaaggcgggactgggaggaccttgggagatgcgcttccgtccagatcctcaccttgctttaggaggtgagaacagaggcagtcttccgtcccaaaatccttctccccacggttgggagaatagcgctggtgggttttttgttcattttactttattttacttattttatttatttatgagacggagtctcgctctgttgccgaggctggagtgcaacggccggatctcggctcactgcaacctccgcctccccgattcaagctattctcaggcctcaatctcctgagtagctgggattacaggttcgtgccaccaacgcccgggtaatttttatatttttagcagagatggggtttcaccatgttggccaggctggtctcgaactcctgacctcaagtgatccgcccgcctcggcctcccaaaatgctgggattacaggcgtgagccaccgcgcccggcctgtttgttaatcttaaatagaaacggagtctccttatgttgcctaggctggtctccaactcctaggctcaagagatcctcctgtcttggcctcaggaagtgatgggattacaggcatgaggctccgcgcccggcctgataggttctcttattgccatgttgtagatagaagggggcccctgggttaggcagacacaggttaggtagttcgtccggcgtcaccgggcgggagcccaccgcaggccccacgagacaagggcgagcaggttcatcgcctcccggggaaaggactgggtagtcccaggccccaccccttcctggaacagcaagttcgctgtgggtcccgacctactgacccaggcggagggcgggacgcagggtagctggggccgcgtagagagggaaagaaggtcgcgattggctcgtcccgaaaggtgggcggggcctcctccgacctgtgcgcgcgcgccgcggggaggtgttgccgagggcggagcgggagggggcgtggccccgcgcgggcggccgttgacggcgaggccccgccccggatgtcgcgtgtcgctgaaagggcggcggcgattggccggcgccgcgggggcgggcggggcggaaggttctggagggggctggcgggctctggaagcttccgccggacgggtatatagagtccgggactggtcggcggcggagccgggggacggcgacagcgggtcggcgggccgcaggagggggtcatgggtaaagactactaccagacgttgggcctggcccgcggcgcgtcggacgaggagatcaagcgggcctac

SEQ ID NO: 20924 - DNA, 2300 bp, Homo sapien
gcgtccggccagatccttgcttttgaaagcacacatacagaacaccttcaggttttcatctgtttttcccagatagcaccagtgaaaaagataatgagtttccagaagaccacatagcgttggcttcctgtactcgcagtcagggatccccaaaggctacagcttcagaagtttccagagccaaatctggatgactgagttccaagcactgactcacccttgcctccgcctgctcccctgtgaatcagtgatctacctttaaggacttctcatcgtgtctctcatgacaggcctgtgaattccagatggttcaacagctcatgaaagctcaggggcaggatctggaaacaagagtaaggagaggaggtgaagaagtgtgccaggtactgcctgttcctttgtctgtcaaaagtcttttctttttttttcttttttttttgagacagaatctcactctgtcgcccaggctggagtgcagtggtgcgatcttggctcactgcaacctccacctcccgggttcaagcgattctcagcctccctagtagctgggattacaggtgcccaccattacacctggctaatttttgtatttttagtagagacagggtttcaccacgttgtccaggctggtcttgaattcctgacctcatgtgatctgcctgtcttggcctcccgaagtgctgggattacaggtgtgagccaccgtgcctggccagaaatttatgtgtttttcatttacagcacatctcaatttggaccagtcccatttctttttcttttttctttttttttttttgagacggtctgttgctcaggctggagtgtagtggcgagatcttggctcactgcaacctccgcctcccgggttcaagcaattcttctgcctcagcctcctgattagctgggactacaggtgtgtaccaccacgcccggctaatttttgtatttttagtagcgatgaggtttcaccatatctgccaggctggtctcgaactcctcacctcgtgatctgcccccctcggcctcccaaggtgctaggattacaggtgtgagccatcgttcccggcctggaccagccccatttcaagggctcagtggccccattggagccactagacacgattctggacgtcaggcagagaccaatgtagttcccctgtccatagggcggagcaaagtgtggaggggggccgggcggggtggctcaggcctgtaatcctagcactttgggaggctgaggcgggaggatcacctgaggtcaggagttcaagaccagcctggccaaccatggggaaaccccgtctctactaaaaaaaatacaaaaattagtcgggcgtggtggcgggtgcctgtaatctcatctacttgggaggctgaggcatgagaatcgcttgaacccgggaggcggaggttgcgtgagccgtcattgcgccactgcactccagctgggggacagaacgagattgtttcaaaaacaaaacaaaacagaaaaacaaagtggggcggggctttcattaaaaacggcagtgaagccaccccagaatggggctggggctcaaggttcttgcaggttgggggttcccaaatggggagcttttcgcgactccgtttcgcctttccttccctcccactcaagagtctcctcccatagtgacctcctcgccaaccagactccgcagcccgcgaccccagcccctagccctctcctgctgttcccggtgtaccccgggggccgcccacctcagaatttaccccttcggcgccgcctgtcatgtggatgctgccttgcctgtcactcaacttcttaccccgcccccgcgtctggcctaaccgtcgcttaccttggtttccacagcgacgccatcagggggcgtggcaaagggacgcgcggggcagagacctcctttggattggtggatggtcaagccccttctctttagcccctcctacaggcgttccgcccccttcgattggtctcgcaagttgattggtcaatcccctggtgctagtcctagtcttggttcggaccggccccaaggagcaggggcgaacgtgggcgcctcgtgccctgattggccgacggggcgcgcgcggcctggaggggcggggcggacgcagagccgcgtttagtctatcgctgcggttgcgagcgctgtagggagcctgtgctgtgccgcgcagttaggcagcagcagccgcggagcagtagccgccgtgggagggagccatgaagcattacgaggtaagaagcgagaaacaggggccgtgtggccactgctgacccattctttttccttctt

SEQ ID NO: 20925 - DNA, 2300 bp, Homo sapien
tacctgcagccacagggcaggccccgtgcccgcccagggccctgctgtgctaaccctttcccgtggatcccgccccgtgtcctctgtccctatcctacatatccccttggtggggcccaacgtcctgcgtggtgtgaccgagctctttttttctggcccctccatgtgccagctctttggccttgttatcgctgtggcttggaggagttcagtaaccttcccctagaggccacaaggccaggcagtgcctggagttgacagcagggactcaggaggccccgtgggccaggatttcctggctgctgggcccattcccaccctcctgtccaggaagtgggggcgagtgtgtcatggctggggaaataggcccccatgctgtggtgactgccaggccagcaggggagtggggatctgaaccaaacccacgggcaacaatgcctcctatcccatggggtgcctcccatctgtcaggggtcacctagtgtaccccatgcattgtctcaggggaccgtcacagtcctgggaggtagtctgcttcctacctgcccccttctgaggcctagagagaggtgacatgcctggggtcccccagggactacaaggcagggctggttacggttcccgagtgcaggccaccaagcccccttgtctcccgctgtcgttgggaatgtgcaggaggggtacccagcttctctggcttgaccgtggtgccctcatcttcaggatgggccctagctgccgtggcccggtctccctgggctctgggtgggtgggcctgccctgggatggccccagcccagaggtttgtttctgagcattgtgtcctgctccttttcctcaggcagcctctgggggcccccgctgggtttctgtgggtaggaagggtcccccaagaattgctggctggtggctgacttgggatcaggcctgcctgcttgccacgacccctgtataataggattgcactgacccctgcatagggtgggtcagatccccgggggctgcctccctccagccctgcccctctgcacccccatcgttcatcactggcctgggggctcagggagggctgggccagactcctacctcaggggctggcacaggcctggctcttggacgcaggaagcgccgggctttagtggggcgcaggtcctgggtgagggtgcagtgtttgggctgactcagtggaaagcctgccccacaggtggctataaggtgagaagtgggtggggaggaaggttggggagacctcatcagcccaagctggaggcggttgcctaaaacttccacacaccccgatcctttccacacttcgagagaggctctctgcacccataactccagaatctgtcacctccctggtaacacaaatgcacaaggaaaataatccaaagtgtctcttacagctcagaaggggaaatggatgatctgtctcgcggattctcaaaatagctgggatttctccaagcccagtgaactccctaggcctgagctgcgggctggggcctgcacggcccgctggcctctcactctcctctagccactggctctgtgcagggcgggggctgggaggtgttgtcatgcctgcccctggggctttccctgtgctggtgccgttgagggttttgaggtgaccactcaaaagctgctttcagggcagcctggctccccggggagactcccaagcccccctcagagaaggtctgtggcatggctcctggggggcgcagtctggggtggttttatatttagctgggctgtggctgtggttgccactcgggttacatctggcacagaagtcggcagtgccagggccggcacgggctcctttccagcaccgcggcagaatttgatcgcgcttgcccggcccagggctgcttcccgtggggaggtcggtggtgggggctgacggccggcagctggggctgctggccaccgtgggcagagccgagtggcagggctggtggcaggcggcatggacttgaacttgagcttgttggcccgggaggccaccccaggcctcctccctggcctcaatgggctccccaggcccacacccccaaaggtggccaagaaacctaaaaaggctgttctcttcttcgaggtggagattctggacgcaaagacaagggagaagctgtgtttcttggacaaggtaggactggggcgtgggctgcactgggccaagggcactgggcccgggaccccaatccttatagcccaggagctgtccagtggggccctttgtgccccaccccctgccctatggaggggtatgccctcacttggggtagggtgga

SEQ ID NO: 20926 - DNA, 2300 bp, Homo sapien
gcctagccaacatgatgaaactccgtctctactaaaaatacaaaaaaattatttgggaggccaaggcgggcggatcacaaggtcaggagatcaagactatcctggctaacacggtgaaaccccgtctctactaaaaatacaaaaaaagtagccgggcgtggtggcgggcgcttgtagtcccagctactcggcaggctgaggcaggagaatggcgtgaacccgggaggcggagcttgcagtgagccgagattgcgccactgcactccagcctgggcaacggagcaagactccgtctcaaaaaaaaaaaaaaaaaaattagctggccgtgatggcacccacctgtaatcccagctacttaggaggctaaggcaggagaatcgcttgaaaccagaaggcggaggttgcggtgagccgagatcacaccactgcactccagcctgggcaacaagagtgaaactctgtctcaaaaaaaaaaaaaaaaaagaaagaaaaagaaaagtctctattgccagttgtctattctcaatagcttgcttttttcacttaatatatcagcagccacttccccatgtcaacacataaagatctagttgagtaattctcccaaagctggtcactagaccagcaacatcacatcacctgggaatttttatagacagggtctcactctgttgcctaggctggagtgcagtgatgggatcacggctcactgcagcctggaactcctgggctcaagttatcctcctgcctcagcctcccgagtagctgggactacaagcgtgcaccaccacacccagcttttttttttttttttttttttgtagagatagagtctccctatattgcccaggctggtctcaaactcctgagttcaggcgatcctcccatctcagcttcccaaagctctgagattacaggtgtgagccactgccctggcccatatttttttttttccattagactgtttttctgttccattagactgtaagcttgaaagacaggaaccacgtctgcctttctgtctgaccactggacccagcataccatacagtagatgcctaatacatgctttgtcagactggggaaaaatatatattagatattaatattagatattaatatattttaaaattgtataaagattgcatatatatatataatttatttgaaatttcagctttaaataattgtttttgaccaggcacagtggcttacgcccataatcccaacactttgagaggctgaggcgggaggatccctggagcccaagagttcaaggttgcagtgagctatgattgtgccactgtgctccagcctgggcgacagaatgagaccctatctcaaaaaataataatataataataactgtatttatgaataacttttatttaaattaaatttatcaaaatctttcttggacaggcactgtggctcatgcccgtaatcccagcaatttgggaggctgaggcgggggaatcacttgaggtcaggggttcgagaccagcctggccaactggcgaaaccccgtctctactaaaaatacaaaaattagctgggggtggtggcgggcgcctgtaatcccagctactcaggaggctgaggcaagagaatttgagcccaggaggtggaggctgcagtgagccgagatcgcgccaatacactccagtctgggcgacaggtactgtgtctccaaaaacaaaaaattcttaaagtgactttatgcaaaattacatacattaacgatataatagatatcgtgccttttttaagagaaatttgaatgttttcaaagaaaaaactttttggaaaatgatatgaaaaataattttaatatgtgctttagcctcgggctaccagaagagccccagatagggtcgagggaggcctcagtcccacaccgtccccttctgccccgcccagatggatttccaggctcagggaagtcccctctcgggtccaaccatatcctgcgaagagacacagcacctgtcccgcctccgcctgtccgcgaggtgacgccaggcggaccggagcgatcctctggagtccttcatctctatgatctccgcagctgcctaaatgacccggaagctgtgtctgactgaggggtcagtggttccgggtaggagctaggtgaccctcggctgctgcagggatctgcagcgactgcagccatgggggcccacctggtccggcgctacctgggcgatgcctcggtggagcccgaccccctgcagatgccaaccttcccgccagactacggcttccccgaacgcaaggagcgcggtgaggcccagtgc

SEQ ID NO: 20927 - DNA, 2300 bp, Homo sapien
cccattgcccacgtgcggtgcgggggaaggtttttccatttgttagaggctctcacttgcttatactgagcctgtcaggtaagaaatacattctattttgtttgagacactcttgttctgagtctcagttatggaaacccaacctaatgttccccatgggcctgatgaatgttccttgttgttgaagccaatctgagttgcatttcctcttacttttagtaaaaacctctacaaagggaaattggggtcttgccccttggggtacatattagtttcctatagtgactctaacaaattactcataaattgagtgactcggaaccacagaaataataattattattattgttactattttgagatagagtcctgctcttttgcccaggctggaatgcagtggcgagatcttggctcactgcagcctccgcctcccgggttcaagcgattcttctgccgcagccacccgagtagctggcattacaggtgcccgctatcatgtccagctattctttttttttttgtaactttagtagagatgggatttcatcatgttggccaggctggtctcgaatgcctgacctcaagtgatccacctgtctgagcctcccgaagtgttgggattacaggcgtgagccaccgcgcctggccagaaatggattatatggattattttattttatttttttgagatggagtttcactcttgttgcccaggcaggagtgcaatgatgtgatctcggctcactgcaacctctacctcccgagttcaaacgattctcctgcctcagcctcctgagtagctgggattacaggtgcgcgccaccatatctggctaattttgtatttttagtagagatgggatttcaccatgttggccaagctggtcttaaactcctgacctcacgtgatccacccacctcggcctcccaaagtgttgggattacaggtgtgagccactgcacccggccagattattttatagttctggagtcaggagaccaacatcagtctcactgctgaaacccaggtgttcatgggctgggccatgcttctttaagaggctgcagcgtgagaatccattttcttgctgtttccagcctctgcagttgcattctttagcatatggctccttcttgcatcttcaaagccagcataactttagtgaccacattgccttttttttgtgtcaaatctccttctgtttcccttctacgaggacccttgtaatgccatttttttttttttttgagacggagtctcgctctgtcacccaggctggagtgcagtggtgcgatctcggctcactgcaagctccacctcctgggttcacgccattctcctccctcagcctcccgagtagctgggaccacaggcacccgccaccacacccagctaattttttgtatttttagtggagacggagtttcactgtgtaagccaggatggtctcgatctcctgacctcgtgatctgcctgtctcggcctcccaaagtgctgggattacaggcgtgagccacgatgcctggcctgtaaagccatttaaggcccacctaggtaatccaggataaaccatccatctcaagacccttaattaattaattaatatttaatgttttttaaaaaattaatttatttatttattgagacagagtctcactctgtcactcaggctggagtgcagtggcgtgatctcggctaactgcaacctccatctcccaggttcaagcgattctcctgcctcagcctcctgagtagctgggattacaggcgcctgccactgcgcctggctaatttttgtatttttagtagagactgggtttcaccatgttggccaacctggtctcgaactcctggccttaagtgatccatccacctcagcctctaaaagtgctgggattccaggcgagagccaccacaccaggccagttgtcattattccttctgtgcgtgaatccaaactggggagaaaggctctgtgtgtatgtgtgtgtgtgtgtgtgtgtgtgtttgtgtgagcacgtgtgaggtctgagggcttcctgtcaaaatgaatttgcatgtatttgactttgaaaggaaaagggaactgagagagcccccagacgcctgagtcggagagacagggggcagaggttgccaagccctggctgccacttgtcaggttccctgtgctagacatgcataatctgtattccatcactgggtacccggacccaccaggtaaggccccggccaggctggggctggggcctaggtgtggtcaggacccagggtacagaatccccaccatggggcagctg

SEQ ID NO: 20928 - DNA, 2300 bp, Homo sapien
ttatcaccactgctatcacagccttcgtcaccatcaccacaacaatcaccttcactgcagctgtcaccttcaatcaccatcatcaccaccatctctgaaaatatcaccataatgtaaccatcaccatcgctactaccatcaccgtcactttcatcatcttcaccatcatcgcaaccatcgtcatcatcaccatcatcccttccttcatcgtcaccaccaccacctatagctccaccatcactcctgccactaccatgattaccaccatcaccaccacaaccgttattatcaccatcatcatcatcaccaccacgacaaagagcagtctgcaaaatcgagctacaaacataaataagcaagctggaagtttgcaaaggtaaatgcagcggctgtgccaataggaaaaggcttcctgggggcaggcatgttcaacatggaggttccctcttcccttttttttttttttttttttttttgagacagagtctcgctctttcgcccaggccagactgcagtggcgctatctcgggtcactgcaagccccgccttccgggttcacgccattctcctgcctcagcctcccgagtagctgggactacaggcgcccgccaccgcgcccggctaattttttgtatttttagtagagacggggtttcaccatgttcccttttctttatcaccacgtgtgcagtaaaaaagcaggcaacatagtgccagccaggtagagaccccatctgcatagtaaaagatgaggatggggcggccagcttctttgcgtgctatgcaaacagcacacccagtccgaccaatctctcggttcctgtgtaaatcagacagctcctcctcaagctcggctataaaaccccatgtatttcaccacgagaccagaagactcacttgggagcccctctctctctgcaggatagagcttttctcttttttctcttctcttgcctgttaaacttctgctctgaaactcacttttttttttttttttttagatgaagtctcactctgtcacccaggctggaaggaactggcgcaatcttcgctcacggcaacctctgcctcccgggttcaaacaattctcccgcttcagccttccgagtagctgggattacaggcatgcgccaccatgcccagctaatttttgtatttttagtacagacagggtttcaccatgttggcttggctggtcttgaactcctgacctcaggtgatccgcccgtctcagcctcccaaagtgctgggattacaagggtgagccacagtgctcggccttaaattcacttcttgtgcatccgcatccttgatttacttggcatgagaggatgaaccccagacaacaacactgcttcagtaggaagtctggtgttttaagtctaatgaagagcttcagaagagttttaagcaggggagccgggtgcagtggctcacaccggtaatctcaacactgggagactgaggcagaaggattgcttgagcccagaaattcaagacaagcctgggctacaaagcgaggccctgtctctcttcaaaaaaaaaaataaaaactaaaaaaaattagccaggcgtggtggcatgcacctgtagtcctaacgattcagaggactgaggtgggaggatcgctggagcccaggagtttgaggttgcagtgagctatgattgtgccacggcactccagcctgggtaacagagcaagacccacataaataaataaataaatatttgctggaggaagggtagatttacagactttttctcccaagtcctgtgactggttagggttggtccaaataaccaaataatgtattaccttctatgagactttgggactcttaacttcttatggctcagcaatcataaccagtaagtatcatctactgggggaagagaaagatatgttaaaatgactcctctggaaacttcagataccaacacagacaccctaaaatctggtttactcacctcaaagccacaggcttatttaagatttattttggccccaaaggcacttcctaatcctcagacaatgtgatgtaactttcagggcatttcctcgttagggtttaccaactcaatcatcccaaaggtgatcaacaatagctaggcagaaaaggtacagcaaataaacgaaaagcagaaccatgagtctgatggcgaaagaggggaagcagtttgcttttctgatagcaatttcatgagtcagctgacctaagatacatacttcaattctcatgggatttcttgagctaggaaaggtggttggcttacggcacagtagagagcttccagggctg

SEQ ID NO: 20929 - DNA, 2300 bp, Homo sapien
tacatacagtgaaataatgaagcaattagcacatccatcgcctcacatatttgcttttttttttttggtggtaagaacacgtaagacctaccctcttagcacatttcaagtacataatatgttcctgttaactacagtcaccatgctgtacattagatctccaaaacttatttatctgaaataactgaacctttgtacattttgttttttaaatgatacatttcttttatttttatttttagagacagtgtcttgctatgtggcccaggctggtcatctggaactcctggactcaagcgatcctcctgccttggcctcccaaagtgtgctgtgattacatgcatgagccaccccgcccggcccaacttctttgtaagaacatttagcttaaaacacagataaattgtactgcataaaggtattttctttctttatatccttattctataagctatttttcatttttttttttgagatggagttttgctcttgttgcacaggctggagtgcaatggcaagaccttgggtcactgcaccctccacctcctgggttcaagcaattctcctgcctcagcctcccgaatagctgggattacaggcgcatgccaccatgcccagctaatttttgtattactagtagagactgggggtttcatcatgttggccaggctggtctcgaactcctgacctcaagtgatccaccagcgtcggcctccaaagtcttgggattgcaggcgtaagccaccgcgcccggtcttttcatatttttaaaacctttttaaatgtgagtaatgtgttgcactgcaacattgtgacagttacaacatcactaggtgataagaaattttcagctccattataaccttatgggatcacaactgtgtatgtgtttcgtggttgaccaaaaccttgttatgtggtgcatgactgcacatgtgcttgatatataaagaataccagggaactagtgacagtggttgtttcaggggaggaaaatttaggaatagagtgagcctcccgtttgaacttttcccataggtatgtactatgtatactacataataaatagtttttaaaaagtcagatctatgtcttagattcacacatcttatttttagtgagaagggcaagctgtagaagaaacaaaaatacatcgtcctatttttagaataaagacagttagttgacccgtgaacaccaagggtttgaactgtggctatccccttataggtagatttttttctacctttgtcctccttgggacagcaagacaaacccctccctttcctcagcctactcagggtgaagctgacgatgaagacgtttatttatgatctttacgatcacttccacgtaacgaagagtaaatatattttctcttcttcatgattttcttaataacactttcttttctctgagcttagtttattttaagaatatggcatataatatacaaaatatgtgttaactaactttatgttattggtaaagcttctggttaacagtagtctattagtaggtaggttttgggggagtcaaaagaagtgaattttccactgcacagggtggcgccccaactcccgttgcctaagggtcagccgtataaaaatatacaaaaacaatcttaagtatgggtatatttttgtaggggattggattaagcccatggataaaggtggaaggggttggggaaaaggaaggagaaaagggtaagttaaatattgagcatccctaaagagacccggggaggggtcgggtgtgcccctctcaacccttgaagcccaggtcccctcatcccgccttccgaatgcaagttcagctcccattcccaccccaagcacaagccccgccccatttttgcccctgaggcgcacgacccgcccctactaccaccctgcaaaccaaggccccgcccactccgccattggggtgcaagccccgcccatcagccatcggagggcaagccacactccaccccgcccccgcgcacaggccccgccccacttttgccccgggacctaagccccacccctatccctgtctctcggacataggctccgcccccagcaccaccctccatgctctgtgggaccccactccagagcctaacctcatcccccgggtaagaatactagaatttctccttggaggctaaagaagacgttagtttctctgccgccgcctaaggctaccctggccacaacagcctgagccacagccacttccgttcccggcggccccgagaccggaagcggaagtgcgcgcggcggcggccgacggcggctgagctgtgctgcgcg

SEQ ID NO: 20930 - DNA, 2300 bp, Homo sapien
tccaaaacttatttatctgaaataactgaacctttgtacattttgttttttaaatgatacatttcttttatttttatttttagagacagtgtcttgctatgtggcccaggctggtcatctggaactcctggactcaagcgatcctcctgccttggcctcccaaagtgtgctgtgattacatgcatgagccaccccgcccggcccaacttctttgtaagaacatttagcttaaaacacagataaattgtactgcataaaggtattttctttctttatatccttattctataagctatttttcatttttttttttgagatggagttttgctcttgttgcacaggctggagtgcaatggcaagaccttgggtcactgcaccctccacctcctgggttcaagcaattctcctgcctcagcctcccgaatagctgggattacaggcgcatgccaccatgcccagctaatttttgtattactagtagagactgggggtttcatcatgttggccaggctggtctcgaactcctgacctcaagtgatccaccagcgtcggcctccaaagtcttgggattgcaggcgtaagccaccgcgcccggtcttttcatatttttaaaacctttttaaatgtgagtaatgtgttgcactgcaacattgtgacagttacaacatcactaggtgataagaaattttcagctccattataaccttatgggatcacaactgtgtatgtgtttcgtggttgaccaaaaccttgttatgtggtgcatgactgcacatgtgcttgatatataaagaataccagggaactagtgacagtggttgtttcaggggaggaaaatttaggaatagagtgagcctcccgtttgaacttttcccataggtatgtactatgtatactacataataaatagtttttaaaaagtcagatctatgtcttagattcacacatcttatttttagtgagaagggcaagctgtagaagaaacaaaaatacatcgtcctatttttagaataaagacagttagttgacccgtgaacaccaagggtttgaactgtggctatccccttataggtagatttttttctacctttgtcctccttgggacagcaagacaaacccctccctttcctcagcctactcagggtgaagctgacgatgaagacgtttatttatgatctttacgatcacttccacgtaacgaagagtaaatatattttctcttcttcatgattttcttaataacactttcttttctctgagcttagtttattttaagaatatggcatataatatacaaaatatgtgttaactaactttatgttattggtaaagcttctggttaacagtagtctattagtaggtaggttttgggggagtcaaaagaagtgaattttccactgcacagggtggcgccccaactcccgttgcctaagggtcagccgtataaaaatatacaaaaacaatcttaagtatgggtatatttttgtaggggattggattaagcccatggataaaggtggaaggggttggggaaaaggaaggagaaaagggtaagttaaatattgagcatccctaaagagacccggggaggggtcgggtgtgcccctctcaacccttgaagcccaggtcccctcatcccgccttccgaatgcaagttcagctcccattcccaccccaagcacaagccccgccccatttttgcccctgaggcgcacgacccgcccctactaccaccctgcaaaccaaggccccgcccactccgccattggggtgcaagccccgcccatcagccatcggagggcaagccacactccaccccgcccccgcgcacaggccccgccccacttttgccccgggacctaagccccacccctatccctgtctctcggacataggctccgcccccagcaccaccctccatgctctgtgggaccccactccagagcctaacctcatcccccgggtaagaatactagaatttctccttggaggctaaagaagacgttagtttctctgccgccgcctaaggctaccctggccacaacagcctgagccacagccacttccgttcccggcggccccgagaccggaagcggaagtgcgcgcggcggcggccgacggcggctgagctgtgctgcgcggcgcggcgcggtgcggcacggcacggtgggagtgtctccggctggcttgcaggtgtggcccggcccctcgggagggcggggagggcggggagggctcggctggcgcggggagggactggagggcctagaacagctccgcctgtgtgaggggtttcctcc

SEQ ID NO: 20931 - DNA, 2300 bp, Homo sapien
gaaacttacaacatggcggcaggggacgcaaacacatccttcacatggtgggcagcaaggagaagtataaacaaaagggggaaaaaccccttataaaaccatcagatcgtggccgggcgtggtggctcacacctgtaatcccagcactttgggaggccgaggcgggcggatcatgaggtcaggagatcgagaccatcctggctaacatggtgaaaccccgtctctactaaaaatacaaaaaattagccgggcgtggtggcgggcgcctgtagtcccagctacttgggaggctgaggcaggagaatggcgtgaaccccagggggcggagcttgcagtgagccgagatcgcgccactgcactccagcctgggcgacagcaagactccgtctcaaaaaaaaaaaaaaaaaaaaccatcagatcttgtgagaactcactcactatttcgagaacagcagcatgggggtaactgcctccatgattcaattacctcccaccgggtccctcccatgacatacggggattatgggaactacaattcaagatgagatttgggtggggacacagccagaccatatcagcccagtacatatttgttcgacaaataggcagaacgcctaaaaacagtttctttaagttgagtgacctgtgtcaaaatgattctgatggaaacatttgtctcaaaatgtacccgtgggattttgatttatgacacagagaggccaatgtcattggaaaattttgattacttgtatttcctgggaggacagggcacaccatgccacacaggtccacacagggaagcaccaaggtcagcctggaggcagaaaggagcgaggggatagcccaggccagagcctttcttggagtttccacagggtaaaccactcaggatttgtcagtttgaataattttagtggaccttgggggataggtgctgtccctggttgatttagggcaggggaaatattggctgggtgagagtgagataaggagctggtacggcatgtgggctgtgggtcacgggatttggagatgaagttggcaggcagtttggccctgtgaatgatggatgccctgtggacaaggacagcattcctgttcagaaccaagatctcccgaccttgctttcttttttggtttttgggtgacttaaacagcagaaacttattttctcacccttatggaggctggaagcccaagatcaaggtggcggcagggctgggttctcctgaggactctctccttggcttgcaggtggccaccctcctgctgcctcttcacacggccatccctctgtgccacacctttctatagtgaaatgtctcatagcctcttcaggggctctgtcctaacctcaggtctgtctttgtatctgcagtgtgttcaagcctcgagaccctcggtggtagctggtgactgccgtaggtggggagtagttactaggtctgaggctaccagatgtcagacctgtgtaccctgactttttttttaagacacaatctcgctctgtcgtccaggctggagtgcagtgttgtgatctcagctcactgcaacttctgcctcccaggttcaagtgattctcatgcttcagcctcctaaacagctgggagcttagatgtacactaccacacttggctaatttttgtatttttagtagagatgggtgtattagtctgtgttcacactgctgataaagacatacccgagactgggcaatttacaaaagagaaaggtttaattggacttacagttccatgtggccagggaagcctcacaatcatggcagaaggcaaggaggaacaagtcacgtcttacatggatggcagcaagtaaagagaccttgtgcagggaaactccccttataataaccatcagatctcgtgagacttactcattatcacgagaacaatcatgggaaagacctgtccccatgaatcagttacctcccactgggtccctcccacaacacgtgggaatccaagatgagattttgatggggacagagccaaaccatatcaatggggcttcgccatgttggccaggctgctcttgaactcctggcctcaagcaattcttcacctcagcctcccaaagtgctgggattatgggcatgagccactgcacccatccccatttgccttgacttctggcagccctaagccccaaaccaaaggtctctcgggctgagaacagctgtggtgccaactctgtcctgctcagcaccctcttgtcttttgccaggggccggggctgttcctgaggatgcagctggtgccctccatagaagagagggagacacc

SEQ ID NO: 20932 - DNA, 2300 bp, Homo sapien
tgttaggagaaccatcatattggattaagggcctaccctattctcctgtcgtctcaactcattacatctgcaacaatcctatttccaaataaggtcacattttgaagtactgggggttaggacttctcttttttggggggttcacagttcaaaccatagcagtctgttctctagtccccccaaattcatgtcctttccacatgcaaaatacactcacgtggtcccaaagttttaatccattccagcgtcaactctaagtgcaaaatctcatctaagcaccatcaactcaaagtttcatctcatctgatgagaatcccacaactcttcatgtcagtcatctacagcaggtatgagggagactcagagtgtggtccattgtggggcaaaattcctctccatctgcgaacctgtgagaaatcagaaagcaagtgatctgcttccaaaatacggtgatggggcaagcaaaggatagacattcccatttcaaaaggagaaaaaggggtcatgggtcctgagcaagtttaaaacccatcagggcaaatgctatgaggtttccaggcctggaacaaatcctctatggttggaagctctgacctctggacctcattttgggtaccttctattcctgttcccttagatgggcagaaagatttgagccaatggttggatacatggtctggtgttcagatgtgagagtcagcctggagatttgggcttcatcatgaagtttgggaattgacacccagagaatgggtgaggttgcacaccaaggcagagagaattgagggagacacgaagaggagggcctgcaacctgtggacgccagcaacatgttggagaagaagctcttacaggaaaaagaggaggctggggttgtgatcactgatcacaggctgggtgggctacaagaaggagggattggctaggtgcagtggcttgcagctataatcctggctactcaggaggctgaggtgggaggatcgcttgaggctaggaattcaaggctagcctgggcaacatagtgagacccccatctctaaaaaaataaaaaaaaaattaacagggtgtggtggtgcacacgtgtagtctcagctacttgggaggctgaagtgggaggatcacttgggcccaggagtttgaggctgcagtgagctgtgattgtgccactgcactccagcctgggtgacagagcaagactctggctcaaaacaacaacaaacccaggagagattggatgatgagcacacatcagtgggatttcccagcacggatggaggtcactggtgattccagggtggtgccagcccttggaacggtggagatgggaagcaagtgggaggggaggaagtgggcacagagggtagatagcccatgatagggaatgaagagatagaggtagcccaagggaaaagtggggtgttatggcttgaattgtgcccctccaaaaagacatgctgaagtcctaaccctgtgaatgtggccttattggaaatagggtctttgcagctgtaaccaagttaggaggtcacaaggttgggccccaatccaacatgactgtgtccttatgagaagaggaagacgccacgtgaagacagacacgcagggaggggaccgtgcgacggtggaggcagacattggagtgatgcatccacaagccaaggagccccaagtgtcgatggccgccaccagaagccagggaggggcaaggaaggactcttctcagagcgtcagaggaggcgtggccctgctgagcttaactttggactcctcgtctctaaaactgcgagaggatacatttctgtggttttaagccactcagtttgtgatactttgttacggcagctgcagaaaacacatgtggggtcagggattgggtgtgggtcaggtttaaaaaaagtgaggggaaaggtcccatcgggagggagaggtgaggatgcaggggatgagggatgatctgggagttgcttgcttgtctgtcataggccagaaggaggatgcctggtgcagagcgaggagtggtgttgatttgaaggcaggtgggaaggaagtttctttttaaggcagacttgcaggttggttgtggtttatctgcccttgatttgtggtaagtcctggagcaccactagccctgcagtgtagaggggcagagaaaggggccaggcagccggggaggaaaagctgtcccaaagctgagtcgggacagtggtgggggctgcaggagctttggagtctcctggtgaattatggagtctatggctcttgggatatggaatgaaggcgtgcgtgtgtgtgtgtgtgtg

SEQ ID NO: 20933 - DNA, 2300 bp, Homo sapien
ccaccacgcccagcgaatttttaaaacttttttatagagatggggtctcgttacattgcccaggctgaataggctgttttttttttttttttttttggcagagtattgctgtgttgcccagggtggagtacagtggcatggggcaatcttggctcaccacaacttttacctccccggctcaagcaattcttgtgcctcagcctcctgagtagctgggattataggtgtgcaccaccatgcctggctaatttatgtatttttagtaaagatggagttttgccatgttggccaggctggtctcgaactcctggcctcaggtgatttgcttgccttggcctcctgaagtgctaagattataggtatgagccacggtgcctggccctgaatgggctctttaaatgtgaagcaagactcaagaggcctaaatctcactggctgaagagactctgtacatttcttttttttttttttttttttttgagacagagtctcgttctgttgcccaggctggagtgcattggcgcgatctcggctcactgccagctctgcctcctgggttcacaccattctcctgccacagcctcccgagtagctgggactacagtcgcccaccaccacgcctggctattttttttttttttttgtatttttagtagagatggggtttcaccgtgttagccaggatggtctcgatctcctgactttgtgatccacctgcctcggcctcccaaagtgctgggattacaggcatgagtcactgtgcctggccgagactctgtacatttgacacaaatccaagtagtcttactttgctcatcagtgaaatggggttagaattacacatataatctggagaagatggaagaagaggtgagaaaaatacaacagaactttgtatgtctacattaataaatgttggttattagtcatcaatgtcatgaattatcccatgccattgaggcataggataatatggcttcaagtgatccccaagttgtcccgggctcaagtgatcttcctgctttggcctcccagagtgctggcattacaagcttgaaccactgttcctggctgatttataaaaaagcatttaaactgagatcattgctaatggttaatgagtcaaggagtcgctcaaatgtgaaccctcttagggcatcacccgctgattcccaggttgcccagtgtgtttttaaaactttatttatttaattttgttatttgtattattttctagagaagaggtcttgctgtcatccaggctgaaatgcagtggcacaatcatagctcactgcagcctcaaactcctgggctcaagtgatcctctcacctcagcttcctgagttgctgggactacagatgcacacaaccaccctcagctaatttttaaatgctttatagggacgaggtgtcactgggttgctcaggctagtcttgaactcttggcctcaagcagttgtcctgcctcagcctcctaaagtgctgggattacaggcatgagccaccatcgctggccccattactgcttttctttctgagttttgcagtgggtagagggtgctgagtagaggcactgcccactacccactactaagtggtagttggtagaggcagacttgttaagaaagcctaaatcccagttaacacttatttctgtttaattcataaatatgtacagcatttcctcccatgcttgccttattgggtggtggtgccaagtgactgtgagatagacttgtatgtagaggaaagggatagggtaaatgcttctaggtagaatgtgcatcactgcttcagatcaattcctgctcatttagttaaccatgcatggcacatagtaggtgtccaataggagtgtttgtgtgtgagagtcaaactaagcacagttccctaaggagtaagagccaaggattttttttttttttttaatttttgggatagggtctcactctgttgcctgggctggagtgcagtggcatgatcatggctcactacagcctcaacctactgggctcaagtgattgtcccacctcagcctcccgaggagtagctgggactacaggtgtatgccaccatgtctggctaatttttatttttattttttgtagagatgggatcttgctatgttgcccagggtcatcttgcactcctggcctcaggtgatcctcttgcctaggcctcccaaatgctgggatgacagtgatgctgggatgacaggctatgactgattaaaaaaaaacatttaaactgagatcattgctaatggttaatgagtcaaggcgtactcagatgcgagcctt

SEQ ID NO: 20934 - DNA, 2300 bp, Homo sapien
ggtctcgaactccttacctcaagtaatccacccgcctcggcctcccaaagtgctggtattacaggcaggaaccaccacacctcgcccacctgactttcttatctcatcacttagagtagatccaagggacatcatcatcatatcctgcgggagaaagggccaaaccacccttttgttttccatgacaggaacatcttatcaatatcctcccaggcagcaagccataccgcccagcccctcccgcccagacctgtaattaccccagcctgtaagcggcagtgggttctggcacgaagctagctcccccctccacaagtctcctgctggacataaacctgcattgctgtagagctgccaactctctgtctttctttaactctcactttcccttcaaaacctaacgggcccacacctggaatctctgtgctttgggaggctgaaacgggaggatcacttgagcccaggaattcgagaccagcctgtgcaacacagaaagaccctgtctctacaaaaataaaaaaaaaattaggacgggtgtggtggctcacgactgtaatcccagcactttgggaggccgaggcgggtggatcatgaggtcaggagttcaagaccagcctggccaacatggtgtgaccctgtctctactaaaagtataaaaattagcctggcatggaggcacgtgcctgtaatcccaactacttgggaggctgagacacgagaatcgcttgaaccgaggagacagaggctgcagtgagcagagatcgcaccactgcactccagcctgggcgacagagcaagactgtcaaaaaaaaaaattagcagggcatggtgccatacatgactataatgcacacccgttgtcacctacatgactacgcctgtattcctagccacccatgaggctcgggtgacaccttcgcaaattaaattaaattggtgacatcttcacaaatttacctggctccctcattcttgaatgtgctatgccaaagtaaaaattttaaatggtggtggggtcattaccccagagcaggaaagcatcactgtgaactcttcttttccgggtcccaggaggaggatcccgtgctgactgtcatcacctacatggggctgagcgtctctctgctgtgcctcctcctggcggccctcacttttctcctgtgtaaagccatccagaacaccagcacctcactgcatctgcagctctcgctctgcctcttcctggcccacctcctcttcctcgtggcaattgatcaaaccggacacaaggtattgacagcggtgttccagagggctcccttccttgacgcaggacacgctggctcatggaatgatgcggcatttgattccttaatataatagcccggctgggcgtggtggctcatgcctgtaatcccagcactttgggagactgaggtgggcggatcacctcaggtcgggagtttgagaccagcctgaccaacatggagaaaccccgtctctactaaaaatacaaaattagccaggcatggtggcgcatacctgtaatcccagttactcaggaggctgaggcaagagaatctcttgaacccaggaggtggaggttgtggtaagccgagatcgcaccattgcatgccagcctgggcaacaagagtgaaattccgtctcaaaaaaaaaaaaaaaaaaatatatatatatatatatatgtgtgtgtgtgtgtgtgtgtatacgtatatatacacgtatatatatataggcccttgagtcctggggaatattagaagagaacaccaccaatttcccattgcctgactcaactacacagcaaatattctctataatgccatcaaatatctcagaattctccccaacaacatggtacaggagaagccatgggccacactcaaatctgatcgccgctctgggcgtcttttacttctccgccaggtgctgtgctccatcatcgccggtaccttgcactatctctacctggccaccttgacctggatgctgctggaggccctgtacctcttcctcactgcacggaacctgacggtggtcaactactcaagcatcaacagattcatgaagaagctcatgttccctgtgggctacggagtcccagctgtgacagtggccatttctgcagcctccaggcctcacctttatggaacaccttcccggttagtgcaaattctcacaatccttatcttctccggcataaccatggccattgctagaacctagatagcatttttatgacacctgcttttaattagatcagtagggattttaggctctattggttggattacactgca

SEQ ID NO: 20935 - DNA, 2300 bp, Homo sapien
agctgggagctgcccagggaggcaggggagatggggaggactcagatgcttccagccatatctgaacaacagaaggcctgggccaccatgctcaccatgggacacctctgtgtggattagaaaagggaggagatggccaggcatggtggctcatgcctgcaatcccagcactttgggaggccgaggtgggctgatcacgaggtcaggagatcaagaccatcctggctaacacggtgaaaccccgtctaatactaaaaatacaaaaaattagccgggcatggtggcgggcgcctgtagtcccagctattcgggaggctgaggcaggagaatggcgtgaacccgggaggcggaggttgcagtgagttgagatcaggcaattgcactccagcctgggtgacagagcaagactccgtctcaaaaaaaaaaaaaagaaagaaagaaaagaaaagggagcagacagtggtgccttccagatgcttccgtgccaggaaacatggcggaccctcagccccgaaagctgctcacagctacgggcattcttcaccctctccttcctcttgcagatgtggacgaatgtcagcagaacccaaggctctgtaaaagctacggcacctgcgtcaacaccctcggcagctacacgtgccagtgcctgcctggcttcaagctcaaacctgaggacccgaagctctgcacaggtagaggccccaggaagacgctgtgaggctggacgggagctggggatggagctgagtcaggtcctccaaagcagccgaggaggagggagaagatccgcaggttcccacaaggtcaaggacctgctaagcccctgcctaaggattcacctcccaggaaggactcgccacacggcagggaggcggcagggccttcagggcttggagtgcccttgtgggcccccagacctcaccccttcctcatctgtcacgtgcgagtggaagaaggtgtcacttccagttctaagaaggggaacctccaccatagtgagggagggagcaggagagagattttagtcagaaagtccagctcccatgactcagtttcccttttggtttcacctcctataaactggggaccatggtccctgctgtgcccatctggtaggaagaccatcataagatgctttgaaggtgaagttgaaggtcaccaagtggtggcacgtgcaataatggtcttcagtctgaggcaatgaaaagataggggagtgggtgcagtgagtggagggcaggcccaggctggtcagggacagggtttgaccctctggctttgtcctcagatgtgaatgaatgcacctccggacaaaacccatgccacagctccacccactgcctcaacaacgtgggcagctatcagtgccgctgccgcccgggctggcaaccgattccggggtcccccaatggcccaaacaataccgtctgtgaaggtcgagagctcagatcccacgttcccagagacccacaaacatctgatcacatgttcaacggcgcccacacaaaccaagcagaatgagcgctggaggcgcccgactgtgtcaggcgttcattcttctgaggctagatgagaaaagagcaagggtcctgcggaaggagctggggtactgaggggggaggctcagggggaccccaggcaacagctgatgactcactgggaggaaggcgtttcaccatattcataacctgctcatctgcacggggcccacctgctgtgcccaggcctctccacgcttccataacccagcgtccacctctccaaggggggcactaatgccgggaggaacgagctgggggcacagacaggagacaggaccctctccaggctgggacaggacctgacccccttcttcctgtcctcagatgtggacgagtgcagctccgggcagcatcagtgtgacagctccaccgtctgcttcaacaccgtgggttcatacagctgccgctgccgcccaggctggaagcccagacacggaatcccgaataaccaaaaggacactgtctgtgaaggtatgacctggccctagaagctccccacccccagcacacacactgacacgctcccgcctaatgagccgcttgtcttgttccctacagatatgactttctccacctggaccccgccccctggagtccacagccaggtgagtggcccccacagggacgaggcggcgggaactccatccacacagcactgcatccgtctccttgttctaaacttcccacccgccgtccaggctctctgacccccacatctcctctctctgcagacgctttcccgattcttcgacaaag

SEQ ID NO: 20936 - DNA, 2300 bp, Homo sapien
taatagcattttcttggcaggatagcgagatctcgtctctacaaaaaaaaaaaacacttaaggagaaaactagccagacgtgatggtgcacagctgtagtcccagctcctcaggaggctgaggcaggaggatcccttgagccctgaagtttgaggctgcagtgagctgtgatggtgaccctgcactccagcctgggtgacagagtaagatctcttaaaaatatatatagcgttttaaaaaatgattacgtacctcaagagacaagctaatcatatgatttatccagaaaggaaagaaccctcctatcacatgattctctgttgattaacgaagtgcccaggggcctctgaaatataagtttcccacaggaggaaactggcttagaaagaccagaaagatccggggggtctgctctgtgcggtgaagcttctcttcttggcacctgcctggcatcggaagagggccccttctccctccctgggcttttatgtggacactgtaatgcctcagttttctttctttctttttgtttttgacacagggtctcactctatcacccaagctggagtgcagtggcaccatcttagctcaccgcagcctcaaactccccagctcgggtgattcttcctgcctcagcctcctgagtagtagcagctgggaccacagacgtctgccaccaagcccaggtaattttttttctttttgaagaaacagagctttgccatgttgcccaggctggtctcaaactcctgagctcaagcgatcctcctgcctcggcctcccagagtgctgggatcacaggtgtggagaaataggaacgcttttacactgttggtgggaatgtaaattagttcaaccattgtggaagatagtgtggtgatttctcaaggatccagaactagaaataccatttgactcagcgatcccattgctgggtatatacccaaaggattataaatcatgctactataaagacatatgcacatgtatgtttattgcggtactattcacaatagcaaagacctggaatcaacccaaatgtccatcaatgatagactggattaagaaagtgtggcacatatacaccagggaatactatgcagctataaaaaaggatgagttcatgtcctttgcagggacacagatgaagctgaaaaccatcattctcagcaaactaacacagaaacagaaaaccaaacaccacatgttctcactcataggtgggaactgagcaatgagaacacctggacacagggcgggaaacatcacacactggggcctgtcggggggtgggggcctgggggagggattgcattaggagaaatacctaatgtaaatgacgagttgataggtgcagcaagccaacatggcacatgtatgcctatgtatcaaacctgctcgttgtgcacatgtaccctagaacttaaagtctaaaaaatttaattaattaattaattaattaatttaaaaagaaagaaagaaaccgagcttcgccatgttgcccaggctggtctcaaactcctgagctcaagcgatcctcctgcctcgccctcccagagtgctgggatcacaggcgtgagcctctgtacctggcctcagtttcctcatctggaaaacagcaggggaagatactgccagctgggacgcaggctctgccaactctggcatgccaaagctctgggcacagggtgagccctaccaaagtgggagcccagagctatttctgacaaggcccctgcgtgcctgcccagggaagagccaagtggccccaggcgagaccgccccgcccggctgccacaccttcccctgcacagcagccagcctggaacacacagaggccagagggttggtcagagccacatggtggaaactccagcagagggatttttaaagcaggttgcacttcattcttgctgagcgagtacacgtgtgtgtgtgtgtgtgtgtgtgtgtgtgtgtgtgtgtgcagcgcccctggttctgtgtttttattgtgctttcctgctggcttccagctgcaccgccagttccggggagggccctgggccagcggctgtccgccccccctcctttataaagtcctggcctcgggacagcccgcacagctgcccagcctgcggagacgggacagccctgtcccactcactctttcccctgctgctcctgccggcagctcagctggaaccatgggaggccgcgtctttctcgtctttctcggtaagtactttggggccccgctgggggtggtagcgaggaagctccagcgggaccccttggatgcgtctgagaaacgggaggcg

SEQ ID NO: 20937 - DNA, 2300 bp, Homo sapien
ggtgactcacgcctgtaatcccaacgctttgggaggctgaggcgcgtggatcatttgaggacaggagttcgagaccagcctggccaacatggtgaaaccctgtctccactaaaaatacaaaaattatctagatgcgatggcaggtgcctataatcccagctactcgggaggctgaggcaggagaattgcttgaacccgggaggcagagattgcagtgagacgagatagcaccactgcactccggcttgggtgacagagcaagacttcgtctcagaaaaaagtaataataaataataataataataataaaataaaaatttaaaaagaatgtttcaggccgggcattgtggttcacgcctgtaatcccagcacttttgggatgccaaggcaggcagatcacttgaggccagaagttcgagaccagcctgaccaacatagcgaaactccatctctgctagaaatacaaaaattagccaggcgtggtggcttgcacctgtaattccagatacttgggaggctgaggcaggagaatctcttgaacccaggaggcagaggttgctgtgagctgagatcacatcaccacactccagcctgggtgacagagcgagactctgtctcaaaataaataaatgaatgaacaaataaataaaataaaataaaaatacaaaaattagccaggtgtggtggtgggcacctgtagtccgagctactctggaggctgaggcaggagaatcgcttgaacccgggaggcggaggttgcagtgagtcgagatggcgccactgtactccaacctgggcaacaccagagtctgtctctaaaatacagtaaaataaaattaaattaagaagagtcgatgatcaccatgaaggggtgtagggacaatccctggcatcaggaagtgccactacctccctgagattctgcagacgccagctgtctgacctgcccgtctgatctgcagagaagggacgttgagccctggggttctagctggagtttctggctttctgagaaaaaaaaggcaaaatccctccagacctggtctggccctctctccttccagcttctgctggtgttcactcccctcccccacagcccaggccacccccacaggagcccgggacaggaaggggtaaattctaggactgtggatgtttgattattcccaggacaatagttctctgacttcagtcattagtgacttttttctccatcgctgcaatctccccctttgaacaactgaactatattttccttagcattcatcacttctgcatcttgaatttactcatgtaacaaggagacttgatttcggcatcctcactgaaaaaccctcctcattgccccagatagtagggaaacctaaaaataaatataaatatgaggaacacaaaaccaagtccttgaattctggctggatacagacacctgctaagcctcagggtcacggaggcgctaaagacatgttagtgcccagtggagactttcccctgggctcatcgcagggactccagggctgggctgccggcctgtggatctgagtctcagctgggtgagtcacttgtgcctcagtttcctcctctgtcaaatgggaatgacaacatcattgcagatgttttaaggagtaaatgagttaatatagattaaaaaaaaaaagcacttaggaccagacctggtacaaattaagtgctccataaataatagcattttcttggcaggatagcgagatctcgtctctacaaaaaaaaaaaacacttaaggagaaaactagccagacgtgatggtgcacagctgtagtcccagctcctcaggaggctgaggcaggaggatcccttgagccctgaagtttgaggctgcagtgagctgtgatggtgaccctgcactccagcctgggtgacagagtaagatctcttaaaaatatatatagcgttttaaaaaatgattacgtacctcaagagacaagctaatcatatgatttatccagaaaggaaagaaccctcctatcacatgattctctgttgattaacgaagtgcccaggggcctctgaaatataagtttcccacaggaggaaactggcttagaaagaccagaaagatccggggggtctgctctgtgcggtgaagcttctcttcttggcacctgcctggcatcggaagagggccccttctccctccctgggcttttatgtggacactgtaatgcctcagttttctttctttctttttgtttttgacacagggtctcactctatcacccaagctggagtgcagtggcaccatcttagctcaccgcagcctc

SEQ ID NO: 20938 - DNA, 2300 bp, Homo sapien
attggacatattaaaacagaacattgccatacatttccgctatcttcagcaccaggaactggtgggactgtggggttgtcatattcagcaatgccactgagccaagaaagatggtgggaaaatgataaattgccacaaagctgtccaacctggtttcagtcaccttttttaaaaaattaaggattcactttgttgctctaaacctttgactgttttccagattcctgactgatatggtttggctctgtgtccccacccaaatctcatctcgaattataatccccaaggttgagggaggggcctggtgggaggtgattggatcacaggggcagtttctaatggtttagcaccattcccctagtgctgtcttgtgatgggattctcatgaaatctggttgtttaaaagtatggtgctaccgccttagcgcgcgctctctctctctctgctgccatgtgaaaaaggatgcttgcttcctcttccccttccaccataattgtaagtttcctgaggcctcccaagtcatacagaactgtgaatcaactaaaccactttcttcataaattacccagtctcgggtagttctttacagcagcgtgagaatggactaatacactgatcaagttgattatgacagctgccacggtattatctatgtttctgtgaagtattggtactttggagttctctacctaaaattcaaaatatatcctaaaatcgcattaatttaatacgcagtacctataaaattttttaaccatattttaccaaaatatttttttaaagcataatgtctgactggctttccagtgacagaacagaaactcacaaaacgaacatgtaaaataatgtaacatatgatcacataaacaatgcaaattattgtaaacatgtcagatgtttgcactgaaaaaatgaaacattggctttataaacaaaggttggaatagctgagaacaatgtgtgaaaagtatcaactccatgcagatagcagggggaaaaagcatagttattgagctcctgttttgcatgcatattaggtaatgaggaatgagggaagacatggaggagaacaaaggtgagaagagctgagaactagaagctgtaagtgtccaagaccattgctactcaaatattaatgaagctgctacattgtctggagtatataccctggggttcattggcatgcactaggaaaatttagaacacggacacacacgaggagttcagaggcggaggtttaatagggagaagagaagaaaaagagaaacacctctctccatagagaaaagggtctccgagaggaaaggacaggctggtggtgaatgcgcagagtttaatagtcccctttgaggaggcagtgtctgatttacatcaggctcacagattggttccatcaggtatgacattttcatagtgctcagggaaggctggtggccccaccctaatcttactttgcaattggactttccagttgatctgcgccatcttgtctgctcgtggctgacaaagagaagggaagatggagccaccatcttgaaaacttctagtccttagttcctgccggcattcacccgtgcaagctcccagcttgtttgtgtctgcagctcgcctttacaggatgctctttgttagaaaatgatttggggctgcttttcattaaaaagaaaagcctcactgaggactcccataaccttactatctgcgtaagtgattttttcttaactcctatatcactaatatgcatgtgaaacccttggtgatattgttaaaatgtagattctgaatccgtaggtctgaccagggattctgcatttaaagaaactcttgttgatcttgttggttcatggacaacactttgagaagccaggctatagagggtacaagtattatggaactaacactacatttccagatcccgatggtagcaaagaaaaggatggaagaatttcagatgccccagaaaaagacagcaagaaaaaggcaatcttttgttaattgattccttcacttaaaattaaatgtaaccaaatttccatgttgccagtgtgttgataattgactgttgcttttttctctcttgtggcagttattttatccccatggaaacaggaaatcaaacacatgcccaagaatttctcctcctgggattttcagcaacgtcagagattcagttcattctctttgggctgttcctctccatgtacctagtcactttcaccgggaacctgctcatcatcctggccatatgctcagactcccacctccacacccccatgtacttcttcctctccaacctgtc

SEQ ID NO: 20939 - DNA, 2300 bp, Homo sapien
tattttgccaggcatcgaggagatacaatggaagctgaaatgtaaccataaccagggtcgcttttattttccatcctataagatccccagcaagcctttgtctccttggagtcagttcctttcttgctaacctacccgttgcacccttgcaatgtatttttgtccttttgctgagggattacctgagtttattagactttttccttactggggtctgtttaatttctctcactctgtttattgaacagctcttttatgtttctttaaacacagggctgaaaacagtcataccaaaatggaagtccaagtttacatgtgtatacagacttgtgaactggaatttcttgtaccaattctacattctgtagggaaaaaagaatctgatattaaaagctttccttgagccaaatgcagtagctcatgcctgtaattccagcactttgggaggccaaagtggaaggttcacttgaggccaggagttcaagaccagcctgggcaacataggcagacctggtctccacaaaaaatgtagaaatcagccaagggtggcggcacatggctgtggtcccaactacttgggaggctgaggcaggaggatggcttgagcctgggtggttgaagctgcagtgagctatgatcacaccactgcactcctgcctgggccctcttcggccagtgtgctgcatgtgtatatgtgtgtgtgagtgagtgtgtggctgcatgtctttggagtgacagcaggtttcagagcaagagggacctggcctcaatatattttattataaaggagaccaatgaaacagaggccagaacccaagacaccagaaggaaataaagaggggatgcatttcaattgatgtgacacctttctagtccagttaataaagtgcaggtgcaacagcatctagacagatggacactttgtcccttgatgttttgacagccaggtccccttattctgcaacatcctctgacaccatgtcccatcactctccgtcttactgattccctggccacactggcttctgtgttggacttgaacatctgaaagaagcacgtcccaaccaggtgcagtggctcatgcctataatcccagcactttgggaggccgaggtgagcggatcacctgaggttgggagttcaagaccagcctgaccaacatggagaaaccccgtctctactaaaaatacaaaattagctgggcgtggtggtgcatgcctgtaatcccagctactcgggaggctgaggcaggagaatcgcttgaacctgggaggtggaggttgcagtgatctgagattgcgccactgcgctccagcccggcaacagagcgagactctgtctcaaaaaagaaaacaagaaagaagcacatccctcaaagtttttgtactgccattcctcctgccaggcacccacttcaacagataacttcatgaatcttgccctgtcttccttgagatcttttttcaaacatcaccttgtttgcaggtcttgaataataatcagcaaacaaacaaacaaaaaacaaaagaaacacttcataccctccctcctttttacctgctttgtttattttccaagcgcctgttcccatctgacatattatgtgattgtttaatttgtttatattcgattgtttaatttgtttatattctttcttcatcattagattgtagggacttttgtttctcagcattgttcactcattatctagacagtgacaagaacatggtcaacattcaatttatattcctcaaattcatagaagaagttctcattctttttttttttttttttttttttttttttgagatggagtctcgctctgtcaccaggctggagtgcagtggcatgatctcagctcactgcaacttctgcctcccggggtcaagagattctccttgcctcagcctcccaagtagctgggactacaggcgcatgccactacaccaggctaatttttgtatttttactagagacagggtttcaccatgttggccaggatggtctcaacctcttgacctcgtgatccgcctgctttgacctcccaaagtgctggggttacaggcataagccaccgtgcccagccagaagttcttattctaactgcagaatgtacgctgtcttcagttaaggctgagagtgggaaggagttcctaatcagagatgacatggagatcccttaaagagaaccagattcatacacaaaatgtaagataatttattggctataaaatataaatgatggtatttctgaaaggttagcaatgcatgcctgtctcgtttccctctttctctctctc

SEQ ID NO: 20940 - DNA, 2300 bp, Homo sapien
tttttttctttttttgagacagagtttcgctcttgttgcccaggctggagtgcaatggcacaatctcagctcactgcaacctccgcctcccaggttcaagcgattctcctacctcagccccccgagtagctgggattacagccacctgcctccacacctggctaatttttgtatttttagtacagacggggcttcgccacataggccaggctggtctcgaactcctgaccacaattgatctacccacctcagcctcccaaagtgctggaattagaggcgtgagccacggtgcccagccaggattcaatagtatggtctaggaaggacattgcatgttacaggaagaccagaaccagaactagtgcaattccataggactgtcaaaaagagttcaaatcccaaagaccctgaataattaaagaagagatgccacatgaataattaaagaagagaaatgagaaggctgtctcacatgctatcagaccatttctgaattctcgtggggaaagataatttgaaattgacaacttgcctggtattcgtttctttctaacagtgtaaccagggtgagaaaagcacaagagtaacatggctccagggagctacagtgtgctgcgtgcatgtaggcaatgtgtgtgtgtgtgcgtgcgcgcacgcacctttagcataaaagcaggttgcagagaaaggggatttgggctctgtattccaaaaggtatctcataatagaaaagccagaagtcaaagacacggcgggaaaaaaagaggggatgcattacacatactgagatgccttcgcaggcaaattaataaaatgcaaatgcaacagcatctggtcagacggactccttgtgtctttaagtttcagcagcttcaaggccacctcatcccacaacatcttctgaaaccatctctcatcactctcttcctgtacattcccctgacacactggcttccttgagcaccttgaacatctgaaagaagcacattctgtgaagtcttccactgagccttccttccccttgcacagactccagcaagggacatgatgactctcgccctgtcttcattctgctctctgttcagtttttagcttgtctgctgatcttgtctgtacacctattaaaagtaacactttttatcctttttattcataggactaatcaccaactgacatagtatatatgtatttgttcccgttatttgattgtagggactctgttttatagcaccattgactcattatctatacagtaccctgaacatcaactcattttttattccacaaatgcatgaatgatttttctctttaatgatactgtagaatacatgccctcagggaaaggctgagagagagagagagagagagcgagagagcgtggtctaggaattcctaatcagagatggcaaggagatcttctaacagggaccagatttacacacaaaacatagaaaacagcttcttgtagaatggagattactagaggccagggcaattggtatggaggcttgaggtgatgtcagtcaagggatacaagatgataattagatagaaggaataacttcaaaatatttattttacagcatggtgaatatagttcatgatgatatattgaattattggaaaatgccaagaaaatggatgttaagtgttctcgccacaagaatgatgactatatgaggtaatactaatgttaattggctagatttagccaatccacaatgtaaatatacttccacatgtgatgttatacatgataaatgcataccattttatctgtcaccatagaaataaataatttttaaaggaaaaataagttcttgactccggagtataaatgagagaatttctgataggtttgtaatgcataattacattgtcatattctctctctttttggtagtcacattgaaaagatgcaaccaagcctgggcacaatggcttatgcctataatctcagcacttttgtaggctgaagtgggaggatcgcatgagtccaggaggttcagaccagcgttggcaacagagtgagagaccctgtctatgttaataaataaataaataaataaataaataaataaataaatagaaaaaaaaagatggaaccagagaatgacacagggatttcagaatttgttcttctgggactttctgaggaaccagaattgcagcccttcctctttgggctgtttctgtccatgtacctggtcactgtgctcgggaatctgctcatcatcctggccacaatctcagactcccacctccacacccccatgtacttcttcctctccaacctgtc

SEQ ID NO: 20941 - DNA, 2300 bp, Homo sapien
atttttaatttttttagggtgggtgcggtgtctcatgcctacaatcccagcacttttggaggctgaggtgggaggatcacttgagcccaggagttggaggctgcagtgagctgcactcctgcctggttgacagagcgacattctgtctcaggtcttgaactcctgggctcaggtgatcctccccactcagccacccaagtagctgggattacaggcatgagccacagcagctggctcaatttttaaaattgaggggaattcacataacacaaaagcaaccatttgaaaacatataattcaatagcatctagtattttcattatgttgtgcaataattgtcacctctatctcgttctgaaataacatatttttctttatatgaatgcagttgtgaaatagaattttaatgtaggcttttttttaatgaaggaaggggtgcacaaagagaaaagttcctcaggcccatgaaaatcacaatttctgagccgccctgtacacgtgaggtgtttagttggtagacagatgggcaagttttaatttttatatgcattttatttaatgttgatgaaaaatataattcacatttcaagtaggggtctaaagtttccattttagatacatttttaattttaattttaaaagtatttatttatttttattttgagacagagtctcactctgtcgtccaggctggagtgctgtggtgcgatctcggttcactgcaacctccacctcctggattcaagtgattctcttgcctcagcctcccgagtagttgggactacaggcacctgccaccacgcctgggtaatttttgtatttttagtagaggcggtgtttcactgtgttggccaggctggtctcgaactcctgagctcaagtgatctgcccgcttcggcctcccaaagtgctgggattataggcgtgagccaccacgcctggttcggtactgttttttaggtaagtgaataaggacacatggatatggccaaatataaagaggagacgcaaaagcctgcagtttgggaaacatcagtacagtgcctgccaccccagaggggctcatgaacatcacactgtggccaagaatcattatcatttcattcccaagggactccccgctctcctgactccccgctctccctgttgctcacctgggcattcaggcagaatagctgcatttactgggcacctgctgtttgccaggcacctgctgattttgtccttgtgaaaagcctccaggctggacacaaaaccgtcctaatttgggggactagcctccgggtgctttgtctagggctccgtatgcagctggcacttcacaaaggcttgttaatttcccttgagccactggggcagcccccagaggcttgtgatgatctcagtgaaataagagtgggctggagtcagggtgtgtcaaaaaggtccattatttttgtggtttcctcctcttcccagccattctcaggaatgattctggagacttgacgttttcctgccaagacctgtccttagaaccgggcacatcgcaacagacttaccttccccctcccctgccattttgtttttagttatatttttatttacttgttgttcttagagacagggctgtgctctgtcactcaggctggagtgcagtggtgcagtcacagctcactgcagcctcaaacttctgggctcaagcgatcctcttgccttggccttagaaagtgttgggattacaggtgtgggccactgcgcctggcctttgtgcttttttggaggggtggaggtctcactatcttgctcaggctgggaagatcatagatcactgtaaccttgaactcttgggctcaagtgatcctcctgcctcagcctcccaaatatttaggactaccacccctagctgcccaggccagtcttgaactcctgggcgcaagtgattctcctgcctctgcctcccaaagtgctgggattacaggcgtgagccaaaacacccagccacccccgccttctgagagtcctcaggaagcgctcattacccttcgcagccttcgccatctgcccacgccggccttctgtcctggccctcaccagccccaggcttctctgtttcccgcagatagaccatgagcagccatggcaacagcctgttcctgcgggagagcggccagcggctgggccgggtgggctggctgcagcggctgcaggaaagcctgcagcagagagcactgcgcacgcgcctgcgcctgcagaccatgaccctcgagcacgtgctgcgcttcctgcgccgaaacgccttcattctgctgacggtcagc

SEQ ID NO: 20942 - DNA, 2300 bp, Homo sapien
gtttttctcatgcttaggcttgagttatggtttctttgggatcctccctgattgttacgggtgtaaagggcttgcaaggccaattgccagggaacaactgctattttatttacttattattttgcgtgacagaccgagggctctgttgtcttcgctgctgagtctccagcctctagcacatccaagtgcacagtaagtatttgtggagtgaatgaccgtaagaggcaggagttcaggggcagctctaggttcaagaaggatgcagaatcgtctaagcacagtgagtgactgaagcagcggagtgagaaggctgcagagaggggttgccaatgtggtccaggggaatctgacatctaggacagagattcagccttagccatacattggggagcattcaaatatactgatgcctgggtcccacttccaggtatgctgatgtgcttggtatagggtgtggcttgggcatcagatatcttttcttttctttcctttttttttttttagacaaggtcttgctctgttgtccaggctgaagtgcagtggcacaatcatagctcactgtaacctcaaattcctaagctcaagtgaccctcctgcctcagcctcctgagtaactgggactacaggtgtgtgcccagctaattttttgattttttttttttaaatagagacagagtcttgctatgttgcccaggctgatcttgaactcctgggctcaagtgatcctctctccttggcgtcccaatgtgctgggattacatgcatgggccactatgtcaggctggcttcagaatttttaaaacctctccaggtagttttaaaatacagctaagtttgagaatcacctatctaggagttgttgcaaagaagcagagccagggcgatgcatgcaaagaattagaattggggcatctgtttcctggctgtgtgaccttggacaagttattgaacctttctgagcacctgtccccgccctgaaaatagaggaagtgatatatactttataggagtgtgtagattaaatataagtattaataaaagagcctgcctagttcaggaggtcgccatcaacacttcatcaacaacaacaacaataataaaaaacattgaacgtgcactgactttttttttttttttttgacggagtctcgctctgtcacccaggctggagagcagtggtgcgatctcggctcactgcaacctccgcctcctgtgttcaagtgatcctcccgcctcggcctcccaaagtgctgggattacaggcgtgagccaccgtgcccagcctgcactgagtttttattcatacgacagacctgatgctcagatctttaaatggcattagctctcaggagaggcagaagatgtgggaagcaaccaagtcattgcctttcgagaagaaaagtcgagtgcaccttgcctggtgtgctctaaagacagcaaagaataatattaattacaataggaacgacattatccatctcccatttgcccagtgcttcgcgctggcacggagcatttccagcctcacgcgctttaattttctcagctttaattttctgtggggtcggccaagccatcttccttgtttagcggaggaagccaggctcagagagggagaggagttggcccaagggcacacagcagccaagtggccaaggccggaaggtgcacccgcaaggagaagggggcagcggagccctctccctggctgttgttactgggacactagagccgcgccttccccaggcctccgccgaggctgctggagcgggtcccgcggtgccagggcctgttccccgcgctccgccagggatgctggggcctccgagggctccggaggcggtttagggggcgggggcgcggaggcgcggctccgagcagggggcgggggctggatgccggagaggccactcacccccgcccacccccagtccccctcccttcgcaagcacgctgtcccccttctcccacacggctgcggagcctgggctgggcgcgggggaggcggagggcatcgcggaggggatcccgccccctcccccggccgctcggtgcccccacacccacgtgagcgcagggccggcccggatccctcccgcagcatagcgcgtcccggctccgcgccggtgcctccacggtccggtccccgcgccggtgctgcacagtccctggcgggtccccgcggccccggccgggcgcttcgccgggctccggctcctgcatccgggcgcagcgcgcaggccgaggcgcgggcaggccgcccccgccgctccggacgccggtgagtggggactccgcgg

SEQ ID NO: 20943 - DNA, 2300 bp, Homo sapien
attcactatagcaaagttatggaatcaacttatgtgtccattagcagatgattggatgttaaaatatggtatacaagctgggtgcggtgatttccccctgtaatctcagcattttgggaggtcaaggaagtcgaattgcttgagtccaagagtttgaaaccaacctgggtaacatggcaaaaaccccacctccactaaaaaaacaaaaataattcgcgttttttttttttttacaggcaggcacctgtaatttcagctattcaggaggccaaggtgatggaatcagctgagcctgggaggcagaggttgcagtgagccgagatcatgccactgcacttcagcctgggaaattggagtgagatcttgtctcaaatatataaacatatatatataaaatatacatatatgctatctacacagatcacatagatatgctatctagatagcatatatatatcggatacaaatgccctataaatagcatatctatcatatatctagatagcatatatatatcacatagatatgctatctagacagcatatatatagcatatctataccaaatacatatgccctatatatagcatatctatcacatagatatgctatctaaatagcatatatatcacatagatatctatatatctataaatatcatatatatgctctctagataacatatatatcacatagatatcctatctacatggcacatatatatagcatatatgtcacatgtatgtgctctatatatagcagatatatatcacatatatatgccgtggaatacttagccataaaaaacagtgaaatcttgtcttctgcagcaacatggagggaactagaggccattatcttaagtgaaatgaccgagaaatagaaagtcaaaaaaactcatgttctcacttctaagtggaagctaaaccatgggtacacatggacaaacagagtggaaaacagacattggaggctcccgtaggtaggagggtgagaagggggtgagggatacagtactacctattggctacaatgtacactatttgggtgatgattgcactaaaagcctagtcttcaccactagaaaatatatccatgtagcaaaactgcacttgtatcccaaatccataaaaataaattttttttaaaggctcttaattcttctagggcaggtgagagatgcccaaaagttaaaaagtaaaccaataaatgaataagataatttcagatagcggtgagtgctatgaagacacgaaagaaaatgtaagactaagccaggcgtggtggctcacgcctgtaatgccagcactttgggaggccgaggcaggagaatcacgaggtcaggagttcgagaccagcctggccaacatggcgaaaccccgtctctactaaaaaaaaaaaatgcaaaaaattagctgggcatggtggtgggcgcctgtaagcccagctactcaggagactgaggcaggagaatctcttgaacccgagaggtgaagattgcagtgagcccagctcgcaccactgcactccagcccagacgacagtgcaagactctatgaaaaaaaaaaaaaagaaagaaagaaaaaagaaagagagagagagaaaagaaaagaaaagaaaacgtaagactaaaaaagctacttttgggtagtcaaggacaccaagaacccagccagcaaaaatctgaagactgcaaagtggccagccatgggagtattctacctgtgggaacagcaagtcccaagcttccaagtgtgaaggcgcttcggacaccctgaagctgaaagaagggccatgtgctggaaggtaacggcgagaggaatgcctggtgagaagcctggcccttcttccatgcttaccgacatgcgacagagtgtgacctggacagctggaagcgcttaggacatcctaaagctggaagaagggccatgttgctggaagcaacggcgagaaggatgctagatgggctctttctcaaggagtcaggatgccagtgcacttaggccaagttccaaagcaaagactccatcctactcctccccccacctctggaattccacctcccttgttgcgcccatcgctatggtgacgggcgctctcagtacactgtctctacaggccaggaaagagttgtgtgtctttggggtcccttccgctccgcctagggttcccggccaggccgagagaccaagcagggaccatgcgcgtgttggtacccccggctgagcgcagccaggacacacgcgttggggccccagcatggcgcgaggcagctcaggccatggcgaggaccgcgcacat

SEQ ID NO: 20944 - DNA, 2300 bp, Homo sapien
gctgttaagcacctagagctctccccaggtcctttgcggatgggaaaatcgagtctcagagaggagagtgagatgccgaaggtcacacagctgggaagggactgaggcaggattcggttctggctccagggctatgctccttccacttcctccctcacaatctttggctcctctttcgtcacagcacttgctgtgtgtgtgtgtgagtgtgtgtgtgtgagagagagagagagagagagagatttaatattcatttctgtcacagactagagctacagaaggacagaaagtcagggagcatgtctgtcttacttaatggattctaagtgcataacacataatagatacccagaaaatatttgctgggtaggtgggtgggtgggtggatggattgatggatggatggatggatgggtgggtgggtagatggataagtaaataggtggatggatagatggaagatagagatgatggatgaaggaatggatagaaggagggctagatggagggatagttggaagatagaatagatggagggatggaagacagagagagataatggatgaatggatggatggatggatgaatgaatgagtggttggatgaataagtggatggatagatagatggatgggtagataaatgggttgatggaagaatgaatgggtatatgggatgactgattaatagatgggtagacagacggatgaatagatgtgtgagtgggtggatggatggatggatgagtggatagataggtaagtggaaagataaattggtggatgggttgatgaataaaaggatggatgttaaattggattgatggatgactagatagatgtgcgggtggaaggatgggtggatgggatgactgattaatagataagtagatggacagatgaatagatggaagggtgagtgggtgaatggatggatagatgatgaattaatggatagatggtagatggatagatgaatgaattgatgggtgactggatagatagatggataaaaacatagatgaatggatggttgatgggggaaggcatagcagatattatgccaccaaaattgtcagagaaggatctagatagaaaaaaaaaaagcattcccggtggggtgcagtggctcacatctataatcccagcactttgggaggctgaggtgggcagatcatgaggtcaggagatcaagaccatcctggctaacacagtgaaatcccgtctctactaaaaatacaataaaattagccaggcatggtggcgcatacctgtagtcccagctactcgggaggctgaggcaggatcatcacttgaacccaggaggcagaggttgcagtgagccgagatcatgccactgcaccccagacagcctgggtgacagagtgagattctgtctcaaaaaaaaaaaaaaaaaaagcaaaaagcattccctactgaggagaaagtgtaggaaaaggcaaagagatggggaaatgccaagagtatgacaaaagtctgtctgtgcagccagagaagagaacaggactcagagatgagaatggagaatgtggacagacattcagactcaaggaagagcaagggaggtggattgaccccttcgtattggagacccagtgagataatatcaaagttgcattccccacttcgatgacattctccttttaaacactcctccaaggcatctctttgagatggcttccccagcccgtcatctcctaggtagaagaggcaaacacatgggtcacttgccctgctcctcattccagggctttcaggggaagttcagtccaccagaagctggtgaatgacccacgggagacacaggaagtttttgggggcggagtgggggacattgtggggtaggctcagcagttctgaagaagacatccagaaatggaagacatcgtgaaattgtcattctaggggtgatatattactacttcatggattatcatctattgcccagatctgtccacagaccaaatccccaccacttgagtgctatttggtctcaaaaatccagatacataagccagtttgtcccctgagcccctcggcctccctttagagaactttaacctatcttctcttgactccaaggatcagacaagggtgctgagagccgggactcacaaccaaaggagaaatgagcaatccgcggtctttggaagaggtaggctgggtgcaggttgaggggagggtgatcatctggggagaaggaaggtgaggattttaatgttttggaaagagtggagggactgaaaaaatcatgatctgaactcagagctaggaggtact

SEQ ID NO: 20945 - DNA, 2300 bp, Homo sapien
tgtaaaccaaaaggtatctcagataagtctcaataaatttagaaagcttattttgccaaggttatggacatgcctgtgacacagacttagaagctcctgacaacataaactagggtagtcagggccactaccttgattcaggtctgtaatcctagctacttggtaggccaaggcgggcagatcacttgagaccaggagggttttttgttttgttttgtttttttgttttgtttttttgagacggagtttcactcttgttgcccaggctggaatgcagtgacacaatattggctccctgcaacctccgcctcccgggttcaagagattctcctgcctcagcctcccgagtagctgggattataggcatgcaccaccacccccagctaattttgtgtttttagtagagaaggggtttccccatgttggtcaggctggtctcgaactcccaacctcaggtgatccgcccgccttggcctcccacagtgctgggattagaggcgtgagccaccgcacccagccgagcccaggagtttgagaccagtctgggcaacatgatgagactctatctctacaaaaagtagggaaattagccaggtatggtgacacatgcctatagtcccacttgctcgggaggctgaggcaggagcatcacttgagcccaagaggctgagactgcagtgagctgtggtggtaccactgcactccaccttggtctagttttatatattttagggagacatgagacagcaatcaatatatgtaagatgcacatgggtttggtctgggaaggcaggacaactcaaaagtagggagaaggcttccaggttataggtggataagagagaaacaattgcattctttcgagtttctgactagcctttctgaatatgcaatttacagagatagtcacttatgccttagtctggcttagtgaaacaaataggtaaggaagcgatcagatatgtgtttgtctcatgtgagcagagggacaattttgagttctgcctgtccttcatccataaggaatttccttgtaggcaaattgtgggggaggtatgtagctttttttttcttttcttttcttctttttttttagacggcatcttgctctgatgaccaggctagagtgcagtggtgcaattttgattcactgcaacctccacctcccgtgttcaagcaattttcctgcctcagcctcccaaatagctgggattaccagtgcccacccaccatgcctggccaattttttttctttttcatatttttagtagagatggagtttcaccatgttggccagcctggtttcgaactcctgacctcaagtgatccgtcgcctcagcctcccaaagtgctaggattacaggagtgagccaccgcgcccagctagcttttttaaccttgtagctatcttacttaggaatagaatgggaggcaggtttgtcctacacagttaccagtttgacttcttccttttggctcagtgatttggaggtctcaagatttattttcctttcacaatcacgacatggttgttttacatcattacgtttggggatggtttgtcaaacagcagtagtaattggaatttggaggtgagagaattgagtggggaaagagtggcatggggagaccaaggaagaagcttggggtggggtgggtagtggggacggtcattgaaacgaatgacactacggcttgcaccaggttgaagcagtacctggcaaggagagagaggatacgtggaggctgcgatttggagacagacccaagagaacttcctggatgccatcacccagagtcccatccagggagggtgggtgaggtggaagacaagggatcgggcctgcgccacgatcgtcacgtcccatcgaagctggagcggatccgggcacccggagcccccattccaacccctcccggccccaggcaactacatctcccagcatcgcccgctcgggccgcgggaaaggggaaaaaaaaaaaaagtttgggccaagcattcccggaatgtgcttcctgctggcgcggggcggggggcgggcggggaggcccgggcggggcggggagggcgcggggcggcgcggccggagcccggggcgcgcactcggctcggcccggcccgggccgcagcatggccgagccgctactcaggaaaaccttctcccgcctgcggggccgggagaaacttccccggaaaaagtcggacgccaaggagcgcggtaagcggagatcggtggggaacagggggcgccgagccccacccggcctgggagcggggtcccagggccccgaggacagac

SEQ ID NO: 20946 - DNA, 2300 bp, Homo sapien
ggcaggtttgtcctacacagttaccagtttgacttcttccttttggctcagtgatttggaggtctcaagatttattttcctttcacaatcacgacatggttgttttacatcattacgtttggggatggtttgtcaaacagcagtagtaattggaatttggaggtgagagaattgagtggggaaagagtggcatggggagaccaaggaagaagcttggggtggggtgggtagtggggacggtcattgaaacgaatgacactacggcttgcaccaggttgaagcagtacctggcaaggagagagaggatacgtggaggctgcgatttggagacagacccaagagaacttcctggatgccatcacccagagtcccatccagggagggtgggtgaggtggaagacaagggatcgggcctgcgccacgatcgtcacgtcccatcgaagctggagcggatccgggcacccggagcccccattccaacccctcccggccccaggcaactacatctcccagcatcgcccgctcgggccgcgggaaaggggaaaaaaaaaaaaagtttgggccaagcattcccggaatgtgcttcctgctggcgcggggcggggggcgggcggggaggcccgggcggggcggggagggcgcggggcggcgcggccggagcccggggcgcgcactcggctcggcccggcccgggccgcagcatggccgagccgctactcaggaaaaccttctcccgcctgcggggccgggagaaacttccccggaaaaagtcggacgccaaggagcgcggtaagcggagatcggtggggaacagggggcgccgagccccacccggcctgggagcggggtcccagggccccgaggacagacggtgggggggatcagggggagccccccgcaccccgctgcagactggggtgcctccagccaggggagggtaggggtcctggaaggaaggggctgggagggaggggggcgcggaccgttatgtgctgctggccggggatgccagcgctgcgggctccttgggaggcccgggagggggcctcgcccacgacaggaaatggggccgcgactgagggcctggagggtggaggggaggaggggctgggaggccgggacactggggcccagtcgggctgggcaaggggcatcgggagccctggaggcgcaggatgggagatgggaggcgtactcctgcaaaggaaagagaggggcggcccgtcaatcagagtagctgccccctccgcctcccacctactaacagtgacggcaactgcgcctgccttagccccaggaaactgtcccttttatacagatggggaaactgaggcacggagcaattgggtcatgtgcccagggccatcgacttaaacagctctttggactatgctacaaacagagaccctagagggtggacatcagaggtggccagaggaggagttcagcagggtagcaagtaaaaaccttagagaaacagctgcgtgggatagggggacccaggaaggaaggagttaaaggaggaaggccagaccattccatggacgtaccccttccccccaggccttcccaaagattcccaatgttcccagggaagggagaagggacagagatgcccaaacacaaacacacacaggaaacagcccaggacatgagacaggagaggagggagggaaggggaagtcccaaagcattgagcgtggggggtctggcctgggctgagggacaagggcccatcccaggatggcgacagagtttggaagacaggagggagggtaaaaggggcaggggactgggagtgactgtgctgcagggaatagaaaacccagctcctcactcctgagcacgtagtgcctgctgtgggctgtatacttttccaaaaggctcctggaagcctccctggacatggaaatcacatccccccatttcacaggaggatactgagcctcagagagggaagcgacttgcccaaggccacgcaggtgcaaagctccatgccacggttattgagagggtagaggaagtggagactggaacgcagtacctacgggccccaggaagcctgacttagaaccctgaggctgcagggatggagtccccttttgggatgccagggactgagtagggggtgctctaagctgataactgagatcgctagcctgtggctgcctattccaaacaaaacagcaggatccaaggaaccatgacttatcaggggccggccagggccgtacacagcatcccacccactgatcaattgcacagggctgctctgcaggcagtgaggggctgggtgggtc

SEQ ID NO: 20947 - DNA, 2300 bp, Homo sapien
ggcgagatctggtacaaccccatccctgaggaagaccccagacctccagcacctgagcccccggggccacagcctggctcagctgagtcagagggcctggccccccaaggtaagaacaagcttcccatccccttccccaaggtgagcaccagctccacatcccttcccttcagggtagcaccagcctcacactccctcctcccagaggagcaccaacctcacactccttcccttcaggggagcaccagcctcacatccccaccccgtcagatgctcccagaggagcatcagcctcacaccctcctccccgccaggggaacaccagcctcacactccttcccttcaggggagcaccagcctcacccccctcccctaagcccaggttcctggaccctgaagtctgctctccacacaggtgcagcccccgccagccccccaaccaaagcctcccgcaccaagtccccgggccccgccaggcgcctctccataaagatgaagaagctgccggaactgcggcgccgcctgagcctgcgaggcccccgggctggcagggagcgcgagagggctgcccctgcgggctccgtcatcagccgctaccacctggacagcagcgtggggggccccgggccggcagcagggcctgggggcacccggagcccgagggccggttacctcagcgacggggactcaccggagcgcccagctgggcccccatcacccacctccttccggccctacgaggtgggtcccgcagcccgggcacccccggccgcactctggggccgcctcagcctgcacctgtacggtctcggggggctgcggccagcgccgggggccacccccagggacctctgctgcctactgcaagtggatggggaggccagggcccgaacagggccactgcgaggggggccggacttcctgcggctggaccacaccttccacctggagctggaggccgccaggctcctgcgcgccctggtgcttgcgtgggaccctggcgtgagaaggcaccggccctgtgcccagggcaccgtgctgctgcccacggtcttccgaggtaggacatgcggctgcaggggaggaggggcagggacccccaaaccccaccgccaccccccgcagagtgcctagggggctgggctccgggcggaaggtgtggcctggagcagcgaggccagggtacatgaagcttcagagcacacccggctcaggcccccttgtgtcctcagggtgccaggcccaacagctggccgtgcgcctggagcctcaggggctgctgtatgccaagctgaccctgtcggagcagcaggaagcccctgccacagctgagccccgcgtctttgggctgcccctgccactgctggtggagcgggagcggccccccggccaggtgcccctcatcatccagaagtgcgttgggcagatcgagcgccgagggctgcgggtgagcacccaccccaccccaaccctctggcccccagacctcagaccactcttcaggacaccctatgtacagatgccagacccctacccccaggcctgagccactcctagctccaatcccaacctagacaagggcagaaggcgcccccttgactgtagcaccctgggcagaacccatgggtcatccattgatttaaaaacaggatccaagccctcctggggctcagagtctgatgggggaaaagatacgactctagtcattcacaaatgtaaaactataactgggactggagttggggtggggtgtacctagggtctgggagagcttaaaacaaaacctggggtagtcatggaaagcctcctcaaagaagtgtcagtttcctaagtcaaaggagatggcagccaagacaagtagtccaagcagagggtttacaaggccaggttgtcaaggtagttccaacctcccagcccacaatgcccattgctgcctggcccagaattccagtgctcaccccactgggccctgattagtctgtggccccggcaagaagacattcactctctcttcccacccccaggtagtgggactgtaccgtctttgtggctcagcggcagtgaagaaagagcttcgggatgcctttgagcgggacagtgcagcggtctgcctatctgaggacctgtaccccgatatcaatgtcatcactggtcagcatggccccctctcccctgcctgctcacccccattcaatgcctcacttcaaggccttggggctcctctgggacctcagtcctcctatctgaccttgctttcacccacctcctcttcccccttagctgtgccctccttagcctta

SEQ ID NO: 20948 - DNA, 2300 bp, Homo sapien
agacagggtcttgctctgttgccccagctggagtgcagtggcacgatcacagctcactgtagacacaacctcttgggttcaagcaatcctcccttctcaacctcccaagcaaaagggataacaagcacgtgccaccatactcagctaattttttttcttttaaaaaaaattttttttagacagagtcttgctctgtttcccaggctggagtgcaatggcgtgatctcagctcaccgcaacctccacctcccgggttcaagcgattctcctggctaagtttgtttgtttgtttgttttttggagagactgggtctcactttttggccccggttggtctcaaattcctggcctcaagcgatcctcctgtcttggcctcccaaagtgctgggattacacacatggaccaccatgccaggcttgtttccctttttaaaaaaatcacttgtcctctgtgtatatttgtttcagggactgttgaataatccagctttcggctgagaagctttttggacatttgcctagtgacaatctttctttatctggggagagattggtcagataattagtcttggagcatgttaaagctttgtctcccaagaaagaatttacatctattacaacatctttctctctctctggaaaattgtatccttgttattaagactttttttttcttttttagctttacagaaaagctgcaaagatagcaagataatttttgtctactctttatccagcttccctgaatgctaacatcttatataaccataatacatttactgaaacaaaaagattaacactggttcattactactaactcaactccaaactttatttggatttcaccaactttatccacaaatttgtcctttttttgattcctggatccagtccagggtactatattgaatttagttgtcacagctcctttccctcctctagtctgtggcagtgcctcagtctttgtttttcatgaccttgacagttttgtagaggtctggttaggcattttgtagaatgtgactcagtgtgaatttcctttgcttactactatacctattatacaaaaaatatacacatatatatatatacatgcacaaatatttatttatagtgtggaaaatatacataacataaaatttaccattttttaagtattattattattttgtgagacatggtcttgctctggtacggccccgctggtgtggaaagcgagctgtgttcggagggcctgaacctacgggcttccaccgtggggccaatggaaagctgcggaaggtgggcccccaaaggtctgggctcctgaagccgctgaggggcgtggcctcctggttttaaaacataaaatgggtgtgaggtctgcagtgcgagccaatgaaaggcaaggggaggcggggtctatgagggaggcggccagtagaggcaaggctctttcgggtggccccggagcggggctccgactgtgcgcatgcgcatcgggccggactacggggcgccgctgagccaagtgggccacccgggcacggccacgctcccgggtcacgtgacacggagggggccgaattctgctggaggcagcgccatatcctggaggtgaaggtgaatagcgtcgggggtcgagctggtgtgggagaaccacatcctgatgcgatgtgacctcgacccagcctggcccggggtcggggatcaggctcgggcccgtgcgctctttaagggagaggcgtgggttgcgtggagggtcgcgcccgctaacccgggggcgtgacctcgtgcctcttggtgacgtaacatggggcgggctcactactggggctgagatttggggtccggttgtggaaagagaggcggggcttccgcctgtccattgacaagtaggtaagtggaagataactgtgtggtgctgtcgtcgccaccttgacttgtggtggctagtttgggtgggagtggtggtgatgtaaaggactggggctagccccgcgaggggcgtgaccttgtcacggagaggcatggcttcaccccgagcctaggcgcacaaagggcgtggtctggcagggttgggggcgtggccgcacagaaactggcggcaagggtcgtggccctggatcctgctgcgagaaggggcgcgatttcttccggagaggttccctgtcgcgcccaagtctgggaagtgccctttctctcttaggtaccacctcatggagacccccgcggccgccgcccccgctgggagcttattcccctccttcctgctcctggcctgcgggacgctggtggccgccttgctgggcgccgctcac

SEQ ID NO: 20949 - DNA, 2300 bp, Homo sapien
gagccgagattgcgccactgcactccagcctgggcgaaagagtgagactccgtctcaaaaaaaaaaaaaaaaaagatacagaaggagatgcaggcacagggaataaggccatctgaagatatacggagaaattggagtgacgcagccataagccaaagaatgcctggagcctcttgaagttggagaaggtaaggatcctccccaaagatctcgagagagtgtatggccccactgatgcctccatgctgaatttctggcctcccgaagtgtaagagaattaattcctgttgtttcaagccacccaatttgtggtaatgtgttatggccatcaaaggaaattaataaaacacctcagggcctttgcatgtgccatcttctctacctggattactctttctccagatccttgtggggcccatgtcctcacttcctcctggtctctctgctcaactgtcacctccttagagagtccttctgcttgtcctaagagaggcccttactgtatccctctaactcaataatttgttgcacttctctttaaatttcgatcaatttagatacatggtatttgtttcctcccctgccccacacccacccccttttttttagagacagggtcttgctctgttgccccagctggagtgcagtggcacgatcacagctcactgtagacacaacctcttgggttcaagcaatcctcccttctcaacctcccaagcaaaagggataacaagcacgtgccaccatactcagctaattttttttcttttaaaaaaaattttttttagacagagtcttgctctgtttcccaggctggagtgcaatggcgtgatctcagctcaccgcaacctccacctcccgggttcaagcgattctcctggctaagtttgtttgtttgtttgttttttggagagactgggtctcactttttggccccggttggtctcaaattcctggcctcaagcgatcctcctgtcttggcctcccaaagtgctgggattacacacatggaccaccatgccaggcttgtttccctttttaaaaaaatcacttgtcctctgtgtatatttgtttcagggactgttgaataatccagctttcggctgagaagctttttggacatttgcctagtgacaatctttctttatctggggagagattggtcagataattagtcttggagcatgttaaagctttgtctcccaagaaagaatttacatctattacaacatctttctctctctctggaaaattgtatccttgttattaagactttttttttcttttttagctttacagaaaagctgcaaagatagcaagataatttttgtctactctttatccagcttccctgaatgctaacatcttatataaccataatacatttactgaaacaaaaagattaacactggttcattactactaactcaactccaaactttatttggatttcaccaactttatccacaaatttgtcctttttttgattcctggatccagtccagggtactatattgaatttagttgtcacagctcctttccctcctctagtctgtggcagtgcctcagtctttgtttttcatgaccttgacagttttgtagaggtctggttaggcattttgtagaatgtgactcagtgtgaatttcctttgcttactactatacctattatacaaaaaatatacacatatatatatatacatgcacaaatatttatttatagtgtggaaaatatacataacataaaatttaccattttttaagtattattattattttgtgagacatggtcttgctctggtacggccccgctggtgtggaaagcgagctgtgttcggagggcctgaacctacgggcttccaccgtggggccaatggaaagctgcggaaggtgggcccccaaaggtctgggctcctgaagccgctgaggggcgtggcctcctggttttaaaacataaaatgggtgtgaggtctgcagtgcgagccaatgaaaggcaaggggaggcggggtctatgagggaggcggccagtagaggcaaggctctttcgggtggccccggagcggggctccgactgtgcgcatgcgcatcgggccggactacggggcgccgctgagccaagtgggccacccgggcacggccacgctcccgggtcacgtgacacggagggggccgaattctgctggaggcagcgccatatcctggaggtgaaggtgaatagcgtcgggggtcgagctggtgtgggagaaccacatcctgatgcgatgtgacctcgacccagcctggcccggggtcggggatc

SEQ ID NO: 20950 - DNA, 2300 bp, Homo sapien
gttcccttccaactctgtcccttcctgttggcatgggccagtccctctgctgggatgacttccctccagctcaactttcagggccaagccccactggacgtcctcttggacgccctccagggtgcacccccagtccatagaacagagtgtgatacagggctggagccttagccatacttgttgaatacatgaatgaacaaataaataaccctcccaggcaaagtcctcacccaccacccgtgtaccccaggcccttcccagattccatgcctttctctggcccagccctgagccctccacactgggtgtgtgtgcgtctagctttttcttccccagactggaagttcctccagggctgggctccaggcctctcagggtccccattctttccacaggaacagagggagctgcaggaagcctgtgcagcatgactgatttgggaaaaggcaattgatcaaggctgggcgtggtggctcacgcctgtaatcccagcactttgggaggctgaggcgggcggatcacttgaagtcaggagttcgagaccagcctggccaacatggcaaaacccagtctctactaaaaaaatagaagctgggcgcggtggctcacgcctgtaatcccaacactttgggaggctgaggcaggcagatcacgaggtcaggagatcgagaccatcctggctgacacggtgaaaccccgtctctactaaaaatacaaaaaaaaaattagcagagcatggtgccagttgcctgtagtcccagctactcggacggctgaggcaggagaatggtgtgaacccaggaggcggaacttgcagtgagcggagatcatgccactgcacttcagcctgggcaacagagcgagactccgtctcaaaaacaaacaaacaagtaaacaaaaacccagaaaaaattagccacgtatggtggcgcacacctctaatcccagctacttggcagattgtgggggtgggggctgaggaaggagaatcgcttgaacctgggaggtagagcttgcagtgagccaagatagggacactgcactccagcctgggtgacagagcgacacgctgtctcaaaaaaaaaaaaaaaaagaaaagagaattaatcaaattgagccagataggctgaggcccaaagctgtgtggggtatgggggtgggactagggggctggggtgaccctttgagagtcacagaggaagtgggttgctttctgggagggctgagagcaagaagagtttgtgtgtgcatgtgtgaacacacacacatgcatgtgactcctagtacgtgtctgaggtctgaggctgcaaatgtagtcctaggctcctggcctggctgagtgagttttagcggttttttgtttgtttgttttgtttgagacagggtcttactctgttgcccaggctggagcgcagtggtacgatttcggctaagtgcaacctcagcctcctgggttgaagcgattttcctgcttcagcctctcgaatagctgggactacaggcgtgcgccaccacgctcagctaatttttgtattttcagtagagtccgggtttcaccatgttggccaggctggtctccaactcttgacctcaagtgatccatccacctctgcctctcaaagtgctgggattacaggccggagccaccgcgcccggtccgacttttaggtttgtgaatgttttagatcagagtcctggggaagcttggtgcatgggcttgcatttgtgcgtccgtggctgtgggtccatgagcctctcaggacgtgactggcctcagtttccagagtttctgggaggctgtgttttttgtcccggctccagaggtgtccggctctgggtgtgtactgggggatggggatggggtgcgtgggcgttcacgaggttgggtgtgcccgccactccgggttctgcccgcgtctcactgcatgctcggcctgggtttccgagggtccgcgcgtcccaggctgtgcgggtggagggtgggcagggaccccgggaggccgggcggggggcgggggcgcgctgggccggccccggggcggggcgagccttcgagggctgggggcggggcggcccggccgcctcacttcggcgaagttggcggcgcggaggctggcccgggacgcgcccggagcccagggaaggagggaggaggggagggtcgcggccggccgccatggggccgggggcccgtggccgccgccgccgccgtcgcccgatgtcgccgccaccgccaccgccacccgtgcgggcgctgcccctgctgctgctgctagcggggccgggggctgcaggtgagg

SEQ ID NO: 20951 - DNA, 2300 bp, Homo sapien
aggagtttgagaccagcctggacaatatagcaagtcgtctctctgaaaagtttttgaaaaattagctgagtgtggtggcacaggcctgtagtcccaactacaggttgtagtgcttgagcccaggagttcgaggctgcagtgagctatgatcgaaactccatctgaaaaaaaaagaaaaagctaaaaacgttccagtggctgcttccgggaggaaggggaggtgtagccacagatcgctgcctttttccctacatctttgcggatggctattttacaagatgtatgtcttcaggcaaatgacttcatcctcgaatttcaggttcatgatctatactacaggaatgtgattatgctacttagacttaatagggttgctctatggttaagtgatggctgtccctaaaatgttcaaggatatcgggagaaggttgcaaaataggaggaagaagctggctgcttttttttttttttttgagacggagtctcgctctgtcgccctggctggagtgcagtggcgcaatctcagctcactgcaacctccgcctcctgggttcacgccgttctcctgcctcagcctccctagtagctgggactacaggcgcccgccaccacgcctggctaattttttgtatttttagtagagacagggtttcaccatgttaggatggtctcgatctcctgacctcgtgatccgcccgcctcggcctcccaaagtgctgggattacaggcgtgagccaccgcgcctggccagaagctggcttcttgcagggacagcagggccgcaaggctctgtgactctaggccccatcacacccggccctgtcccacttcctctttcggccagaaccccagaactccagtcattcataggccgggtcctcctcgggggaaccaggcctgccccctaggaatcagggtatccacgcctcctcggcccgctctcggagcctgggcctcaacacctgcagattggctcccgggccaggacctgtcgcttgaacatcagtggccgccgccgtccaatcacagacgtacaggggcgggctggcgggcctgttgggccagcaggaggacggcgccgggccgaggccgctggacccgccgttggaaccacagctgggtgaagtcagtgctgctaggtctttggagccagaccgaagggagggtcgcgcgcccctgggtgggtagcaccaggcggcggccgtcggccgggcctcccgaagcctcctccagccgctaataccgcccgcgcctccctcctagtcctagacctggcattgcctgtccctcttcttcgtcttccagaccctcctgacccgccatattaggtcccggccccgccctccgtctcattgcccattgcccaccccaccccaccgccccctccccggcctaccgtcagctcattggcccaggctcccgccttcttcgcccaatgttaggcctcacctcctctaggatccaccctctccccgcccacccgcataagccaggcccaccattccaactctttctcctttttggcttgtaggccgcacctactctgcatatgccccgcccctcactccaggtgtcgcccacttaactgaagatccaggatcccctccttaaggtttgtctgggctcggaattgccttttttttttttcttttttgagacggagtttccctgttgtgacccaggctggagtacagtggcgcgatctcagctcactgcaacctccacgtcccgggttcaagcgattctcctgcctcagcctcccaagtagctgggactacaggcgcccgccaccacgcccagctaatttttgtatttttagtagagacggggtttcaccacgttgcccaggctggtctcgagctcttgatctcaggtgatccgcccgcctcggcctaccaaagtgctgggattacaggcgtgagccaccgcacccggcccggaattgccgcctttagaccctcacccacccgctgctgagtcttcctgggccccgccccggccctaagccccgcacaggacctgctaggccccgcccatttatttcccccctttccaacctcttcctccccagcctccgcaccctacccttgtttcctgtccctgtcgcgcccaggtgtttacctggcactcaggtgagtggtgcgctctggctgttttctgtcggagccgcccgcctcttccttcagcgcgtcccacaaatcccgacggcacggaggggccccaggccaagggcgatgggcccctgagccctgacaccgcttcgccgctgctgcaggtgcccctggccggcagcgccgcc

SEQ ID NO: 20952 - DNA, 2300 bp, Homo sapien
tcaagagcagtgtggattgggatcctgctaggggctttgtaggccaaaagccaagttgttagactcccaaagagacttaacaggcatccctgggcccccagccagctttcaggagtcatccgtgagccatcctctgaacccaccagcaggcaggtggtttctataaaccacagcccctggagcctaccgttgcccaggtcagcctcagcaggtgctgaaggcactgccctagttgggtgggaggctgttgcagtcatgtgcctgtggatccctggcaggccagacctggggccctccagcactgaatggaattggcagtgcccaaagtggtcccgatgtgctagaattggaggagatgtcaacgccaggaaaaccagccacacacagcagtgggctgcggggacaggatgggcctggccaccatgtgggctccaagcagctgcagtgtcttctggcgttaggagtgggtcctggctctagagaggatctaccacacctggggcattgtggtttgctccaggcctatgaaaatagatgcctccagccagcagggctcctggagaacccaagggtgcctgtgctgacagacagtggaaggagatgggcatgaggctaggctgggagcaaaagcgttgcagaggggcagcctcctctgtggacagtgtggcttgtcccgagctgcagctagccaaagagcggtgaggccccttgcctgcagggattccagcagagagaggccacatgttggatgggtaggactcagctgctccagctgcacagtcccgaggtgctggctcactgtgattgagggcccagtagtccctgtggctgctggatccttcccagccttgggttggatgcaggtgtcaggctggcctgtttcctaagagacagctccaggcccttttccgcctgctccccactcggcgcaggtggaggccaattccaggcttctctcttccgtgggggcgtgcaggctgagtggggaataggactgtggggagggtcctgagcatccccacccccaggactgggtcttgcaccccctgcaatcatccaggtgggccaggctagttggcaggaacccaggctgagctttgtgggtttaaaaagtattagggcccaggccctgccaagcccacatgtgtcaggatctgtgttttccacagtatcccagatgattctgatgcacacaggagggtcaaacaccaggactggtgccacagggccctagaaagctctgctgcacactgagttatgccccacatgcagggggacacagggcactcagccctttcggggaggggtcatgtcctcaccaggcccagtcacttgtgtgggtcttcaccctttttgagctgggctaatggacccttgtcccagggcctgggcggcacatgcagtttctccatacagcccacgttttccttcccgacaattctctcagggccagcagttctaagccagccccttgacacattccttgtcccttctcctaggtcacctccgcgaagccccctccccgcttatgatacattccccccagatgtcacagttccagagcctgacccaccagtctccaccccagcaaaacgtccagcctaagaaacaggtaactggcagggctgggccatagtcctgtgggctagggccgggggtgcctgcccacctcaccggccgctgtgcctgtgccatcccaggagctgcgtgctgcctccgtggtccagccccagcccctcgtggtggtgaaggaggagaagatccactcacccatcatccgcagcgagcccttcagcccctcgctgcggccggagccccccaagcacccggagagcatcaaggcccccgtccacctgccccagcgtgagtgctctccctgcccacagccagggctcaggccccccgaggcccgtgttggacataagcttgctgtggggctggtggaccatgccccactggggtgaggtgggccagggcccaccggctgtttatgttccagggccggaaatgaagcctgtggatgtcgggaggcctgtgatccggcccccagagcagaacgcaccgccaccaggggcccctgacaaggacaaacagaaacaggagccgaagactccagttgcgcccaaaaaggttgggatggaggtccatgggtgtcgcttgccccttggccctggaaggtgccatgctgggcacacccccagctatgccctttaggcacagcagacccctcacccaccccaacctctctgttctgcaggacctgaaaatcaagaacatgggctcctgggccagcctagtgc

SEQ ID NO: 20953 - DNA, 2300 bp, Homo sapien
tagaagtggacagacaccaagaggccagtatgggcttgtcaaaggggatagattgcatagaggctgagtagtttttacatgtgtggccgagtggttggttggttttcagtgtaagtaggtgttgtcatccacacacctgccaccacctctggcttcattctgtgggtctttgtgcccacccacctggcattgttacctaatttcatctgtaattttgcatcctgcatttctgatgtaacatcacattctcttaccttcacaaagtctagaaatctatggaatgggctgcaaactatggcctgcaggccagtcagtttttttggcacacagtgaggctcatttgtttcaggattatttgtggctgctttcattttatgatgatggcagaatggaatattttaacaggctgtttgtcctgcacagctgacaatatttgctctctggccctttacaggaaaagttagcctagcctgcccctgctggaatacattttaacccaacagtttttgtttgtttgtttgtttgtttgttttggagatggagtctcgctctgttgcccaggctggagtgcagtggcacaatctcggctcactgcaacctctgcctcccaagttcaagcaattatcctgcctcagcctcctgagtagctgggactacaggtgcacgccgccatgcctggctaattttttgtatattagtagagatagggtttcactgtgttgcccatggtggtcttgaactcctgaactcaggcaatccacccgcctcggcctcccaaagtgttgagattatagacgtaagccaccatgcctggccaacccaacagttttgatcttgtccatgtcaaagttttgtttttgctacatgcttctcacaggaacattttacatttcatgaatccatccgcccagatttaacaatcagcaacatgatgtaacccacatgtaacaatggatcctttcactgtacctgagccacttgtccctccagttgctggcagcttttgcagtgaaaagatgctgcagcattttcagtgctactagtttaattagcctgctgatgagtttcaaaagcagagagactggaattctggttggtgagattgtgtcccgcccagtttcctggcctcctgactgcaagatccttgtgtgcctgtgtcccctccagtggggaacagagagcttgagtgtggctcacactctcccctagcagcaaggccagtatatctctgccttggcttgtctaatccaaggcaagttgcagggtctggggtactgcagagtcaagaggtaatggggccccaccacttggctggtccaaggggtggggggcagggtgtatacacactgcgtgaaggaggattaaggcctctaagagctgcctcggcgcacggccactggcccggctccaggcggcgcagtctggctgatgacacgagcgctgttctcaccagctgcctgagccagtcagatggaaaagtaatcctatttgtgcttccccactgacacagattgcacaattaaagaagccgctgtcaggaatttgaagtagatgccactctagcacctaggaggggaacagaccttctgatattgatgttgtgtaatcagcatttcagcaaagatgtttctaggacaagataagatgtaaattgctgtaaattgaattgtattgagaaattaccaggtttttaccagtcagggtccctcatcctcttgtttttgtccctgggcagaatctagcattccctgaaaataattgtttattcaagagccttggagcggtggagaggtgacctcctctacctgaagggtatgtgtgactgtgaacttgtgatttcatgaggggctgtagtcagttggcattggctggcagtctgtatggaataaaacaaatttaagccatgtcccctcaggcatcttactgcttgggaagcataaataacaacttggtgtcccttccccttgcccccacacctcatgacttcagcacagtggtatgttttagatttcacctatgacacgggatatatctcattgtaagcagatggccaggtgctgcagggagaggtcttggctctgatttgtttacgaggatgaaattctttggaatactactgctagaagtctgacttaagacccagcttatgggccacatggcacccagctgcttctgcagagaaggcaggccactgatgggtacagcaaagtgtggtgctgctggccaagccaaagacccgtgtaggatgactgggcctctgccccttgtgggtgttgccactgtgcttggtgagtggagac

SEQ ID NO: 20954 - DNA, 2300 bp, Homo sapien
tttggagacagagccttgctctgtcgcccaggctagagtgcagtggcacaatctcggctcactgcaacctacgcctcccgggttcaagtgattcttctgccttagcctcctgagtagctggcattacaggcatgggattacaggcatgcgccaccacacccggctaattttttttttttttttttgagacggagtctcgctctgtcgcacaggctggagtgcaggggcgcgatctccgctcacagcaagctccgcctcccgggttcacgccattctcctgcctcagtctctcgagtagctgggactacaggcgcccaccaccacacccggctaattttttgtatttttagtagagacggggtttcaccgtcttagccaggatggtctcgatctccttacctcgtgatctgcccgcctcccaaagtgctgggattacaggcgtgagccactgcgcccggcccacacggggctaatttttgtatttttagtagaggcgaggtttcactctgttggctaggatggtctccaacccctggcctcaagccaacctcctgcctctgcctcccaaagtgctgagattacaggtgtgagccaccgagcctggtctgacttggggttgagtcttaaggatgggaaggagctgggcgcggtggctcacgcctgtaatactagcactttgggaggtcgaggcaggaggatcgcttgagtccaggagacagagaccagcctggccaacatcgtgagatcccatctctacaaaaaatagttagctgggtgtggtggtgcacacctgtagtcccagctacttgggaggctgaagcaggaggatcgcttgaggccagcaggttgaggctgcagtgagctatgactgcactactgcactccagcctgggggacagagcaagaccatgtccctttttttaaaaaggtgggttggaagaagatcaacaggggggcataagaggagaaaggtgctacctccctgcccaggggcagccaaggaggatccgcctcggccttgctcgcagcctcctctcacctcctttcctccacttcaccccagccccggcgcccccatcgcagctctctcgcctcagcctccctacctggggtccccccttagggctctctcctccgcctcctccatcagtctgtggggtccctcctcaccatcctccctccctgtgagggtctgtcttcagacctttcttagtattttggatgtctctctcagccttcagatcttttcccgcaggcccagcctgcagtccgcccgtttcccccagcccgctccttcgctctgcggggtctcctccctcagtccgcggtatcccccactcacctcgcagccactgtctctccagagctcgttcgcgctgggcgcgggggcggggcgcgcacaccgggcggcggcggcgcggggccgcgcgcgcagcgtgcgcggtgacgtcagtgcgctggcggcggcggcggcggcggcggcggcggctgggctgtttgttctggtctcccgcagccgaggagccgaagcagtggcggcggcagcggctgcggcggctgccggcggtgcccgcgggcgagcgcggcctgtgagctcggcagagcggcgggcgggccccggcgccgcgcaggcagctcggggagggggcggcggcagcgggcggacggccggcgggggcggcgtgcggcctagcgtctcaggtgaggactggtgccctttggggcggcggacgacactgggcggctggcggaggctcgcggcgcggtccgcgtaacctgcattgcgtaatggggccggggcgccgccacctacgccatccgcgcggcgcgggggcggggaggccggggctacgcgggctcgggcctgcgggcctcccgcgccgttcgttccgggccggggcggcctgcgccgttggtgtcggggcggcggggtcgctcgcggctgtcctgcctttggtgccgtcggacccgggcttgggctggccggcggggcgcgggtggggggcgcgggcgccgcggcggggccggcggtcgggggcgggcggggggcgggccgaggcgcccggcacttcctgccgccgccattttgttaagtgaggaggaggaggaggaggaggaagcggccgccgcggggtccgcggcgcgcccggcccgggtaagtcccggcctggcgcgggggccgcgagcgcagctgtcccggtccgcggtcctctaggcgggctcggccgcggcgctcacgtgggccggggccggcgcgctctccttctggcacccaggtcgttttgcctgggccggggcag

SEQ ID NO: 20955 - DNA, 2300 bp, Homo sapien
gacctcccaaagtgctgggattacaggtgtgagccaccgcgcccagcctgctttccatttttaaaagatgggaatacaaaatgctaagagaatggcctgggtgcggtggctcacgcctgtagttccagcactttgggaggctgagggaggtggatcgcttgagcccaggaattcaagaccagtctgggcaacatggtgagacctcctctccacaaaaatacaaaaattagctgggcacggtggcgcacacctgtggtcccagctactaaagaggctgacgtgggaggatcacttgagactgagagtttgaggttacagtgagctatgatccagccactgcactccagcctgggtgacagagcaagatcttgtcttaaaaaaaaaaatatatatatatataaaaggaaagagaagtggttgtttccaggtttgaaaaatttcacagtattattttaagctacaagagacatatgcctaacttcctccttttagcaatctcaaaactaccccatgtttactaagctcttccgtggccaggtggggtgctttggaagccctagaagaggtcatatgatgttttttcccctcggactcacacatgtagagtaggcacatacgtcctggagctgacttagggttgagtctttttcttttttggagacagagccttgctctgtcgcccaggctagagtgcagtggcacaatctcggctcactgcaacctacgcctcccgggttcaagtgattcttctgccttagcctcctgagtagctggcattacaggcatgggattacaggcatgcgccaccacacccggctaattttttttttttttttttgagacggagtctcgctctgtcgcacaggctggagtgcaggggcgcgatctccgctcacagcaagctccgcctcccgggttcacgccattctcctgcctcagtctctcgagtagctgggactacaggcgcccaccaccacacccggctaattttttgtatttttagtagagacggggtttcaccgtcttagccaggatggtctcgatctccttacctcgtgatctgcccgcctcccaaagtgctgggattacaggcgtgagccactgcgcccggcccacacggggctaatttttgtatttttagtagaggcgaggtttcactctgttggctaggatggtctccaacccctggcctcaagccaacctcctgcctctgcctcccaaagtgctgagattacaggtgtgagccaccgagcctggtctgacttggggttgagtcttaaggatgggaaggagctgggcgcggtggctcacgcctgtaatactagcactttgggaggtcgaggcaggaggatcgcttgagtccaggagacagagaccagcctggccaacatcgtgagatcccatctctacaaaaaatagttagctgggtgtggtggtgcacacctgtagtcccagctacttgggaggctgaagcaggaggatcgcttgaggccagcaggttgaggctgcagtgagctatgactgcactactgcactccagcctgggggacagagcaagaccatgtccctttttttaaaaaggtgggttggaagaagatcaacaggggggcataagaggagaaaggtgctacctccctgcccaggggcagccaaggaggatccgcctcggccttgctcgcagcctcctctcacctcctttcctccacttcaccccagccccggcgcccccatcgcagctctctcgcctcagcctccctacctggggtccccccttagggctctctcctccgcctcctccatcagtctgtggggtccctcctcaccatcctccctccctgtgagggtctgtcttcagacctttcttagtattttggatgtctctctcagccttcagatcttttcccgcaggcccagcctgcagtccgcccgtttcccccagcccgctccttcgctctgcggggtctcctccctcagtccgcggtatcccccactcacctcgcagccactgtctctccagagctcgttcgcgctgggcgcgggggcggggcgcgcacaccgggcggcggcggcgcggggccgcgcgcgcagcgtgcgcggtgacgtcagtgcgctggcggcggcggcggcggcggcggcggcggctgggctgtttgttctggtctcccgcagccgaggagccgaagcagtggcggcggcagcggctgcggcggctgccggcggtgcccgcgggcgagcgcggcctgtgagctcggcagagcggcgggcgggccccggcgccgcgcaggcagctcggggagggg

SEQ ID NO: 20956 - DNA, 2300 bp, Homo sapien
gcctcagcctctcaagtagctgggattataggtgtgtgccatcatgcctggcaatttttttcttttttttagtagagatgaggtctccctatgttgcctagtctggtctcaaactcctggactcaagtgatcctcaccaaagcctcccaaagtgcaaagattataggcgtgagccaccatgcgtccggcttgcttgccgttgtttttgtttgtttgttttgttttgttttgtttttgagacggagtttcactcttgttgcccaggctggagtgcaatgccgtgatcttggctcaccacaacctccgcctcccgggttcaagcgattctcctgcctcagcctccggagtagctgggattaccaagtagctgggattacaggcatgcgctaccatgccagggtaagttttatatttttagtagaactgggatttcaccatgttgaccaggctggtctcaaattcctgacctcaagtgatccacccacctcagcctcccagggtgctgggattacaggcgtgaaccactgcacccagcctgcattttttttacaaacagattttcgccatgttgcctacactagtctcaaacccctgggctcatgtgatcctcctacctcggcctcccaaagtgctggaattaaaggtgtaagccaccgtgcccatccagttgacaaagtttatttctttttttttcttttgagagagagtttcactgttgttgcccaggctggagtgcagtggcgtgaacttggctcactgcaacctctgccccccaggttcaagccattctcctgcctcagcttcctgaatagctgggattacaggcatgtgccacaacacctggctaattttgtgtttttagtagagacggggtttctccatgttggtcaggctggtctcgaactcccagactcaggtaatcctcccgcctcagcctcccaaagtgctgggattacaggcatgagccactgcgcctggccgacaaagtgtatttcaaacactgcggagaattgttgtggtcttaattcatttggggtaatcggtattgtcattctcattgtcctcttgtgaggaggaattaggaacttatgtctctctagggaggctacagttttccttttggggaccattgtagtagagaattctcacattcacacatttcatttccctaaagttagtcaccggcccatgtgggtaatctctaaagaggacaacaagtatttagcagttatttcagagataattttctgccagcaaatatgggaaacttgcatgcatttttgaactctgcctcttcacatctatttagagaaatgttcccaagtctttgtaggcatctgagaagccaaaatccccaggcatttcccacagggcaggatcggttgtcgttttgagtgggtagcgatgggctgggtggcctattaagtgaaaacatggtgatctgtgcacccacaatgcctaggccctgcagacacaaatgcccaacttgttgacctgtgactcagacttagacccgaaaaggagatgttatatacactctgttctttattgaaataatccagcttgaatgagttggctggaaatataggatttgtaggaataaacggtcttccacatcaacataatggaattcagttgagaggaatattactggggatgtaaatatgctttaaacacaggctcgcggtggctcacacctgaaattccagcacttccggaagctgaggcaggcgatcacttgaggtcgggagttggagaccagcctggccaacatggcgaaaccacatctctactaaaagtacaaaaaaattagctggctatggtggtatgtgcctgcaatcctagctactcgggaggatgaggcaggagaatcgcttgaacccaggaggcggaggttgcagtgagccgagatcgtgccattacactccagcctgggagacagagcagcactccgtctcaaaaaaaaaaaaaaaaaaaaagaaaagaaaagaaaaaaaaaagaggctgggtgccatggctcacacctgtaatcccatcaccttgggagaagtttctcttaagcccaggagtttgagaccagcctgggcaacatggagaaaccctgtctctacaaaatatacaaaaattagcagggcgtggtggtgcatgcctgtagtcccagctactcaggaggctgagatgggaggatcacttaagcctaggagattgaggctgcagtgggctatggttgtgccactgcactccagtctgggcaacagagcaagaccctgtctcaaaaaaataaaaaaaagaaaagaata

SEQ ID NO: 20957 - DNA, 2300 bp, Homo sapien
cagcatggaagtgtacaagtttattctagtgttgctgggttattgtggagaagatctggaagcaacataaatgtgcctcacttgggagaatttatggtgtggttatctgggcatctagaaccaggaggataaactgttggcaagtgagagtcactgggggaacggtctatagtagtatcctaattgtgtatctttagtttattgtgagcatgtatgatgtctgttaatattttcctccagtagtagagaaaacgtgctaaggaaaaaaaaaaatgaagatggagagagtagaaacagcaagtgagaaggctttctgaaacatgtaaatggagtgggaaggactcaatgggctctcccaccccaccaaaaatatccttcttttaccttatggtttttataatgatcaaagtgagatttgcctgtactcccaccatgagatggcccagcatattgatggaaatccttccagacaaaatggctctggcatgctctgcagacagtactatattatacacctttcttatgccagtgcagagatgagcccgatttgaagggctgcatgatgttcttttgaatgtacgatttatttaacctcttctgcactgaggaacgtttaggtgttttcccatttttcaccactacaatcagtgtgcacgcatgtttccagttcttaaatttaggatacgttctgggaagggattaatgagacagatttttacttttcatacattgtgtcaaactgctttccaaaaaatacggaaacagttgatcctcccaccagcagagaagactctcttcacccttgcatgactgggaataattcttcattcttggaattctgtgggttaaaaaagacgtttcattaaatatctgttcctgtttttatatcttccccgttggccccaaagtgctccttgcctattagcctagttggcaccttgttacaggttgcacccacctttggctcttagtttcttaattgttcactgcttatagcttttttgtaagcaaatcagatttctgtaatacagccgtaaagttagagatatatagatctgtatttttatttacctacagtaagtgtggtgtggaaggagagggaatttgaacaaagatcagataggttgtggttccatgcttgtggagtggccctccgttggtggggctggaagtgcgtgggtgcaggggcggggtggggtccctctaagctggcagggtcggggcagcaacttgtagggcactcagagcagcctctccagctccttctgccctgcccgcagctcatgatggagcagtccaagaagtcctccctcatggtggcccgcagtattctcaacaacaagctcatcagcaagaagctggagcgctacctgaaggtgaggcactggtccgggcctgccctgtccccagcttagtccccgcctgtgctccctcccttcagtgtccgcgcccctccccacagggcgagaaccctttcaccgacagccccgaggaggagaaggagcaggaggaggctgagggcggtgccctggacgagggggcgcagggcgaagcggcagggatctcggagggcgcagagggcgtgccggcgcagcctcccgtgcccccagagccagcccccggggccgtgtcgccgccaccgccgccgcccccagaggaggaggaggagggcgccgtgcccttgctgggaggggcgctgcaacgccagatccgcggcatcccgggcctcgacgtggaggacgacgaggagggcggcgggggcgccccgtgacccgagctcggggcgggcggagcccgcgtggccgaagctggaaaccaaacctaataaagttttcccatcccacctccgggtttctctgttactgtgccgcgcgggcggggcggggtgggcagaggggcggggtgcgcatgcgcgcgggccgggccgtcgggcaccgcggtgggaccacaactcccattaggccacggagctggatcgtagcagcccgaaaggccagctgggacggcgagggcgggccctcgtgaagaccagccaatgggggcgcgcggaagtagtgacgtgtgcgcctggtcttccagtagtcgatggcggaggtgcgctgaacgcatgcgtgctgtggtcgcctagtaaacggggctgctggtgggccgcgtcgaagacatggaccagggctacggaggtttgtgttggctgctgggtgcggagcggggagggaaggctctgtgcgggcgacgcagccgctgcgcagactgccgccggccgggccttcgtcccgagcgtggttgccccagctgggccc

SEQ ID NO: 20958 - DNA, 2300 bp, Homo sapien
gcctggcagggtggggtcgggctctgcgtgggggatgggacagggacgtgcggatgccgcaccaggcttgcccgcacctcccctggggccccgtcactgccttccctgcggtcacaaaatggcgccgctggcccgtcgcctcagggtcgctgccctcacgcctcgttgcctcagctctctgtgtctgcagccggcgtcccggctcccggccgcctgatgtcttggcttctgtcgcctgtgtccgtgggtccgggcctcagcgcacgaggtctccgcccccaccacctccgtccctggcctgcgctcctggacctcgacgccttaggtttccctttctcaggccttggtccttgcgagcaggcagcaggctcggctgccgtcgccattgtcgcgtcctcccccgcgcagtttctctgcaaaaacgccgcagctctacacccccatcccgatcccacccaccacccccttttgtctatttcagaactgggaaaggcgccaggccctagggggataagtaaatattggaagggtttgggctgagcggggagccttgggcccctaggggctgaactgcaaggaatgacaaggttccatgttaattccctctgcgtctgtcaaatgaaccgtgtccggtacagactgggtattgggaatacagacaagaattcctcaagcagcttagaggcgaggatcttaataggcaaataagcgagtgtaggatatattttagggtggtcagtaccgtgcgggggtcgctccactacgtggagtggttggagccttctgtaaagaggtgacatttgagcagagacctaaatggagggagcgaataaagatatctggcccagggagcttttgctgtaaaaggcttacgggcaggaactgcctggcttgttagaagatcagccagggaggccagtgggaggccaatgggatttgaaagggagagtgggtgacagatccgagagcccctctccgccccccgcaatatgcttgggcgactgtaaatcatcactgggtgaattgccaaggcctcctgggtttgccttggcagtgactgatgaggcttctcggccaggagacttacactaggcctccctgtttggtgagggtattataggcttgagcgtgtgtggttgccaggtaacctgcattctacttggaattttgagaactgagaatgcaacgtgagtctgtggggctcctttgtagaccactttatgttggcataggcaagaaggtagtgccagtcccctctaccctggctgccaggtcaggagctttccaagaaccccagtttttctagcaaccatcccccagcccagtgggttctcatccaggggtgattctgccccagatgacatctggcaatgtctggagacatttttggttgtcacatatgggagtgggagtgctgctggtatctagtggatggaggtttgggatgctgccctgctacggtatacacaatgacacctaccgcaaagaagtatctggcgtcaaacatcagtagtgcccaagttgggcagctctgccagagcctttctgtagctttcctagttcaggaggaaagactatggggttgttactgacatccctgggattggaatataattctcaccaagtcttaccaagaactggaagacagtttcatggtttttaaaaacaggactcttgaagaaaccagaagatgaatggttgggtgctgtggggtagctgagtaatggagctcttttttttaatagatgaggaaactgagatacaaggtcactaatgaccaaacctgaattccagctctaggtcttgtaggctgtagttctgggtttgggtgggcactgagatagccaagctaaaaaagtaatgattagtttttcctttatcttgataaactgaaaaccacagtaatttacaatgtgagtcttccccttatttaagaagtagggcactaaagtcaaaggcattttaattcacatttcagacaactaatagctttaagggtaagtcctagaggcctcgaagcaaatgttagcattattaaacataaaaggtgactgataaatctttttattaactcgccctgcttttgaaccctgttaccttatttatacgtgggaaaggaagctgcatctctagcactgagaggggaagaggagagcagtggtaaacagcacagaaatatccagaatcaggccctcaaacaaaggtctgaaatgctactgtacttgtcatagaaacatttattgtctcacacagtttctttatgtttggaatggataggtgatttcactgggtggttctag

SEQ ID NO: 20959 - DNA, 2300 bp, Homo sapien
attttttgagacagggtctcattttgttgcccaagctggagtgcagtgtagggacctcggctcgctgcagtctctgcctcctgggttcaagtgattctcctgcctcagccatccaggtagctgggatcacaggcatgcaccaccacccctggcttatatctgtaatttttgtagagacgggggtttcaccatgttgcccgggctggtcttgaactcctgagctcaagtgatcagcctcccaaagtgctgggattacaggcgtgagccactatgcccggcccgtaagtcagtttttgaaatataaaagtggtataggctagatgtgacaaaaaacagtcaaatgatacaagagcttataaagtcatatggcaagttcctccccaccaatcatgcagtgaagtgagggtcatgtgtgtccttggaagagtcacctccagttcttgcagggggatgttttcctaaaactttctgagcattgctcttctctgctcaagccacttcaatacacctcaggcagcaaagtctcagcttttgagccgtggtctctgagggtgttggatgtgaacgaaatcaaatcggtacaatgatgactgtggcaagtgcgatgaaggaacgaacctgcagggcgcagaagacgtgtcctggggccctgccttggtttggaagacaggcaggcatccctgaggctgatggggagatgaaccccgaagccagagtgcttatccgtcagatctctgcttcatgtttggagtttgctcacttaacacatcagaagtggctttgttccgtatggcagcaagttctgcagaagcctcatttgggtggggggagttttattaaaacagtttatcatggagaattccaactatacaaaagtagagcaaacagtaaaatggactctcatctatccatcaccaacccatgaccaatgtcttcagctgtcagagatttatcttatagctccttgcttcctcctcctctctctacctgtctgaattgtgtgaagcacatcctggccataagatcagttaacttcttagtatttcagtatgtttctctcaacgttgtaaatgccactattacacctaaagaaatcaacaatatcaaaaagaaacagcataccttaaaaaaagttttaaaacacacgaagcgtagaagtcgtaattgcgcagcttaatgagttttcacaaacacacgtgttaagtactcttcggtgcagctctgtcatctctagaaattatgagttgtccctggcagggtttccatatgcccaggaaacagactgaggacatgactggtgcccggctgcactattgcaggatctctcgagcccagagtgaatcaggagggttttagaagcaaagctcccattttaacacgtaactgtcaaggaccttgagcaaatcatgagttccaagcttcagttttaagtgaggattaaaagctttttgcaggtttgaaggagcattcgaatgacacacaatacaaacggaattattacacatataagcatatgccatataaatatattatcgttttgttacgattaatcacatttattcagtgcactggcaccagaatgatttctttacacacactttgtcacgtaatgttgaaacgtgtgtccagcatcttgtttggtgctgttttaattttctcttctcaacatggctttgctatgcttgttttggagccgaaggccagagaatttgagagacttagctaggtcccctacccagcacctcggtggcggagttggcatcccagccctgccctgagccgtagacccgactccctctggcgggtctccagggtacgggcgctcctccagcccgaccatgcttgggccttgggcctttccgtagtgcacagctccgccccctcaaattctataggactccgcctctctgccggcttctgtaggccaatcactgaggccttagaataacagaaggcggggacaaggcggggctctcacgagattgccagcagcttccagccactgatatgaggaggcatagagatagacagcggttccttccaatagacgtgaagccgaggccggtatgagccaatgcggtcgggaggcggggctcgggtgtgtgtggaggggaccctgtggttagcagcagctatcgcagcgtcggatgttcagagcagcagaagccggcgtcgtcggatgttgtgttgcccgccaccatgagctacacaggtgggcctggcagggtggggtcgggctctgcgtgggggatgggacagggacgtgcggatgccgcaccaggcttgcccgcacctcccct

SEQ ID NO: 20960 - DNA, 2300 bp, Homo sapien
actgagctgctgctcaattgtcctttattcatttgagaagcaggattgtgtcattcagtgacagcagaaagattccatctcttgtgccatttcaatcgattggtagtggctgccagccagactcctagggagaaagactgcggggatccattagtgatgtctgctacagcaggagcgtagggactggcagtgaacgtctgaactgtgtctttctgacatttttggtaattaagtgcttgacattgggagtcaagtgtgagttaagatctctgttcctccacagtctagctttatgtgaccttgggcaagtttcctcatttggaagatggagatcagcatagtcccaactctgtctggttttcttgaggattaagtgggataaagcacttagcacagcacctggttacagaaaactctgtatgccatcattgtaatgtcacttgctcgcttgcctgtcacaccagcactgtgttcattctgctcaggttgattggatgcccactgtgtgctgagcaggtgagggcagcccaggcttgtgccttagcgctcacgtgtgttgtgtaccagctctgtgccccatgctgagagctgttcccattttagaccgtcccaaagtaacactgggaggtaggggttttcatctccattttgcagcggaggaaacaggctcagagagggaaagtgacttgcccaggatcatacagggaggtatcttgaagccagctagaatttgaagtgacagaacaagcagaagagccagatgttaaaagggcctctggaagcccagatgagggagcaggttgttgcggtctggtgggtggtgtggacaggggtagctaggcagctggcactgatacgggggctttgagcttggaggcttcctgcccgcagccgccgcctccttctcctcctcctcctcctcctcctcctcctcctcctcctcctcctcctcctcctcctccctcctccctcctcctcctccctcctcctccctcctcctccctcctcctcctcctcctcctccttccccctaccctggatcccctgcagcgtcccgggcagagccggtgcgcgacatccgctgtgagttctgcggcgagttcttcgagaaccgcaagggcctgtcgagtcacgcgcgctcacacctgcggcagatgggtgtgaccgagtggtccgtcaatggttcgcccatcgacacactgcgagagatcctcaagaagaagtccaagccgtgcctcatcaagaaggagccaccggctggagacctggcccctgccctggctgaggacgggcctcccaccgtggcccctgggcccgtgcagtccccactgccgctgtcgcccctggctggccggccaggcaaaccaggtgcagggccggcccaggttcctcgtgagctcagcctgacgcccatcactggggccaagccctcagccactggctacctgggctcagtggcagccaagcggcccctgcaggaggaccgcctcctcccagcagaggtcaaggccaagacctacatccagactgaactgcccttcaaggcaaagacccttcatgagaagacctcccactcctgtaagcagcgggcggcagggtcctgggagggcgaccgccagggcctgccaggccaggcaatgccacaagcgtgcacactgaccccaagtggggcccccatggctgggtctgtgtgggaggcgggattggcacctggcctgggcagggccatctgggtgcacctgccccctttgggctgtgactcagcagcaccccctccgccccgcagccaccgaggcctgctgcgagctgtgtggcctttactttgaaaaccgcaaggccctggccagccacgcacgggcacacctgcggcagttcggcgtgaccgagtggtgcgtcaatggctcgcccatcgagacactgagcgagtggatcaaacaccggccccagaaggtgggcgcctaccgcagctacatccagggcggccgccccttcaccaagaagttccgcagtgccggccatggccgtgacagtgacaagcggccgtccctggggctggcacccgggggcctggccgtggtcggccgcagtgccggaggggagccagggcccgaggctggccgggcagccgacggtggtgagcggcctctggcagccagcccgccaggcaccgtgaaggctgaggagcaccagcggcagaacatcaacagtgagtgcttggtggaggagggtcgggagcgcagcgggcacctgtcaggcccacccagccactccccaggcgctctgctgtggcccttaagtcc

SEQ ID NO: 20961 - DNA, 2300 bp, Homo sapien
actcccttacctgcacctgccctcaccaccctaacctgtgggcgtgctgctgccgcccacgcccagccgaccaggacactcctgcaggtgaccatgctggcagttccacgatgctaactgcccctttctcctcctgctgcagcctcaggcccagagccagcacgagacatccgctgcgagttctgtggtgagttcttcgagaaccgcaagggcctctcgagccacgcgcgctcccatctgcggcaaatgggcgtgaccgagtggtacgtcaatggctcgcccatcgacacgctgcgggagatcctgaagagacggacccagtctcggcctggtggacctcccaacccaccagggccaagcccaaaagccctggccaagatgatgggcggcgcaggtcctggcagctcactggaagcccgcagcccctcggaccttcacatctcacccttggccaagaagttgccaccaccaccgggcagccccctgggccactcaccaactgcctctcctcctcctacggcccgaaagatgttcccaggcctggctgcaccctccttgcccaagaagctgaagcctgaacaaatacgggtggagatcaagcgggagatgctgccgggggcccttcatggggaactgcacccatctgagggtccctggggggcaccacgggaagacatgacacccctgaacctgtgtaagtgtgaccctgcagtagggcagggagaacagttggaggggtctcctccctgcctccccttgggggtatccagagtgcctagggttgaattggaagggaggacacgcaggtagagaggacacagggttagctgtgtattcctgctatgcagacccctgcaactgagctgctgctcaattgtcctttattcatttgagaagcaggattgtgtcattcagtgacagcagaaagattccatctcttgtgccatttcaatcgattggtagtggctgccagccagactcctagggagaaagactgcggggatccattagtgatgtctgctacagcaggagcgtagggactggcagtgaacgtctgaactgtgtctttctgacatttttggtaattaagtgcttgacattgggagtcaagtgtgagttaagatctctgttcctccacagtctagctttatgtgaccttgggcaagtttcctcatttggaagatggagatcagcatagtcccaactctgtctggttttcttgaggattaagtgggataaagcacttagcacagcacctggttacagaaaactctgtatgccatcattgtaatgtcacttgctcgcttgcctgtcacaccagcactgtgttcattctgctcaggttgattggatgcccactgtgtgctgagcaggtgagggcagcccaggcttgtgccttagcgctcacgtgtgttgtgtaccagctctgtgccccatgctgagagctgttcccattttagaccgtcccaaagtaacactgggaggtaggggttttcatctccattttgcagcggaggaaacaggctcagagagggaaagtgacttgcccaggatcatacagggaggtatcttgaagccagctagaatttgaagtgacagaacaagcagaagagccagatgttaaaagggcctctggaagcccagatgagggagcaggttgttgcggtctggtgggtggtgtggacaggggtagctaggcagctggcactgatacgggggctttgagcttggaggcttcctgcccgcagccgccgcctccttctcctcctcctcctcctcctcctcctcctcctcctcctcctcctcctcctcctcctccctcctccctcctcctcctccctcctcctccctcctcctccctcctcctcctcctcctcctccttccccctaccctggatcccctgcagcgtcccgggcagagccggtgcgcgacatccgctgtgagttctgcggcgagttcttcgagaaccgcaagggcctgtcgagtcacgcgcgctcacacctgcggcagatgggtgtgaccgagtggtccgtcaatggttcgcccatcgacacactgcgagagatcctcaagaagaagtccaagccgtgcctcatcaagaaggagccaccggctggagacctggcccctgccctggctgaggacgggcctcccaccgtggcccctgggcccgtgcagtccccactgccgctgtcgcccctggctggccggccaggcaaaccaggtgcagggccggcccaggttcctcgtgagctcagcctgacgcccatcactggggccaagccctcagccactggct

SEQ ID NO: 20962 - DNA, 2300 bp, Homo sapien
gccagggtcatgctcgccactgaggggcagctcttggctttctctgggcctgtgggtaggggcggtgaaggtaaccagggttcctgtggcctagctttctcagtggtagttggaagcatcttggatagacaggggatcacctgatgggaggtgcccacgattggtcctgtcatcaagtcttcctggctgtccaccacgcagaggcagctctctgcgcctgccggtgaagccccacctcctgggctgcctgtgggcacggcaggcagggtttgggaagaaaccctccaggtgcagtgagcaggtttaacaaggacgtcccttacaacatcaggctttcccatatctttgtggacattagagtctgggggtgaccccagggtctcaccccctgcccaatggagccccccatttggcaccttatgttcccttgaagttgcttccactgagtctgccgtgcttccaggggcagggccttgagcaggtgtgcccttggctgcgtgagcccagcagccaccatcgcccccaaatagctcccatagcagggatcctaggggagagggtctgggagtatctgattacctagaatttggtcactgcctgtctacccaaagtccttaagctctctacactcccctcgatgccaaagggctaggcaggaaacaggatgtcctgcttcccaaacttcaaaagaaatctgcggcctgagtcttggaccccccaactgcctgagcagccaaaaatcacaccagaccctcctacctcaggcccccaaggccggccaaggtggcggccgtgaaccccccctgtgttttgtctccgcagctttagatagtgacgggggcagagagctggactgccagctgtgcggtgcctggtttgagacccgcaagggcctgtctagccacgcccgtgcccacctgcgccacctgggcgtcagcgatccggacgccaagggatcccccatagacgtgctccacgggctcatcaggagggacggcgtccagatccgcctcccacccaggcgcggcgccctggcccacccggggcggccgcctcccacctccgcggccctctccttgcttccccccccaccgccggccaagaaggccaagctgaaggccgcgggtatggccagcccctgggggaagcaggacctctcggccgccgcagccgccggcattttctgggcctctgatgtggagccgtctcctctcaacctctgtaggttctcgcttcagctgccccctcctcactgcgggccctggagcccctcccggggggggggtcacagccccctccctgctggggcagggagtagacaggggcccttggcagtgggccggttctgcccagagatcttgttggcagtgggctgctaggccctctctcttggcctttgacctccatgacccttcctgagaatgaaggccaaggtggggagatcctgccttttagtgtgcagagcacccacatctgcccctgtctggatggcacatagcacctaggctgcctccctgcctcaccctgtccttgttgggacccacagagcaatggaatcttggttccatcctcctccgccaggactgagggcccatgtgctctctggagcctcccctcactcctgccgggtatctggcccccagccccgctcctccactcccttacctgcacctgccctcaccaccctaacctgtgggcgtgctgctgccgcccacgcccagccgaccaggacactcctgcaggtgaccatgctggcagttccacgatgctaactgcccctttctcctcctgctgcagcctcaggcccagagccagcacgagacatccgctgcgagttctgtggtgagttcttcgagaaccgcaagggcctctcgagccacgcgcgctcccatctgcggcaaatgggcgtgaccgagtggtacgtcaatggctcgcccatcgacacgctgcgggagatcctgaagagacggacccagtctcggcctggtggacctcccaacccaccagggccaagcccaaaagccctggccaagatgatgggcggcgcaggtcctggcagctcactggaagcccgcagcccctcggaccttcacatctcacccttggccaagaagttgccaccaccaccgggcagccccctgggccactcaccaactgcctctcctcctcctacggcccgaaagatgttcccaggcctggctgcaccctccttgcccaagaagctgaagcctgaacaaatacgggtggagatcaagcgggagatgctgccgggggcccttcatggggaactgcacccatct

SEQ ID NO: 20963 - DNA, 2300 bp, Homo sapien
cgtgaaaattcacccttggttccctctgccacacactcctcacccagggatgctgcgggcctgatagatgtctcagaaacttaacacaaagttctgtgattccaactctttctgtccgaagtcagatagctgtaggtgcagacaccttaccccacttagggcccagcttgtgatcagtaggccacccctggtcccccattgtctctgcagccccagctgtcttgtctggtggagattcctcacaagtgctgtgaagccacctccctgtccctggctccctggctccctgcctctgtgtggcctctccagcctcctgaccctggtgttgtgttgaattccctctctgagtgcctcccaccctcaccctcgagacaggcagacgttccccctcacaagttctgcccagagagatcttttctttgagatcccctgggatgggagtttgggctcagatttgcattagaccccagacctgtccatgctgtagtgtgtggaagcagctgctggcgtctgctgtcagtggcagcctcagtgtccctgcactggactggtgctgggggttatggtggaacctcagctttcctggggtgagtcgcttcgcagagtgagagcggacatcaaggataaggaagaaggccatcttcttagttctgggtatagacagcctgaaatttgtctgggctgagcctgtctccccaacccacaggcctgggttctgaggaaaacgcaatggtggccatggacttgggctctccctcgctccctaagaagagcctgcctgtccctggggccctggagcaggtggccagtcggctgagcagcaaagtggctgcagaggttcctcatggcagcaaacaggagctgcaggacctcaagggtgagtggcccaggtggcatggcaggggatgctggccaggctggttacactcacaggagcactctcgtgccttggggttaatgtggggcccaaggttgcccgcagttttccctctggcaccttgaggcaccaaggttggcactcagctgtcttctctcttgaacttctactgtcctgggcatgcgtggccctgagctgcaccctcacggggcgagggacagcatccagaagcagtgggtgtggtggtccagagctcatactcagacccagctcatttgctgaatctggcctttgctagctgtgcagtctctcgcatgacaccatttcttcgtctgttgatcctaaggttgttattgactagtgacgggccctggggtggactccagggaggtgagaggagcaaaatgaatttggcccttgctcttgagggccattcaagttggggaacggggagacagagaagcagataggcaaggataaaggctctgtggaagagggtgcaggagactgcaaggaccagtgtttcgggcaggagttgagccacagagggtggttagaacttagttcagtgaggcatgtggctgtcaggtcagcgtttgtgtgaacctgttgccagggcaccccgtaggcctgaaaggttgtgaaaggtgtcccactggctggatgacagaagggctctatctcctgctgtgtgcccttgggcacaacttttccctctctgagtctcagtttctaacccttattggcaaagcagccaagctattctctgcgttgttagggtcattgtgaggtttggggggcctgacggaggcaaaacacttccatggagcctgggtgagtgggactctcaggggaggagaagcgggagagctgggccgtgggcctcacagcctgctctcccggcctctgtgttgcccttcagcccagagcctgaccacctgcgaggtctgcggtgcctgctttgagacccgaaagggcctgtccagccacgcgcgctcccacctgcggcagctgggagtggcagagtcggaaagcagcggcgcacccatcgacctcctctacgagcttgtgaagcagaagggtctgcctgacgcccaccttgggctgcccccaggcctggctaagaagtccagctcactgaaggaggtggtcgccggggccccccggcccggcttgctcagcctggccaagcccttggatgcccctgctgtcaacaaagccatcaagtcgcctcccggcttctcggccaagggcctgggccacccgcccagctctccactcctcaaaaagacaccactggccctggcgggctcccctacccctaagaatcctgaggacaagagcccccagctgtccctgagcccccggccggcctccccaaaggcacagtggcctcagtctgaggatgaggggcccttgaacc

SEQ ID NO: 20964 - DNA, 2300 bp, Homo sapien
ctgcaaagggagtggacaagtgaagggcccagtcttgcacagcctggctttgcacgagcctttacaaggcagagaacttggctacaaaaagtagttgggctctgaggaatggagagtgtctgaacagggggtatcgcccctgggactgctggaggctggggcttcctttgatactattccttctttttttttttttttttgagatggagtctcgctctgtcttgagatggagtatcgctctgtcgcccaggctggagtgcagtggcacgatctcggctcactacaagctccacctcctgggttcacaccattcttctgcctcagcctcccgagtagctgggactacaggtgcctgccaccacgcccggctaatttttgtattttgtttagtagagacagggtttcaccgtgttagccagcacggtctcgatctcctgaccttgtgatccgcccgcctcggcctcccaaagtgctaggattacaggtgtaagccaccacgcctggcccttttttttttttttttttttaaagatggagtcctgctctgtcgcccaagctggagtgcagtggcacgatcttggctcactgcaacctccgcctcccgggttaaagcaattctcctgcctcagcctcccaagtagctgggattacaggcgcccaccaccatgcccagctaattttttttgtatttttagtagagatggggtttcaccatgttgtccaggctggtctcaaactcctgacctcaagtgatccacccctcttggcctcccaaagtgctgggattacaggcgttagccaccgcacccggccccttcggtactattcctacttgcagctgctggggtcctacctagatctgtactctgggctcagtcagacccactcacaagcccacttgaagggcattcatgagcctgcaaaggggagggtggggctatcaaagccccctctccttggaggttcagagaggacaggggctggttgaggtgacacctcaggaaggggcagagtggggacttgacctcaggcttcttgcttctgctaaaggctgctccccaggcactcagctcacccacgtctggcttgtagtgtctcaggggtggctgcgagacagagctggctctgaggatggctaggggtgcaggaggcactggggtataaggaatcagcctacggatgagaggagccaggtttggcactgccctggccttgtccttgggagggagagctatgaccagtctttcagtgaataactgcgaggcagagggttggcggttagggagtgattgggaagatcttggaagccttgccttaagtaaggatatgcaacattagggctaggtctgggcactggcgctgcaaggctgtcgttagaagcctgccccctctccctaagtgggcaggagggggcgggtgccaggttgggggcggggcaatgttccgattctagccccacccaactgtcaaggaacagctggggacaatcggagagagaagcaggcggtgattgaaatgtgttgccggccttgtggggttccctaggtctgcggaacggcaccgtcgggggacggttggataacaggatgatactggagggattcttgtggttggagatcaggtgttttccaggatccccgactcggagatggagactttccggaaagggaatggggcagggtcctagggcaggtcctagctccgcccgtcggggctcttaagagttttgacgttgtttaagggggtctgagtgaggccggaagattcccatcctagggatagagatgtccggggactgggctggggcggcggttagaggccgctgggcgcccagcgtgggtgcatccgctagccagggcgcgcgacaagcttccagcagctgcagccgtccgccctcagggcccagacgaacggtttcgctcgtggcactcggcgctcggcgctcggcactcggcaggccaacctgggcgcgccctgaggggcggggcggagcgggtttggcggcggcggcagcggcactcggcactcggcgctcagctgctcccgcctggggcggccgccccgcgtgcgccggagccaagatggccgcctccaccgcccagtgccgagtgacaaaagcggagagcaaggcggcggcggggccgcgcgcggggggcgcccgggagcgcgcgcccgcgggggcgcccccgcccagccccccgagcccgggccccgcggcaccccccgcgccgccgccgccgcccccacccccgccgccgccgccaccaccaccgccaccgccaccgccgccgcgggacggg

SEQ ID NO: 20965 - DNA, 2300 bp, Homo sapien
aaacctggtgagattgccatctgagccctggggcaggtctgggcggtggaggagcaagggttgcggtgcagccctctcctggtttctgaaccccatcaccactgcctccccaggagcaccgcctaaatgagatggagagaactcaggctcagctgagggatgctgtccagagcctgcagctttctccaaggacgcgggggtcttggagtcaaccccagcccctcaaagcaccctgcctcaatggagacaccacctgagctgcccatcctgcctcatcacacgtggtctgggagcagagagatagccatcttagggggggtgtctgactttgccttagccctacttggcctacagtggggagtggagctgctggtcccaaccactctggcagtatgaagttgcccagtaaaatcttgatttcagtgaaattggtggtttctttgcccactaagaattgccaattcttaggcatttgccccgcaagccctattcatctctcccaaattctcccctaattagaagtctcatggagagggccatgtacacaagttctcaccagctgtgtgaccttagaccttcattctcttaagagcccgttttcttatctgtgaaatggacgtaaagttccctacacagtgagaggacccatagttaaaggcattcgataaaaggtattcaccattgttataggcagcacctgcttctcaatgaagcatggattccacccctggcaacctcccaatcccacagtgagagcatcttcctaggccctcctcatgtcacggaggccatgggtctgggaggcggataaaggaagggggtcaggtgtggagatggttggatactgtgtatgaatgattgggtaaatgagtcattcaaatcatgggtgagtggatgggtgaggggtagagtgggtggagcaaacggcagacggataggttagcatttgctggatgtttgacctggtaggtgagtagctgggtagttggttaaccaggttgggtatgtctgcctagaaaaggcctggttcatagtaagaaaaaatttttttcaatgttgtgattatatatatcatatgtacatatgttgaggtctcctgagacgcctgagaactgggcagtggagaaacaataatgaactagacaggactcctggcctcatggaacttacatgttagtggagggaccaaatcaacagacaaactggtggatggatgtttggggggctgggcggaaagatgtgtgtggggatggttgggtacttgcttggttgtatggataaatgagtatttacttgggtgctggatgaatgggtgggtagatgggaagtgaatgggtgggttgagtgggtgtttgggtgaattaataggtggttggaggggtgggtggataggtgattagttcattggataggtagatgagtgattgatagattgaggaagtggatgagatagctaggtggttagatatctggatacatggtggataagacaagacaacaggccatgatgtgtgtctgatggggtagtcctggaagctgtgatcctgggaactgggtggagaaggtgacttaggactgaagacctagggcaactctagggacatggaggtgctgaagtccagtgtggatgattgggaaggagggagtgagcttgtggttggaaggtagctgatggggggcaggggacaaaaggctaaaaattggctgggtggagtcttcaatgacctatcaatgacccatcaatgacccatgggggaacttctctgcaccctccccactcttttagtgcttttagcgagcctaccattggaagtaccagtgggacgataaggagccattggggtgtgggacgacaagggtgttgtcatggtaacggggcctctccctggactcaggccgtgcgggccctttaagggtgacccgcttggccactcccaacatggcggcgcgcccgctggccgccccccccggggcggcgaggggggggggggtggggtggggggggcgccccggacctccccatcatggcggcgcggcggggctgtcgcgctgaggtcacggcggcgcgccgggggggcggggcggcggggggagcgatttaaagggacaatgtcccccgagcggtggaggcggcggcggctgcggaggccgcggcaccggcaccgggagcggcagcggcggtagcggcagcgacggccgcaccaaggaggggagctccgagccccggcacctggccggcggcgccgcctccccggtgaggcccggcccggcctggggagcccgcgggtggggcggagccg

SEQ ID NO: 20966 - DNA, 2300 bp, Homo sapien
tcagcggcctgctggtgagctaggggacctgggtgaagttctaagagtccttgagcaacctggattctggtagtgagtggtgttttgggggtgctaggatcctggggacaattgggagctccccaagatgttgggtgcctccggaataacctgaagacaaggttggaggatgggtgtggcaggttttggtggtcatggccccagcccctatctggctgtgctgggctgcaggacaggttgtgcggcgtctctgtgcttctactgaggactgtgaagtggaccccagcaaatgtccagcctcggagctgccagagcaccaggccagacttcggaacagctgcgaggaggtcttcgaaaccattatccattcctacgagtgagaatcagggccccagcagcttagcccacccctgcttaccatgctagccccgacctccagtttagggtggccagataaaatacaggagacactcagttaaatttgatgcaataattgggaccatgcttatactaaaaaattactcatttgaaccaggcatggtgactcacgcccgtaatcccaatgctttaggaggccgagacaagaggattgcttgagcccaggagttcaaggccagtctgggcaacatagcaagactccatctctccaaaaagctttttaaaaatgagctaggcatggtggcacacacctgtattcccagccgaggctggaggatcgcttgagcgcaggattcaaggctgcagtgagctatgatcatgccacagcaccccagcctggttgacagagaccctgtcccaaataaaagtaaaaatataaataaaaatcactccgttatctgaaattcatgtttaactggatgtcctgaagtttcgtttgctgcatctggcaaccctatcaccatgcaaccctatcaccactgaccccaagtaacctgagacccaattccttgtcctgtaaccacagttgattccatatccccaatttcatgccactggctccagttaacataggacctcaatcctatgaccagatgatgccccaagtccatgatccctggctttaagtgaccctccacctcaaatcccatgcaactgatcacaggagacctgggattccaatcccttgacctctgaccctaggttaacctgcatacctaatccctgacttcaatcaagtgacttctgaccctaggtgacctccagagccccaatcctactttatatcttgtactctggcccaccagtctcatgtctaattataagtacatccaagctcataacctctgtcttcatgtgaccctgtatccccaactataagagtattatccccagcgattgccatagctacaccataagccatggccccatgctgattcataaccccaagcattgttatctcagatattcccaatcctagagcccagaccccaggttcagtgagaaggaagcctgcatgggcttcatgaatagctctctggaggatcatggaccaatcatgcagtgcttctgggactcccaaccttatgactttaacctttatgcccatagcctccccgtctgaccattcattgcctcttctgcaccagctggttccctgcggagctgggcatcgtgttctcaagctggcgagaagcatgtaaagaacgtggctctgaggtgctgggcccccgactggtgtgcgcctccctcttcctgcggctcctgtgccctgccatcctggcacccagcctctttggtttggcaccagaccatccagcacccggcccagcccgcaccctcacactgattgccaaggtcatccagaacctcgccaaccgtgccccgtaggtgctgggaagctaggggtggggggaccatgctgggagtgtgggggtggcaggtgcctgacctgacccacccagcctggccctgatccaggttcggtgagaaggaggcctacatgggcttcatgaatagcttcctggaggaacatggaccagccatgcaatgcttcctggaccaggtagccatggtggatgtggatgctgcccccagtggttaccagggcagtggtgatctggccctccagttagctgtcctgcatgcccagctctgtacaatttttgctgagcttgaccaggtatggcctgaacccagagtagggaggcaagaaggcttgggagactctgaccctggagactttgctcagtctctgtcctgcatgcctcaccagacaacccgagacaccctggaaccactgcccaccatcctgcgagccattgaggagggccagcctgtgcttgtgtcagtgccaatgcgtc

SEQ ID NO: 20967 - DNA, 2300 bp, Homo sapien
gcctgggtgacagaacaaggcttcgtctctctgggcacagaggctgatgctattcctgtattcccagcactttgggaggctgaggcatgaggattgcttgagcccaggagttcaagacaagcatgggcaacatagtgaggccccatctctacaaaaaacaaacaaacaaaaagttaaaaattagtcaggtagcatgcacctgtagtcccagctactcgagagcctgaggtaggaggatcgcttgagcccaggaggttgagaatgcagtgagctgtgattgtgccactgcactccagcttggccaacagagcaagaccctgtctcaaaaaaaaatcttattaaaaaaaaaagaacatgctaaatttgtgttatatgaattttacctcaattaaaaaaaaaataggccaggcatggtagcatgtgcctattatcccagctacttagggggctgaggtgggaggatcacttgaggccaggagttcaagaacagcctgggcaacaaagcaagaccctcatctcaacaacaacaaaaaaattgtttttaataagccaggtgtggtggcatgcagctgtagtcccagctactcaggaggctaaggcgagaggatctcttgagcccaggagttagaggttacagagagctatgatggcaccactgcactccagcctggatgacagacctcatctacaaaaaataataatattcatattatgtataatgtaatattatttatattactatgtaatataaatattatatttttattttatgagatctatattatttttatagacctcatttataaataataataataataagggccgggcacggtggcttacgcctataataccagcactttgggaggccaaggcgggcagatcatttcaggtcaggagttcaagaccagcctgaccaacatggtgaaaccccgtctctactaaaaatacaaaaaaattaggcaggcatggtggtgaatacctgtagtcccagctactcaggaggctgagtagggagaatcacttgaatccgggaggcagagattgcagtgagccaagatcgtgccactgcacaccagcctgggagacagagcgaaactccttctcgataaataaatcaattaataataataagagtaataataaatcttgccatcttccagaagccccccttgtaccctcttcccagccaccagtgcctccaaaagaaactgataccctgcttgttagacatggttttgcctgctttaggactttatgtaaatggaatcacaaagtgtatactcttcattgttttggggtttttaaatttatttattattgctttttagagatggggtctcccgagggcagggaggggaaaaagaaaaaaaaaagttagatatgaggtctccctatgtcacccagactggagtgcactgcctattcacaggcatgatcacagctcactgcagcctcgaactcctggcctcaagcgatcctcctccctcagcctcctgaatagctcagattactggcattttatggctttggttttggttttggctcaacattgtttgtgattcacccaagttaaatcattctttagtttgttctcactgctgtatgatattctgctgtgcgaagagatcacaatttattccttctcccactaatgggtacttaggctgcttccaatgtggggctattatgcattgtgctgggggggcatatctattggacgtctacctagcaatggaattgctgagtcagagaagatccagctagtagtgttagtagatcctgccaaaccgtttcccaacatgagtgaatgggtctacactccggccaactgtggattagagttctaggtgctttgtattctcgccagcatttgttcagcctgtactcattttgcagagaaggcaacggaggctcagagagaggggcaagtgctgcctccccgtcagggaggcagtctgggtccttcttgctagaagcctggtaacccacctcctctcttctcctccctcgaacctccagcaacctgcccgcactgtgccctcccagcctggctgtggggtggggtgggacagagagggtcacgtggagttgggttccgagggaggaagccaggcggggtgcagacggctgctgattctggggctggtcaggaaaccaaggtaagggagggagtggaggtgggggcagggggattcctggaggcagagctgagggtggggagggggccgagatgagggcagtatgtggacagacactgggcactactgtcactctctcgtcccccaggagaccccccc

SEQ ID NO: 20968 - DNA, 2300 bp, Homo sapien
ctgcagtgagccaagattgtgccactacactgcagcctaggcaacagagcgagactctgtctcaaaaaaaaaaaaaaaaaaaaaaaaagcctgtaatcccagcactttgagaggccaagacaggtggatcacccgaggttgggagtttgagaccagcctggccaacatgctgaaatcccgtctctactaaaaatacaaaaattaactggaagtggtggacgggcacctgtaatctcagctccttgggaggctgaggcaggagaatcacttgaacctgggaagcagggctgcagtaagccaagattgcaccactacactccagcctgggtgacagagggagaccctgcctcaaaaaataataataataaaataaaaaataaagctgggtgcagtggctcacgcctgtaatcctagcatttcgggaggccgaggcaggaggattgcttgaggccaagagtttaagaccaacctggccagcatatcaagactccatctttaaaaataataataataataaaactgttctaaaaaagtcttaaaattatttatcggccgggcatggtggctcacgcttgtaatcccagcaatttggtaggccaagttgggtggatcacctgagtcaggggttcaagaccagcctggcctacgtggcaaaaccccgtctctactaaaaatacaaaaattagccaggcatggtggcgcatgcctgtaacctgagctacttggtaggctgaggcagggaggcaggagaattgcttgaatctgggaggtggaggttgtagtgagctgagatcgtgccattgcactccagcctgggtgacagagcgagactccgtctcaaaaaaaaaaaaagttattgatgacttagattttcaacactgccttaaattttgcggcaaagaggatgcctcaacctagtccctgcctcagcccacaaccttcatatggttctaccaggcaaagctcctatccccaaatcctgggaaacgagcttggaggaggacattgtctcttactcccatgggaagtgtcccccattcactctatcacttagcaccctacatcctgagcttccactatgtgcccagcttttttctgggaggtccccagaaagaggacacctgaggaggccccaggggtggcccccaggggaatcccaggcctggctcaggctggacattcccaggcctgccctggctgagtctccagctggtgggtctcctggaaactccccgggctggttttgaggtgggagccccacagggaagcaatttacatacacaacagcccagtcatgtcaacctgccccatctgatgccagaataaaggggagatgggtccattctgcaggtctcagtcatgggcacccggagaagaggaaggacatttcactgtcagcccaggtgagtccagaagccagctcctggaacaatgccagggtcctgaacactcaagctcaacccctgctctcagctactgctggtggcttgaaatcaagggctggaactggatgagaggtgacagcccctggtccccatgggctcagagcaggcctcagcaaacactgtcctcggcccctgcacccatgctctgcctgagcctgaagtgttggttgcaaaaaaaagcaggaggcagtgccaacttcaggcctcagcaaacactgtcctcagcccccgcaccgatgctgtgcctgagcctgaagtgttggttgcaaaaaaaagcagaaggcagtgccaacttcaggcctctgcttctctcctctccctcaacacagccggtcttaccagtacagcaggcggcagctgagagtcccctctggtggccagcagcggctacagagccgtcactatggggagggacaggacttgaggggttgcctcggtccacctcactggagaatgggcagagtttatggagtctgaaccacctggtctccaggcccctctggggatgggcctggcttactgaccactgacctcagcctaggagggacagaagagactgggggagaccaggatgcccagatgaccttgacccagggtacgctgccccatgtccctgctgcctcccgcccacagctctacgagaggcaggtctgtcattcgccgctggactttgacagtggtcaaaggctctgctcagttctctgtgcctgtctccctccagcactgccgaggttctctgccgaggccaaccagaaataccccttggaagctggaatcctgcaacaatggcccagggtgtcctctggatcctactcggattgctactgtggtcagacccagggacaggtgagtcag

SEQ ID NO: 20969 - DNA, 2300 bp, Homo sapien
tgggatggccccaatcaactgcaaactcaaacagctgatgtttgtccagcctgtgccctgtgccaggagtggggctgaacaccacctcatcacatgggcttcttctgcattttatgcatagggagatggaggctcagagcagccatgtgactagctcaaggccacacatccacgaagcccactcttagtgctccaggccctttcacttactcctccttcctggtctccagctctttgagagcagagaagccaggcagatggcttcttttccttctctcttccctagaaccccgtatttagccagtggtcagtggagatgacctccgggacctcatccttaaccccttcctgggtctcagctacccccaccctttgtctctgtcccctgcagccactggaggggtccctctcaaacttcactctatgtggatctctgcattttccaaagtgcttctagtaagctcccccttggccagaattactggcaaaacaaaattcatatccctaaaaaataggctttcatgctgcgttaattatgaataaaaaattaataaaataagctcttcctcagaagtaaaaaagattaaagacacaaataaatataaatatttttttttaaaagttctaggagctgggagaatggcttgagcccaggagtttgagaccagcctgggcaacatagtgagaccctgtctctaaaaaaatgaaaaaaaaaaattagctgggtgtggtggcacgtgtctgtagtcccaactacccaggaggctgaggcaggaggatggcttgagcccaggagtcaccccagcctggatgacagagtgagaccaatcaactaacagggggcacctcccctactcaagcaccatccatggctccccactgcccaccagatcaagatccagccattcaaactggccttcacagtcaactcctgcatccctccagcctccacacctctcacactccaaggccagggaaagccatctgctaagtcacaccctccagtttctctgtgcttgagctctaccccctctcctgcacttgttgaaatccaacctctccatgcagtcccagctcaagtgtcacatcctccacgtcgccttccctgacctcatgtctgcctcctccaagcagcaaaacttcaattacttgtgtctcctcttcttcaccaggagacatgccccacacctcccacgccctctttccaagggcccagcaccaaatgagagcgtattcttagaaaaaagagggataaggaagtcttctaagtttaccacctgctggggcaagtggagattcttgtcttctcatctgtctgcccacgtgctaaggtcagccacacatccacccaccgactccggaggacagacacatccagaggcggagctgactctgtctccacacatctggagtagacgggttggccaaggacaacatcctggtcagagggtcaaggtgtctggcagtgggtggggaggagtggcggagggcgggttggcggggagcagaaccagtctggtgctgcttgttgaggttggaggtcttcctggaggaagaggctgcagagcctccaggggtgggtgccggggaagcttaggcccaggatccagagagaggggaagggctggttcccaagggctggtggagccagagaattcctgagggccccagaggaggcttctcgggggggtcagtggggccccagggggtgatggtttagagatcgctgtccaagcttgggagcaaacctggaagtaagggccatggggggtgttggtgtgggaggagtgtggtccagagcgggacttgggcgctaatgcggcccagcagtggcaggagggcggggagcctgatggtttgggacttctaggtgtccaagtctctgtctctcttcatctctccatctcagtctcagtctctctctctttccatcgctctccacccctccacacgcctatttcttgttctctccttttctagggggcagcgctggagtccccgcccagaaccctgcgggagcccggggcgggatgtccgggggcggacccctcggcacggccgggcggggttaaagggttgggccgtgggacggcgcggtcagatcccaggtagtggcgccggtggatccggatcgagggcaggaggctgagacccgcgggtgagtgcgcgcgtggtgagggctgtaacctgagcgcggccgcggcgctgcgctggaacccgaggctcgcgcggttcggtgctggcggggcaagggcgaaggtctgcgcgcggcggcgggcggggcgcagccggccacgggg

SEQ ID NO: 20970 - DNA, 2300 bp, Homo sapien
agacactgctttcaattctttgggggtatatccccagaagtagaatggatggattatagggtaattctatgtttaattttaattttttttaagatacaggatctccctatgtcacccaggctggggtgcagtcgcacgatcatagctcactgcagcctcgaacaactgggctcaagcaatcttcccatctcagcctctagagtagctgggatcacagacatgcaccaccatgctcagcttgtttaatcttaaaaggaaccaccagtggccgggcgtggtggctcacgcctgtaatcctagcactttgggaggtggaggtgggtggatggcctgaggtgaggagttcgagaccagcctggccagcatggtgaaactctgtctctgctaaaaatacaaaaattagcccagcatggtggcgggtgcctataatccaagctactcggtaggctgaggcatgagaattgcttgaacccaggaggcggaggttgcagtgagctgagactgtgccactgcactccagcctgggcaacaaaagcgaaactttgtctcagaaaaaaaaaaaaaaaaaaaggaaacaccatatggttttccccagtgcacaacagttccaatttgttcacatcctcaaccacacttattttctgtttttttgtttcagttgcaaccatcttaagactggtcatgtagtctgtattttaagtcataatatccatcccaattgggatctccaaatctgatgatgacccacccagctgttttcccaggaagtgttaactaataaaaatttcacttctgcagctgggcgaggtggctcacacctgtaaatctcagcacttgggaggcagaggtgggaggattgcttgagcctaggaatttgagatcagcctgggtaacgtcatgagactctgtctctacagaaaatagaaaaaattagctgggcatgatggtgtgcacctatagtcccagctactctggaggctgaggtgggaggattgcttcagcctgggaggttgaggctgcattgagccgtgatagtactctttagggtcactatttagcctgcgtgatagagtgagaccctgtctcaaaaagaaatttcacttctttatttttattatttttattttgtttcgagacggagtctcactctatcgcccaggctggagtgcagtggcacgatctcagctcacttcaacctccgcctcccaggttccagctattctcctgcctcagcctcccgagtagctgggattataggcgcacgccaccacgcccggctgatttttgtatttttagtagagatggggtttcaccatgttgtccaggctggtcttgaactcctgaactcaagtgatctgcccacctcggcctcccgaaatgttgggattacaggtgtgagccactgcacccggccaacaaatttcacttctgcatggaaaatgtggtttggcgttggctggcagaagacctaagtgaggcgtggtgtggtggctcatgcctgtaatcccagcactttgggaggctgaggtgggcggatcacttgaggtcaggagttcaagaccagcctggccaacatggtgaaaccccgtctctattaaaatacacaaaaaataattagctggatatggtggcaggtgcctgtaaccccagctacttgggaagctgaggtgggagaatcgcttgaacccaggaggcagaggctgcagtgagctgagatcgcaccaatgcacttcagcctgggcaacaagagcaagactctgtctccaaacaaaaaacaaaaaaactcacaacaagatcccatgagaactcactcactcactatctggaagacagcgccaaggggatggtgttaaccattcatgagaaaccagccccgtgatccaatcaccttccactagaccccatctccaacactggggattccagttcaacatgaggtttgggtggggacacagatccaaaccatatcagattctctgagatgaggctggtactgcccggagcatggtggtgcacggcagatgacaagcccttcctgcctgctcactgttttattaacattatggttacctgactgctttgttttggttccttaggagctggccctaaagcaaggacctgagtgcaagtaatttttttgggaagtaataacagaaaataccagcaaggaagaagacagtgaacccaaaagaattgaaaacaggtactcagataaatacatgtacacacatgttcagagtagcatatttcataatagccaaaatgtagaaacagcccaaatgtctgtccacagatgaatg

SEQ ID NO: 20971 - DNA, 2300 bp, Homo sapien
tggcccctgagatattcctggttggatgagaaatcttggggagactccagccttctcaggcacaaaactcccagagtagagagctccctctggactatctctcctgcccttggcctcaatttcctgttctgctacctggtccaggaatcaggacctcagtgatgaaacttggcttctcccaggctgcagagtcctgctggggtgtgagtccttgctcatggctcatgaaagttcaacatatgcttatggcttcaatattgggccagatttcacttcccaccttggccttcccaaggatgaattgtgtggtcccatgtgttggtgatctcagcatgaactgcaaaggaagaagaactcatgtgcatttttgcgcagctgggtgccgcatcccatggctgcccttggagggtctccctcttcattcatgtctctgctaaaaggtcacctcctcctggaagccctccctgattctctgatttattggattgtctgatttattggatcattgcctgtctctttacgtgatgtgatacctttgacagctgagcactcactgttgcatccccagtgcctggcacatagtaggtgctcaagaaacatatagttgcatgaacagccctgagaggcatagatttttctttttattttataactgaaagaagccctgagaatcagaaaggttaaggggttaactcccagcatccctgcaaagcctggagccaggaatcttaaaacaagtctacttaaacttgaaggattgtatagggatttcctggggttctattaagatgcaatcctgagttagtatttctggattggggcatgggattctgcatttcctgccagctctcaggtaatgctcatggcgcaggtccctggaccacactttgagtaactgagccttacagttaaagtgcatgttgccagctccttcccttcacctcctctttttgaggctctttcctctgaagactcctcctctgtccccctctaaagcccctcattccacatcccatctcccaaatgcaaaatctgagctcacagcaatttgggaggccgaggtgcgcagatcacgaggtcaggagttcgagatcagcctggccaacatgtgaaaccctgtctctactaaagatacaaaaaattagctgggcgtggtagtgggcgcctgtaatcccagctactcgggaggctgaggcaggagaatcgcttgaacccaggaagcagagtttgcagtgagccgagctcaccctccatcccgtcgcgccaatgcactccagcctgggtgacagcgcaagactccgtctcaagaaaaaaaaaaaaaaaagcctgagcccaggaggggcagtactgcccatcatcaaagcaaggacagagcagaaggagactccactcagggtcccctggctctgccttccactgtctcgacctcgtctgctctcagcttccctcagcgttacccttcacaggccccctctgtcctcctatgctgagcccagcatccaggttgctttcccagctggtctcgttatctccagaatctgaccctgggtaatccccagtggtgctgcattctttgttcctgctcctgtcagtcaggtctcagcctaggtcctgggctgctgggaggcaggacttgaattcctgccaggctggcagtggagggcaacaggcttctgtctctgaatctcctaaatctgcactgagaaatggtgcacagcattctcctggcccacatttggaggggaacttgggggatgttttgggagaaggcttggcctcacccagctcacctggcatctgaacacttcattcctttacctaccttcccctggtcttggaaaggcagggtggctgcacattttggggctcagatcaccattggctgccctccaacttaccctctgccttacatgagaggtaccaaggactgagtggccatgctcggtcaccctgaattggttcttctacagttatggtccccaccagtccccgggttttggttggctgccctggcacaaaggaggcatccaggctgtgaggattggctagtccagccccgcccagcctcctgaagtgtttcctagatctggggccaggagcaaaaacctcctggcaaaggaggagaggaggttgtgcgggacaaccttctcctgacagaaggtgccaggctgggggtggcagggctggatagggaggggcactgcccaagactgggatggctccagggagctggccctggtgatgggtgcttgcaggtaaccagaggtcaagttggctggtggttctagatgaggctgtct

SEQ ID NO: 20972 - DNA, 2300 bp, Homo sapien
aaaaatatttaaaaaccattttatactctaatagtaaaatgcaaaactcttgtttgacttattttaataggcttatatatttttaaaagtttaacattttatcaatatttttcacatttagaaatttttccctttgaaatctatgttggaatctattttttctccaaatgtctaattgtcccaaccaagtttaatgaatattttgtccttgtgtcatgattctaaataacaacaaattcacaagaaactatgtgtgtgtatatatatatatatagtgtatatatatagtgtatatatatatagtgtttgtgtatatatatatacacacacacatactatatatagtgtatacactatatatatatgtattttaaggcaacaaataaaaccatatatatatatgcctatcttaggcatgtatgtatatatatggttttatttgttgccttcattttgttccatttattatgtagtcctacatgagcagcatgaagtctacttttaaaaacactttaatatttggtagagtttgttctgtctcattactttgtgtttacagttttttttccctcgagttcctatttttttccatttgaactctgtgatcaggttagccagtttgacaaatacttttgaaaatgttaattaataaattttttggaccttaggtgctaatgtttgagttaacgatgctcttcaattcatggcaaattctcgtcatttttctatacaatacgtatttcttcccatttatctcaaatctctccttccagctctccatcagtatgattacaaaatggtggatacttttatctgtaaaacttgttgttggggtggatacattttaaaattctatatatgtttttatttcacagatgttgtgctggttcttaccttttcagaaatatagcactatgatttgtgctacgtttgcagcaccgtggttgcatgctatgatttgtgctatataaatgtagcactatgatttgcagcaccgtggttctaagtacatttattctcttgcttttagctatgatctagtccttttctcttcagttctgtagtggatacctggactgcttctatctctccagtgcaatgaccatctttgtgcatatctctttatctgcatgtctgataatttctctgggatctacagttgggaaccagcttgctgggctgtaaaacacacatctttccttggccatgtcctggaggttgccttccatattggcagcttctgtgcaccccactgtcagtgcatgtgacccctctacccacacctcagccaacccttggcaacacctacctttggccattctagcctcgaatagatgtgaagtggtacctcgttgtcagctagcttccatttctatgacagctagtgactttgcgcatctcctcttacatttctcatgtttgagcatccatgaattcttagatcaaatcctttgtctacttttcacttgggttacctgttcgttctcttgtagatttgcaggaattcctaacatattcagatattgttctggatatctatctatctatctatctatctatctatctatctatcttaggcatcttctctgaatctcttatctctcattggaatgttaattgggtccactgtatcttttactgcacagaaatccttaatttgcatgcgtatttatcctttatattttatcttgtttaagcttttggggttttaagaattcctactcttaagtcacaaaaatttctcctatgttatcatcttttaacattataattttacctttctcataaaggaaaagactccaccttgtatatgcagtagacaagaacctgtttctctctgttcccacatttccagtggtctgaacaacttccaccacactatccattctccaggggcgtgtggaccttcctttagcagatgttaagtttccccctattcacaggcctgattctgagctctctactctgttctatggatctgtttttctgttcttgcagcagtcccacagtttttttaaaattattttatttttattagtatgcatttgtaatatctcttaatatctggaagcttgggttctccttcttcaatcttttatttaaaaattgacctagcttggatagggcatggtggcttatgcctgtaatcccagcactttgggaggctgaggcaggcagatcacttgaggtcaggagtttgagaccagcctggccaacatggtgaaaccccatctatactaaaaatacaaaaattagttgggtgtggtggtgcacacctgtaatcccagctacttgggagg

SEQ ID NO: 20973 - DNA, 2300 bp, Homo sapien
tgctgggattgcaggtgtaagccactgtgcctggcccagtaggcactctttaagagcaggtgtcacacagtagaaactctatgtagaccatatgtagaccatgagtcacagagtgggcacactatgaagagcaggtggcagcagtaggcactctttatgtagagcaggcagcagtgagtaggcactctttatcaggagcagatgatactcagtaaacactctttatatagagcaggtggcatctgtaggcactctttatctagagcaagtggcattcaatgggctctctctcttttttatttttttgtgagacagagtctcactctgttgcccaggctggagtgcagtggtatgaactcagctcactgcaaactctgcctcccgggttcatgagattctcctgcctcagcctcccgagtagctgggatcataggtgcccgccaccacgcccggctaatttttgtatttttagtagagatggggtttcaccatgttggccaggctggtcttgaactcccgacctcagatgatctgcctgccttggcctcccaaagtgcttggattacaggcatgagctactgtgcctggccagtaggcactctttatgtattgcaggtggtactgagtaggcactttttatgtagcgcaggcaagagtaggaactcttcatgtagagcaagcagcactcagtaggcaccctttatgtacagaaggcagcccacagtaggtacactttatggagcacaggcaacactcgagcaggcagcactcaatagaccctctttatgtagatcaggaaacactcagtaggaagtcaccatatagagcaggtggtatcagtaggcactgtttatgtagagcacttggcactcagtaggcatgtgttatgtagacagcaactggtgctcagtgggcactcttcatatacagggggtggcactcaataggcactcactatgtagagcaggtggcacacagtaggcactctatgaggaatatcaggaactgagtatacagggttaatgtagagcacctggcacacagtaggcacactttatggaaagcacttggcacagagtagacaggatttagcacctggcacacagtagctgcccttcatttagagtattggcacacagtagaagtactttccatgcagcctttgtgcagagtagagactggcacacagcagctcaagtgctagttgccaccctttcccttcactcctttttggggctccctcctcttaggagccctcattgtcccccgctaaggccctcatcgaacatcccatttcccagatgggaagactgcacccaggaggggcagtactgaccaaagtcagagcaaggatgaggcagaatgaggactccattcatggttccctggctctgcccttcccctgcctggaccccatccgttccctctcatcctaaccctccacgtccccgctctgtcctcctatactgagtccggcctccagatttgcttttccagctgagctcttaatctccagaatctgacccaggtaatcctcagtggggctggattctttgttcccgttcctagcagtcaggtctccaacagggccctggactgcctggaggcaagacttgaactccatccagcagcagggggatagaggcttgtctcttccaggttgcctgattcagcatccagaagtggtacacggtgtcctaccggcccagggttagagaggagcacaggagatgatctggaacaaggcttggcctggcctggctcgcttgacacctgaactctcaagttcatgcttttatctgccacacactcagtaggtgctctttaagagcaggtgtcacacagtggaaactctatctgacccctctcggcttactctccaccttatgtgggaggtgctgagacctgaggatccagtgcctgtgctgtgtcaccctgagctggttcctctgcatccagctggtctcccacacccaggttttggccagctgcccagacatgggagcggcacccaggctgtggggattggctggcccagcccagcccagcctagcctcccacagccttccctacatcaggggccaggggaaaaaacctcccagaagaaggggagaggaggttgtgtgggacaaggtgctcctgacagaaggtgccagggtgggggtggtgggcctggggcatcctagcctgtgatggagatgggcactgggcaagggattgggcgcacacataggggagccccagccttcccacattctccattgctgcccaaggcccaggcagctcctggttgctggctt

SEQ ID NO: 20974 - DNA, 2300 bp, Homo sapien
cacactgcctgagattactccattataaatgtccctatattaatatggcattgacactaaagaatgggggtggagcagcatggcagagggaacggatttggacttgagggtctcatagtcttgagttcctatgagctctgcaacttggactagaggcctgccctctctgagcctcagtttgcttttgtgttaaatggacaccttctctcctctggatgccatcactcaggtctcttcaacaatgcccagggttctggcctagggagctgttgggagggtggtgggacagctttgggcactgtgatgcaggtgagcatctgatacaagcaggtgcacgttatatagagcacctggcacatagtaggtgcaccttatgtagagcacctggcacacagtaggtgtactttatgtggcgtacctagcacatagtaggtacactttatgcggcatacctggcacacagtaggtgctctttatgtagcatatctggcacacaataaggcacactttatatagtgtacctggcacacagtatgtgtgctttatgtcaagtatgttgcaccgagtagttttactttatgtaggggacctaacacacgggagaagcattttatgtggaacatctggcacacagtaggtgtgctttatttagagcacctggcacacagcaagcatggtttatataaagggccagggactcaagatacaggatttgtgaagggctcccagcatacagtagacagtatttatgtggagctcctggcacacagtaggtgcactatatgtagaatagccagcacacagtagacaagatttatgtagattacttgatgcagagtaggtgcgctttctgtgggtcaccaggtacgtagtacacatgctcaatgtggagcacctgacacacagtaggtatgctttatatacagcacatggcacagagtaggcacgctttatatgaagtactctgcataaagtaagcttacattatgtacagcatgctgcacacagtaggtgagctttatgtggcatacctggcacatagtagacagaatttatgtacagtatctgatacacagtaagtgcactttatatagtgaaactggcacacagtaggtgcacacagtagtgctttccgtacagtctttcgcatggagtagagacaggcacacagcagctcaagtgctagttgtcatccccttcccttcagtccctctttttggagctcccttttcttaggagccttcctccgtcgccctctaaggcctcatctgacatcccatttcccagatgggaagcctgagcccaggatggccacactgcccacagtcagagaaaggacagggcagaacaaggactccactcgggatccccttgctctgccctcccctgcctggaccccgtcagctcaaggcccctctcagcctcatcccctgtgcctccgctctgtcctcctaagctgagcccagcttctaggtttgctcctccagctgggctctttatccccagaatctgacgaaggtaatcctcagcggggttggggctggattctttcttcctgcttcaagcagtcaggcctcaactcaggccctgggctgccaggaggcaggacttgaactcttgccaggctgtgaagccagagatgagaggcttctgtctctgaatctcctaagtctgcaccaagatgtagtgcctgacatcctccccgcccatgtttggagaggagcccagatgatctgggacaagggttggcctggcccagctcagctggctgccaactgtcatgataagtatatgcttttatctgaacacccttgtcttggaagggcagggtggaggtaaacttggggttcagagtcccctctaaccaccctccaacttcccctgcaaactcccaagaaggtactgagacctgagaattcagtgctcgtgctggggcaccctgagctgcacccagtgggcccaaccccaggttttggctggctgcccaggcacggaagacacacccaggctgtggggattggctgcctcagcccagcccagcccagccccgcctcctacggccttccctagatcaggggccagggccaaagacctcccagcagaagaggagaagaggttgtgtgggacaagctgctcccgacagaaggtaccaggctgggggtggcagggctggaaggtcctggcctgggatgaagaggggactgcctaaggctggggtggctccaagatgctggcatgggaaactgggggtttcctggtaactggactcctagcaaactcccaaggattcaggtggggcc

SEQ ID NO: 20975 - DNA, 2300 bp, Homo sapien
gaagcattttatgtggaacatctggcacacagtaggtgtgctttatttagagcacctggcacacagcaagcatggtttatataaagggccagggactcaagatacaggatttgtgaagggctcccagcatacagtagacagtatttatgtggagctcctggcacacagtaggtgcactatatgtagaatagccagcacacagtagacaagatttatgtagattacttgatgcagagtaggtgcgctttctgtgggtcaccaggtacgtagtacacatgctcaatgtggagcacctgacacacagtaggtatgctttatatacagcacatggcacagagtaggcacgctttatatgaagtactctgcataaagtaagcttacattatgtacagcatgctgcacacagtaggtgagctttatgtggcatacctggcacatagtagacagaatttatgtacagtatctgatacacagtaagtgcactttatatagtgaaactggcacacagtaggtgcacacagtagtgctttccgtacagtctttcgcatggagtagagacaggcacacagcagctcaagtgctagttgtcatccccttcccttcagtccctctttttggagctcccttttcttaggagccttcctccgtcgccctctaaggcctcatctgacatcccatttcccagatgggaagcctgagcccaggatggccacactgcccacagtcagagaaaggacagggcagaacaaggactccactcgggatccccttgctctgccctcccctgcctggaccccgtcagctcaaggcccctctcagcctcatcccctgtgcctccgctctgtcctcctaagctgagcccagcttctaggtttgctcctccagctgggctctttatccccagaatctgacgaaggtaatcctcagcggggttggggctggattctttcttcctgcttcaagcagtcaggcctcaactcaggccctgggctgccaggaggcaggacttgaactcttgccaggctgtgaagccagagatgagaggcttctgtctctgaatctcctaagtctgcaccaagatgtagtgcctgacatcctccccgcccatgtttggagaggagcccagatgatctgggacaagggttggcctggcccagctcagctggctgccaactgtcatgataagtatatgcttttatctgaacacccttgtcttggaagggcagggtggaggtaaacttggggttcagagtcccctctaaccaccctccaacttcccctgcaaactcccaagaaggtactgagacctgagaattcagtgctcgtgctggggcaccctgagctgcacccagtgggcccaaccccaggttttggctggctgcccaggcacggaagacacacccaggctgtggggattggctgcctcagcccagcccagcccagccccgcctcctacggccttccctagatcaggggccagggccaaagacctcccagcagaagaggagaagaggttgtgtgggacaagctgctcccgacagaaggtaccaggctgggggtggcagggctggaaggtcctggcctgggatgaagaggggactgcctaaggctggggtggctccaagatgctggcatgggaaactgggggtttcctggtaactggactcctagcaaactcccaaggattcaggtggggcccttctggactctaatcggcccatctctttccctttctgtgtggttaccaggttactggaggccacttagttgttggttttggttgggactttctggacttcagatctcagccctcgtttactcacccctgagccctccctgccctgcccccagcagttcctgacttcgcccctatacactgtccccggagctcttccctgggcctcaggtcctcaccctgcatcccctctgccctgcaggatgtcgctgctgagcctgccctggctgggcctcagaccggtggcaacgtccccatggctactcctgctgctggttgtgggctcctggctactcgcccgcatcctggcttggacctatgccttctataacaactgccgccggctccagtgtttcccacagcccccaaaacggaactggttttggggtcacctgggcctggtgagtgtgacagcaaaatgtgtctggggtctcagggtggatggacttccagaggagcaggaatggggctcagtgagctaggtattgatggtggctggggtctgcgaccccagagaagcaagagagatggctcactcattcctctgctaactcactcattcctc

SEQ ID NO: 20976 - DNA, 2300 bp, Homo sapien
ctgtctccttttcttaatttcaccatttctctgcatcactttttcttttaaggcagccgttctcttatctgtcaaccatgggtcctagcagctcagttcttgtccgaaagctcaccttacccccaggggtcccataaatagccgcctatagtttcaatattatacctggttatatcttttctgtttaacctgggatcatatggagaagtcatcatgtgtgtggctcagctgtggtcgaggacacttggggcatgtcagagactttctggttcttctctgacatgtgatttgaaattgtcttttctcctccttgtcatctcttggccatgtttgtagcttgtccaaggtctgggagctagggtctctttggaattgtcagagttattattttagtctccctgagccaggtttcggaatccattctaatcacgcttgaagaaaactcttggttccacctgggacatgtctgggacatttaagaaatcacatttaaaccctatctggggcctgtctgtggggtacacagaggtcatgtcagactatctcaggtccatgtcaggagatgacagagagtgctatggcagacagggtgtccgaggtcctttaaaggtattttgtagagtgtggagctgtgttcagttgttgcagaacatgttgggatatataggagccatgtcaaggcgtgctggggtgtgctatgacctgttaggttgtgtcatagctttactgtgctgttgcagcctgggctggtccttcttcctctatcctcccttcgtcctttgcccttggcccccttcctgctatgctgggcatggagtggggaaagtgctggtaggcagccttgccctatacctgaagttcctctcttgccctctacatggcccctgatggtcctcgttcatgtcagctgccattgcacccaaggataatctcttcatcaggttcctgaagccctggctgggtgagtacctgcaggtgaaaggggttggggacaaccttgcggggagggtaggggaagtgctgctcttgcccactgtccttggctgccctactaggagaagggatactgctgagtggcggtgacaagtggagccgccaccgtcggatgctgacgcccgccttccatttcaacatcctgaagtcctatataacgatcttcaacaagagtgcaaacatcatgcttgtgagtcccttgaagtctgggtcccagatggagtcttggggtggagggaccatggacacatctggtctggaattttggctcttctgggtggcactgggccattgctcttcctctctgagccttggtttcctcatctgtaaaatggggatgataatccctacttgaaaggtcatttacttggcacacagtaggttctcagaaggtgtcagtttctgtgtttttctcacagaatccctgtaaactcaagagagtaaaaatgaagattgtgtagtagtcattgctgattataaaccacttcagaactcattggcttagagccataagggtttacaattgctaacgagtctgtgagacagctggccagttcttctggatgtggaagggatcactcttggcacatgagcagctgtgggtcggggggcagctttgctgatcctggctcagttcattcacgtttggggcttcagtaccttcagactcatctgggatgggctcagctgtgacacctggactttcccccatgtgattctctgcctccagaaggcaccctgttgttcacatggcagagactgggctccgagaaactgagaggaggctgcaatgtctgtggacattgtctctgcaatacttcaaagttcaaccaggtttgagtctattagagttattacatcatcatttcaccacattgtactggccaaagaaagtcgaaagtcaaaagtccagtacagactcaaaggggtgtaaaatagaacgcatctcttaatgggagttgctgaaaaattactgtggaaagggtacgaatacagggagaagtgaagaattgggggtcaggattttgtgaagtgtctaggatttgttttaaatatgcaaactgataagttagcttgttactgtctcatgcattctaacagattcctgggtcagagacaaagggtagttgattactcatggcacaataagcaacatgtacttcttgttggtttgtatcctttttctgagtcaacctaaattccatgggggtgacactggtgggcctctacattagcctgctcatgcagtacattgcatgacatacaatgggcattaggcttagggaatctactttaatagtggcaga

SEQ ID NO: 20977 - DNA, 2300 bp, Homo sapien
accacacatctgctttctttctcagtggatttaactattctggacatttcttataaatggaattatatactatgtggccttttgtgtctggcttccttcactcagcctcatgttctcaaagtgcatccacgctgttgcatgtatcactgattcaatctttgcgtggttgcataatatttcattgtgtggtcggaccacattttgtttatccattcattcattgatccagtttgcattgtaacataaacttttgtattttgcatctagcctgtttgcagactggcaagaaagagagtgggagaggagtcacagcctcctagtttagtttgttggggaacttccataaactaaataaagtagaagggctcctattggtgcagggaggagagctgccctggcagagaaattgggcagatctgactctgtggccactcagggaaggtgatgagagaagccatggctgatagcctaggtttttgctgttaggtttgggattggaggattggggttggggtcaaaaagaggaggagaccagcagagtcacgtagtggaagcatgctgggcccatagcctagaggtcagtggaccataaccattttctgctaagaagtttttgactgggcatggtggctcacacctataaatcccagcactttgggaagctgaggcaggctgatcacttgaactcagaagttcaagaccagcccgagcaacatggttaaaccccatctctactaaaaatacaaaaattagccaggtgtggtgatgcgggcctgtaatcccagctactcaggaggcggaggcaggagaattgcttgaacccaggaggcggaggttgcagtgagccgagatcatgccactgcattccagcagggacagagtgagactctgtctcaaagaaaaaaaaaaaaaaaagcggaattgtgatagagaaagagtaattcacacagagctggctctgcaggggactggagttttattattactcaaatcagtctccctgagcacttggggagcagagtttttaaggacaacttggtgggtggaggggaagccagtgagccagcagtgctgattggtcagagatgaaatcaaagctgtcttcttgcggagagtcagttcctgggtgggggccacaagatcagttgagccagtttatcgacctgggtggtgccagctgatccatcaagtgcaggatctgcaaaatatctcaagcactgatcttgggagcaatttagggagggtcagaatcttgtagcctccagctgcatgactcctaaaccataatttctaatcttgtggctaatgttagttctacaaaggcaatctaatccccagacaagaaggaggtctgctttgggaaagggctgttatcgtccttgttccaaactataaactataaactataaactaaatttcccccaaagttagttcaccctatgtcctggaatgaacaaggacagcttggaggttagaagcaagatggagttggttaagttagatctctttcgctgtctcagtcataattttgcaaaggtggtttcaattttccaggggagcaatgaggctcagagaggggaagcaacctgccctgcatctcacagctagaaagcagtggtgccgagaattaaacagagtctggacgtttccatgacatagggaagagatgacttccagctgaaggtggcaatcagggagcagcttgctcataaaattcaggtaggatttggacccataaagatagggaaaagcatgaaaagaccagcatgaacaaaggcagaaaagcaaggtgtaggtggtggtgcatggatctaataatcgtgatggcaataacaatagcagaataattattactatcaacatttataatttattaaattcttactttgtgtcaggacctgcacaaagcacttaaggtgagtgatcttatttaaacctcaatacattattattaatgcctttctgcagatggagtaaccatggcttggacagatgaaggaggcgctctcagatgtcctcccaggcaggaatcactagacacccccatgctcctaaccactgggtcttctttcctctcttccccaactaggggtggccgtcatgctggggctaaaccacacctccatgtctgaattcatcctcgtcggcttctctgccttcccccacctccaactgatgctcttcctgctgttcctgctgatgtacctgttcacgctgctgggcaacctgctcatcatggccaccgtctggagcgagcgcagcctccacacgcccatgtacctcttcctgtgcgtcctctc

SEQ ID NO: 20978 - DNA, 2300 bp, Homo sapien
cctctggatgccatcatttgggtctctccaacaatccccgggactctggcctagagagctgatgggagggtagtgggacagctttgggcgttgtcatccagctgggcatctgatacaagcaggtgtggtttacgtagagcacctgacacacagtaggtgcactttatgtagagcacctggcacacagtaggtgtactttacgtggagtacctaacacatagtaggcacactttatgtggcatacctggcacacagtaggtggtctttatgtagtgtacctggcacatagtatgtgtgctttatgtcaagtatgttgcacagagcagttttattttatgtacggggcccaacatacaggaggaacattttatgtaggacatctggcacacaataggtgtgctttatttagaacacctggcacacagcaggcatggtttatataaaggaccagggactcaagatacaggatttgtgaagggcgcccagcatacagtagacactctttatgtggagcacctggcacacagtaggtatgctttatatatggcatgtggcacagagtaggcacgctttgtataaagtactctgcacaaagtaagcttacattatgtagagcatgctgcacacagtaggtgaggtttatgtggtgtacctggcacatagtagacagaatttatgtagagtacctgatacacagtaggtgcactttatatagtgagactggcacgcagtaggtacacacagtagtgttttccatacagtctttcgcatggagtagagacaggcacacagcagctcaagtgctagttgtcatccccttcccttcagtccctctttttggagctctctcttcttaggagccttcctctgtcgccctctaaggcctcatctgacatcccatttcccagatgggaagcctgagcccaggatggccacattgcccacagtcagagaaaggacaggtcagaacaaggactacactcggggtcccctcgctctgccctcccctgcctggaccccgtctgctcacagcccctctcagcctcatcccctatgcctctgctctgtcctctaagctgagcccagcctctagatttgctcctccagctgggctctttatccccagactctgacccaggtaatcctcagcagggttgggactggattctttcttcctgcttcaagcagtcaggtctcagctcaggccctgggctgcctggaggcaggacttgaactcttgccaggctgtgaagccagagatgagaggcttctgtctctgaatctcctaagtctgtaccaagatgcagcacctgacatcctccccgcccatgtttggagaggagcccagatgatctgggacaagggttggcctggcccagctcaggtggctgtgaactctcaagttcatgcttttacctgccacatccttgccttgaaagggcagggtggctgtaaacttggggctcagagtcccctttaaccactccccaacttcccctctaaactgtgagggagatgctgagacctgaggatccagtccccatactggggcaccctgagctggttcctctgcacccagctggccaaaccccaggttttggccggcatctcccaggcaagggagatgcacccaggctgtggagattgactggcccagcccagcgcagcccagcctcccacgacctttccctaaatcaggggccagaggcaaagaactcccagcagaagaggagaggaggttgtgtggtacaagctgctcctgacagaaggtgccaggctgggggtggtcagactggagcctcctggcctgggatggggaggggcactgcccaaggctggggtgtctccaggctgctggcctgggagactggtggtttcctggtaaccggacccctggcaacctcccagtgattcaggctgggcctttctggactctaatcagtctctctctctcttctcctttctgggtggttactaggcaactagaggccacttggctattggatttggctggggctttctggaatttagctctcagtccttgtttattcatcccagagccctccctttcctgcctccacccaccccttccctgcttctctccactgtccctggagctccctgagactttccctgggcctcaggatctcaccctccatcctgtctgccctgcaggatgccgcagctgagcctgtcctggctgggcctcgggcaggtggcagcattcccgtggctgctcctgctgctggctggggcctcccggctcctggccggcttcctggcctggacctatgccttct

SEQ ID NO: 20979 - DNA, 2300 bp, Homo sapien
actgtgtgagggtttcggctctcgagtcaagataattcacttacttttaaaagaaaatactcagcgtttgaagaaaccaacaaaatccctcaaactcagtgtccatatagataggcagggaagacaaattgtaaggcgcttgtattttatatagctcaacaagagaagcacaagtatctatccctttcagacaacaaagatgtgccatttaattattatttccatgacaatacacagttgaataaatcattatatttgaatgcttcttggtgttgccaagtcctgacccacagggttttgtattaatctctgaagtccaggtaccaggaaagagaagagttattcaccgtcacaagttctcactctggaaaggagaaaaatggatgttttaatgaatctttgtaatttaccaatttaactatgacactttattgtggaaatgtattcatttcgctgcagccataatggaagagtgattttccttactttgctgagattctcagccccagtagccttctcaaggctaagccctggaattccatttgaaatcacccaaaagaaaagaacaaatatgagaaatgtatcacacgccatctgggtaagacaaaatgtaaattaaaagctttatcggatgatgggtggctcatgcctgtaatccgagcactttgggaggccagccggtggatcatttgaggtcagaagttcgagaccagcctggcaaacatggtgaaacaccatctctactaaaaatacaaaaattagccaggtgtggtggcaggtgcctgtaatcccagctactccggaggctgaggcaggagaatcacttgaacctgggaggcggaggttgcagtgagccgagatggcaccactgtactccaggctgggcaacagatcaagactctgtctcaaaaaaaaaaaaaattaatggatgaaatataaggctagacatttcttttcttttttcttttttttctgaaatacacctctttcttgcctccttggatatattctatcttgtctatcaaactctactaataaaatccatttgatatttaattttttaaaaactgaggttcaggctgggtgcagtggctcacacctgtaatcccagcactttgggagtttgaggcaggaagatcgcttgagcccgggagtttgaggtcagcctaggcaatgtagtgagaccctgactctattataagtaagtaagtgaaaaaaaaattttcaaggtgacaaacccagggaggggtagggcaaactggaataccggcaagtctgactcaagtgtcagatcaggtcatcctatataacctcagacatgccccaaaccctgtgctgctcacatatatactcagtgaccaccctcccagaagacactgcattgtgtgcgtttcagctttttgcgtcacctcagtgaaggtggttttcctgtccttagccatagttttctcccttcactaggctaagaggattcaaaggacagggatcattccagtcttttcccttcaatagcagcatctgagtggctgaccagagaggtatttccaagaagtgaaaactgggcttggggtgagaaaagctaaatgtcctaaggggtttccttttagatgacggagggagataccaggggactcctccctcccgggaggtagggggagggggtgcacccggcggctcccctgagaggccccacaggcacatctcaggctgtcctctgggaagaaatgacccaggagctgatattcatgaccctccaagagacccggcagcttgtgggcatctcagatgagccccaggcagttctgaaacccaggaccaggaaaagataagagggtgggctgaggtcacatcaccctgtaacgtttccaaaagggaactgtcaggcctctgagccgaagctcagccattgtaacccctgtgacctgcacatatatgtccaggtggcctacaggagccaagaagtctggagcagctgaaaaacaaggaagtgaaacagccaattcctgccttaactaattaacccaccttacgacattccaccattatgacgtgttcctgccctgccccaactgatcaatcgaccctgtgacattcttctggacaatgagtcccatcatctctccaccatgcaccttgtgactccctcctctgctgacaacagataaccacctttaactgtaactttccacagcctaccccagccctataaagctgcccctctcctatctcccttcgctgactctcttttcagactcagcccacttgcacccaagtgaattaacagccttgttgctcacaca

SEQ ID NO: 20980 - DNA, 2300 bp, Homo sapien
gtaatttaccaatttaactatgacactttattgtggaaatgtattcatttcgctgcagccataatggaagagtgattttccttactttgctgagattctcagccccagtagccttctcaaggctaagccctggaattccatttgaaatcacccaaaagaaaagaacaaatatgagaaatgtatcacacgccatctgggtaagacaaaatgtaaattaaaagctttatcggatgatgggtggctcatgcctgtaatccgagcactttgggaggccagccggtggatcatttgaggtcagaagttcgagaccagcctggcaaacatggtgaaacaccatctctactaaaaatacaaaaattagccaggtgtggtggcaggtgcctgtaatcccagctactccggaggctgaggcaggagaatcacttgaacctgggaggcggaggttgcagtgagccgagatggcaccactgtactccaggctgggcaacagatcaagactctgtctcaaaaaaaaaaaaaattaatggatgaaatataaggctagacatttcttttcttttttcttttttttctgaaatacacctctttcttgcctccttggatatattctatcttgtctatcaaactctactaataaaatccatttgatatttaattttttaaaaactgaggttcaggctgggtgcagtggctcacacctgtaatcccagcactttgggagtttgaggcaggaagatcgcttgagcccgggagtttgaggtcagcctaggcaatgtagtgagaccctgactctattataagtaagtaagtgaaaaaaaaattttcaaggtgacaaacccagggaggggtagggcaaactggaataccggcaagtctgactcaagtgtcagatcaggtcatcctatataacctcagacatgccccaaaccctgtgctgctcacatatatactcagtgaccaccctcccagaagacactgcattgtgtgcgtttcagctttttgcgtcacctcagtgaaggtggttttcctgtccttagccatagttttctcccttcactaggctaagaggattcaaaggacagggatcattccagtcttttcccttcaatagcagcatctgagtggctgaccagagaggtatttccaagaagtgaaaactgggcttggggtgagaaaagctaaatgtcctaaggggtttccttttagatgacggagggagataccaggggactcctccctcccgggaggtagggggagggggtgcacccggcggctcccctgagaggccccacaggcacatctcaggctgtcctctgggaagaaatgacccaggagctgatattcatgaccctccaagagacccggcagcttgtgggcatctcagatgagccccaggcagttctgaaacccaggaccaggaaaagataagagggtgggctgaggtcacatcaccctgtaacgtttccaaaagggaactgtcaggcctctgagccgaagctcagccattgtaacccctgtgacctgcacatatatgtccaggtggcctacaggagccaagaagtctggagcagctgaaaaacaaggaagtgaaacagccaattcctgccttaactaattaacccaccttacgacattccaccattatgacgtgttcctgccctgccccaactgatcaatcgaccctgtgacattcttctggacaatgagtcccatcatctctccaccatgcaccttgtgactccctcctctgctgacaacagataaccacctttaactgtaactttccacagcctaccccagccctataaagctgcccctctcctatctcccttcgctgactctcttttcagactcagcccacttgcacccaagtgaattaacagccttgttgctcacacaaagcctgtttaggtggtcttctatacggacatgcttgacacttggtgccaaaatctgggccagggggactccttcgtgagaccggccccctgtcctggccctcattccgtgaagagatccacctgcgacctcgggtcctcagaccagcccaaggaacatctcaccaatttcaaatcgggtaagtggtctcttcactcttttctccagcctctgtcgctaccctccaatctccctgtccagtctttttcttctctagtagagacaaaggagacacattttatccgtggacccaaaactctggcgctggtcacagactcaggaagacagtcttcccttggtgtctaatcactgcggggacgcctgcctaattattcacccacattccactggtgtctgatcac

SEQ ID NO: 20981 - DNA, 2300 bp, Homo sapien
aaggttctccacgtccccaccagactcagaagcccagctggcttcacccagtggatcccgcaccggggctgcaggtggagctgcctgccagtcccgcgccgtgcgctcgcactcctcagcccttgggtggtcgatgggactgggcgccctggagcagggggcggcgctcatcggggaggctcgggctgcacaggaacctacggaggccgggggctcaggcatggcgggctgcaggtcctgggccctgccccgcgggaaggcagctaaggcccggcgagaaatcgagcgcagcgccggtgggctggcactgctgggggaccgagtacaccttcccgagcagccgctggcccgggtgctaagcccctcattgcccggggctggcagggccggccggctgctccgagtgcggggcctgccaagcctacgcccacctggaactctagctggcccgcaagtgccgcgcgcagccccggttcgtactcgcgcctctccctccatacctccctgcaagctgagggagccggctctggccttggccagcctagaaaggggctcctacacctataagtgagaatatgcggtgtttggttttttgttcttgcgatagtttactgagaatgatgatttccaatttcatccatgtccctacacaatgagaacatatggacacaggaaggggaacatcacactctggggactgttgtggggtggggggaggggggagggatagcattgggagatatacctaatgctagatgacgagttagtgggtgcagcgcaccagcatggcacatgtatacatatgtaactaacctgcacattgtgcgcatgtaccctaaaacttaaagtataataataataataaaaaaatccaaaaaaaaagaaaagaagagaaaagaaaggggctcccacagtgcagcggtgggctgaagggctcctcaagtgccgccaaagtgggagcccaggcagaggaggcgccgagagcgagtgagggctgtgaggactgccagcatgctgtcacctctcagtgggagcaggtgtgacaagagttgggcaaatcagacctttaatccaccctgataggctggagtgtgggcttatggcatttctcctttgacccaattaacctccactcccaatgtatctctgtgcagaaggctcagctaggtgtatcagccattgtaaatcctcaacataaattataatttaacctagaatacagagactaggtagcaggaggagaggaaatgtagagatactaatctcttctcccttatcagaaagaaacctagcataagaaatttcacgcttaatgggccaaagagtaaatcagaaaactccatgggtgatggtatgctcatggtggtggtggtggtgatggggaattatttgccctcctgtgacctcccttggattaatttctccccaggacaatgggaaaaatcatttaatccttggagttttttttttttttttttttttttttttttttttttttgcttgagagtgactctgatcctgtttctgatggtcatgttcctcagcatcatactgagtaagtcactggccttgtagcatctggagtgattggagtgatccaagatccctagttcccatgtcacaaatgaggatcccacatatctgggacagagatggaacattatttctgggtgtgtctatctaatctattcatcctatctatctaatttctcatctatatatatatttgcctacccatccatccatcaatccatcttagctgtacgtttatccattccatctatttatcctattatctatgtatctatctatcatctattaatagctatctatccatctgtctaatatatccattatctatatctactttatctatctacctaatgtatccatcctatctactctatctatctgtgcatctacccatccatctggaccctgagctgattcctctgcacccagctggcctgacgccaggtgttgattggctgcccaggctcaggagacacatccaggctgcagggattggttggcccagcccaacccagccagccctcccacagcctttgctatatcaagggccagggtcaaaggcctcccagcagacagagagaggaggttgtctgggacagactgctcctgacagaaggtgccaggctgggggtggcaggcctggggggggtcctggcctgggatggagaggggcactgcccaaggcccacgcagctcctgggtgctggcctggaggatgggtggtttccgagtaactgaaaccaagcccctggcaacctcacagtgat

SEQ ID NO: 20982 - DNA, 2300 bp, Homo sapien
aggaacctggacaggtcctgcaggatggactcgctgtgcaagcaaactgctcccggcacacctggttcatgatggagacatcagctgcatgggtccggtaacagtcgtgcacagagacgaaggtcaggcccttcctgtagcagtgcagggtggtgagcatcatgtgtgaggagtccagcgagtggatgaagttgggccggaagccgttcttctgcttaggtgtgttgggcttccggctgatgtctctgttgtgggtgtaagtgatgctctgaattccacctcctgattgcttgaccttggactccaggcgatacggctggatgatggggacgcccaggggggtgacccactccaccacagagcccgtgtgggagacgaggtgggcgctctcgatcagccagtgctggatggcccgggtccccgagaacatctcctgtagactcctgaagacctggcgtacgaggtagtgggaggcctcccacacgaactcctggggaaagtcgttcagctcccggaggcgcttctcaatctgcaggcgcccaccgtagcgggtgaccccgtacaccacggtcatcactgtctgcttcaccaccttgcgggtgatgaaggcttccagcacctgtgccacccgcatgccccgctgggcgtcctgcctacggaacacctccacctgcgcggccacgccgctgtacacgtcctgcggcacatccgagggctccaggttgactgaggcggcgcccacgctgtcgcggcccagggcagcataatgctgtaggccgttgcatctactaaacatttaaggaaggaattataccaattttcttccatgtcttttgaaagacagaagcagaggaaatattgcctaattcattttatgaggccagcattatacctaatggcaaatacagacaaagacatgacaagaaatgaaaagagaaagaagaaaagaagaaagaaacaaaaaaactatacagattaatattgctcacaaacctagatgcaaaatcctcaagaaaatatcaaatcaaatccaacaatgtataaaaataattacatatgttaacaggggtgagatgacatcttatcatggttttgacttgcatttcctagatgattagtgatgttgaccattttttaatgtatgtgtttgccatttgtatctcctcttttgagaaatgtctattcagatagtttgcctattttttaaaaggattattttgaggtggtttttttttttgctattcagttgtttaagttccttatgtattctaattactaatcccttgtcagatggatgatttgcaaatattttttctcattctgtaggttgtctcttcactttgttgatttgtttctttgctgtgcagaagctttttggtttcgtatgaccccgtttgtctatttgcttttgttgcctgtgcttttgaggtcttaccaaaaaaaaaatccttgcccagaccaatgtcctgaggtgtctcccagatgttttcttctactggttcaaagtgtcgtgtcttgcatttaagtctgtaatctattgtgattgttaatattgagtgtcaacttgattggattgaaggatgcaaagtatttttcctgggtgtgtctgtgagggtgttgtcaaaggagattaacatttgagtcagtggactgggaaaggcagacccaccctcaatctgggtgggcacaatctaatcagctgccagtgcagccagaaaaaaagcaggcagaaaaacgtgaagagactagactggcttatcgtcccagcctacatctttctccctcgctggttgctttctgcccttgaacatcaaactccaaattcctcatctttgagacttggactagtttccttgctcctcaccttgcagacagcctactgtgggacctcaccttgagattgtgtgagtcaatattccttaataaacccccctttatatgtacatctatcctactagtctgttgctctaaagaccactgactaatacagattttggcaccaggagtggggttcatacatctatcctattagttctgtccctctagagaaccctgactaatacagattttggtaccagaagtgggattcatacatctatcctactaattctgtccctctagagaaccctaactaatacatctatcttgatttgatttttgaataggatgaaagagaggggtctagtttcttcttctaaatatgaagatccagttttttcagcaccatttattgaagagactgtttttttctaactgaatggtctttgcacttttgtcaaaaattagttggctctaaattc

SEQ ID NO: 20983 - DNA, 2300 bp, Homo sapien
cagaggctgcaccacatctggaggctgcagggggaacttgatgtggctcctggtggggaggtgcattactcagggttctctttagaaactgaattgacaggatatcttcccgcttatatctcatgcatgtatgagacagagagagagagagagagcgtgagagagagagtttattacggaaattggaaaatgtgatgatggaggacaagaagtcccatgatatagcatctgcaagccagaaaccagggacactggagttgtaaattcagtctgagtcccaaaaggcctgagaacctggagttctcatgtccaaggacaggagcagatggatgagcacatccaccctttcctctgcctctttgttgtatctgcaccatcaaaggattggatgacacccacccccactggggaggtggatcatccttcctcagtttacctattcaaatgtgaatctcttctggaaatacaccgatggacacatccagaaataatgttttaccagcatgttttatctgggcatctcttggctcggtcacgtggaattcatgattaattcaggatgcctagaattaaccatcacaagggctgacggcctctgccttgttttcaggtcactcccacggaagagggcatgaagacattgacccagctggtgaccacatatccccagggctttaagttgtggctgggtcctaccttccccctcctcattttatgccaccctgacattatccggcctatcaccagtgcctcaggtacccgtgcagagcttgtggtagtgggggctgggaaacatcaaaggccttctagcctctcccctccccaagcttctgtgtggcccctgcagggcccaggcccctcttcctgcttctctctcagccatgttcctctttccttcatgtattcacgaaccccccatgtcagcgtctcctccctccactgccatctctctctgcctttgtgttctgggcaccactggggctccaaaaagcctcaatttagggccctgtcctcgagaaagccccgtgcttgaggaaatggatctggacagagacatctcaaacttcgtggagtcaggaattggcaagaaggagatgggtgtgacaactgggagaacaaggtctttcctgggggcagattggaaggcttcctggaggaggagttgctggaaaaatgagtaaaaagattttaaagcaaggggaagggtgatgcagtggacatcattagtatacaggtaccgctgccaggcctggcatcagccttgtctgtccctaagcctatggtactagggggatttgaggctggtggagaatctgggctgctatttatgtgatgttcaagtctggtgagtttattccttttacctcatcctgtcactcatccaccctattcatggctctcctgctccaggccccagcaatctccagtaggagatcccaccccagtctggggccctttctttacctctgctcatcctgtgcttgaacaggccagactaagcaggggcaggggaagcatcccacagaaactatggctataacctcaggatgctgagtgactctgggcaggtcctcagctctctctggctgctgaagtctctttcagttgcgagtgatggaaactcagactcatgtggtctaagcaaataaagagaatcaatgtgctgtaagtctggggagagtggtcttcaggcatggttggatccaggtgtcaattaatccacatcactgggaatctgtctccttctctcgattttaccattctctgtgtcactttgccttttcatatggtgtcaacgatgagtctcagaagcccagttccaatcagaaagcccacctttcttccaagggtcccatatatagcctatgttttctacattatatttgattgtatctggtatatgcttccacctgggatcatatacagaagtcatcatgtgtggggctcagttgtggctgaggacatttggggcatgtcagagtctttttggttcttgtctgagatgtagtgtgagattgtctttttattctacttcaaatgtcttggccatgtttggtgcttgtccaaggtgtaggacccagggaatctttgagaactgtctgagatattatttgagtcttagtatagttaggtcttagggtagatttgaattatgccgaagaataggcttggttatacccgggccatgtttaggacattagtgacatcatatttaaatgttatctaggacccttcactgggatacacagaagtcatatcagaccatctcaggtccatggcagagcatgttgtgtcattta

SEQ ID NO: 20984 - DNA, 2300 bp, Homo sapien
gagccaggtgctgattcaaagacctcaagatatttcccctctgggaccatgacattgcctgagattcctccatttatacatgtccctgtattaatatggcattgaccctaatgaatgggtgcagaacagcatggcagaggaaaaaggtttgggcttgaggatctcacaaacctggcttcctgtgagctctgtaacttgggctagaggcctgccctctctgagactcagtttgctcttttgttaaatggatgcattcccttctctggatgccatcactcaggtctctccaacaatcccagggctctggctcagagaaccgaggggaggttggtgtgaaggctttgggcatggtgacgcgggtgagcatctgacatgagcaggtgcacttgacctagagtaggtggaacacagtaggcatgctttacctagagcccctgccacatagtaggagtgctttgtggagagtgccttgcacacagtaggcattctttatgtcaagaactttacatagagtagttttactttatgtggagcacttgacacacagaaaaaacactttatatagagcatctggcacacagtaggtgtgcattatgtagagtaccggccacacagagtcagagtttatgaagagtacccagcatccagagtaggcacgctttatgtagagcacttgacacacagaaagaacactttatgtagagcatctggcatacagtaggtgtgctttatgtagagtaccggacacatggagtcacagtttatgaagagtacccagcacccagagtaggcacgctttatgtagagcacttgacacacagtaggtgcacttgacatagatcaccaggcacgtagtaaacatgctctacatagaacatctgacacacagtaggtgtgttttatatagagcagcaggtgcagagtaggtacactttacataagttactccgcacaaatttcactttatatagaggaccgagaacaaagaagcaagattttctgtagagcgcccagcacacagtggacacacttttcatagagcacttggcacacagtacacaacatgtatacagagtacctggcacatggtaggtgtgctttatttagagtccagtacacagtaaaagaactttgcatattgtcttttgcaaagagcagagactgacacacagcagctaaagtgctagctgccagccccttcccttcactccctcctcagaatctttcatctgtccccatctaaggcccattttcctgtgatccctcctctgtccccctctaaggccttatctgacatcccatttcccagatgggaagcctgagtccaggaggggctcactacccacagttagggcaaggggagggcagaataaggactccactcagggtcccccatctctgccctcctgtccctggccccatccactcatggcccctctcagccttacctcccatctcccctctctgtcctcctatgctgaacctagcctccaggtattctcctccagcggggctctttatctctaaaatctgaccgggtaatccccagcacagttagatagtttgttcctactcctgtcagtcatgtctcgacccaggccctgggttgcctggaggcaggacttgaactcctgccagactgtgaagccagaggccaggagcttctgtctctgaatctcctaagtctgcactgagaaatggtgcatgatgaactcctggaccacatgtggagaggagctcagaacatgatctggcacaatggttggcctggccccactctcttgccacctgaactctcaagttcatgactttatctgccacactcttgccttggaagggcaaggtggctgtaaactttggggctcagagtcacctttgactcttcctcaagatcccctcccactcaggtgtgagatgttgagacctgcggatcctgtgcccatgctgtgtcaccctgagctggctcctctgcacccagctggccctacgccaggttttggttggttgcccaggcttggaagacacacccagtccatggggattggctcgaccagcccagcccagcctcgcctcccacagccttccggaaatcaggggccagaggcaaagacctcctagcagagggggagaggagggtatgtgggacaagctgcttctgataggagccaggctggcagtggcagggctggagggtcctggcctgggatggggaggggactgcccaaggttggggtgggtcaaggctgctggcctgggagactggtgatttcctggtaactggacccctggcaacctcccag

SEQ ID NO: 20985 - DNA, 2300 bp, Homo sapien
ggacgtgttctgtggggaccatgtcagcagagacctggttgtcaggggtgtggtcagctaatgcggtgccaccgaaggactccccagtggggcctactcagtggggccctggtcagtggaggcctggttgtaaggggcactgttggcagtgaccttgtcattgagctcctggccagttgggaccagtcagtggtttgggtcagtggggcctggtctgtggggccatgtcatgtggtctggtcagtggggccctggcagtgtgggcctggtcatcagaagcctagtcagtgggggggcctactcacgggggtgttggtcagtgaggacatggtcattgtggtcggcttaacgggatccattcaatgagggtcaggtcatggaaaatctggtcagtggggtttgatcagcaggggactgctcagtggggatcggaccagtggggcctggtcagcaggcggccggcagttcctggggcctggtcagtggggtccagcagttgggacctggttgattggagggtccagccctacgggacttagcgggtgttctccccgtgtgcagagacgagagagcgtaagaaataaagacacaagaccaagagataaagagaaaacagctgggcccgagggaccactaccatcaagacgcggagaccagtagtggccctgaatggctgggcacactgatatttattgcatacaagacaaggggcgtagggtcaggagggtgaatcttctaagtgattgacaaggtgaagcaagtcacgtgatcacagcacagggggcccttccctcttaggtagccgaagcagagagagagaaggcagcatacgtcagcgttttcttctatgcacttacaagaaagatcaaagactgtaagactttcactattccttctaccgctatctactacaaatttcaaagaggaaccaggagtacgggaggaacatgaaagtgaccattggagcacagcaccacaaggaggggtttaggcctccggatgactgcggcaggcctagataatatccagccttccacaagaagctggtggagcagtgttccctgactcctccaaggaaaggagactccctttcgcagtctgctaagtaacgggcgccttcccagacactggcgttaccgcttgaccaaggagccctcaagctgcccttatgcacgcgttgacagagggctcacctcttgccttctaggtcacttctaacaatgtcccttcagcacctgaccctctacccgccagttattcctaggttatgttagtaacgcaacaaagagtaatattaaaagctaatgattaataatgtttataataatgattgataattgtccatgatcatctctatatctaatttgtattatgactattcttattctaactattttctttattatactgaaacagtttgtgtcttcagtctctcacctcggcacctgggtaatcctccgcccacagtcaataggggtctgcagctggggcaaggtcagcggggatctgatcagtgagacctagtcaggtctcactgactgactaggccctgggggttggggcctggccagcaagagtccagtagttggggcgtgtttggcgagggtctcatggttggggtctggccagcgggggtcccacagttggggcctggtgagcagagatctggcagttgcagcctcgtccatgggggtctggcagttggggcctggtcagcggggtcttatagttggggcctgtttggagggggtccagcagttggggcctggtcagaggggatacggcagctgggggttatttggcagggatgcagcagctgggacctggtaggtggggtctggcggttggggcctggtcagtgaggatcagatcagtgcggtctaggcagtgaggtctggacgctgggccttcatctgcatgggtctcgcagttgggacctggtcagcaggggtctaccagttggggcctggttggcggaatcaggcagttgggacctggttgtcgggggtccaacagttggggcctggtcaaaggggatccagcagttggaacctggtcagcagggctctggcagttggggcctggtcattggggtctggcagttggggcctggtcaacaggggtccaggagctgaggcctggttggtgggccgtctagcagttgaggcctggtcatctgggcccggcatttggggcctgatcggcggggatcagagcagtgaggcctagtcagtgaggtgtggatgtgggggcctggtaagcaggggcccagcagttggggtctggtcagcaggggtctc

SEQ ID NO: 20986 - DNA, 2300 bp, Homo sapien
gagtttggagacggggctgtgtggccatcccggctgcccgcggggctcttgctcaccctcgtcacctctggcatctccccggcagcacttagcagcccagtgagagagcggtcaaggcaggcgtgtggatggatccagggccctctctcaagggttctgacagatgagggtcgaagaagggccaggctgtccagtctctgggccagagaggatgggcaaagtcaaggaacaggcagggtcagcagccggggtgcagggagaggcaggtgtatgctggaaggtcaggccccacgagggcccttgggggcatcaagtgggacagggccccggcgcaccctcagtgccctgggcaggcctcgggccagtgatgtggtcactccctcgggaaatgctgttgggaccggaccacccaccctgggccacacccatcccgcctcaggcctggattttctgagctcccgcagagtgtgctgcctagcccaggaggggcacccccattgtgcaatccaagcctcgccctccacaagccccaggcagcccctgttgggtgggccctagttccctcttctcccaggccccagcccctcccaggcgccagctggcagggaagcaccggtcctcccttccctgtgtgtcccctggatggagacctggggcgggggtgggggacagggctggttctttcctggggcccactaggggaggaggaggacagttcctggcccagcacaggtcctcagctctgcctgggttgccttacagtgagacgtagctgccacccatcagtgccctggaagtgaaggtaagagcctgaccctgctgtgtgagtggttggtccagggacagggggacccagtgggtggtcagcaggctgtgggcctgggtggtgatgagtgggagcgacaggctgtccctgggcctgcgggacctgacctcaagactctgtccccatggtggcttgatcaaatcctaaaccgagaaccacagtcgtggctcagcagtcactgcccacttgtgccaagaccccacctgaatgttgggactccaccaacgcccggggtgcctgtggcctgaggatggcatgtcccaagtcatgaggccaggacacctgtgctcattcagtcagagggtctccattccctggggccggccctttcctggctccttccagtttgatcctgtcagggccctggagcccaggacccagcatccaaggggcatcctggcagctccactaacttcatcttatttgacagagaagacatcaggagatgagggacacagaaaaatggctccaggtgcttctcgactgccagcgacataggagcggcaaggaggtgacatggggagggaagggccccgtgaccactttctacagagtcagggtgacgggctcccacggctgtgtcctggcacccccagcctctcagagggtggacactacactgggacaccagctttcctgttcttccctgcaaacctcatcttgccaggagagagtctgatgccagggccagggccagccctagctcaggggtagggacaccccctggtgacccgaaggaaggagtaggtcaagatcagagttcatgaccgggcgcggtggctcacgcctgaaatcccagcactttgggaggccaagacgcgtggatcacctgaggtcaggagtttgagaccagcctggccaacatggtgaaaccccgtctctactaaaaatacaaaaatgaaccgggcgtggtggcacgcagctgtaatcccagctactcaggaggctgaggcaggagaatcgcttgaacccaggaggcggaggttgcagtgagccgagatcatgctactgcactccagcctgggtgacagaccaagactctgtctcaaaaaaaaaaaaaaaaaaaaaaaatttcagcatttgcgacccaccaagacgcagtagttaggactcaagctcactactggcttgggcatccaagcaggaggagaagggtctcaaaggtgtcaaagtaagatggaaagaggtcaaggcccagacccctggtctaacctgagcttgaccaccatttcacagagcaagtaatgacgccctcctcccagacttgccccaaagccccccagagcttggtggtgtcccaggacggtcctcccaggaaacattttgaataagttgctgaagtgcctgatggacgtggctctcgtcacgaaatgagtttggatccgagaagccctcttcttcatcggaaaacaggcaggggtccaatttcccctccacctgaaccctgtcagagcccttccagctgacggctcca

SEQ ID NO: 20987 - DNA, 2300 bp, Homo sapien
gtcctcagctctgcctgggttgccttacagtgagacgtagctgccacccatcagtgccctggaagtgaaggtaagagcctgaccctgctgtgtgagtggttggtccagggacagggggacccagtgggtggtcagcaggctgtgggcctgggtggtgatgagtgggagcgacaggctgtccctgggcctgcgggacctgacctcaagactctgtccccatggtggcttgatcaaatcctaaaccgagaaccacagtcgtggctcagcagtcactgcccacttgtgccaagaccccacctgaatgttgggactccaccaacgcccggggtgcctgtggcctgaggatggcatgtcccaagtcatgaggccaggacacctgtgctcattcagtcagagggtctccattccctggggccggccctttcctggctccttccagtttgatcctgtcagggccctggagcccaggacccagcatccaaggggcatcctggcagctccactaacttcatcttatttgacagagaagacatcaggagatgagggacacagaaaaatggctccaggtgcttctcgactgccagcgacataggagcggcaaggaggtgacatggggagggaagggccccgtgaccactttctacagagtcagggtgacgggctcccacggctgtgtcctggcacccccagcctctcagagggtggacactacactgggacaccagctttcctgttcttccctgcaaacctcatcttgccaggagagagtctgatgccagggccagggccagccctagctcaggggtagggacaccccctggtgacccgaaggaaggagtaggtcaagatcagagttcatgaccgggcgcggtggctcacgcctgaaatcccagcactttgggaggccaagacgcgtggatcacctgaggtcaggagtttgagaccagcctggccaacatggtgaaaccccgtctctactaaaaatacaaaaatgaaccgggcgtggtggcacgcagctgtaatcccagctactcaggaggctgaggcaggagaatcgcttgaacccaggaggcggaggttgcagtgagccgagatcatgctactgcactccagcctgggtgacagaccaagactctgtctcaaaaaaaaaaaaaaaaaaaaaaaatttcagcatttgcgacccaccaagacgcagtagttaggactcaagctcactactggcttgggcatccaagcaggaggagaagggtctcaaaggtgtcaaagtaagatggaaagaggtcaaggcccagacccctggtctaacctgagcttgaccaccatttcacagagcaagtaatgacgccctcctcccagacttgccccaaagccccccagagcttggtggtgtcccaggacggtcctcccaggaaacattttgaataagttgctgaagtgcctgatggacgtggctctcgtcacgaaatgagtttggatccgagaagccctcttcttcatcggaaaacaggcaggggtccaatttcccctccacctgaaccctgtcagagcccttccagctgacggctccacatgttgggagggcctctcatttcaagatgggtcaggggcttctcaggattctttagcccaaactgtgccagcccacgaggagcacgtgttatgaacgtcattcccaaagatcctgcggcacttggtgaacagacggtccccttggctccttcccagaggccctgggtcccatgggccaggggtaaaggggcggctggagcccctggtggggctggcaagaggctgagtcccagccagggacatggagttctccatggcttcggagctggagtttccttttcccgccctggagcaggcagaggcactcaacccgggccgagcttgggctgagcagggctaagggaagtatgtcccgggggtccatgcagggggcaggtgtcaggggtgccccagccaccacctggtgttctgtccctcagggaagggtctgcagaggggcctggaatggggaggtttgggggcaggcctgggagccccaaggacctctgctgctcccattaggacaaagatgagctgcgtgcccataattccacgtttacgctgactcctccagtgcctcatcaatgaagtaagcaggtacagtcatacatcagtgaagtaagcagggagcccccagcccagggaccctcctgccccacagtccctgcatcccctcctgcccacactccctgcatcccccagccctccagcccagggaccctcctgccccatactccccagatcccccggat

SEQ ID NO: 20988 - DNA, 2300 bp, Homo sapien
ggtcagcgggggtctgatcagtgggaacctggacattgtggcctggtcagctgaggcctggtcagtgggtacctcgaccttatggcttgatcaacaggggccttgtcagtgggacctggacattgtggcctgctcagcggggcctgatcagtaggacctggacattgtggcctggtcagcgggggccttgtcagtgggacctgaacattgtggtctggtcagtgggggcctgatctgtgggacctggacattgtggcctgctcagcggggcctgatcaatgggacctaaacaatgtgtcctagtcaatgggggcccggtcagcggaggctttgtgaatggggacacggtccttggggacatagtcagaaaacacctagtaaatgggggtgttgtcagcagggacctgctcggtgaggatctggtctgtgggaggcctggtcagctgtggcctggtcagaggggactgatcatgggtcctcgagttaaggacttagtcacttggcacctcatcagtgaggacctggtcagtgggcgcctggtcagcggaagctgggtcagtgtgatctgattattgggggtctggtctatggggacctagtcattggaaacctggccactggagcctgttcaatagaaaggtggtcagtggaagcctggcagtgagggcctggtcgttgggctcctgggtagtggggcctagtcagtaaaggtctattcagtaaggacatggtcagttggaattttcttagttggggcccagtcagtggggacctggtcagcgagggcctagtcagtgggacttggtcagtagggacctgggcactggagtcctgggtagtggggcctagtcagtaaaggtctggtcattcagggcctggtcagccagaacctcatctgttggggccgtgtcagtgagctctagtcagtggggacctggcaatggaagcctcatcagtgggtcttggatagtgaggcctagtcactggaggactggtcagtggggacttgggtaagggggcctggtccctaaaggtctggtcattaaggacctggtcagttggaaccttgtcactttgggcccggtcagtgggacctggtctgagggggtcttgtcagttgggcccaagtcagtgggagtctcatcagtggggcctggctagtggggcctggtcagtggaggtttggtcagtggggtcctggtaagttggagcctcatcagtggggacctagtcagtggggacttgtcaatgggacctggtcaggggacccttgttagaaggagcctggtcagtggggcctaggtagtgaaacctggccactgggggcctggagagctggggcctgctcagtgggacctggtcagtgttggatgtggttagcggggcctcatcaactggggcctggccagtgggacctggtcaatgggagcttggtcactgaggtcctggtttgtggggtctagtcagtaagggtctattcagagagacttggttagtagggacctggtctttgaggccctggagagtggggcctattcagtaaaggcctggatcactggggtcctggttagtgaggcctagtcagtaaaggtctggtcactgaggacctggtcagtcagaaccttgtcggttaaggacctggtcagttggaaccttgtcagttgggcccagtcactgggggcctggtcagtagggacatggttagtgaggacctggtcagtgggggccttgtcagttgggccaagtcagtgggagtcctgggtagtggggcctagtcagtaaaggtctggtcattaaggacctggccagtcagaacctcgtcagttaaggacctggccagtcagaacctcgtcagttaaggacctggccagtcagaagctcgtcagttaaggacctggccagtcagaacctcgtcagttaaggacctggccagtcagaacctcgtcagttaaggacctggccagtcagaacctcgtcagttaaggacctggccagtcagaatctcgtcagttaaggacctggccagtcagaacctcgtcagttaaggacctggccagtcagaatctcgtcagttaaggacctggtcagttgggtccagtcagtgggggcctggtcagtggagacctaggccatcagtgggtcctggatagtgaggcctggtcattggggtcctgggtaagtagggtctggtcagtgaaagtctcattgatgaggcctagttagtggggtccaggcagtgagggcctcatcagggggacctagtcagtgagtcagtgagggcttggtgagtgggggcctcg

SEQ ID NO: 20989 - DNA, 2300 bp, Homo sapien
gaaaacacctagtaaatgggggtgttgtcagcagggacctgctcggtgaggatctggtctgtgggaggcctggtcagctgtggcctggtcagaggggactgatcatgggtcctcgagttaaggacttagtcacttggcacctcatcagtgaggacctggtcagtgggcgcctggtcagcggaagctgggtcagtgtgatctgattattgggggtctggtctatggggacctagtcattggaaacctggccactggagcctgttcaatagaaaggtggtcagtggaagcctggcagtgagggcctggtcgttgggctcctgggtagtggggcctagtcagtaaaggtctattcagtaaggacatggtcagttggaattttcttagttggggcccagtcagtggggacctggtcagcgagggcctagtcagtgggacttggtcagtagggacctgggcactggagtcctgggtagtggggcctagtcagtaaaggtctggtcattcagggcctggtcagccagaacctcatctgttggggccgtgtcagtgagctctagtcagtggggacctggcaatggaagcctcatcagtgggtcttggatagtgaggcctagtcactggaggactggtcagtggggacttgggtaagggggcctggtccctaaaggtctggtcattaaggacctggtcagttggaaccttgtcactttgggcccggtcagtgggacctggtctgagggggtcttgtcagttgggcccaagtcagtgggagtctcatcagtggggcctggctagtggggcctggtcagtggaggtttggtcagtggggtcctggtaagttggagcctcatcagtggggacctagtcagtggggacttgtcaatgggacctggtcaggggacccttgttagaaggagcctggtcagtggggcctaggtagtgaaacctggccactgggggcctggagagctggggcctgctcagtgggacctggtcagtgttggatgtggttagcggggcctcatcaactggggcctggccagtgggacctggtcaatgggagcttggtcactgaggtcctggtttgtggggtctagtcagtaagggtctattcagagagacttggttagtagggacctggtctttgaggccctggagagtggggcctattcagtaaaggcctggatcactggggtcctggttagtgaggcctagtcagtaaaggtctggtcactgaggacctggtcagtcagaaccttgtcggttaaggacctggtcagttggaaccttgtcagttgggcccagtcactgggggcctggtcagtagggacatggttagtgaggacctggtcagtgggggccttgtcagttgggccaagtcagtgggagtcctgggtagtggggcctagtcagtaaaggtctggtcattaaggacctggccagtcagaacctcgtcagttaaggacctggccagtcagaacctcgtcagttaaggacctggccagtcagaagctcgtcagttaaggacctggccagtcagaacctcgtcagttaaggacctggccagtcagaacctcgtcagttaaggacctggccagtcagaacctcgtcagttaaggacctggccagtcagaatctcgtcagttaaggacctggccagtcagaacctcgtcagttaaggacctggccagtcagaatctcgtcagttaaggacctggtcagttgggtccagtcagtgggggcctggtcagtggagacctaggccatcagtgggtcctggatagtgaggcctggtcattggggtcctgggtaagtagggtctggtcagtgaaagtctcattgatgaggcctagttagtggggtccaggcagtgagggcctcatcagggggacctagtcagtgagtcagtgagggcttggtgagtgggggcctcgtcagtggggccttgtgcctggtgagtgtgaacctggtcttcaggggcctggtcagcaggtgactgatcagtaggggtcagtgcagccctggccagtggctgcctgatcattggacctaatccatcggggcctggcagaggtgggggaggggtgagggggggtggctgtcagtggggcctggtcagtgacatcctggtcagcaggctcctagtcagagggagcccaatcaataaacctggtcatcgggggcctggtcagtgaaaacttggtcggcagggttggtcagtgtgtcctggatattggggattggtcaatgggggaccaggtcggtggagacctggtcatcggggcccatttagtgagggc

SEQ ID NO: 20990 - DNA, 2300 bp, Homo sapien
catttcttcattatccacccagggtcctttcatcatgactgacgtccctcgagatgcaattattctggtctgcttttgtcacaggacgaaactgtctgtgtagcatgggggaggggtgggataagggaggaggatgaagaacggagttggggaggggtctgggcttggcccccttaactccggaacacagggagaagtcaatgtctttagcgcatgaaagaagttctagaatgttctatttgctaccttttcagcccctgcaccaacaggggtgaagttttcaccatgacaaagagaaggaagctggcttaatgaacagtgaggcagctgggagggggcagagggaagctggacactcttggcccgaacctacagtccccagtggcactgaccactacccatctcttccacgatcctgtttcctctacagccttgggcagaaaacaaggaggcctccctacctccacttcatcccacacaggagtcttgatgctgggtgggagtccaggagtctgtctaggaatccaggaaggcttcctagaggaggagccattgcatctgggccttgaaggatgaatagaagtttcctaggcagcgaagtgtgtgtgtgtgtgtgtgtgtgtgtgtgtgtgtgtttcattttaacaaacactttcctatcttctaggggccaggtactcagaagaccacagacaagacccagccccatggcctgccccaaagagttcacatctcataaatgatgcttgaataataacaataatagtaacagctcccacatgctgagtgtgcgctgctaggacacagcatgtgacaggaattcagtgcctgaatgaatgagccaataaattaaactttctctttaaaaaaaaaaattctttttgttttattcttttagctctactatctaaggaaggaaaaagctttctggagtcagcaaatcctgcccttgattgctggaggggagaacggaggcatagtagggtcaaggagatggacggcacaaaggcctgggggtgggaaaactggagtacaggggtccagtgtggagagagttgggggcagagtcttaagcggggagctaaggcactaaggccgtctcctgttctttgggaactggggagccacaccttgattcccagcacaagagggaggaaaggaagacctgagatctagagaggacagcaggagcctgccctgggctccaagagtttcagagatggcccagatcagttgattgagtggccttctccctgtcatgagccacaagcagtagaagccacaggggggcagaagagatggagagatggagagagacacagcgacagtcaccagaagagagacaggggcatggcagaaagaggtgggagaaatccaggaaggctccctgggggtggtggccggaaatagggtggaggcctaatccctgatactagagaggcaggacctagaggggaggagaaagcttgatgctaggcaggaagtccaaaagtctgtctaggaatccaggacggcttcctgaaggaggggccattggatctgggccttgaaagataaatagacgtttcctacatttcctaggcagagaaaagtgtgtgtgtgggcggtgggggaggggggaaacggggaattgctcattttacttaacaagtactttcccatttttaggggaccaggtactcagtgggccacagacaagaccaaggcagaaaagacaggcgcctccccacattgcagcaccgggaccccgagcccacccacagccctcttcattcctcccaacgatggatggggaaactgaggcagcccagagcagcccccaccctaggtcctgcccgggacacgcccacgcgggacctgtgtcaccaggttaaaaatggaaacagctaggaccttttttttttcttcctttaagaaaatcctaggtccaaataaggcgagggctgccgggagcacggtgagctggccaagtcctcctgagcaagcgagtggcggctggcccggccggcctgggcttgggcctcctccaagactcgcctggcaggagggcggaggcaccccgggaggctataaggccctctcctccaccctgccaggctcactctgccccacagccacagcccctgactgccgcagcccccacagagcccgccgcgcaccccacgtcccccacgccagcgcccagccatggaggccatcaagaagaaaatgcagatgctgaagttggacaaggagaatgccatcgaccgcgcggagcaggcggaggcggataagaaagccgctgaggacaagtgcaagca

SEQ ID NO: 20991 - DNA, 2300 bp, Homo sapien
cagattaaatgtctggtgagcgctctctagctagcttgcagacagccaccttcttgctgtgtcctcacattggaagaggataaccaagttctggcctcttctcataagggccttaatcccatcatggtgggtcaaccctcatgacctcacccaaacctcatcatcttccaaaggccccatcaccaattaccatcacatggagatgagggcttcaacacatgaattggagagggggcaaaagcaagcattcagttcattataggcttatattccagaagacctgggctcaaaccctgtgctgtgtgacctggggaaagtcatcccacctctctgagcctcctgctgtggggaggaagcaggagaatgaagctgggctcagtgggggctgtctgcccaccctgggagcaggaacaagatcagtgtcaaaccatctaaggcaaaagtcagatccaagccaggtgtggcgactcacgcctgcaatcccagcaatttgggaggccgaggcgggcagatcacttgaggtcaggagtttgagacctgcctggccaatattgcaaaaccctgtctctactgaaaatacaaaaattagtcagtcgtggtggtgtgcacctgtagtaccagctaccggggaggttgaggcaggagaatcacttgaacccaggaggcggaggttgcagtgagctgagatcgtgccactgcactccagccttggtgacagagcgagactctcaaaaaaaaaagtcagatccaggcatgagctggatatgatcaccctaatccagagttgggggcccagggagggagtttcagcctggaggtgacagaaaagtcttcttgagccaactctagaccggtgtggtggggggtgacaaagagaggtgatggggtctgtggtttgtaatccataggcctgagcttctcaaactaggagtgatgggaggataggactcttgggataaacagaggactgaaaatttagggaaagtaggggacatttttattaaaatgaacatggcctatatgcaaaaattttaaagatttaacccgagccttcaaagaaagtgatcctgtaggggcgagtctcttctagccaagctccccaaagcccagaaatgagggactaggtctgagcccttcagcccttcagagtattttggtaagacagtctaagaaccactgccttgggccatagggagccatagcaggttctaggcagaaagagggcaggcgtatttgttagaaagtttctctgaccccgtgttggggtcagaaccagagggagaaaggctggggacagggatgggcggagggatccacgcgcagagaatgagattgcttaactccagatcatggtgaggctgcacctctgaaactggaatgtgtgtatttctggaaaacatttggagtcttcagtttcccaaaagctgccattgatctccctagagtactggggaccccaataagcccaaaacagctggtcctcaggacgagggaaagatgtgaaaatcccactatcaggtagcatggatggcgtggtgcatgctatcgcaacccctgttctacagataaggaaactgatgcccagagagagacggaggactcttgtgaatattgggggggaccgcccctgcacctcggggacgtgaccccccccccaggctgacccgttcctcgctctgtcgtccccaggtggaggaggagctgacgcacctccagaagaaactaaaagggacagaggacgagctggataaatattccgaggacctgaaggacgcgcaggagaagctggagctcacggagaagaaggcctccgacgtacgtgtgcagggatgcgggagcccgcggcggggccaggccggagccccggggccgggaaggcggggagagccgcagggggaggaggaagaggaggaggagaaggcggcgcctcccagcgctttctccaaataagtcccgaaaaggggcactttccagcagctgtggccagcggtgccgacgtcaggccctcccccagcggtgctgacgtcggcggtccggccgggtgacctcatcgccccgacggcagccggcccggggggcggggagaggcgggggcggcccccgcgcaggcaaaggcttggggggccggggcgcggctgtgcagctctcgccggagccgagcccagccgagcgtccgccgctgcccgtgcgcctctgcgcctccgcgccatggccggcctcaactccctggaggcggtgaaacgcaagatccaggccctgcagcagcaggcggacgaggcggaagaccgcgcgcagggcct

SEQ ID NO: 20992 - DNA, 2300 bp, Homo sapien
acagctggtttcgtttagatttttgtgtgattaactgacatcttcctgttcctttgccacatgtatctagcaagcctcttttaccttataagggaaatcctttgtagcgtgtggaaggctttgattgcaggaaggggtggaacccaaaatgactcggccgtgactagcagtttttcaaaaatacatatatatgtatgcatgtacagatatgcgtgtatctcccaactccagacagctgaaaatctgccaaaagcgttgtttgccaggattcagaatttcccacataagggctactcacttcttaaaagacaactcatgaatcaagcacctctgtttgatctttaaaatcaattcctcgactgctaatgggtacacagttttttgtttgtttgtttgtctttggcgggttatgaaaatgtcctggaattcgataatggtgttggttgcagagtgtttttgcaacatcagttcctggcccagttactgaaggtggtaggaggagttaagatctaggcaattaaaaagaatgaaaggcacccattcatgggaaggcctcagtgacgtttcttaagacagtttcatcagtggttttcacaattctctgcatttggtgtttcagaggacactgcaatacgaaacacctgtgggagtgccctctttctgcttctaggaatctgaggctgagaaaccttcctgactctatttgtgtagtttttcggccacgttagcctcattctatttttttttcccccagtatgaactcagggcaggagagggagtggtttcctaataattttttttttttgagacggaatcttgctctgttacccaggctggagtgcagtggcgcgatctcggctcattgcaaccttcacctcccgggttcaagcgattctcctgcctcagcctcccaagtagctgggattacaggcgcctgcccccacacccaactgatttttttgtatttttagtagagatgcggtttcaccatgttggccaggctggtctcgaactcctgacctcatgtgatccacccacctccgcctcccaaagtgttaggattacggatgtgagccaccgcgcccggccttcctaataattttgatagccttccccagttcagggattcttcatttgttctgataggaaaaagctagcgtggcttcccttttcctctcggttgaggcccgtttgacccgttctcaatattccttccaaagagcaggcatcgctggaaaactcgccttgcctcgtagccctggcaggacctaggggacaggttctgacaaggaagagccctgggtgggtcttaagaggccattcatttcttaccaattctgagtcactgaataaaaccacttcccccagtggggcccctcggtttcttcacctgtaaaatgggtgcgatgtgtgaggatgaaattgcagtaaaataaaaccgtggcagtaagagatgcctttctctggcacatcccacctgctgggcataagcggcgccaccctctggagttacagcctcaaggcagtccggtaactaatcaggctttgggatggagagggccaggatgaggaagcaaccttcccaacaccacgtggctgtgaaaatgacaaagcacggtcgggcgcagtggctcacgcctgtaatcccagtactttgggagaccaaggcgggtggatcacgtgaggccaggagtttgagaccagcctgaccaacaagacgaaaccctgtctctactaaaaatacaaaaaaatagcaaggcgtggtggtgtccgtctgtaatcccagctactcaggaggctgaggcagaattgcttgaacccgggaggtagaagttgcagcaagccgagatcatgccattgcactccagccttggtgacggcgcaagactccatctcaaaaaaaaaattaaaaagaaaatgacaaagcggggattccagcccagcactttttggccctggagttcctggtttaatgcttcccattgtacttcctttcttgtaggtaaaaacaccttgaaaagccaataacactattggggtatgtcttccatgcctgcaaccaagttttctttccctttccatatctttttgtcctgccatctctcagccaggcggattgaaggatggaattccaacgaggctcccccgcctcgtcccaccttggtaattgcatggccaacatttaactgagggctccatagtcttgcatttatcttgccattcaggtgaatgggagcggaactcacaggacacaatgagccgggtcactgatggccttgctttctaagaatctcacagtg

SEQ ID NO: 20993 - DNA, 2300 bp, Homo sapien
gctcaagggatcctcccaccttagcctcctgagtagctgggactacaagcatacaccaccatacctggctaattttttaaaaaaattttttgttttttgagatggagccttgctctgtcacccaggctggaatgcagtgacacaatctcggctcactgcaacctccgcctcccagattcaagcaattctggtgcctcagccgcctgagtagctgggactacaggcgcacatgaccacacctgcctagtttctgtatttttagcagagatggtgttttaccatgttggccaggctggtctggaactcctgacctcaggtgatccacctgccttggcctcccaaagtgctgggattacaggtgtgaaccacctcgcctggccaaaaaacttttttttttttgcagagatggaggtcttgctatgttgcccaggctggtctccacctcctggcctccaatgaacctccacctcagcctcccaaagtgctgggattacaagcgtgcaccatgacgcccagctaattttatttgttgtagagatggggatctccctatcttgtccgggctggtcttgacctcctaagctcaagcaatcctcctgcctcccaaagtgctgactcccaaagtgctgggattacaggcctgagccaccacacccagctgcaagcccgattttccaaatgtatctctcctctgtttttctctttctttttttttttttttttttttttgagacgtagtctcattctgtcgcccagactggagtgcagtggcgcgatctcggttcactgcaggctccgcctcccgggttcacaccattctcctgcctcagcctcccgagtagctgggactacaggcgcccgccactactcccgggtaattttttgtgtttttagtagagacggggtttcaccgcgttagccaggatggtctcgatctcctgacctcctgatccgcccgcctcggcctcccaaagtgcgggattacaggcctgagccaccgcgcccagcctttttttcttttgatagggtcttgctctgtcgcccaggccgaattgcagtggggcgatcacggcttactgcaccctcaacctcctggcttcccaaagcactgggatcacagacgggagccaacgccccggccagttttttcaacgttgagagccctggcccctagataggacccagcatcctcactgctctaacccctccccccccaccatccccgggctggcccggacaacccctaaggtggccgagggcgggccctgaggaggccggcgcgcgcttccgggcacagcttgtggcggtgaagccgctcagatggcggaggccttgggtatctctaagcagatcgctaggccgcagacctcggagctcgtcttgggtcacttttatttattttttttgagacggagtctctctctgtcgcccacgctgcagtgcaatggcgcgatctcggctcactgcaagctccgcctcccagattcaagcaattctctgcctcagcctcccgagtggctgggattacaggcgcccgccaccacgcccggctaatttttgtatttttagtagaaacggggtttcaccatcttggccaggctggtcttgaactcctgacctcgtgatccacgcgcctcggcttcccaaagtgtgggaattaaaggcgtgaaccaccgcgtccggcttgggtcacttttcgagtatacagctcctcctctctccttcctccctaggcccccactgccccgactcgcaggccgcagacaaggctgagagcgctaccttgctttcccgcgctcgcctcggtgcctactgcgcctgcgcgagctgtgagggcgggacccagagacacccgccccaactactggcgtgcgccctctgctgtcgcctaacggaactccgggcgcgcgtgcgcacgcaccccaagccacgccccgccaggctgccggcgcgcgagcggttggcgccgctccctgccttccctctcctacagtggggcggggccgggccgcccgagtcgggggtggaaggcgggggccacataatgccacgcccccgcctcgtccccatttgaagccccgcgactcttcactgctggtcaatcagagcccgtgctctccctagtgccggccaatgggaggtgcgctcgggctgcttccggctccgcgctccgctcgccccctcccaaggtctccccgcgactggcgggacgcaggggcgggcgtcggccgcggtgacgcgcagcgggcctggagccaataaggggcgggctcggtgctgatggacggtgctggtggcca

SEQ ID NO: 20994 - DNA, 2300 bp, Homo sapien
tggcagatgatggatggatggtttgatggctgattggttggttggatggctggaatggtaatggatggatgacctggcagatgatggatggatggttggatggctcgttggttagttggttggtttggctggtttgattggtttggttgtttggttggttggttggttggttggttggatggttggatggatggttaggtggatggttaggtggatggctggttgattgtgagacgtagtgctgattctcagtgataacctcagaaaacctcttgtgatttcaggaaggcaacagcccccaggggagcaaccagggagtcaaaatcacaccggaccagcagaagaggagcagctttttccgatgtgttcttctgtgaggaacaccgccttactctgagcctcgctcagcccagctgactgtgcctgttctgagtgagcccctcactcagccggggccctcccacctccaacgccccgcccacgccgcggccaccgggcccacggccaccagaatgcaattgagaaatcgtttattttagtaactgtctgatctttttcaactttggagatggaataagttaaaaatttgctatttttcctgtaacatctgctgaacgggcccacccacacgttgtatattcagagagagagagggagtcaaggtgtgaccgtcgaccacagccagtgtcaggcctctgcctctgggcctttgctttgtggcctcactgcaacacaaagctccaccaggaggctggttcacgtcccctaccacggaagcgaggtcccagaaggccagcggtggttccaggagcaacagctcccaaaccctgagcaaggcaaccgatcgccaggaccaggaagcatcacccaggagatttggcgcccacttccacctcttctctcagttttggacaagtgacaaaccattttgccccctcactcttcttttttaactgttaaaccaaaggaaagcacaaatgaaggaaatcctgtgtaaagcattgagaaggaaagaagcctggagcagcctctcctgtccacagccaggggttaggtctgcaggcccgtctgcggtccccatcgagcatcaaggggacgctgtgtgtgctgcaagtgaccccgaaaacaaccacagccgtcacatggtcctcctgaagttggggcaccctcctctcagcaccaaaatggcccccactccttcgtgtcctcccgctatctccaaatcggacgttctttctagctgagatttttatttttccacatctgtagtgccatgaagcgattctgtctttgacttccaatggcaaacctgggtgatcgggaacaagcacgttgtacccttggctggacatggccaagacacaaggcattccacggcggcaagctgaccgcacagcagtctggcttgattttcagccgtcatcattgggttctgttttgacagctctgctgtcccatagggactgcgactgggaccaggtcaaccacgccaggggggtgtcaccagccttttctttttttctttctttttttttttttcctccttaagctgctgtcaatccaaaccattggcatcatcgtttcttttgaattaaaaccaacatatcagcaatagtctgctctccccgggaatctctaacatgctctgtttacatcgataaatgcacttaaggaaaacaaacaaattaaagctcatcttaaagtccaaggatttttatgtccacattttccctgtaggccacacggacatggccaggtgctgggggtgggtctggacaagatggtagagcccatggattaccccatcgagcggccacctcagaggagatgccacccatcatcaaaagactaaattgggaaaagaagcctcctggcttggtgcagtggctcacacctgtaatcccagcactctgggaggccaaggcgggctgatcacttgagctcaggtgttcgagaccagcctggccaacatggtgagcctgcgtcacctggcttctggcacacagctcggccactgtgtccctcctgcctccctggcaggtccttctaggggccctctcctggctggctttccagggcattccttccactctatccagggtccttcccaagaccacacccaggtccagtcattccctaggacttggcagagagctgtactcacagccaagatcacagcaaaatcagcaaagggaaaaggcatgcagagtgaagtccagaggcaaccagacagaagcatccagaatcctctcacagtggggtcacacaccccatgcttaactcccccaacaatgagttgt

SEQ ID NO: 20995 - DNA, 2300 bp, Homo sapien
cttccctacatgcgtggctcatacactttctgtacaagtgatgcggtttatgctaaacccctgctttctttgtaggagtctggaatcctgataagtgccaggtagagggttcctatgtgactggctccataaacacctgggtacagaactgccaactagctttcacaaaagacacattacacacctgttgttacaactcattgttgggggagttaagcatggggtgtgtgaccccactgtgagaggattctggatgcttctgtctggttgcctctggacttcactctgcatgccttttccctttgctgattttgctgtgatcttggctgtgagtacagctctctgccaagtcctagggaatgactggacctgggtgtggtcttgggaaggaccctggatagagtggaaggaatgccctggaaagccagccaggagagggcccctagaaggacctgccagggaggcaggagggacacagtggccgagctgtgtgccagaagccaggtgacgcaggctcaccatgttggccaggctggtctcgaacacctgagctcaagtgatcagcccgccttggcctcccagagtgctgggattacaggtgtgagccactgcaccaagccaggaggcttcttttcccaatttagtcttttgatgatgggtggcatctcctctgaggtggccgctcgatggggtaatccatgggctctaccatcttgtccagacccacccccagcacctggccatgtccgtgtggcctacagggaaaatgtggacataaaaatccttggactttaagatgagctttaatttgtttgttttccttaagtgcatttatcgatgtaaacagagcatgttagagattcccggggagagcagactattgctgatatgttggttttaattcaaaagaaacgatgatgccaatggtttggattgacagcagcttaaggaggaaaaaaaaaaaaagaaagaaaaaaagaaaaggctggtgacacccccctggcgtggttgacctggtcccagtcgcagtccctatgggacagcagagctgtcaaaacagaacccaatgatgacggctgaaaatcaagccagactgctgtgcggtcagcttgccgccgtggaatgccttgtgtcttggccatgtccagccaagggtacaacgtgcttgttcccgatcacccaggtttgccattggaagtcaaagacagaatcgcttcatggcactacagatgtggaaaaataaaaatctcagctagaaagaacgtccgatttggagatagcgggaggacacgaaggagtgggggccattttggtgctgagaggagggtgccccaacttcaggaggaccatgtgacggctgtggttgttttcggggtcacttgcagcacacacagcgtccccttgatgctcgatggggaccgcagacgggcctgcagacctaacccctggctgtggacaggagaggctgctccaggcttctttccttctcaatgctttacacaggatttccttcatttgtgctttcctttggtttaacagttaaaaaagaagagtgagggggcaaaatggtttgtcacttgtccaaaactgagagaagaggtggaagtgggcgccaaatctcctgggtgatgcttcctggtcctggcgatcggttgccttgctcagggtttgggagctgttgctcctggaaccaccgctggccttctgggacctcgcttccgtggtaggggacgtgaaccagcctcctggtggagctttgtgttgcagtgaggccacaaagcaaaggcccagaggcagaggcctgacactggctgtggtcgacggtcacaccttgactccctctctctctctgaatatacaacgtgtgggtgggcccgttcagcagatgttacaggaaaaatagcaaatttttaacttattccatctccaaagttgaaaaagatcagacagttactaaaataaacgatttctcaattgcattctggtggccgtgggcccggtggccgcggcgtgggcggggcgttggaggtgggagggccccggctgagtgaggggctcactcagaacaggcacagtcagctgggctgagcgaggctcagagtaaggcggtgttcctcacagaagaacacatcggaaaaagctgctcctcttctgctggtccggtgtgattttgactccctggttgctcccctgggggctgttgccttcctgaaatcacaagaggttttctgaggttatcactgagaatcagcactacgtctcacaatcaaccagccatccacctaaccatccacctaacc

SEQ ID NO: 20996 - DNA, 2300 bp, Homo sapien
tgcctcaggctcccaagtagctgggactacaggcacacaccaccacacctgactaattaaaaaaatattttttttggagatgggatcttgctgtgttgcccaggctggtctcaaactcctggggctcaagcgatccgcccaccttggttcaagtgactctcctgcctcagcctcctgagtagctgggattagaggtgcccaccaacacgcctggctaatgtttgtatttttagtagagacaaggtttcactatgttggccaggctggtctcaaactcctgacctcaggtgatccacccgcctcagcctcccaaagtgctgggattacaggtgtgggccgccgtgccagcttaaaattctattttacaactgtgttggcattaagaccgatgtggtccaggctggattccttattgtatatttattattaggatgttcagttttttttcttctgattttaaataagctgaagccctttgggaagtcccacacagcacttgggtcctgggtgcaggccctgtgtgcctaacagattggccagctctggccgtgtgctcgtaccccaggcagacaaacaaaactacttcctcctctcctttcaggcagaaagggcccagatcctactgggggcctccccaagggcctattgccctggcccagctgggctagataaccccaggctcaccctgggtgcctctctcacccccctgctcctcctcggcaacagcagcacctcgtctgccctctgtggtcaacaaggtctaagcaggagacacgtggagccctgcttctcactcacctgctgtgtgtcctaaggtgagttgctcagcctctctgagcctcagttctgcatctgtgcaatgggcataatagccctccttaatcatgtgaagatgctaggagaggcaactctccagcacagcacatggagatgagttgggagtgagagaatcaggactctttgttgtgacttaattcaagcaaggcctttgtgtttgcctgggggagactctggcttgggcctcagacctcatgggctgagctgccttgggcaactcacttcacctctctgtggctaatctctttttcttcttcttttttttttgagtagggtcccctcactctgttgcccaggctggagtgcagtggtgcagtctcagctcaccacagcctctacttcctgggctcaagtgatcctcccatctcagcctcctgagtagctgggactacaggagcaccaccaccacgcctggctaatttttggatttttgaagagatggggttttgtcatgttgccaggttggtctcgttcaagtgatcctcccgcctcagcctcccaaagtgttaggattacaggtgtcagctgctgcatctggcctttttatttttgagatgatgtcttgttctatcgccccggctggagtacagtggtgcgatcttggctcactgcaacctccacctcccgggttcaagcgattctcctgcctcagtctccccagtagctgagattataagtgtgcaccaccactcctggctaatttttatatttttagtagagacagggtttcaccatgttggccaggttggtcttgaactcctgacctcaagtggtctgcccaccttggcctcccaaagtgctgggattataggcctgaagtatttatttatttatttttattttttatttttttgagacaggatcttgttctgttgcccaggctggagtgcagtggtgcaagtacaactcactgcagcctcaaactcctggcctcaagcgatctacctgcctggacttcccaaagtgctggcattacaggcatgagccaccgggcctggccttcacttcacttcacttctctgatcctcctgggaaagtctgaccatcggggctcttatttgcatggggtttagagtttccaggaacatgggggtacgctggcccagctctagcacagtcccctaagacctcaccacaaacggcccaacctcgcttcccctgacctgcttgggtgatgtggtctcccacaaactaacgtcttcctttcagatgtcgcaacagaatcacccccacacccctcagtgtccgcaggcctcggcccgcaaacggacatgcgtcccccagaggaaggaagggtgtggaggggaaaacgaaggtgccctgatggggagataacggggctagaattccaaggccccctctctctgataccaggttctccagggagacagatctgggcttctcagcagaggccgcagctggtaagtgggccattcacagattcacgtggggtggctcttggg

SEQ ID NO: 20997 - DNA, 2300 bp, Homo sapien
agcctggaccacatcggtcttaatgccaacacagttgtaaaatagaattttaagctggcacggcggcccacacctgtaatcccagcactttgggaggctgaggcgggtggatcacctgaggtcaggagtttgagaccagcctggccaacatagtgaaaccttgtctctactaaaaatacaaacattagccaggcgtgttggtgggcacctctaatcccagctactcaggaggctgaggcaggagagtcacttgaaccaaggtgggcggatcgcttgagccccaggagtttgagaccagcctgggcaacacagcaagatcccatctccaaaaaaaatatttttttaattagtcaggtgtggtggtgtgtgcctgtagtcccagctacttgggagcctgaggcaggaggatcacttgagtccagcagttcaagactgcagtgagctatgatcataccactgcactccagcctgagtgacagagtgaaactctgtctctaaaataggttagtcaattaataaaaatattttaaaatattttataatggaggaagtcctggtgtggacctatgcgtgccatgagaccccagcctgtccaggctcaattcagtttcaaggcctttgtgcctgctcttccctcccccagcctgggcaatatagcaagaccccatctctacaaaaaaatatactctttctgcactacgcactccccaaatcaagatgattccttctcaccctcaaatgccccttccttcacgtcagttaggtcacctctgtgggtttgtgcaactgctgttcccacttcctgtttcccctttggatttttttgtttgtttggggttttttgtttttttgttttgttttgtttggttttcgttggttttgttttgtttgagacggagttacactctcgctgcccaggctggagtgcagtggtgagatctcagcaaaccgcaacctccacctcccgggttcaagcgattctcctgcctcagcctcccaaatagctgggattacaggcatgtgtcaccacgccgggctaattttgcagttttagtagagacgggatttctccatgttggtcaggctggtcgcgaactcctgacctcaaatgatctgcccaccttggcctcccaaagtgctgggattacaggcatgagccaccgcacccagctggtgtttttttgtttgtttgttttgcgggggacagaatttccctctgtcatccaggctaaagtgcagtggcgtgatctcggctcactgcagcctctgcgtccctggtccaagcgattctcttgcatcagcctcctgagtagctgggattacaggcacccgccaccacgcctaatttttgtatttttagtagagacagggttttaccatgttggccagcctggtctcaaactcctggcctcaaatgatccacccgcctcggcctcccaaagtgctgggattacaggcgtgagccaccgcgcccagtttctgttccccctttgttgcttttgtttttgttttgagaaggagtctcactccgttgcccaggctggagtgcaatggtgcgatctctgctcactgcaacctccgcctcccgggttcaagcaattcttgtgcctcagcctcctgagtagctgggattacaggcgtgcgccgccacacccggctgattttcgtattttaatagagacggggttttgccatgtttgccaggctggtctcaaactcctgacctcaagtgatccgcctgcctcagcctgtcaaagtgctgggattgcaggtgtgagccaccgcacccgttccccgttctccctttgtaatgatgtctcactcctcttcactgcttgatagattatagatgccaggagtcagggggcctgcacctgtctccgtgtcacccctgtgtcctccaaacagcaggcacacagtaggtgctcaataacaacttgctgggggcaagacaggagcaagctgtctctgcacctgtggcaccagatgctttgttggactgcagacagggtgacttgagctgtccttgttccgcccccagggctcacctgcttgaggaaacaggaactgcctcggggcagccagccccgccccattgacgtgcagaccttgaatcgaaacccaggctcctgcaggcactggcacagctacagcgagggcctcggccatccaagggtctcccaggtatgtgacccaagagcctcagccctcgaggagacagaacgtgggggctgggctaggccagaaggagggacagggctagtggggcctggggtggcaggagggattttctaggggca

SEQ ID NO: 20998 - DNA, 2300 bp, Homo sapien
gtgagcatgagctgtgattgcaccattgcacactccagcctcaggaacagagggaaaccctgtctcaaaaaaaaagaaagaaagaaatcagggcaaccctttttgaccaccaccgttgggtcagctgtttatttcgttcacttgccattttgtcatttccttattcctccaggggccttgatatttacttaatatttaaatactctactcttttttttttttttgagatggagtctcactctgccccccaggctggagtgcaatggcgcgatcttggctcactgcaacctctgcctcctgagttctagcaattctcctgcctcagcctcctgagtagctgggattacaggcacccaccacctcatctggctaatttttgtatttttagtagagatggggtttcaccatgttggccaggctggcctcgaactcctgacctcaggtgatccacctgcctcagcctcccaaagtgctgggattacaggcgtgaaccaccatgcccagctctaaatactctattcttaaatttcaaaacatttatttataaaatgaactttctagtccttgcaataatggcataaaaggctgggcacaatggctcacacctgtaatgctagcactttgggaggctgacacaggtggatttcttgagtccaggagtttgagaccaatgtgggcagcaaggtgaaaccccatctctacaaaaatacaaaaattagccaggcgtggtggcacatgcctgtggtcccagctacttgggggactgaggtgggagaatcacttgagggaagaaggtcgaggctgcagtgagccaagatggggccactgcactccagcctgggtgacagagtgagaccctgtctcaaaaaaaaaaaaaaagaaaaaaaacacaatggcataagaagaataaaaggaaaagtccttgaaggcctttggggatgagccaatgaatgaatgtgtaaaaactatcaggcacatagtaggtgcccaaaaaatcacaagccagtggttttttttttgttttgttttgttttgttttgttttgagacggagtctcactctgttgcccaggctggagtgcagtggtgcaatctcggctcactgcagcctccgcctcctggggtcaagtgattctcgtgcctcagcctcccaagtagctgtgattataggcacaggccgctgtgcccagctcatttttgtatttttgtagtgacagggtttcaccacgtggcccaggctggtcttgaactcctgatctcaggtaatccacctgccttggcctcccaaagtgctaggattacaggcgtgagccaccacgcccagccacacaagccagttttttgttgttgttgtttttgaaacatggtcttgctctgttccccaggctggagtgcagtggcacaaccacagctcactgcagccatatcctcctgagctcaagggatcctcccacctcagcctcctgagtagctgggactacaggcatgcaccaccacacccagctaatttttaaattttattttattgatttatttgcttatttattttttgaggagtctcactctgtcgcccaggctggagcacagtggcatgatcttggctcactgcaacctctgccccccgggttcaagtgattctcctgcctcagcctccggagtagctgggattacaagtgcccaccaccacacccagctaatttttgtatttttagtagagacagggtttcatgatgttggccgggctggtctcaaactcctgacctcaggtgatctacccaccttggcttcccaaagtgctgagattacaggcgtgagccaccgcacctggccaaattttttaattttttgtagagatgggggtctcactatgttgcccaggctggtctggaactcctgggctcaagcaatcctcccaccttggcctcccaaagtgctgggattacacatgtgagccgtcacacccagccacaagccagttttaagtccattgctctgtccaccctggaggacttctcaaaggaggaggcaccacaagcttcaagaatagagcaaagataagaggtgcatcaagcttgattcttgtcttccctcccttctctacccaggtgaccttccctccaccccaggaagctatgacagaggccgggaagctgcccctaccgctacccccacggctggactggtttgtgcacacccagatgggccagctggcccaagacggggtccccgagtggttccatggtgcaatctcaagagagtgaggacacacccacaccctccaccctgccctccccaccctgt

SEQ ID NO: 20999 - DNA, 2300 bp, Homo sapien
ttgggaggctaaggtgggtagatcacttgaggccaggtgttcaagaccagcctgggcaacatagacagaccctgtctccacaaaaaatacaaaaaaaaaaaaattagccggatgtggcagcatgtgcctctagtgccagctacctgggaggctgaggaaggagggtcgctgcagtgagccatgattgtatcactgctctccagcctgggtgacagagtgagaccctgtctcaaaaaaaaaaaaaagtcatccttgaggcatctttcaagcctgatcagggtcacattttacaagatgactgcacagatttggcagaggatgcttgatgaggccgaggcaggaaagcctgctgggaaacattgcaatagtccaggccaggtagagaaaacacaggtgagacccaaagtgagaagggcatggagggccaggctaagaaatttagactctcagattctccacccaagaggattctgggccttaataaagttggtagctgctacattagatctgccctttgggccgggcgaggtggctcacacatgtaattccagcactttgggaggccgaggcgggtggatcacctgaggtcaggagttcgagaccagcctggccaacatagtgaaactctgtctctactaaaaatacaaaacttagccaggcgtggtggtgggcgcctgtaataatcccagctactcgggaggctgaggcaggagaatggcctgaactcgggaggtggagcttgcagtgagccgagatcacgccactgcaccctagactgggtgacagagcgagactccgtctcaaaaaaaaaaaatacaaaaaaaattagcttggcatggtggacacctgtggtcccagctacctgggatgctgaggcaggagaatcacttgaacctgggaggcagagattgcagtgaaccgagatcacaccactgcactccagcctgggcaacagagtgagactgtctcaaaaaaataaaatgtaataaaataataatgtcaatgcacaccccagaacttcatctagcttgttcaccattatgttcccaatgcagtgatgcaatcatggctcactgcagcctcaaactcctgggctcaagcaatcctcccacctcagcctcctgagtagctgggaccacaggcatgcaccaccacatccagctaatttttgtatttttagtagagatagggccttgccatgctgcccaagctgatcttgaactcctggcctcaagtgaatctcatgctttgtcctcctaaagtgctgggattacaggtatgagccacctcgcccagccaaaaccttttttttttttttggagatggagtcttactctgtcacccagtctggagtgcaatggcgggatctcggctcactgcaacctccacctcctgggttcaagcaattctcctgcctcagtctctggagtagctgggattacaggcatgtgtcacaatgccaagctaatttttgtatttttagtagagatggggttttgccgtgttggccaggctggtcttgaactcctgacctcaggtgatccgcctgcctggccctcccaaagtgctgggattacaggtgtgagccaccttgcccagtcaaaaccttttttttttttttttaaatctcagatcctgagaatgaccctatgaggtaggtataatgtaattttcatctcatgaatgaggttcagagaagtcaggtgacttgcccagggccacacagctagtgggcagagagctgggatttgagctgcagtgtgcccatagcccttctgtataccctgcctgtctcttgagtgtgccccataaccccagcctcaccttgtggtggcagatgtggcctccccactgaggtcttctctgtgacatcccacagcccttatccttacccatggacacattcaggctgttgtccagagagcctggctgtaatttgagtctcatcaagcagggggtgatggcgtaggtgggtgggtgacagccagggcagggagatttgcccagacactggtacacaacagcctggcaacccgtgtggccccgaggaagctgggagcctttggggtgcatccccaagtctgggctgtggttcacaccatgggcaacaagcagacagtcttcacacacgagcagctggaagcgtatcaggtagaggggggcaggatgggtcctcagtgggtttgacaactttggttccgtggtctgggaaatgggaacagaatgccttcatctgggtgtaccgtccgcctgggttcctggttctgctctgtgtgtggcagcatcaggccatctgtgtg

SEQ ID NO: 21000 - DNA, 2300 bp, Homo sapien
tgggttaaaacgtaggaatctaattcttttgtcatagtataagtgaatgcttaatcttttaaagaactgtcagactgatttctaaactgtttatgccattttacattcacaacagcagcacgtttgagttccagtttcaacacatcttcacagatacttggtaggcacagcctttttaaatttttcccataatagtttttttttttactaggtttttgatacagagggaaatagagaagaaaccaaaaattccgatagtcctctgctgacattaaaaagatatattcaagggccgggcacggtggctcacgcctgtaatcccagcactttgggaggctgaggcaggcggatcacctgagttcaggagttcgaaaccagcctggacaacatggcaaaaccctatctctactaaaaatacaaaaattagcggggcatggtggtgggcgcctgtaatcccagctactcaggaggctgaagcaggagaatctcttgaacctgggaggtggaagttgcagtgagccaaaatcgtgccactgcattccagcctgggcaacagagcgagactctgtctcaaaaaaaaaaaaaaagatatatgcatgtacacatcgtatgtaagaaaaccgcacagtactgaaaggatgaaaagaaagaaagaaagggccaggggtggtggctcacgcctgtaattctaatgcttcaggaggactgcttgaggacaggagtttgagaccaacctggacaacacagcaataccctatctctattgattttttttttttttttttttttttgagacggagtctttgtctgttgaccaggctggagtgcagtggtgcgattttggctcactgcaacctccgactcccgggttcaagcgcttctcctgcctcagcctaccaagtagctgagactacaagcgcaggctactatgcccagctaatttttgctttttgtgttttgttttgttttgttttagtagatacagggtttcgccatgttggccacgctggtttccaacacctgacctcacgtgaaccgcctaccttggtctcccaaagtgctgatttaaatatatatgtactttttttttgagatggagtctctctctgtcgcccaggctggagtgcagtggtgtgatttcagctcactgcaacctccgcctcccgggttcaagcgattctcctgcctcagcctcccgagtagctgagactacaggcgcccgccaccacgcccaggtaattttttgtatttttagtagagacggggtttcaccgtgttagccagaatggtctccatctcctgacctcgtgatccgcccacctcgttttcccaaagtgctgggattacaggcgtgagccaccgcgcccggcataaaatagatttttaattgttttaacataccaccaaccttgtcacatgatattgtcatttacctaaagctgaaaaattaatgaatactgattaggtttacaaaattaggttcagctatccagtgaacgctcaaaatatggcaataaaagagaacgggggtggtggggcgtggctcaggcctgtgatccctgcgctttggaaggccgaagcaggaggatcacttgaacccacgagttcgagaccagcctggacaacacagcgagaccccatctcgacaaaaaaatttaaatgaaaatattagccgcgctcagtggcgcccgtctgcagtctgctactggggaggctgaggcgggaggatctcttgagcccaagggttcaaggctgcagtgagccacgatcgcgccactccactccagcctaggtgacagaccaagatcgtgtctctaaaaaagaaaaaaaaatcaaggagagagaacaggtcacccaaaagtgcgcaaaacgctcaaaaaggggttgggtttccagcaccctgtgtgaagaatgggagaccggaagtgggcgccaaattcggaagtgtggcagcagataggaatcgaagggcactcattcgcttggctctctgtcccgcccactacccggaagtgtggcccgggtccagaaccaagagcgcatgctcaccttgtagctcagccaatcaaagagaagcgaggcggccattcgggcggaaatagtgtttgcaaacaggaagtgtggcactccagctaccgaagcactggagagtgtcatggaggcctacgagcaggtccaaaagggacccctgaagctgaaaggcgtcgcagagctgggagtgaccaagcggtgaggcccgagggcccgcgggattccgtcttcatcccccttagaccttttctcgggacccctggccctga

SEQ ID NO: 21001 - DNA, 2300 bp, Homo sapien
gaggctgaggcaggagaatcacttgaacctggaaggcagaggttgcagtgagccgagatcgtgtcactgcatgccagcctggtgacagagtgagactctgtctcaaaaaaaaaattaaaaaaaagaaaaatcccaataaccaaaccctggcccagaccaattaaaacaaaatctctatacatggctttcaggcctcagtggttcttattgtgtgtgttgtattgggggggcttttgagacccccactcctaacctattcccagaccaaactgagggttgggcttctatatctcacagcccaataatgagacacagatgaactagggaggaagagagtttttatttctgtaactggttacagggagaaggcctggaaaatatcaccagaccaacccaaaattacaaagtcttccagagctcatataccttctaagctatatgtctacgtgtaggtgtgcattcatctaaagacgtaagtaagttatagtcttttaacccataactaagatctgagtcctgaagaccttcctctggagcctcagtaaatttacttaatctaagtgggtccaggtgctggggtgattacccttatcttatctcctgctaaatcatggaggtttgggggagttccttcaaaccccaataaacttgtttgtggaggcctgaggagtttcttcagaccgccaataaagcttgtttaatcctaaaagggtcctgttaagaattccttcattatcttgtcatgcttcaaggcccaggaaaggcctaggcacaactctgggtgggcttttgttacatcccagcctttgtataagggcactggctctcttatcttttaatatttaacttaacccttgtaatcccagcactttgggaggccgaggtgggtggatcacgtgaggtcaggagtttgagacaagcctggccaacatggtgaaaccacgtctctactaaaaatacaaaaattagctaggtgtggtggcacatgcctgtaatcccagccacttgagaggctgacacacaagagaatcacttgaacccaggaggcagaggttgcagtgagccgagatcatgccattgcactccagcctgggtgacagagtgagactccatctcaaaaaaaaaaaaaaaaaaaaaagcaaacaacaaaaaccctctcttggctgcttgctctgtgccttgagcaagaatccttccagcccaggagtcacttagcagtcttcaaacattctagtttgcttctctagagtttcggtcacatttctttcctaagcaaaacactatataattaccgagttgcaaaaatcatctttccaaacgccaaaacggagataagacagaaaataaaagatgtgagaggcaggcatcctgggtaaatcactctggtattgcagggttgggatccccagggtactatgatggctaactggaacagaatgcaggcatttctccaaagcccaagagttcataaaagcaaattaaatatgactcaatggattaatcaagggccaccagttgcattactgattactaactttgcagaaatgaaacacggtatgttgggtcaaggttcagtgaggctggttttcataacattccaggcaataaacaggcacactcattcattgataaatgttgacaatgacaggtggtgactgttgataaggtttgattgccattcagaaagtttgtttgacctctttccaagtaaccacgaccttacctctctcttttgagcttatcacaattggtgactgtacacttgtttcatagacttccccaccagactgtgagctccatagggctgggccccaggtcggtttcaccaccaggctctctcgcctaactcggcccacgggaggccgtttccagctgctctggctccatagctcagcctggcagcggccactgggtgccctgatttggtcggccccgccccaccgggccttacttccgggatgcttctggcgggagcaagaaacatggttacatacgacgtaatgcgcctgcgcacagtccgtcctgcgcctgcgcattcctgacagcacctcccggaccggacataacggtccccgcgcggctccccgaaccggaagtggaggtgagctgtcgcgggcggcgcccggccttgctcaacgcccagcagtccccaccgtcgctgccgccgccaccgccctcggccgctgccgaggcctcctgcagccatcatgtccgccagcgccgtctacgtgctggacctgaagggcaaggtactgagggctccccaccctccctgttgccaggcaaccggcaggggcctc

SEQ ID NO: 21002 - DNA, 2300 bp, Homo sapien
ttatctgcatttcgaagattgaggaggcaagcccaaacagccaaagccactggttcaaggtcacacagcgcgtgctcagtggctgaggctgactcgcagccatttcagtggcaactgcagaaagcaagtttgtattcaacttgaagtctccggtgactgggtttggtgggggctgcagaggggaccctgcagagtgcatttctgcagaggctgagagtccaagcttccagggcaggagctgcctgcatccctcaccacctggctccaagttcctccttgggatgctcttcctcccatacccacatggtccccaatgactttttcacattagctcacatttcaccccctgggtgagattcagaatttccccattttctccttcccactccctcatctcacactcactttctagtcccttctactgctccatttttctttttaaacccctatcagtaaggccaggcgcaatggctcacacctgtaatcccagcactttgggaggccgaggcgggtggatcgcctgagcccaggacttcaagaccagcctgggcaacatagtgagaccccgtctctacaaaaaaatacaaaaaaaaaaatttagccaggcatggtggtgtgcaccttgtaatcccagctacttgggaggctaaggcaggaggatctcttgagcgcaggagttcgaggctgcagtgagctgtgattgcactactacactccagactgggcaacagagggagaccctgtctcaaaaaaactcaaatgaataaacctctatccttccctccttcactaaagtggaggtcccctagggcagggatcttgtctatctcttggttactgtgtccccagtgcctacccagggctggcagacagttgtaacaggagtgacagtccctggccagcagggatatggtgtgggggacagaggtggagcattgaagggacccattgggcagcattgtcctctgatgcccccgatgctggagctgtattgggggaatgactgtcatcaccgtcctctgagttacttaattcatttatggaagtcagtaaaggaacccagcctgcctgtgcctgccgcaactccaacttctcccagccacctctgcctcagtttccctgcacttgacgggcttattgaggttggggaggagggggtgggtgtctcaaatgtcaaagatttaatgtgtcttgatgttaccacacaaaagttttgttttgtttgtttttttgagacagtctcctctgtcacccaggctggagtgtagtggtgtgattgtatctcactgcagcctcgacctcctgggctcaagcgatcctcccacctcagcctcccactacacccagctaattttttttattttttaagagatgggggccactgtgttgcccaggctggtcttgaactcctggcctcgagtgatcctcctgtctcagcctcccaaagcggtgggattacagatgtgacccactgcaccaggtctacacaaggtgtttttttttacagggtgatgtgcacacggtgggtccctctgggtggtcccacaacagatgaggggcccagcctcacccatccatgaatcctggagactccagacttcccatccatccagggttctgcagccctctctgaggctggagccaatctccccttccgtcaagggatccggggagaccgccaagcccggtgctcccctgagagtctctgagaggccccgacaccgcccccgctccaggtccccgggatgctcgcgcaggcgggagcccggggcgcccgggggatccctgagcgtcacgccgctgttgtggagcgcgtgttgacaacgtcgccggggagacgggcgggggcggggcccgggagagggggaggcgcggccctggcggcgcgcgaggggccgggctgtcagcgcaaggcccaggccgccgcagtggccacggccgctgccgcccgccggcttatataccgcggctaaatttaggctgcgcccggagctcgtccccatccgggacgcgtttccgccgccgccgctttggcccggcccccgcgcgcgccgcgcctataaggcttgggcgggcccggccgcggcccacagagccgtccccgcccgcccgcgccccgaccagcccggcctcgggcagccactcaccggtgtccccgtccgcgtcctttctccccgggtcccggccatggcgctgagtgaacccatcctgccgtccttctccactttcgccagcccgtgccgcgagcgcggcctgcaggaggtgagggcggcggggacggcggggcggccgggaccgtg

SEQ ID NO: 21003 - DNA, 2300 bp, Homo sapien
aaatatataagagacaggatcttgctctgctgccctggctggagtgcagtggtgcaatcacggctcattgctatctcaacctcctgggctcaagtgatccttccacctcagcctccctagtagctggaataggtggatgccaccacacctagctaattttatttatttatttattttgtagagatggggtcttgctgtgttatgctggctggtcttgaactcctgggcttgagggatcctcctgccttggcctcccaaagtgctgagattacaggcatgagcactgtgcctggcctagctccatggattttgataaattgtttgatcaagtccttgctgtacttcatcacacatacttgctacgtgaaacccctgaactaagctgatctgggtcacatggtatcccttgtttcccaagcttgctttctgatttccctgagttggtatcaggagcctgttagatttggacatcacaggagactcgttcatgaagagtaaacgagtttaaccattgtttcccagtcttgaccatgagtcccttctcctcaatcctatggacatcttcgggttgtcaacactgtgagaactctttgagaaatcccccccccctttttttttccccgagacggagtcttgctctgtcgcccaggctggagtgcagtggcacaatctcagctccctgcaacttctgcctcccaggttcaagcaattctcctgcctcagcctcctgagtagctgggatcacaggtgcctaccaccacacctggctaatttttcgtgtttttagtagagagggggtttcaccatgttggccaatctggtctcaaactcctggcctcaggtgatccacccacctcagcctcccaaagtgctgggattataggtgtgagccactgcacccagcctaagaaatcctttcataactgagaggaatgactttgagtggcagtttcaggcatcatggcgttcattgaaggtgaggagtggagtggcttttctgtacagttgctgcgtggagaaggaacaatcgatccctccagccacatttgcctgtcctttttctctccactccctcatcatctagataattcaatcaggtgtttattctcattgctattatgagattgtttaaaaggagtgatttgtgtaaatatttaaaaaaaaagggaagaggaaaagcacgtctagagttcaggacacagatgccgtgaactgtggcgtggtgggtgtattgaaggcccgcggtaatgcaggtggagtaggccacggaaggggcctgcccctgagtgcctgaggggcctcaatgcctctgaaccaggaggtgaccgggccctggttgacccatgatggcgtttgcctctctcaagttaactgtgagctggtggcgagaggggtcgcacgtgcagcgggtgacccagccccagggctgtgaactttgagctgcactgggctcgtggctccatctgccctggtggggttggggctgcatgaatgttggtggggcctcgtgggtggtggccctcttggatggtggtgtctcatttgttacctgtcagtgacgtgtgtgtactcacaccttgggggtatctttgttgtctcaggagtggggcagggacatagaagggtggtcttcagagtcctgggacaggacactttggctgcctgtagggcagcctttgcgggctgaggagtgggaggaccagggaggctggcatgtggccgggccggttctccagggacggtccttccaagtgggtgctcgggagggtctttcctggcatgcttgaacccatcccctgaagatcacagcctccctcacaccctgggtggcagggtggatggacaaggagagcgggtgatggggtggagagaggtgcagactggcatctgggtgagcttcacagagccagcctcaacctgtctcagcctcagttttgccagttacagaacaaggatcacatctgccctcttggctcatggaagtgaggagagtttgatgccaaatgtgcatggaagtgctttaatcgccccatcatcaaaaagcatgtgtctgggggtcataaaaagcttccagattaactgttttgccaaaaactgtttcagccaacagtgaactgggtggtgcccgtggcagacaagatgcgatttgatgagatattcctgaagaccgacctggacctggatggctacgtgagtggccaggaggtgaaggagatcttcatgcactcgggcctcacccagaaccttctagcacacatatggtaaggccggacaggtggcagttgtggctgtgggtggct

SEQ ID NO: 21004 - DNA, 2300 bp, Homo sapien
tggtcttttgtgtctggcctctctctcagcatcgtgttttcagggttcatccatgttgtagaatggatcagtgtttccatattccatttactggatggaccacatctttatccattcatctctctggacatgtgggttatttccacccttttgactgttgtgaatagtgctgctaccagcattcatgtacaaggatttgtttggacatccgtttttaattcatttgggtcaatacgtaggagtggaattgctgggtcatgtggtgattctgtgtttaactttgtgaagtcttcccttttttgaaagcactttgaaacgtgtatccttttcagcaaacccacccacctatgatttaattctgtgccagccacaaaggaatgtttctctctcttctcagcacgacaccagcagccctctgatggtcacaccgccctctgcagaggcccactgggctgtgagggtaagtgaacgggaatagctccctccttggctctccttcagatagaattgttccagcagttgttctagaattgttctggaattgttctagtttgatgttgttcagaacattttataggatgattgtgtcagctcttctgtctcagtgtgagtggccacagcacttggatgaaacgcctcttctaatgaacaccttttacaaaggctgtggcccttcactggaattgggagttgcctacctggacaactaagtgtcaggagttggattattaaagggctgcagtttaaatcttgcatctttaggtcacattctgtggtttttgctgcttgtgttggttattcagaatagaagaggaaacggtgagagcttgcaagcacgtggacccccaaatgtgtcccttgctttctcgcttctttccagccactttgcatgttaccattctttcctccctgatgttctgattgctttgtgaaaagcctctctcagcacttgaagtgttatttttaaaacagaggatgttgtggctggaaagataagctactgcgtccagaaagaagaaaaaaaacgagggctgtcttctaagtacagaattccttctaaaggaagtgagcatggtccctccaagtaacatcaggcctcctcaccttcccttcactttcagactgtcacatttcctcacgtttatgtggcttaaatcctgacatgaataacactcttgctctcaaataaaggtcccaagcactttcgtcccatgtttacacggttggtttgctcccttcttggagaggtcatgggctgggtgggggtatctgtgcagggagaggacatgaagatatgtcatgtgactgaggagtcatgcagtcacctctgtcatcaagcactttgccagtggcaatcactgtggtgaagggtttctccctgtcacccagcgcattgtgtggactttgaaaaagagctactttgtcatgggaaacagtgccaagagatcttatactttaaaatgtgatggctcttttccaccaggggttatgtccaggcctcactggaagagctgggactgaggggcctggggacctcgcagagaggagtcagggagcacaggaccagatgctgtaattggggtgtactgtggtcgagagagattctgcattccattcacagccacagtcagaaagaacaagcccgaagtgccaagtgtttgtttccgttgtgaacatttctgggcttctgaaggcactgagtcagcaagtccgatggccaggagaggatcccaggcccccgagaaagacctgcagcgctcagcttcttagcaccaacagctgtgaaagcatgcggtgtctgccggtgatctcatctctgtgactgagggctctgtcttggtttttgtcttttaaaaattaaaaaatttttattgtggttgaaagacacatcatgtaacatttaccatcttaaccatttctaagtgtacagttcaggaatgttaagtttcctttggagggtggaacagactggaagccactgcctcactcatggccccttttacgggctgcctgccctatgtctttcagaacagcaggaactgtgactccccatcctaatgctgtaccttccctctgttcatgaagagctattcctatttacgtattaatttatttaccattagaaatggagggcttcctgtatgtggctgggcttggtggctcacacctgtaatcccagcactttgggaggccgaggcaggcggatcacttgaggccaggagttcaagaccaacccggccatcatgttgaaacaccatctctacaaaaaatacaaaaattagccgggcctggtggcgcat

SEQ ID NO: 21005 - DNA, 2300 bp, Homo sapien
tcgcaatcatggtggaggcaactgtggctagcaagggtgaacacatctgggatccttctgtaggcacagtgattgtgggttatgggtcctcctgtgctttatttatttatttattttgagacggagtttcgctcttgttgcccaaactggagtgcagtggcgtgatctcagctcactgcaacctccgcctcccaggttcaagtgattctcctgcctcagcctcccgagtagctgggattacaggtgcccaccaccacaaccggctaatttttgtatttttagtagacacgggatttcatcatgttggccaggctggtctcaaacttctgacctcaggtgatccatccacctcggcctcccaaagtgctgggattacaggcgtgagccactatgcccagccacctcccctgctttaatctttcagctctagagaggctagcagcctcatatagttatgaatctttaggtaaacttaccttcctcttttgttcttccagtacttccaacacttttatactcagtcccctgtagtcgtttatgtattcatttatttttatttatttattttttagacagagtctcgctctgtcacctaggttggagtgcaatggtgagttctcagcttattgcaaccttcccctcccaggttcaagcaattctcctgcctcagcctcctgagtagctgggattacaggcacctgccactgcactgggttaatttttgtatttttagtaaagatggggtttctccatgttggccaggctggtatcaatctacctgtctcaactggattgctgggattacaagtgtgagccacagagcctggctcaatcccctgtattcaatatcctctgtttgaagtacctagaaggacttctcttttccttatggaatacgtactgataaagcactcaagactgttaaaaaccttcattactctattgatgtaacaaaagaagctgaggcaaagttaatataagtagagagtttgggccaaggttgaggaccgcagtccaggagacacagattcaagttgccctgaatgtatgctttgattagcaacagttacaagtgggttctttttgtttttgactttgttttgagacagagtctcactctgtcacccaggctggagtgcagtggtgcaatcttggctcaccgcaacctccacctcccgggttcaagtgattctctggcctcagcctcctgagtagctgggactacaggcatgcaccaccacacctgctaatttttgtattttttttagtagagatggggtttcaccatattgatgtttcaccatactggccaggctggtctccaactcctgacctcatgaccctcccacctcggcctcccaaagtgctgggattacaggtgtaagccactgtacctggcaacaagtgggttcttgtcttatttatttatttatttttgagacagagtttcgcttctgttgcccaggctggattgcaatggtgtgatcttggctcactgaaacctctgcttcctgggctcaagcaattctcctgcctcagtctcctgagtagcttggatttcaggtgcccgccaccacagccaggaggacgccttgcggggcagggtgaggggggcagggtgcgggtcccccaaattagcgcgcacacacacacacacacacacacacacacactgcgatcctaggaacagggcgctttgcggggcagggtgagggtcccgaccctccgcggggtgggcgaccgcctccccaggcgcactggcagggggacggcatccctaacagagaaccaggcctcggcatgggctggagggatgacacagcatggtcgactcggacagcggccagcggcatgagagtccgaacaacgttggaaggaggagtaggggaacgggcaagagagcacggaagacgcagatgcctcaggcccagcccctccaggctgcgtgtgggcggccccgcccctgcccccgcccctcccggcctgactgcacatgcgtggccctgtctacggccccgccctctcccgggacaggcggcctgcgcaccgccctcccgtcgtcccagtgcgcacgcgtggctgcagccccgcccccgttcccccggcgctcggagcccgagtccgcgggaagatggcggcgccgctcatccccctctcccagcaggtacgggccgggcgggcctgggggcggcgccggggtgcggggcgcgaggcgagcggtgcggcgaggctgaggcgctgggagactcagccaggcggcggcgggggcggcgcgtgctgaagggcttgcggcgggcggg

SEQ ID NO: 21006 - DNA, 2300 bp, Homo sapien
tggcctcccaacatgctgggattacaggcgtgagccaccgtgcctgaccatatttttctttttttttgagatggagtctcactctgtcactgaggctggagtgcaggggcatgatctctgctcactgcaacctctgcctcccgggttcaagtgattcttctgcctcagcctcccgagtagctgggactacaggcatgagccaccacacccagctaatttttgtatttttagtagagacagggtgtcaccgtattggccagactggttttgaactcctgacctcatgatccgctcgcctaaggcctcccaaagtgctgggattacaggcatgagccaccgcgcctggcctatttttctttttaatacgaaaattaaaatgagaaaaagtacccactaaccttttccttctgaggggcatggcccttgatcctcaaatgcacttgactagtgtctattaagaggggcaattttggtaatgcctactaataacacattcatataaatataatccaaagaaggttaaataccattgcatatttgacagtgcttcaagtatgattttattataccaaataagctgaatatgtctccttggacttcaggggacctaataccaataaaagtaataataatgataataggccaagcaccatggctcacgcctataatcccagcactttaggaggccgaggcaggtggattacttaaggccaggagtttgagtccagcctgggcaatgtggtgaaactctgtctctaaaaaaattagcagggcatggtggcgcacgcttgtaatcgcagctcctcagaagcctgaagcaagagaatcacttgaacccgggagacggaggtttgagtgagccaagatcgtgccactgcactctagcctaggcgacagagcgagactcctactaccaaaaaaaaaaaaaaaaaaaaaaaggaatctttggcaataaagaaaggagagaggaggctggatgttgtggctcatgcctgtaatcccagcactttgggaggccaaggtgggtggatcatgaggtcaggagttcgagaccagcctggccaacgtggaccctgtctctactaaaagtacaaaaattagccggtcatggtggcgcgcgcctgtagtctcagctactcgggaggctgaggcaggagaattgcttgaacccgggaggtggaagttgcagtgagccgaaatcgcgccactgcactccagcctgggcaacagagcaaggctccgtctcaaaaaaaaaaaaaaaaaaaaaggagagaagaaacaaaaaaacaaggaaaggagccccttaagttctacctttgccttaatgtcttcatctgtaaaacgggaataaaagcgttttggctgtgccacaactacctagagaggttgctatggaaatgtaacattaggctcaatttggtcctgattctacactaacctttatctttctctttatgaccataaaacttgcccgacgaaagtctaaaatgcccaaatcgggagtcattggtggactgcaaccatcggtttctccaatgctctgtggggaaggggaaataacaccggttagaggtgataatggttaatttgggctaagggaagggtgaaggggaccctcgaggattcgagggttcgctgccgtggaccccgtggcgactctggccagccttagggggcggagatgggggagcttacacctccgccaccacgggcgtggccccttcacctccgtctagaaattcctcttggaaatagacggtagccagcgccactcgcagcatgcatatggcccagagctggaccaaagcccgggccatgggggtgtgcactgcgcttccggtcgccgccaccccttagctcccagctctctctgcggctcttcaggcgcgtcccgaaactacaactcccgtcacaactcgcgattatgacctgagggtcccattggtcgctgcggcgcggggcacgttgggcccgccccggaactaccgctcccatgacaccccgcgattgtgattcggggcgccattggtctgcggggcgcggtgcttcccgggagatgtagtctcttctgctctggctctgttgcccagggcaaccgctccttcaggcgtgaatgtggcggctgcctctgcgaatggacggcgtgggaagaggtcggcagggctggtggggaggtgacctagctgggcgtccgggctcgcgagggggatacggggaaatggggccttctccggggctgagctggttgggccgctgcaggatggtcccgcgcctcagtttccctgtctggggtctattgg

SEQ ID NO: 21007 - DNA, 2300 bp, Homo sapien
taaagaaattggaaccctcatatgttgttgggggaattgtaaaattatgtagtcctcaatgtggaaaacagttggttcctcaaaaggttagacatagagttaccatgtgatccagggattccactcccatgtggcccaagagaaatgcaaatgtatgcaaatgttcgtaatagttttgttttgttttgagacaggctctcactctgttgcccaggctgagtgcagtggtgttatcatggctcactacagcctcgacctcccggggtcacgcgatcctcccacctcagcttcctgggtagctgggactacagacacacattgccatgcctagctaactttttgtagaaacaaggtctcactgtgttgcccaggctgttctcagattcctggggttctagagatccgcagcctcagcctcccaaaatgctgagattacaatcccacatcatcatacctggccccataatatttattactcctagtagactaaaacggaaaacaatgtaactatccattaattagtgaatggattacaaactatggtccatccatacagtgtaatacagttcagcaatttaaaaaacaaatactaatataacagcacgcaggaatctcaaatacatcacgctaagggaaagtagccaagccgggcgcagtggctcacgcctgtaatcccagcactttgggaggctaaggcgggcggatcacgaggtcaggagatcgagaccagcctgacacacatggtaaaaccccgtctctactaacaatacaaaaattagcggggcgtggtgtcatgcgcctgtaatcccaaatactcaggacgctgagacaggagaattgcttgaacctgggaggcggagttcgcagtgagccgagatcgcaccattgcacttcagcctaagtaacagagcgagaatctgtctcaaaaaaaaaaaaaaaaggaaagaaaaaagaaagtagccagacactaaactccacacaccctatcatttcatttgtaagaactgtcaagaaaaggcaaaccaataaactcagaaagcagatcgggccggtgctgtgactcacgcctataatcccagcactttgggaggccaaggctggcagattacgtgaggtcaggagttcgagaccagcgtggcaaacatggtgaaaccccatctctactaaaaatacaaaaaattagccggagtgcagtggcatgatcacagctcacagcagcccttgacctcctggacacaagcaatcctccctcctgcctcaacatcctgagtagctgggactacaggcgcgtgccactacacctggctaattttttatttttatcttttttagagatggggtctcgccaggttgcccaggctggtctggatctcctggcctcaagtgatcctcccgcctctgcctcccaaagtgctgggattccaggcgtgaatcaccgcgcccggcctgacgcaaagttctaaagctggatgagctggatggtggcgacggcttcacaactttgtagatttactaaaaataacggagtcgtcagcttaaaagtggcgaacactatggtatgtaaatgaaggctcaataaagttgttacaaatcaacaaaccaaaacttgaaaaccctggcgcccctgagaccatcctgctcttctccccagctatgaagcgacccgcgcaggaccatgctccaatagaccccagacagggaaactgaggcgcgggaccatcctgcagcggcccaaccagctcagccccggagaaggccccatttccccgtatccccctcgcgagcccggacgcccagctaggtcacctccccaccagccctgccgacctcttcccacgccgtccattcgcagaggcagccgccacattcacgcctgaaggagcggttgccctgggcaacagagccagagcagaagagactacatctcccgggaagcaccgcgccccgcagaccaatggcgccccgaatcacaatcgcggggtgtcatgggagcggtagttccggggcgggcccaacgtgccccgcgccgcagcgaccaatgggaccctcaggtcataatcgcgagttgtgacgggagttgtagtttcgggacgcgcctgaagagccgcagagagagctgggagctaaggggtggcggcgaccggaagcgcagtgcacacccccatggcccgggctttggtccagctctgggccatatgcatgctgcgagtggcgctggctaccgtctatttccaagaggaatttctagacggaggtgaaggggccacgcccgtggtggcggaggtgtaagctcccccatc

SEQ ID NO: 21008 - DNA, 2300 bp, Homo sapien
tgtttgtttgtttttttgagatgttgcccaggctggggtgcagtggcgtgatctcagctcactgtaatctctgcctcccaggttcaagtgatgctcctgtctcagcttcccaagtagctgggactataggcgcacgccaccatgcctggctaattttttgtatttttagtggagacgggacggggtttcaccatgttggtgaggctggtctttttttttttttgagatgacatctcgctctgtcacccaggctggagtgcaatggcgtgatctcggctcactgtaacctccgcctcctgggttcaagcgattctcctgcctcagcctcccaagtagctgggactacaggtgcccaccaccacgcccagctaatttttatacttttaatagagacagggtttcaccatgttggccaggatggtctcgatctcttgaccttgtgatccgcctgcctccgcctcccaaagtgctaggattacaggcgtgagccaccgtacctggtggtcaggctggtcttgaactcctgaccttgtgatctgttctcctcagcctcccaaagtgctgggattacaggcatgagccactgtgcccggccctgtcttctgtctgttttttttttgacagagttttgcccttgttgcccaggctggagtgcaatggcgtgatcttggctcactgcaacttccgcctccgagattcaagcaattcttctgcctcagcctctcgagtagctgggattacaggctcttgccaccacgcccagctaatttttctatttttagtagagacgggatttcaacatgttggccaggctggtcttcgactcctgacctgaggtgatccacctgcctcggcctcccaaagtgctgggattacaggcatgagccactgcaccaagcctgtcttctgtctttataaagctttctcagaaggcagccacgctccttcctttacacattgtctatggctgctttcacactatgacattggagctgagtcagtctgtccccaaaagctggaaatttcccagctagccttttattttttatcattattattatcattatttgttatgataattatttttgagacggagccttgctctgtcacccgggctggagtgcagtggcatgatcttggctcactgcaacctccaactccgggttcaagcgattttcctgcctcagcctcctgagtggctgggactacaggcacgtgccatcacacttggctaatttttgtatttttaatagagatcgggtttcaccatgttgaccaggctggtgttgaactcctggcctcagttgatctgcccatctcggcctcccaaagtgctgggattacaggcgtgagccaccatgcccgatgattattattattttttagagacagggtctctctatgctccaggctggagtgcagtggtgtgatcatagttcactgcagctttgaactggtctcaagagattctccggcctcagcctcctgagtagctgggactacaggcacccgccaccacgcctggctaattttttgtatttttagtagagacagggtttcattgtgttagccaggatggtctcgatctcctgaccttgtgatctgcccgcctcggcctcccaaagtgttgggattacaggcgtgagtcaccgcgcctggccatgtcttcatatctttctaaacatttgtgggagattaggctggctgcggtggctcacacctgtaaacccagcactttgggaggccgaggcaggtgaatcacttgaggccaggaattcaagaccagcctggccaaatggtgaaatcttgtctgtactaaaaatagaaaaattagccgggcgaggtgtcaggcacctgtaatcccagctactcaggaggctgaggtgagagaatcacttgaacttgggaggcagaagttgtggtgagccaagatcgtgccactgcactccagcctgggtgacagagtgagactctatctcaaaaaaaaaaagaaaagaaaagaaaaaagaaatttggaaggtttgtaaaaatttatggagtaaataagagagtaaatgtaaacgcttatactcattttttaattacagagtttagaataaatattttatcgcttgacggtctggctccagctgtcagtgagaactccgatttggaacaggaagtaagtacaacaaagtcatttttcatggtcgattgtttttggcttcaacatttttttttttaaatttttaaaaaatttaaaaattgaggcagggtctcactatgttgcccaggccgtcctcaaactgggctcaagcaat

SEQ ID NO: 21009 - DNA, 2300 bp, Homo sapien
ccaccacacctgactaagttttgtaattttagtagagatagggtttcactatgttagccaggctgttctcagactcctaacctcaagtgatctgcccgcttcagcctcccaaagtgctgggattacaggcgtcagccactacgcctggcctcctttcaagccttttctttttctttctttcttttttttttttgagatggagtcttactctgtcactcagactgcagtgcaatggcgtggtcttggcttaccgcaacctccacctcccgggttcaagcgattctcccgcctcagcctcccaagtagctgggactacaggcgcgggccaccacacccggctaatttttgtatttttcgtagaaacagggtttcactatgttggccaggctggtctcagactcctaacctcaagtgatctgcccgccttggactcccaaagtgctgtgattacagtatgagccactgcaacaggcctcctttcaagctgtttaatcgaacaccaactgtgtgttatgtattaagggacaatgaccttgtaccttaatacaagacgagcgtgtagtcccctgaactacacgctcgccgaagccaaacagaccttgtttgggtcattgtaccttaatacataacacacaattggcgttcgatcaaacagcggacaaccacctctcaatgtccatctacctggcaaactcctagttattcatttaaacaatctagagacggggttgggtactgaacgtgacagatgtgatacctgccctgagcagccgcaccacctggtgactatccattattcaaaggccagctctgcttcctaactttaaacttctttagagcaggactggaatcctgttgcctaaatgaacgaacattgataaacacttgccaataactaaaactcagagggataattctttttgatttctgctgcaggcatctgaaatgcacaaaaccttgctggacccacagggagacggcaaagggggctggacagtgcctgtcccatggactcccatccggcctctatcacttcctccctagaaaacactaaaacaatcacgctactcctgctaatctccgtcatcagtctgcaaaacaacagcaaaatccctgatccagagcccaggggggaggatcgaaaacctcgttgttctccattacagtggcacccagcagccgctctgtgcagggccgtgggaacagcggaacagggatcgtgtggaccgagctgctccacttcaaagaataaacgacccgaaagaaagaggtttgtggcagagcccggactggaatccgagaaaggaagcgctcgatgggacggcctgagtgccggaggggactcacgctgctgctgctccagcgccagcttgcacttgtagtaactgtagaattcgcctccgaaaagaaacgagaatttggggttgtccttctgcttctccatagtcatcttctcaaactcgggcccattgcgagccacgaactgggcgagcttgtcgatgacatttcgaagctcctggtctggaggacggagaaaaggccacgcggggcgtcagcgaggaccgcccaaagccgggggactcggcgccccagcccccgtccgccttgccggggaccccaagggggtgggccccgaagaggccgcccttgtacgggtcccgataggggccacacgctcgccgggaatgcggggacccacgggagaggccgcaggcgaagccgcgaggccgagccccgccccctcccagacccggggactccgggaggcggggccggccaataggaggttccggggagagagaaacggtctctcggccggtttgggtctcaccatcggggggcagcggcatctccatggctccggccgcggggaacgtcctccggcgccacacgatcgaccaccagcgccgtctgcggaagccggccggaagtggcgcgagggagccgtttacggcgggcttctagggccgcttccgcccgccacttacggccgtcgctgggaaactccggaagtgagagcgggaggcaggcgggaagaagccgcgcgatgcctggcgcgcgggaggggctagcgacgcgcacgcgcagaagtttcctgacactttcgcagagtgggtccccgtcgcgcggcgccgcggaaaggctggaacggcgcgggtgggtgttagtcgagaccggggggcgcggggcgtgccccttggtcggcgtcgcagcccgatgggctggctggttgctacctccgggcgaccaggggcctggggacttcgtgcctgggccagggtctctttcctttcgcgggc

SEQ ID NO: 21010 - DNA, 2300 bp, Homo sapien
gcctcccaagtagatgggattacaggcatccgccaccatgcccggctaatttttgtatttttagtagagatgggatttctccatgttggccaggctggtctcgaactcctgacctcaggtgatctgcgtgccttggcctcccaaggtgctggaattacaggcatgagccactgagcctggcctttcttcctctttttattttattttatttattttatttattttttttttttgagatggagtctcactctgtcgcccaggctggagtgcagtggtgcaatctcagctcactgcaagctccaaaccagtcccactcccatgataacctatttatccattaacacatgaatggcacgacctcataacccaatcacctcttaaaggctccacctcttaatactgtttcactggggattaggaacaaacattcaaactgtagcaacttgtatttaagaaactactcagttatcatattttgattttcaccaacaaaaattttatgaacttttctttctggttatagaaatacctaaataaggctgggtagggtggctcacacctgtaatcccagcagtctgggaggccaaggcaggcagatcatgtgaggtcaggagttcaagaccagcatggccaacctggtgaaaccccatctctactaaaaatgcaaaaattagccgggcgtggtggtgcgcacctgtagtcccagctcccctggaggctgaggcaggagaattgcttgagcacgggaggcagaggttgcagtgaaccgagatcacaccactgcactccagcttgggcgagagagagcaagactgtgtctcaaaaaaaaaaaaaaaccaaacaattaagatcctcgatcttcatgagaaaatatgaactagaggacatttagaaaaaaaaaaatccttgatcttgcctcctgacctgcagagtctaaaatatttgctttctgtcccttttatacaaaaagttttgttgattcctagcctacagcaacacttgatgtagagttgtcaatccataagcatctggtggaaaaatgctgttaacaataaaaatgaaactaatctaaaatacatgtgcatttatttgcacagaaaaaaacaggctgggtaaagtagctcatgcctataatcctagcactttgggaggccgaggcgggaggattacttgagcacaggagttcagggctagtgagctatgatcatgacactgcactccagcgtgggccacagagcaagaccttgtctcaagaaaaaagaaaaaaaaaaacggataaaggaaaaaaaagcggcgggggcggggggcaggtatagccaactaagcattaaccatctcaagaggatcagtttatatcggacgtccacagcagaaatttgctgcttctggctatcttttccccacaattagcaagggttagcttcattattttagaggcaacccaactgcagcttttagaaaggcgctgtgccctctaggccagcaatttgagggcatgggttggggggtaccccgccccagtcttcctgaccaaagagtggagcggaagaaagccaggaggaggatgttttgaacctaaatacgtccagctgcaatcccagtcaagctcgtcgcccccagttctgctccacctccggtctggccggggagaatgtgacagtcgccgcagcccgggatccacccggacgcacctcacctcgcagtctcctcactgtgcccgcgaaaggaaagagaccctggcccaggcacgaagtccccaggcccctggtcgcccggaggtagcaaccagccagcccatcgggctgcgacgccgaccaaggggcacgccccgcgccccccggtctcgactaacacccacccgcgccgttccagcctttccgcggcgccgcgcgacggggacccactctgcgaaagtgtcaggaaacttctgcgcgtgcgcgtcgctagcccctcccgcgcgccaggcatcgcgcggcttcttcccgcctgcctcccgctctcacttccggagtttcccagcgacggccgtaagtggcgggcggaagcggccctagaagcccgccgtaaacggctccctcgcgccacttccggccggcttccgcagacggcgctggtggtcgatcgtgtggcgccggaggacgttccccgcggccggagccatggagatgccgctgccccccgatggtgagacccaaaccggccgagagaccgtttctctctccccggaacctcctattggccggccccgcctcccggagtccccgggtctgggagggggcggggctcggcctcgcggcttc

SEQ ID NO: 21011 - DNA, 2300 bp, Homo sapien
acaggtaaatggatttgcatttgggagttccagtcttgagttggttgacattgagctggtcgcctaagcgtgtcttcttgcatttgagaggaccgtgtgatccttctctcttggagtgcagtggagatggagtcaggtagacatcctgcagctccagcagggccgccaatcacggtcaccctgggctgagccagctctgtcctcctgtggccaaggtcagcgtggcctggaaattggcctacagggcagtgtctacctggttctcacctgtctgcctgtcctgggaccagcctaggctctttgggggattccatggtcccgatgtctgctagttgtgatttcttaatttctggatcccttagtcagaatggcctcattctggtcagggtcagatggtaaagttttgtggggtttttttgaaacagtgtcttacactgtcgcccaggctggggtgctatggcgccatcgtagctcactgtagccttgaactcctaggctcaagcgatcctcccacctcagcctcccaggtagctgggaccacaggtgtgcaccaccatgcctggctaatttttttttttttttgtagagacagggtctcactgtgttgcccaggctgccctcgaatgattttttttccttagcctcccagagtgctgggattacaggcatgagccaccacgcccaacctaaactggtttttttgtttgtttttttgagacagagtctcgctctgttgccctggctggagtgcagtggtgcaatctcagctcactgcaacctccacctcccaggttcaagagattgtcctgcctcagctgggattacaggcatgcgccaccacaccacaccacacccgaccaattttgtatttttaatagagacacagttttaccatgttggtcaggctggtcttgaactcctgacctcagatgatccagctgcatcggcctcccaaagtgctgggattacaggtgtgagccactgcacctggcctcagctgttgatggtaacgtcacctcttgtgtttgtttggcttgagattgttgtaaagcacttcaaaagccatgattctgttcatcctcgcagcaataggtgcagacccgtggctttcgtattaccaggtacttcgcaggctcagagccaccttcccaggacctccaaccctgtagaatgcattgcgtccaacaagcagatccctgctttgccaaacccagggttcctggctgttcactgccagggaaggctttggcttacgtcttgcttggtgccctttggggacctggcttcacctgtttccttggcaggagacggcgggtgattcccatgctgtgtggtgtcatgaggttctgaggtcatggacctaaagcacctagtgtctcttggtgacacatctggactggctgcctgtggaccatgaggctccagatgagcccctccacatcccttcccctaaccctgccaggtggatacagggaggcagggtcaccgctgcccactgaagtgctgtctttaccttccggtctctgcagacctacgtctaccagtggccctggacgctcctgctcctggctgtcagcggcttctgtaactttgcccagaatgttatcgccttcagcatcctcaacctcgttagccccctgagctactcggtcgccaatgccaccaaaagaatcatggtcatcacggtgtccctgatcatgctgcgcaacccagtcaccagcaccaacgtcctgggcatgatgaccgccatcctgggggtcttcctctataacaaggtgagagtctgagaggctgggcagggaaggaagccggccccccaacacccaggaagtcagaaaaggaagggcctcccgggcgctcaaggctggggttgtatgtcagagctttgccactgactggtttatgatcttggcgtagccccatcccactctggcttcctttttcctgcataggcaacctcaggtcctcaaatcattccggctgtgtctcagctggggttttccctccctcctctcaaaggctctgtttagtgcggtgtaaggacatgggatggccaacagggagggcttgccttcttttccttttcttttttttttttttttttttcgagatggagtctggctctgtcacccaggctggattgcagtggcgctccatcccagcttactgcaacctccgcctcccggggtcaagcgattctcctgcctcagcctcccgagtagctgggactacaggcgcctaccacacctggctaatttttgtatttttagtagagatggggtttcaccatcttggccagg

SEQ ID NO: 21012 - DNA, 2300 bp, Homo sapien
tgacgatgcacgccatcgaggaagtgggtttcctgtgtatttccttctctggtgtgcttgatcccaggtgctgatagctgctgtgtgtgcgccagtagcgtcaaggaagagaaggtgactctttcacctcctgacagtatagtccagatagcacattgactttttatttttactcattttttattttaaatgtttattttttagagacagaacctcgctctgttgccagggctggagtgcagtggcacaatcatggctcactgcagccttgacctcaatccggggctcaagcgatcctcccacagcctcccgagtaactgggactgcaggcgaataccaccatgcctggctaatttttttttgtttgatttttgtttttttactgtttttggagagacagggtctcactatgttgcccaggctggtcctgaactcctggcgttaagagatctgccttggcctcccaaagtgctgggattacagatgtgagccactgtgccttgccagccctggaactttgaaaactatgcactggccaaaaaaaaaaaaaaaaaaaaaaaaagccgggcgcagtggctcacgcctgtaatcccagcactctgggaggccaaggcgggcggatcacgaggtcaggagtttgagaccagcctggccaatatggtgacaccctgtttctcccaaaaatacaaaaattagccaggcatggtggctcgcacctgtagtcccagctacttgggaggctgaggcagaagaattgcttgaacccaggatgtggcggttgcagtgagccgagatggtgccactgcactccagcctgggtgacagagggagactccgtgtcaaaaaaaaaagaaaaaaacatgcgctgcctgggtgtggtggcttacgcctataatcccagcactttgggaggccaaggtgtgtgaatcatttgaggtcaggagttcgagaccagcctgaccaatatggtgaaatcctgtctctactaaaaatacaaaattagccaggcgtggtggtgcacgcctgtaatcccagccacttgggaggctgaggtgggagaatcgcttgaacccaggaggcagagtttgcagtgagccgagatcgcaccactgcactccagcctgggcaacaagtgtgaagctccgtctcaaaaaaaaaaaagaaagaaagaaaactgtgcagctcagttcctccctggtctctgtttccatttactccacgtcgaatctttttgccacctgcagggtctgccttcagagaatgtgttataaatgaatgcaagtgcctgcggtgaggaggaggccagtgcgattcttccagactcgagttagaaaggaaaagtaaatatttattgaggtcttaatgtggtctagctggatttgtgacatttcttatctttaatccttggctccacctgctgaagtagtggatattacctctattttcccaatcagtaaaccatggctcacttttctaactttcgtttcacattgatgagctgtaattcttctgtgaagaactttccatcttccaggactagtttgttaccttgaagtatggtacgagaaaggcagtttaatgcttaactgttccttttgatgactaattttcaggatagagagttggagcttactccaaatgttgaccagagttgagggtttgtttgggggtagggaaggggttctctttttttctccagcatcattgtgaacttttatgtgtttgtcagttgcatgaattattcgttttcctagtcaaattgtcctgtcttggccaggcgcagtggctccagcctgtaatcccagcactttgggaggccgaggtgggcagatcacttgaggtcaggagttcaagaccagcctggccaacgtggtgaaaccccatctctacagaaaatacaaaaatttgccaggcatggtggtgcacgcctgtaatcccagctactcaggaggctgaggcaggagaattgcttgaacctggaaggcggaggttgcggtgagctgagatcgtaccactgcactccagcctgggcgacagagcgagactccatcttaaaaaaaaagaagaaaaaaaaattgtcctgtcttagccattggagcccttctgattggctccttgcccttctagcactgtgggtcagcgtttctcccagcgggatgcccgccttcaccttgtgtacttcccatcccagagctgcagtcagcccctccttcaggactccaggtgccgttagtggggagcggtatttagagacacaatccaggtgccatgggtgctttttgctgctgggtggtcattgt

SEQ ID NO: 21013 - DNA, 2300 bp, Homo sapien
accggatatcatcgtgtgtatcaggtttccccgttgtacgggacattgtacccagcttgggcaaggagccggaacttcacacagtgaggaaagactgggaattggcccggttaggcagccagactaattataatgacatcataacttctaggaacctgccctgcaaggcagataaggccagtagtcatcattcctgatctcaggttttcctgagatggactgagaggggagaatcatgtgcctgagggccacagcctgatattcgggaagctggaattcaggtccacagccctcggtctgccctccttgtggcatgaccactccctcctaaaatctccacctctcctatctctccttaagagtgtttgtttttctgagacggagtctccctctgttgcccagattggagtgccgtggtgcgatctcagcttactgcaagctccgcctcctgggttcaagcgattcttgcctcagcctcccgagtagccgggattgcaggcgcgttccatcactcctggctaatttttgtattttcaatacagacagggttttaccatgttggccaggctggtctcaaactcctgacttcaagtgatctgccctcctcagcctcccaaagtgaagagtgttctttgtaggacaggattgagccgagagtcagaagagctggacacgcgggaatggatcctggtggatcctggaagttgggagttgtttagccctgcatgccagaccttctagaaggctctctgtcactatgtttgctactcgttcattcagctagcagctattgagtgcctactgagtgctaggcaccaggataaagcagtgaacaaggacctgctctaaggtacactaacgggaccggatgatgtaacagacagagtgggtggagaggctgggcacggtggcccacgcttgtaatcccagcactttgggaggccaaggtgggcagatcacgaggtcaagagatcgagaccatcctggccaacatggcaaaaccccatctttactaaaaatacaaaaattagttgggcgtggtggtaggcacctgtagtcccagctactcagaaagctgaggcagaagaatcggttgaacctgggaggcagaggttgcagtgagccgagatcatgccactgcattccatcctggtgacagagcgagactccgtctcaaaaaaaaaaaaaaagagtgagtggagagctctctgctggggaagtccaggcagtggccctgggagcacagcacaggagcctcccaaggtggaggtgggttggagaaagcactccttgtggaggcaggaggtcactgggaggagaaggcatcagtggagtgtgccagccaggagtaaccatactggaagagcctgaagtaagagggaatgggggctgggcacagtggctcacacctgtaatcccagtactttgggaggccaaggtggatggatgacgtggatcaggcgttcaagactagcctggctaacatggcgaaatcctgtctctactaaaagtacaaaaaaattggccgggcgtggtggcacatccctgtaatcccagctactggggagtctgaggcaggagaatcgcttgaacccgggaagcagaggttgcagtgagccacgattgtgccactacactccagcctgggcgacagagcgagactttgtctcaaaaaaactattttttaaaaagagggaatgggggagccttatagaggatcagggcttcaaaccctggtgcgtcagtggcagctgaacagatctgtggagttaggaccagccccgggctgtggccctgagcagaggctcttaatgggggtgacggtatggggatggggctacccacaaataagccctgcccctggcgctctgataaccacctgcccccagccacccaccagagcgtcactggcacagcaaacaccactttcaaagtgttaggtggtatccctttgctgagggaggagaggggctcttccctgggcatctgtggcatgtggcccagctctagtctggcctgtgagcccttcttgatgacctcttcctgcaggtatacttgtcactcatccccatcatcagcggtgtcctgctggccaccgtcaccgagttgtcttttgacatgtggggactcgtcagcgccctcgccgccacgctgtgcttctcgcttcagaacattttctccaaaaaggtatttggtcaccatcagcggacatgcatggggtttcaggggtgtgcgggcagcaaactggtggcattgggaaaacaggcggagtagaaatttctttgctattagagcagaaa

SEQ ID NO: 21014 - DNA, 2300 bp, Homo sapien
aatttttctcccttgactataaagtgctcatcttttagttccccctcgtccctgaaactgtaggctaagactttggttttccagtttttcactttggaataggtcatcttacccatatctgcttaatttcacaaatgaagaaacagctacaccttaagacatgcagtctcacagggcaaaccaaaggttccttccagcctgtaagactacagtcagtccagagccagtttgagagctagcagggattcctggcaaaagcttggtgcagaacacactcccctccccaacaaaaggccatgggcaaagtggctttgaaggcaggatgaggttgaacccaggcctaccacccaccagctgtgtggctctgagctcatctcttcactcctgtgcacatgtccccatttggggggtgagaataccccagagttgtgagaactaaaacacaaagcatgtcagtgtgtcagtggaagtatctgacactcagctgtgctgtagggtgcctatagttatactttcctaatttcactgtgcctatgtttaacagctctgctgagacatggtgtcccaaggatgtgactttactctgatccacagagggtacagctggaggatattagggtgcagagcttggcctcctatcagcatctctagagttttgggataggttgcagctccccactacccctgcctgcagggactaccatgcctgtgtccatgtatccagaagggcctagggcctttgagaatgcaaggataagctaagataccttccaacatttggggagccaagttgggttgctgctttctacttttctttgagactgggtctcgctctgtcacccaggctgcagtgcagtggcgccatcatagctcactggaaccttgacctgggctcaagccgatccacccacctcagtctccctagtagtgggtaccacaggcgtgcgccaccacgcctggctaatttttgtattttttgcaaagatgaggttctgccatgttatcgatgccacgatctccaactcctgagctcaagcaatccgcccaccttggcctcccaaagtgctgggattccaagcttgactcactgcacccagccggttgctgcttctaatttgacaagtaaaaacactgtaacggaattttaacaccctttccccgaaaaagttggaggcacacgatgtggagaacaaattatagcccttgaattagtataagatcatcttactgaaaacctcgtcctgttttcctccactggggcctcctggggctggtccatcccggctggtccttggacatcagccgtcagggcccggcacctcccccttctgcagagccttggagacaggtgtccaaggacgctaccatgaccacggtccccagtgtggccaggaagcctaagacaagtcgcttccccattctggacttcggtctgtgaaatgcggacagtgatacctaccgcaccgcgttcctaggattcagtgggatgataccagggccacgcccgagaactgcgcacgtcgcggtggtttccagaacatgattccagggatcgggtgctccgggatagtcccactgccagagtttggccacgagcgtgcgcccccagtttgcagagcgagtttagcccaagagcttttcacaaatggtttctttccctaaaaggccttttacctttggtgtcagccgccgccagccatcaggaatcaggaatctagttagcggttgcccttgtatccctggtcgaggccctgatgtttggcccacgcacagacgccgacgctgcgaagccctccgcgcttctgttcgcccgtcccgttcgagctccggctcccggtcactgggaccgcccacgtctcaggtggcacagcttggacgcaggtctgtgtccccttcttccgcttccggcctcggctccgccggaagcgcatctacagtggactgggcctgcactcgagacgtggtggctggcgcgtcggccggcgcggagggatgacgcgaggaggcagcgaccaatgggaaacggcgtagaccggggcgcctgcccccccgcccagccccgcccccgcccggcgtcgggccgtcggacgggctggaaggggcggccgctcgggcaggatggcggcggccgcggtgggcgcgggccacggcgcggggggcccgggcgcagcgagcagcagtggtggggcgcgcgagggcgcgcgggtggcggcgctgtgcctgctgtggtacgcgctgagcgcgggcggcaacgtggtcaacaaggtgatcctgagcgccttcccgttcccggtgaccgt

SEQ ID NO: 21015 - DNA, 2300 bp, Homo sapien
attcttctgcctcagccccctctagtagccaggattacaagtgcgcgccagcatgcccggctaatttttgtatttttagtagagatggggtttcaccatgttggccaggctagtctcgaactcctgagctcaagtgatcgcccacctccgcctgctgaagtgctgggattacaggcttgagccaccacgtccggcccaaatgtttcttaaaataacctgacccatgcaaaataaattgcctcctatgtaatactttattaaaaaaaaaaaaagatactgtacatccgagttagaaattaagagagaggcaagaccagaatatgcctgaggaaggctttgcttattttgcttatcagaaatgagagaattatctccgaatgggccagtttccaacttggaccatgtacaccatgtacacaatgcaccgcattctgggaggggcgaggttgggagcagtaaatgacaagtgttttgcccgtgtttcttttctcctccaagtgtgatgtaaaacttttcacatgtgcagaagcacgcaaccatagccacgtgcagaagcagccgtttttgcaaatgaaaatatttcccagaagcacaacaaatacaagactaacaggtgtcgggcagctccaaggcacacatgtggttctcatcagctgtcttcctcctgttttaaatctaggtcttcctgtaacagtgggaaaaaaaagatttctcccgaggccgccgagcttgcctttccatcccgtctcacaagagcatttccaacagagctcccagagagaggggagcaattaccaaggcaataaacagggtggagggaggaggggcgcccttaaacttgacatctgcggttctgggcttaaccccgaagtctaggtgaccttgggcctccgtttcctcctctgtgacgtgtttggttaagagaatgagcatctcagttttacagaatctcaaggcagaggcgggtagaagggtctttcaatcacggggttctctgccggtgggggggcggggggactgtgcccccacaagggacggcggcaatgactgcagattgggggagggggcgcttcggaggccagagatgccgctcaacttccgacagatcgggggacccgccccgaagacagagcgatcccgcccaaatgccagtggtgccgaggtggagaagccgccgcgtagacgcagatttgcaacctccggctttcccagctacggcgggcggcttctgccagaggcgctttgccgcctcacgttttcgcgatcggggtcgcgcgtggcggtgcagacccccgccctgccaccacacccattcccacaccctctgaggggcgggggggccgcggcgacacccccggactccgatgacccttctgcgcgcagaatcacaacgtggacgtctggttccctcgccctcacaaaaaactcggcagctgctcagcctgcgactcccgtcccccagtcacgcgccgggaaggctctcccagaggaaggattttcccgccgccctccccgccccgaggtagccgctgcgagcgtccgggttcaaggactctttgcgcgcgcgcttccgtcagaaagccccgccccgtgacctggacgggggccgttgccccgcccaacctcctcccaacggctgcctaggccgggcggctgggcggggcgtcacgggcggacgagtgcgcctgcgcgcgcttgcgcggaggcgcggggcgtggcacacgggcagccccgcccaggcctggcgtctccgcccgccccatctcccaacctcctcagcgtggcgccgacgctgcgtgcggcgcggactacccagagtactccgcgcgggggcagctcactggagtttggttctcgaggcggcggcagcgagcggcggcggctccggcggctcctcctcctcctttggtggcggcggcggcccgggaccgagacccggccccggctcccctctccgccaccccgcgcgcccccaaccccccggcgccgcggggaacatgcggctccggctcccggaggccggcgagtgagtgacccccgtcccccgcctcagcccgcccgcccgctggcccggccgcaaccccccgcctcgcccaggcaatgacagcggctccggcgtctccgcagcagatcagggaccggctgctgcaggccatcgacccccagagcaacgtaagtacccgccgcgcgagctgggacggaggccgcatgggcccgggaccctccccctctcctgtacccctcgcccaccgggcttcgggggacccgtctggcgcccacctcccctcgagggccgctgc

SEQ ID NO: 21016 - DNA, 2300 bp, Homo sapien
gatccacctgcctcggcctcccaaagtgctgggattacagttgtgagccactgcacccggcctggaatgagtaacgtttgattggcatctgttgatggtgggaggtcctgttttcacgatccttcgctaggggaagggtcttgctgagcagcgcctctcaaaacttcctggaaacagaccaagcatttaatgtttctagtctgtgctggatcagccctgtatacaggttgtgctgcacgtgactaatcctgtcggctagataatactaggctcgtctaaaccgttttcagcaagatggtgtgttcagcacaagctcggatggagcagggatgtcaggttgtcatccctgaaaaagtagaaatttctgggcttgtgttgtgtatgctgtacttaccatgcagccccagtctgcagatacttcgggtagcacccttgtagatcacctaatctggagccattctttttttttttttttttttttttttgagatggagtcttgctgtgtcacccaggctggagtgcagtgacaccatctcagctcactgcaatctctgcctcccaggttcaagtgattctcctgcctcagcctcctgagtagctgggattacagtcatgcaccaccacacccggctaacttttgtatttttagtagagacgtggtttcaccatgttggccaggctggtctcgaactcccgacctcaggtaatctgcctgcctcggcctcctgaagtgctgggattacaagtgtgagccaccatgcctggcctaatctggacccattcttttcattctggagggcttgagagggagagtgattgactggaaaccctggaagaagggtctagaacccaggtctctggagtcttcacgtactaaattgccttccctcggaggggtttctgttccttggcattcaaggggaccagagtaagtcatcaccaagaaacaccttccctttcacttgcctgaattaggatgctttcagttacaaacactgcaaacccagctcaaagtggttaaagcaaattgaaacatccaacagaattgttttcaggcaccctgggtttaggtgtcaaaccagtccttcaagattagggttggggttggagttggggttagggttagggttagagtcagtatctgactctctgcagctctcaattcccctttcttttatgttggttttactgtgagactggttagggttggcaaagatgaccccagagcaggggttggcatgtttttctgtagagggccacatagtaaatatctgagggctttgcgggccatatggtgtctgtctggcacaacaatgtgactcagctctgctgttgtagtacaaaagcagcaggacatgatatgtaaatgaatgggtatggctgtgtgccataaaactttattcattgacactgagatttgaatttcttgtaatttttgtgtctcacaaaatagtcttctttcttttttttttaatgtaaaaaccagccgggtatggagactcatgcctgtaatctcaacactttgagaggcttaggcgggaggatcacttgaagccaggagttcaagacccacctggggaacatagcaaaaccccatctttatattttaaaaaaaagtaaaaactattagctcataggccatccaaaaacaggtggaagaggctgctggatttggcctgtgggcactgagcttactgagcttacatcttcccagctcagtaagcctggcagaaggtatctctttcccagtagttgggggaaaagtcccagggtggactctcattggacagacttgggtcacatgccccttcttgagccaatcagaggcagaggggcttggtgctttcaggggattggtcagtggtagacacagcctgatgagggtagggaagagggagaaaccaaaaggaaaagccacactgttgccgaagttggaggcagcaagcgccgggtgggtggaagtcacaaaaatccactgctgaggtggcagtagggatgggatgttagctgtgccataaaagtgctttctgattcttccaggtgacaacatccgggaattcttgctgagcctcagatactttcgaatcttcatcgccctgtggaacatcttcatgatgttctgcatgattgtgtgagtccagcctgccctttcctttcactgtcgtctcttagtctccttctccagggtgacccacctgatggtcattctctgtcttttcagtcatcactcttgtatcctggtttctgttttctttattttttgttttgtttgagatggaatcttgctctgtcgcctaaac

SEQ ID NO: 21017 - DNA, 2300 bp, Homo sapien
gtaatcccagctcttcgggaggccaaggcagggatcacttgaacccaggagttcgagaccggcctgggcaacgtggagaaaccccatctctacaaaaaatacaaaatttagcctggcatggtggcacacacctgtaatcccagctactaagggggctgaggtggaaggatcactttagctcaggaggtcgagtctgcagtgagccatgatcgcaccactgcactccaacctggacaacagagcaagaccttgtgtcaaaaaaaaaaaaaaaaaaaaaagagaaagaaagaaaacgaaggtagggcttggcgaaacagaactgtcctctgaagtggaccatgcaattccaggatccaattagaccttacctgtgctgggctccctggactcctccccaaagccctgcgtgtccttctttttcctacaaagaggagcagacagtgtccactttcaatgggacatagagtcctcagccccctgacccccagctcagaaggccacaaacactaagtttcagccctggccctgccgcaaacttgctgtgtgacctctgacgttcaatacccttctctgggcccccactgcccggacaatcacagccaggtcagcagccaccgaccgtttacaaagtggcccgacagtgcgggtgcagggcggaaggtccgcggtggggctatttcttgggggatggggcttaagctctccaggaaggtgaacagagggacaaccaaggaacggagagtatgggtttaaggtctctcggggggtggggggcgaggaagataaaccaggctggaggcgtgcccagagggcggatagggcggggcctgcggcttgggggcggggcctgagaagtgcgccgagatcacgcttatgagggcggggctacgggttccccggatggagccgcagtccggccgcgacctactcacagcttaaagttcagcaccgccccggcattcatcagcaacgtcctgcagagggagaattacagttactaggggcgcccccgcgtcctgcctggctctctcttcccagcctctggtccccctaattacccgaacagcaggatgtctccgatcatcgttacggccgaagcgtccgtcagaaccggaagcggaagccccagggagggaggggagaggagcacaagccgaccaatcctaaagcaacagtggcgagggctgggccaatcgaaggtcaaggctgggagggtcccgccctctgcaggccagacccccttaggggagcgcgagcgccccacctcgctggggaggccccgagagccagaatgggaggagcggggtctcctgggggcgggattgggtcacgcgttcgaagcgtgccgcgcatgcgtgaggtctcgatgccgtagggttagctgggcagcaattcctactcactttctggggtcccaaattgggcttctggacaaaaggaatcctttgactcctgagctgcacagggtgcggggtcctgacgcagtggggtccctagaaacgggtgccccaaccaactgggctctaaaatgagatcctcctgggccccatggggaacgggggttcccactgagctgccccccacaagacgtcctgatttgcagagccccaccggagacggggttcctgatcgaacggaccctatggggcagaaaagtcttgacggggctccacagaggaccgaggtcctaacctatctccacggggaacaggggttctgattcatggggtcccaccatggcgtaggggtcctcactgggctccaccgaagatcggggtcctaattgagcccacggggacaaagtcctggccgatccggccccctgggaacgggcgtcccgcgtgggtgggctccgtgagggacgggcccccagaacaggcagctccccagcctccctcgccttgcacgggtgccccgcaccccgcctcgctgggcggaacggggtagcgatggcaggagggtcaacgcctgggacgcccgaccgtccagctgcgtccgtggtgctgggcgtccccaccacctgtcccggggtgggccgtcgcccctcctctcccgcgggggccgggcctggggtggcgcctggcgggcgggggcgggcccagctgcgggggcgcagtcgccgggccgcgggcggcgggacggacgaggccggggccccgggtggcacccggcaggcgggcaggcgggcgccatggagctgctctcggcgctgagcctgggcgaactggcgctcagcttctcgcgggtgccgctcttccccgtcttcgacctcagttacttcatcgtctccatcctctacc

SEQ ID NO: 21018 - DNA, 2300 bp, Homo sapien
ctggaagaattcccgtgggggctcggagattcagcaccgtgggggaagggaggggagtggagggtgctgggcagttgcagtggggaggagaaccggtgtcactttcgctgaacctgaccgcagcccccagcgcagtggcccttatagacactccgctggcgctctcaatccgcgtgccaaggtcaaggagggaggtcacacctgcgcgcggccagaacagatgcaccgacccccacctgcaccctcgccacagccggcgccccttgcccaagttcctgcagctctgacccaaccaggagccccgaccccaagcacctgttccccctcctctaaacccgcgcacgcctctccttcccctcccccagcttcatcgtcctgggggcttctcccccgggctcaccccggcgtgagagaaccccacgattctagcgcctgcctactcccacgatgcaatccttgaacctgtccctcgctccctccaccacgcacgggcttcccctctctgcgacccccgagctgccccggcccgcgccacccgctgccggtcccctccagccccccgccccggctcacctggctcatacttgaggtagaggatggagacgatgaagtaactgaggtcgaagacggggaagagcggcacccgcgagaagctgagcgccagttcgcccaggctcagcgccgagagcagctccatggcgcccgcctgcccgcctgccgggtgccacccggggccccggcctcgtccgtcccgccgcccgcggcccggcgactgcgcccccgcagctgggcccgcccccgcccgccaggcgccaccccaggcccggcccccgcgggagaggaggggcgacggcccaccccgggacaggtggtggggacgcccagcaccacggacgcagctggacggtcgggcgtcccaggcgttgaccctcctgccatcgctaccccgttccgcccagcgaggcggggtgcggggcacccgtgcaaggcgagggaggctggggagctgcctgttctgggggcccgtccctcacggagcccacccacgcgggacgcccgttcccagggggccggatcggccaggactttgtccccgtgggctcaattaggaccccgatcttcggtggagcccagtgaggacccctacgccatggtgggaccccatgaatcagaacccctgttccccgtggagataggttaggacctcggtcctctgtggagccccgtcaagacttttctgccccatagggtccgttcgatcaggaaccccgtctccggtggggctctgcaaatcaggacgtcttgtggggggcagctcagtgggaacccccgttccccatggggcccaggaggatctcattttagagcccagttggttggggcacccgtttctagggaccccactgcgtcaggaccccgcaccctgtgcagctcaggagtcaaaggattccttttgtccagaagcccaatttgggaccccagaaagtgagtaggaattgctgcccagctaaccctacggcatcgagacctcacgcatgcgcggcacgcttcgaacgcgtgacccaatcccgcccccaggagaccccgctcctcccattctggctctcggggcctccccagcgaggtggggcgctcgcgctcccctaagggggtctggcctgcagagggcgggaccctcccagccttgaccttcgattggcccagccctcgccactgttgctttaggattggtcggcttgtgctcctctcccctccctccctggggcttccgcttccggttctgacggacgcttcggccgtaacgatgatcggagacatcctgctgttcgggtaattagggggaccagaggctgggaagagagagccaggcaggacgcgggggcgcccctagtaactgtaattctccctctgcaggacgttgctgatgaatgccggggcggtgctgaactttaagctgtgagtaggtcgcggccggactgcggctccatccggggaacccgtagccccgccctcataagcgtgatctcggcgcacttctcaggccccgcccccaagccgcaggccccgccctatccgccctctgggcacgcctccagcctggtttatcttcctcgccccccaccccccgagagaccttaaacccatactctccgttccttggttgtccctctgttcaccttcctggagagcttaagccccatcccccaagaaatagccccaccgcggaccttccgccctgcacccgcactgtcgggccactttgtaaacggtcggtggctgctgacctggctgtgattgtc

SEQ ID NO: 21019 - DNA, 2300 bp, Homo sapien
taatttacatctaagtgggagaaaggcttatgaagtttggggttcctttatttttctaagcctaaaatctattatctagtaagttgctggtgttctagaataacggtgaacaagaaacatttaaacatttgttcacggtgaaccttttataaaaatagaacacgttctaaggaagccattcatcctcattttaaaaattaagaagcaggctgtaccctcctgtgacctccccagcgtggagtctggagctgagatggaggacactgaccccaagtcacccagccttggggccggttctgctccgtaagtggaaaggatctggagccagggctggaagaattcccgtgggggctcggagattcagcaccgtgggggaagggaggggagtggagggtgctgggcagttgcagtggggaggagaaccggtgtcactttcgctgaacctgaccgcagcccccagcgcagtggcccttatagacactccgctggcgctctcaatccgcgtgccaaggtcaaggagggaggtcacacctgcgcgcggccagaacagatgcaccgacccccacctgcaccctcgccacagccggcgccccttgcccaagttcctgcagctctgacccaaccaggagccccgaccccaagcacctgttccccctcctctaaacccgcgcacgcctctccttcccctcccccagcttcatcgtcctgggggcttctcccccgggctcaccccggcgtgagagaaccccacgattctagcgcctgcctactcccacgatgcaatccttgaacctgtccctcgctccctccaccacgcacgggcttcccctctctgcgacccccgagctgccccggcccgcgccacccgctgccggtcccctccagccccccgccccggctcacctggctcatacttgaggtagaggatggagacgatgaagtaactgaggtcgaagacggggaagagcggcacccgcgagaagctgagcgccagttcgcccaggctcagcgccgagagcagctccatggcgcccgcctgcccgcctgccgggtgccacccggggccccggcctcgtccgtcccgccgcccgcggcccggcgactgcgcccccgcagctgggcccgcccccgcccgccaggcgccaccccaggcccggcccccgcgggagaggaggggcgacggcccaccccgggacaggtggtggggacgcccagcaccacggacgcagctggacggtcgggcgtcccaggcgttgaccctcctgccatcgctaccccgttccgcccagcgaggcggggtgcggggcacccgtgcaaggcgagggaggctggggagctgcctgttctgggggcccgtccctcacggagcccacccacgcgggacgcccgttcccagggggccggatcggccaggactttgtccccgtgggctcaattaggaccccgatcttcggtggagcccagtgaggacccctacgccatggtgggaccccatgaatcagaacccctgttccccgtggagataggttaggacctcggtcctctgtggagccccgtcaagacttttctgccccatagggtccgttcgatcaggaaccccgtctccggtggggctctgcaaatcaggacgtcttgtggggggcagctcagtgggaacccccgttccccatggggcccaggaggatctcattttagagcccagttggttggggcacccgtttctagggaccccactgcgtcaggaccccgcaccctgtgcagctcaggagtcaaaggattccttttgtccagaagcccaatttgggaccccagaaagtgagtaggaattgctgcccagctaaccctacggcatcgagacctcacgcatgcgcggcacgcttcgaacgcgtgacccaatcccgcccccaggagaccccgctcctcccattctggctctcggggcctccccagcgaggtggggcgctcgcgctcccctaagggggtctggcctgcagagggcgggaccctcccagccttgaccttcgattggcccagccctcgccactgttgctttaggattggtcggcttgtgctcctctcccctccctccctggggcttccgcttccggttctgacggacgcttcggccgtaacgatgatcggagacatcctgctgttcgggtaattagggggaccagaggctgggaagagagagccaggcaggacgcgggggcgcccctagtaactgtaattctccctctgcaggacgttgctgatgaatgccggggcggtgctgaactttaagctgtgagtaggtcgcg

SEQ ID NO: 21020 - DNA, 2300 bp, Homo sapien
tttgctctgttgcccaggctagagtgcagtgaggcaatcatatctcactgcagccttgactttctgggctcaagtaatcctcccacctcaacctcccgagtagttgggactacaggcacacaccaccacgcccagctaattttttgttattgttgttgttgtagagatgagggtctcactatgttgcccaggctggtcttgaactcctggccttgagtgatcctcccaccttggcttccccagtagctgggactacaggagcatgccactgtgcctggcagcacctgaaacttcttttttttttttttttgtgagatggagtgtagtgtggctctgtcgtccaggctggagtgcaatggcgtaatctctgctcactgcaacctctgcctcccaggtttaagtgatcctcctgcctcagcctcccaagtagctgggattacaggcacctgccaccatgcctggctaatttttgtttttagtagagatggggtctcaccatattggccaagctggtctcaaattcctgacctcaggtgatttgcccacctcggcctcccaaagtgctgggattacaggcatgagccaccgcgcctgaccaagtatctgaaacttctatccctgaaaatatagtaacactattattattactttttctttgagatggaggcttgctctgtcgcccaggctggagtgcagtggcgcaatctcggctcactgcaagctccacctcccaggttcatgccattctcctgcctcagcttcctgagtagctgggactacaggtgcaaaccaccacgcccagctaattttttgttttttgttttttgttttttatgtagagacagggtttcaccatgttagccaggatggtcttgatctcctgacctcgtgatctgcctgccttggcctcccaaagtgctgggattactggcgtgagccaccatgcctgggtgacttgtgagtttttgagacaaagtctcgctctgtcacccaggctggagtgcagtggtgcgatctcggctcactgcaagctccacctcccgggttcatgccattctcctgcctcagcttcctgagtagctgggactacaggtgcaaaccaccacgcccagctaattttttgttttgttttgttttgttttttttgtagagacggggtttcaccgtgttagccaggatggtcttgatctcctgacctcgtgatctgcctgccttggcctcccaaagtgctgggattactagcgtgagccaccatgcccgggtgatttgtgagtttttgagacaaagtcttgctctgtcgcccaggctgcagtgcagtggcaggatctcggctcattgcaacctccaactcccaggttcaaacaattcttgtgcctcagcctcccaagtagctgggattacaggcatgcgtcaccacgcccagctaatttttctatttttagtagagataggggtctcaccatattggccagtctggtcttgaatgcctgacctcaggtgatccgcctgcctcggcctcccaaagtgctgggattacaggcatgagccaccgtgcccggtcttggagttttaatggtaattaatcatggctaacatctcacgggcccttcctgtgatgtaggtgtagtgttagtctcactctctatataaatgcttttcattgtctcaccaacacaggaagttagtgagaaaattcaagtgcagagtagtgaagcgtcacaggcaagggacttcacctttctgcatcttgttttcttcatctgtgaaacaggatcataatgtctgtctcttggggtaataatgtggactgctaatgccaaatgccaaccaactgcacctcctagactgtcagcaaatggcatcttttacgaggagccgtatcagcctggcacacaatagttaaccactaagtctgggctgaatgcccggctaagctggtgccctagtgcaaacaatcgctttcattatcccagttgctgggagaattgggcaaggagagacccataaaatacctaagacgaaagttactaggatagccaggggcttgtcttccgggtggcgccgaggccaggaaactgtcctctctaacctatttccccagaggagtctaaattggtcgttcaactaccagcaaaggctaaagagaggctggagcccccaggacagccagaacgctgacactgcaaagggcctctgtccttactggggaagcccagtcctgctcagctgtcttcttcagcaacaaacagaagtccagaaagagaaacagttgtggaggaagctgttgtgatgataattta

SEQ ID NO: 21021 - DNA, 2300 bp, Homo sapien
gctccctgccaacccccagagctttgcctagtgggctgttactctaaaaatgtttgccaaattaacgactgaatgaagttgagaatcagcttgaaaatcaggattcctttctcctattatttcatcattaacaaggagtttcttttttctttttctttcttttcttcttttttttttgagagggagtttccatctgttgcccgggctggagtgcagtggcgtaatcttgacacactgcaacctccacctcctgggttcaagcgattctcctgcctcagcctcccttccaagtagctgggattacaggtgcctgccaccacgcctggttaatttttgtatttttggtagagacagggttttgccatgttggccagactggtctcaaactcctgacctcaggtgatccatccacctcggcctcccaaagtgcttggattacagacgtgagtcaccacgccctgccattaacaggagtttctatacctctatcctcccagcaggactgtgccaagtactgttggtgagaaactcagaaatccctcactgtccaattctcgcagacccagcagtgcccccaccttcattttactcctgggaattgcccactgatgaaagaagcctctcaactggaaatggcagggggatgtggccaccgcccctgaaatggccccagtcaatgactgcctgatgtgggaatacaaaagtctggcccccttgcttcaagatgggacaattcatggtggctcatgcctgtaatcccagtactttgggaggcaaaggtgggaggatcgtttgagccctggagttcaagaatagcctgggcaacatggtaaaatcccatctctacaaaaattagctgggcgtggtggcccgagcctgtagtcccagttacttggggggctgaggtgggaaaatcactagagcctgagaggttgaggctgcagtgagccatgttcgtgccactgcactccagcccgggcaacagagtgagactccgtctcttaataaataaatacataaataggctgggcgcgatggctcatgcctgtaatcccagcattttgggaggccgaggcgggcggatcacttgaggtcaggagttcaagaccagcctggccaatatagcgaaaccccgtctctactaaaaatacaaacaaattagctgggcgtggtggtgcgcacctctagtcccagctacccgggagactgaggtgggagaattgctggaatctgggaggcagaggttacagtgagccgagattgtgccactgcgctccagcctggacaacgaagccagactctgtctaaaaaaaacaaaaaataaaaaaattagtagggcacagtggcaggcgcctgtagtctcagctactcaggaggctgaggcaggagaatcacttgagtccaaaagttggaggctgcagtgagcttcagtctcgccactgcactccagaatactgtctcaaaaaaaaaaaaaaaaagaaagaaagaaaatatgaacaccaggccgggtgtggtggctcacgcctgtaatcccagcactttgggaggccaaggtgggtggatcacctgaggttgggagttagagaccagcctggccaacatggagaaaccccacctttactaaaaatacaaaattagctgggcgtggtggcacacacttgtaatcccagctactcgggaggctgcggcaggaggattgcttgaatccaggaggtggaggttacggtgacctgagatcgtgctattgcactacagcctgggcaacagagtgagactccatctcaaaaacaaaacaaaacaaaaaaaaccaccagggaagcagggctgctgtgattcactctcagtgtaagtcattctcatttttcttccctggcaggcgaggaacaagattccctggacacctccagtgagatcaggtgtctggaggttgctgagcagcgcaagctcctatttacgggcctcgtgtcgggggtcgtccttgtgttccccctgaattccaggcaggacgtgatatgcattccccctcccgaggcccggaaagcaatcaactgcatgtccctgagcaagtgcgaggaccgcctggccatcgcctatgacaacatcgtcctggtgctggacatcacctccggggacccctgcccggtcatcgatgggccaagatacaccttttacactcagctgcccgagaccctctccagcgtggccattctgacggactaccgcgtggtctacagcatgaccaatggggacctctttctttacgagtgtgcaacttccaaagcgtttcccttggagaccca

SEQ ID NO: 21022 - DNA, 2300 bp, Homo sapien
cctgcacctcttcacttataaaaagagaaagcacttggtcattaattgaacgttcacttatttgatgaatgctgactgagagactgtgtcagggatttgtattagagacggacacaaaacaaatatgaaatacaagggactgaggggagacatagaaggggactgggaacacttcctgagggaaagggatatttgggctgcgtttagaaggatgtataggtgttttctgaataacaaagaggcatgacagtacttctggcaaaggaaatggtgagtgccaatgcttgggaccaggaagcagccaggttggtcaggcaattgtgtgaagttctgcacagaggcaggcagtttgcttggaaaatcctgcaggaaaaggttcctaaggaccaattctgacagcctgcaatgtaggtgcttagatttcatctcattagaaataggaagaccttggaggtttggaaggagtggtggaaaaagtggagttttttgtttttctgtttttttttttttaagagatgagatgctctttaaaaaaaaaaaaaaaaaaaagcactgctatgcttcccaggctggggtgtgcagtggcaagatcatggctcactgcagccttgaactcttgggcatgagcaatcctgcctcagcctcccgagtagctgggactaaacgtgtgcaccaccacgcccagctaattttttcattttattttattatttaattaattaattaattaattttttgagacagagtttttgctcttgttgcccaggctggagtgcaatggcgtgatcttggctcactgcaacctccgcctcccgggttcaagcaattctcttgcctcagcctcccgagtagctgggattacaggcatgcgccacaaagcccggctaattttgtatttttagtagagacggggtttctccatgttggtcaggctaatctccaactccagacctcaggtgatctgcccgcctcggcgtcccaaagtgctgggattacaggcgtgagccacggcgcccagccaattttttcattttctttttctttttttcaaggcccggctaattttttgtatttttagtagagacggggttgcaccgtgttagccaggatggtctctatctcctgacctcgtgatccgtccgcctcggcctcccaaagtgctgggattacaggcgtgagccaccatccccagcctagagttcttgatagtatcagggctgagaaagtaccagagttagagccaggtggggtggcactaaaagtacaaaaaattagcagggcgcagtggcgggcgcctgtagtcccagctactcaggaggctgaggcaggagaatggtgtgaactcgggaggcggagcttgcagtgagcggaaatcgcgccactgcactccagcctgggcgacagagcgagactctgtctcaaaaaaaaaaaaaaaaaaaaaaaaaaaaaaagaaagtaccagagttaggaggctcctaaactggtccagatgggaagtgacggggccaaggatagggaagtgaagatgggaggagtaggactaacttaaaggccatttagcaaaaattcaccacgcaaggccctatattagggcgctgggggctcatacctcatcgtcccgtcaactctataaagcaggggccaacaaactttttccataaaaggccagatcgtaaatacttcagggtctgcagatctgtaggatctttagcaactacctactctgttgtaaggcgaaagcaggcagagaagccaggtaaacgcgtgggcgtgtctgtgtgctaataaaactttattcagggaccctcaaatgtgaatttcacaaacttttcacaggtcatagactattcttctttggatttttcccccggctatgtaaacatgtaaaaataattctgagcttgcggggccggacaaagtaggcggcgggtcttggctcgcctacccctgctatataaatcattaattatgataccaatcttaaggagaaggtcttcagaagagtccctcaaagagcaccgcccctcaacgtcatcaaaccccgcctccaaaggcggaggctgcgcatgcgcggcaggacctcgggcgggggcggggcggggcgcagctccgacttcggacatggcgcacgctggcggtggcagcggtggcagcggtgccggcggccccgcgggccgggggctgagcggcgcccgctggggtcgctcgggctccgcaggccacgagaagctgccggtgcacgtgagtggcgtccccgccctccctcggggaacccatcttctggaccccgcgggcgggcg

SEQ ID NO: 21023 - DNA, 2300 bp, Homo sapien
gccctggcaaacatcagccacttccccttgctgcctgtttctctgtccactgcaccttgtgtttctgtggtgccggcatgcacacggcgagatgccccaccagtggccgccacatgagcccccgcacgggaagacccaactcagctgtctccctcctgaaacccccagcccttctccctcccttatccataaaggcctcacaggagctttctcccagcctggcagtgttagtctgtgatgattcggttaccttggaatgtgagcatcttgctggagtcacctcacgcatggacggagcatctggcctggtgcccgtggccaccattgcccaccgggctgtgggctgagctggaagcagctctgcatgctcaggtgcatgggtccagccacgtctccggtgctgaccacctcccacatgtgtccttagttcacaggaaacgggccgtgcgagatgcacagcgtgcagaagaacgagcacgacaagaccccggagcacagcaggaagcgctcccggccctcgctcctccgccccgtgtctgcacccgccaaggtacctgtgagccacatgcagccatgcctgcacgcggggcccccagcaaatcgggccttcccagcatgtgaccagggaacagaggccccagcaggggttcggggctggaccgggggctgtgtgaggttcaccggcagtgggaccgttggaagtcagctctcctctaaggtggctgttcttccgttctccctgtcctgtgagattgttttgaaaaggaggaggaggaaggagtgttaaccctgccctaggtcccaagaaacagggtgtaccacccagtctccttttcaccctcaggactctctcacaggcaaggccgccatgtacgtttgttcaggttggtcactgcacagctgagggcagagaggggctgggatccagctcctgtcacgcctttcacctgcaatggtggttttccgattccattattccttgtgcagttactacttggctttctactattggtgggaactttgtcgtcctcccatttatttagttatgtatattagatatggactctgggttataatccattctagtgttgatgtccatactgttccagattgggccagcggggtccctttggctcttgtgtcctttttttctttcctttgagacagagtctcgctctgtcacccaggctggagtgcagtggcgcgatctcggctcactgcaagctccgcctcccgggttcacgccattgtcctgcctcagccttcctgtgtccttttggcatgtcctcatcattctttctcctgtggggggatggggtttcactctgccacctaggctggagtgcagtggcacagtcagccttgacctctgggctctagctgtcctctcacctcagccttccaagtagctgggaccacaggtgtgcaccaccacacctttttgtagagatgaggtttcatcgtgttgcccaggctggtctcgaactcctgggctcaaacaatcctcccgcctcagcctcccaaagtgttgggattacaggcgtgagtccctgcacccagctcatcctcattcttcaggcactttggagatagttctggatggacagtgttgtccttcttgccatgatcgtgcatccaagttcaggtccaagtccagcttagagacaaaagcctgcagagactcaacatttggcttctccagggtcttcccagtgccaccctcttcctgtccgcttcttgttgctgtcttggctctcaggacaaaacagggaaaggattctgagattgtcgtagccaggggcacatcccccttgcctttctgatgctgtggcactcttgcctgttacccaaagccctaccctgctgagatggagatcccagatttggcagtggcaggtatccccagaggtgtcatctcaggggtcctgggtaactgagcggctcctgcctgtccctcactgagcatctcatggcagttcccaaaggagagcacggtcttagccttcttgagactctgtgacagcgatggacagaggccaccggtgggaggcacagtgttaactgcatagaatttctccccacagaaaaaaatgaaacttcgtggtaccaaagacctgtccatcgctgcagtggggaagtacgggactctgcaggaattttctttctttgacaaggtgagggtgggccctggcttccatcttggggatgccatgtccagctggctgggccaatgctccctgggcctgccccaggattggggcggggagcaggtagggtgggtgcagtctgaggatggatcc

SEQ ID NO: 21024 - DNA, 2300 bp, Homo sapien
ggtcgctccttcttttacaacacagaaacggaatccacaggagccgggctgctggcccaaggcctctcccagagcctgtgggactgtggggacccccttccctcccacctcccttcccgtgggccaccctcgccccaggcccacccacaaccactctggcttcctcactctagtcctcggcgatcctcaagcccaagaccccgtataggttctgtgggtctgtggtgtctgcaaagtgcagatgatgaagtagccctggaaatccaccaatgcgaccctgagttcctggatccctccctggggctggggctgacaaagggaggggcaccaaggttcatatgcagatctctgcacatgcaggtccttgatgaattccaaagtcagaaccccattccatcacgtgatttacaaagcatggttacagatcatggacatggggaccctgcttcagaggggactgtaaaggaattttcagagtgtttatggcataaatgagacctgggggacttaggaagcagtcagagggcgatggtcacactgaagagcccagagcagggctgagcgtgcagactcctaggaaccaggtcagtgtgcttggccctaccagcctctaagccgccttgcaggggaggaggaagggaaacctcaggctgctaggagacccggtccttccctcgggagcctgcagagatggcatccacgctcattttccccaagagccctgctgcgtctgcctccctgccttggactgagggggttggggctgcccagcagaggccctgggtgccaggacagtggtgtgggaggctggaggaaggggtgattgtctaatggtgtgagggaatgaaagtcatgatctagataaagaccaaggggaggggtgagcctgggacagggttttccagggagtgagagcagatgggcatgtgcaaaggccctgcacacgcaggagggagcttggcgcggtgaggctggaggagctgtggaggggcacatcaggggccggcgtcttctgagcagcctgggaaagcctgaagggcattagttggggtgaccatgctcctgtgggccaagtcaccctggacccagtgaggagagtggttggagcaggctggtgggagctggtgggagggctggtgacatgatggtggtagcaagcacgtgcaggggctggcggggacagcagcggaggcgggggcttggtgacgatgggcgtgcaggtcttcagatgtgagcagttgcaggccttccgggtagtagatggagggcagaggcagagaggtcacggctcaccctttgcctccttgacttcatcgatagcatggtgtgggcagccccggtcgagctggaatcaggcgccaccgttgctttcagtaggaggaggtcagcctcagaggcttctccatgctgagccacggggccccgttctgtcctggagctgggctgagcgacagacccaggcttgacgctgtcagaccccctgtgaaccccgccccacatctcagaatcctcttggctcctttgtctggggtcccgggatgacttgggtctgcctcactttcggagaggggaccaggagcacatggggctgcacaagaggttgaggcaagcgacctaccccccaggccctgctgcctcaccgatgttcgccacccatcctgctctgggcagcgctcatccaccttggtggcccagttaacagcgagtcgtgaatgggcactgggggtcctctgggtgctgggtggctttccacctaatggccgcccttccccccacagcaccaggagcagcactcggagggccgcagtgccccctctagcgagccgcacctcatctttgtgtacgaggaccggcagatcctggaggacgcagcagcgctcatcagctactacgtgaagcggcagccggccatccagaaggaggaccagggcaccatccaccagctgctgcaccagttcgtgcccagcctcttcttctctcagcagctggacctgggcgcctccgaggagtcagctgatgaggaccgggacagcccccaggggcagaccacagaccccagtgagcggaagaagccggcgccaggaccccacagtagccccccagaggagaagggggccttcggggatgccccggccactgagcagccacccctgccgcccccagccccgcacaagcccctggacgatgtctacagcctattttttgccaacaacaactggtacttcttcctgcgcctgcaccagaccctgtgctccaggctgctgaagatctaccgccaggcgcagaagcagcttctggag

SEQ ID NO: 21025 - DNA, 2300 bp, Homo sapien
ttctccatgttagtcaggctggtctcgaactcccaacctcaggtgatccacccgcctctgcctcccaaagtgctgggattacaggtgtgagccactgtgcctggcttttttttttttttttttttttttttgagtcggagtctcgctccgttgcccaggctggagtgcagtggtgtgatctcagctcactgtaacccctgcgtcctgggttcaagagattttcctgcctcagcctcctgaggagctaggactacagacgtgcgccaccatgtctggctaatttttgtatttttagtagagacgggttttcaccatgttggccaggacggtctcgatctcttgacctcgtgatccacccacctggcctcccaaagtgctgggattacaggcgtgagccattgcgcccggtcgtgcatcactattttgatgcatcatcttcaaaccaccctgccccagcatcactggactgccggtgtgcccagcctcccctgcacagcttcccactctgctcacagagaagacggtggaggggggagcccaggcgtgggttttccgtgtgctgagggtgtcctcagccacctttttccccaagtcattgacgtgaagctgattttctcattggtggccatggaaactgcccagaaatgggagcagggcctctgagaccctgccccagctagactctctctccaggcttcagtgtctcctcctggagctgggtgttgactctgtccaagactctgctcagtcacttcctggctgatccccgagtgctcaagtgtgtgatgagattagggctcccccaggcaggaaacggccacattggacccctccctcccccatccctagttcattttattttccccaatcctcatggctcccaactaggccctcctgctcccagacccccccaagccctgtcccccatcccctgtagcccagcgctgagcacactggggccagaaccacccataccagactcccccagggcacgacgggttgaggcctctctgaggcagggagggacaacactgaggggccttgtgcagaagagggaaggggtacccccccgagcttcagtttcttcatctgcccgatgagcccccatccaatggtacccaggagtggggatgtgctggggctagaggagggaggccccctggaggctggcttggggacccttcaacctggccacctcactcagggtcagaggtcagagcaggcgagccacacaccccgaagtccccccggtcctcggcaggtgctgtccccagcatcactgtctcccctacagatgcccgtgtgtcccctgggcaagagtgaagtgaggcactcatacaggggtgccttgtgagtatggggtcagccgaggatgctgaggggctctcgaggttcagccagagtccctgacgctgggctcgtgctgctctgggggtctgaagggaccctcgctattaccctctgggaggcgcccatccttggtttttttttttttttttgccgagtctcgctctgttgcccaggctggagtgcagtggcaagatctcggctcactgcaacctccacctcctgggttcaagcaattctcccacctcagcctcctgagtagctgggaccacaggcatctgccaccaagcccagctaatttttgtatttttatgagagatggggtttctccatgttggtcaggccggtctcaaactcccaacctcaggtgatttgcctgccttggcctcccaaaatgttgggattacagccgtgagccaccgtgcctggcctagcagggctcttcttatcctgctcaccagagataggaagtcggggggtgacttcaggaaaggcccagagcccgtgatgggcgtggggattggggtgaggacagggctgtcgtgagaacagtggctgcagatgtgagcggctggcaggaagtggccacttgaaccgcagatgcttcctgggctggtcagggaccgggggtgctggctgcagctgggacccccccccctgcatcttgctggcctggcacctgggtccctgggaggcgccacactggatatagccacgtggggcagcccggtctccataacccacactccagtcctcccacgggctggctggcaagcggccctggtgggtctgcgggggcaggggcagccttcctggtttatctctaccggcgcgatctgctcgtccgcctcggctccagaagctggggctcagggtccggcgaggcaggaagcctgaggccacagcccagagcagcctgagtgcagtcatgtgggggcgactgctcctgtggc

SEQ ID NO: 21026 - DNA, 2300 bp, Homo sapien
tggcacgctactgtaatcccagctatttgggaggctgaggcaggagagtcgtttgaacctgggaggcggaggttgtggtgacctgagattgtgccactgcactccagcttgggtgacagagcaagacctgcaagaccttgtctaaaaaaaaacaaaaaaaaataagacactgggagaataaattccaggcagagttggccatgctgacagctctgtgccctcggctgatggcagttggtagaaaaagcagggaggggccgcagtggatattatccatctgtaggaaggagcgaagcattgatccatgctacagcatggatgaacctcagaaacatgatgctgagtgaaagaagccagacacaaaaggccacagagtacatgattccattgacatgaaatgcccagaacaggcaaatccgtagagttggaaagatttgtggttgccaggggctgggggagtggggagtgagtgctgatggcgatggggtttctttgggggagaaagaaaccgttctgtaactagacagaggtgatgattgcacagtatcgtgaatgtgctgactcccacccacacatgctcagccatgcgtgcacacacacaaaaaggagtggtgtttcagaggccacctgagacgttttcccagtgggatggaaggacccaaagaataaaaaatgggaccgaggcggatcacttgagggcaggagttggagaccagcctggccaacatggtgaaactccgtcttgatcaaaaatacaaaaaattagcagggtgcggtggtgggcgcctgttatcccagctacttgggaggctgaggcaggagaatcatttgaacccaggaggccgagcttgcagtgagccgagatcacgccactgcactccagcctgggcaacagcgcgagactctgtctcaggaaaaaaaaaaaaaaagaaaagtaaaagaaaaaaagaaaatgggatcacgtttcttctgtgtttcacgcgtcctgggtatccctgaaatcagccagttctgggcctgagctcagcgccccgggcctcctggcccgggtcgagcctgcgcccgccgctgccccacagatccccagccggtgcctgacgtgcgtgcggttccgtgctctccgggagtgcgtggtgggcaggacgtcggcgctgccagtctccgtgtacgactactacgaacccggtaggcccgcgcgcccgcacccccggcccggcccggtccctgacccgtcgcgcctgcacttggtcacccgccaccctcgtcccgtagccttcgaggccactcgcttctacaacgtcagcacccacagcccactcgcccgggaactgtgcgccggacccgcgtgcaacgaagtggagcgcgcccctgcccggggcccgggtgagtgcgcggagccactgccgccccccaccgcggcctgccacaccccgactcccaccctcggacgccagggagggctcccctgggggcttggcagaggaggggccaacgtaaagtcaggagaacgcagcatagaggtgggcgggcgctctgcctgtacgggggaggcggggctggaggagcggtcagcggggaggggcgtggctgggggagtggtaagtgcggaagggaagtggctggggaatggtcagtatactgggggcagggccgagccagtgagggtgtggtcactgtggtggggactgggcgcaatgggttgagggtggtcagtgtggtgagggcggggtcgagcggcgagggggaggtgagtgcggagggtgcggggttgagggcgggtgtgttcagtgcggggggcggggccgaacggggtgggtgtggtcagtgcgaaggggacggggttgagagtggatgtggttagtgctgaggggatgaggttgcggtgggtgtggtcagtgcggggggcggggtcgagggtgggtgcggtcagcgctgaggggcgggatttgtggtgggtgtggtcagtgcggagggggcggggttaagagtggtcaggacggagggggcggggttgagggtaggtgtggtcaccgcggagggggcggggttgaggataggagcggtcagtgcggtgggggtggggttggggtgggtgtggtcagtgcggaggaggcgcggcaggggacggggctgttgttgcagggcggcccagacaggacgccctgtctcctttctctcctacaaccgctttttaaaagtctgtttctgtttttgtaagtattaggcaaatacctgcgtgaaattccataaggccagggctcaggacctcccattaactgtcgcgccccaagacccaccga

SEQ ID NO: 21027 - DNA, 2300 bp, Homo sapien
gtttaaagaggatccagggatggagtgggaggtggtggtggtgggctggtttctctctggatttgagagtctttacacctcatgcgagctcagaatccttggagcctttttctttttttttttttttttcttttcttcctttttttttttttttttttgaaacggagtttcgctcttgttgcccaggctggagtgcaatggcgtgatctcctaactcagcctcccaagtagccaggattacaggcatgcaccaccatgcccagctaattttttgtattttttagtagagatgagtttctccatgttagtcaggctggtctcgaactcctgacctcaggtgatccgcctgcctcagcctcccaaagtgctgggattacaggcatgagccaccgtgccttgccattctttttaaattattattattatttttatttatgtatttatttatttattgagacagtctcactctgtcacccaggctggagtgtggagtgcagtggctcggtattggctcactgcaacctctgccttctgggttcaagcaattctcctgcctcagcctcctgagtagctaggattacaggtgtgcaccaccacacacagctaatttttgtatttttagtagagatgggatttcaccatgttggccaggctggtcttgaactcctgacctcaaatgagccactcacctcagcctcccaaagtgctcggattacaggcgtgagccactgtgcctggccagaatctttgagcctttgcaagtcgagtgtggctgcttgggcactaagtaggaacatcaggggctggatcagtacctggtcaggagggaggctattgactagtgatgtctgtgtccaggaaggggaaggtggcctttgattagtgatgtctgccaggggtaaggttgggtagccattgattcacgatgtctgccaggggcacaggaagggctggggctgccataggtttgcagatctgagatggagccccaaggcccttcctgttccagctgtcttcccctgatactcttctcccactggggtcccacaataccttttctttagaccccatgcttggatgcgctccatgggatgccaggctacacactgggtgggttatagctcttgaccactcctttccttgcagatggggtcacccactggagcctgtcaaattcctgggacgtggacaagggcacattcttgagcttcagtgacagggtctctcagtcaggtactggccaccccagctcccgggtgcctgccttggccatacctccatgcactgggtccatgtccctgtgtcaaaagtccccagtgggcctcttccattgcagtggtctcggccgaggtggaaatgacagcctacgcccttctgacctacactctgctgggtgacgtggctgccgccctgcctgtggtgaagtggctgtcccagcagcgaaatgcacttgggggcttctcctccactcaggcgagccgggcagggccagagggaggggctcagggctgggtgggtggggtccctgcagtccttgttttgagctctgaggtggccaggcagtctggccccttctcaccttatggagccccaaagagggcaggggttgggggtgagggacagatgcccctggatcccccatgggagcccagcctctgcctctggggacacaccaacctggctgtcctgaggcccccagtgccatgggtgtctgcactgggtccagtctctattccagccccgttggtgcctgttttaggctaggcttccaagacggggttcaggggaccactggccaactcagtctcagggttgatggccgtctcctcctccatccccaggacacctgcgtggctctgcaggccttggctgaatatgccatcttgtcctatgctggaggcatcaacctcactgtctccctggcctccaccaacctggactaccaggaaaccttcgagctgcacaggaccaaccagaaggttctgcagacagcagcggtgcgtgttcctgggatgagggtttgggggttgttggaggaggggtcagcagggcctcacggtgacttctgtctccagatccccagcctccccacggggctgtttgtgagtgccaagggggacggctgctgcctgatgcaggtgaggttttggggagcacgaggtgatcttgggcttgtcctcctgtgccccattccctccaatcacacagtggaaccccagggacccccagagggttctgaactcagcagcatgccagactgcaggacaggttttcagccttctaatactgcccaaggcagg

SEQ ID NO: 21028 - DNA, 2300 bp, Homo sapien
ttagaccttacaaaccaggcaggcagggaaggcacctccgggctaaccctgaaggtggaggagagcagccggtcttgtgatgccacggggaagtgcatcccaggcagaggggacagctggcaccttggcccaagatggtggtggtgggtgggggtctgatgtatctcaggagcaaatgtggccagagcccaatggtcaagggggaggcggagggctcaaaggctggcctggaggctgaggagtggaggttggcttaggtaggagtcagagttggcctggaggggcccggaggggtggcatggggcaaacttcgatgatgagggtgagatcagatgctgcttcttggtgctagatttttgcacctccatgtgagtttagcagcctgtttggggttggcctggtctgagcttggaggcaggcagctcctcctcttctccaggcaggagagacggctactcaatctactccggcccctgcgcgcgtgcacgcacacacacacaccaacacaccatcatcagttacgtcccctctgggttgtgtgctcagtggcagcaggtcctgtatgtcccagggtcctcattgcccagcccagggcttggtgctgcctgggtgatcagtgttgggtccaaaggctgttgacagggctgagaagcccccagaggacccacatccctaggggcagggagggggcaagagaagcttcccttgagtttcctggaaggatcaggagttggactggcaaaggaggcaggtagaggaagacagagattaggcagaagcaggcagtggagtaagaacagggtgttggaggaactaggctgaggtctctgccatcaaagccagagtttagatttggtctcaataaacgggaagccctggctggatgtggtggctcacacctgtaatcccagcactttgggaggctgaggagggaggatcatttgagcccagtgctcaagaccagcctgggcaacacagtgcgactccgtttctaaaaaaaaatatataaaaattagctgggtgcgggcttgcacctgtagtcccagctactctccaggagtctgaagctgcagtgagctgtgactgcaccactaaattcctgcctgggcaacagagcaaaactctggtctcaaaacataaaaataaaatgtaaaataaacagggagccccgaggattccgggcaggagggggtgtggtcagcactggaattttagaagaagggcagttggtagctgggggaagggggttccacactggaaggagggggtccaggacttggacatggtataggatgtgccgcctgccagtgggacctaggacagcaggaccatcactgaggtggccacacggggaggggcaggaggggacaccctgctcttggagagaaagggggtgcccatccacccctgctgtatgaaggggaaagggggactctgaggcccagcgagagaggggacgggcccaagggatttgtggacagtgggggtgggggagaggggagcagagagcacagatagggacctggggcagatgtgagtctgggaggttcgacccctggctagactgtttccccaaagggtcctctgctccttgggctgtacgcactgcactgggcactagatacaggccagggcttagggcacggcggcgcctgtgggatcggggttgcaggcggcgtccagacccaggggcccctggtgaggggcgggcccggggagggggccataaggggctggctggggagggagggagggagaggccagggaagggacaggttccgagtggacgctgggtggagaggagagggagagtgggggcggtggggggtcgggtccgaggcggggctggtggggaggggggcatccgggggcgaatccgggtagggggtgaggaggcgggttcggaaggaatcgggcagggcccgggtgggtccggtgagtaagtgaggggacgatccccggaagggatcggggcgggtcggggtccggagatgggcggagcaggcgtcccgggagggtgcgcccaggagcggggcgagcggggcgagcggggcggtcccggagacgaggcgggtccggggagggggctggcccggggctgccccagcttggccgggcgcggagcggggcgcatggcgccgggcgcactgcgcgggggctgcgaacaaagggcccccggcggcggcgcgaggacggccgcgctcggaccctggccctggcccagccctggcccggccccctccccaggcgcggcgccccccaggagccgaaaaatgagcggcgccctgctctggccgttg

SEQ ID NO: 21029 - DNA, 2300 bp, Homo sapien
ggtcagcagtgtccatgtgggagaaggacaggaacaaacccctggaacccagaaagggctgattggcaggggcggaccccccacccagtgggtgagtttcctgtggttgctgggacagagtcccacaacctgggtgggcaaaacaactggaattcattctcttacggttcaggaagctgaaagtccgagattgaggtgttggtggttggccctgtctgagggctgcgagggagaatctctcctggccctgtctttggcctgtgaatggttgtcttctctgtgttcacatgtcctccctgctgtgtgtgtctgtgtccccctttccccacaagacaccagtcgtgttggattagcatcccccctacaacccccctatcacctcatgttaacttgatgaccctgataaagtccctcttttcaaataagggcacattccaaggtactgggagttggatcatcaggtatgaatttggggggatacagctcaacccctaacatccaaaattttcatgtgagcacccgtgcagctagaccctgggcttgagtacaaggtctctgactttagggagctcaaaatggaagaaaaagagacaaacccagttgaccctcaaacaacacgaatttgaagtgtgaggttccacttacatgcagatttttttcaataagtatattggaaaaagttttagagatttgtgacaatttgaagaaactcatagatgaaccttatagcctagaaatactgaaaaaattaagaaaaagttaggcatgtcatgagtgcatacatacttgtcccagcatgggcaacatagtgacacccaatctctacaaaaaaattttttttttttttgagatgggcgtcttgctctgtcacccaggctgtagtgcagtggtgctgtctcagctcactgcaacgtccgcctcccaggttcaggcaactctcatacctgagcttcctgagtagctgggactacaggcatgcaccaccacgcccagctaaattttgtatttttagtacagacagggttttgccatgttggccaggctggtctcgaactctggacctcaagtgatccgccctccttagcctctgaaagtgctgggattataggtgtgagccactgcatccggccaatttctataaaaattaaaaattagccaagtgtggtggcatatgcctatagtcccagctacttgggaagctgaggcaagaggtttgcttgaccctgggaggtggaggctgcagtgaactgtgatcactccacagcactccaccttgggcaacacagtaagatctgtctataaaaaatatgtatgtgcagtggctcacgcctgtgatcccagcactttgggaggctgaggtgggcggattacttgaggtcaggagtttgagaccagcctggccaacatggtgaaaccccgtctctactaaaaatacaaaaaattagctgggcatggtgatgcgtgcctgtaacccagctacttgggagactgaggcgcaagaattgctggaacccgggaggcagaggttgcagtgagccgagactgcgccgctgcactccagcctgggagacagagcaagattccatctaaaaaatatatatgtgtatgtgtgtgtgtgtgtgtctgtatgtgtgtctgtgtgtgtgtgtatgtgtgtgtgtatatagatgctaatctatttacatgtttattgaatgtttactatcagtaaggtttcagtcagcagtagctatcagtaaatttgggggaagtcaaaagttagatacagatttttgactgcacaggggttgatgccccaaactcccgtgttgctcaagggtcaatcgtatatcatttcaaacccccatgaagacccagacagcatgtttggggtgggagtgggccatgccggggatggccttgtggaaggcaggcgtttaggcgcagtactctaaagcaggtgggctcagctgagggcccaagcctagaaccgctggcagacacatgttctcagtaaggggcctgggccgccttgccatccacttggctctcttgggaagagctcaccacaccctcggaaacttcctgagctctgattccctggggggtggtgaagaacagcgctgtatcttaaccctgcacaagccgttaagcttctgttaagtttccagagaggggactccagggtctcccctgattatcccttctgcttacagatcgagatgctcagccccttcgaggcagtggccacacgcttcaaggagcaatacaggacattcgccacggccctggacactaccaggcacgagctgcccgtgagg

SEQ ID NO: 21030 - DNA, 2300 bp, Homo sapien
ttgttcatgaaatagtctcatgcttagttcctaacacaacataccgtacgtgccatctgttggcatctgcagcactcctgggctcttgtgtagtggtagcatgctgtatgctagtgcccatcttagacagtgtaaggcttaattttacagtttagaatatacgttaaaagatgaagggaactcccagggaggatgaacagtccagaagctgcagaaaaaagatggaaagattacttggctgagtgcggtggctcatgcctgtaatcccaacactttgggaggccgaggtggatagatcacctgaagccaggagtttgagaccagcctggccaacatggtgaaacctcatctctactaaaatacagaaattagctgagcatggtggcgagtgcctgtaatcccagctacttgggaggctgaggcaggagaatcacttgaacccgggaggtggaggttgcagtgagccgagattgcaccattgtcacctgggtgacaagagtgaaactccgtctcaaaaacaaaaaaggtggaaagagagtagagggtagaatgggaatatggcatcgtatcccacctgtagcatcttgtgaactagcagaaaggcctatttgcgtctctttggttatacagaatgtctctgtcttctagtggtactttaaaaatagagtcaaggtgatggctgggaatttccacaggttttttttttttttttttttttagcctttccaccttggacgaaattgggcttttagaagcaagtggtattgttcaaaaacacggcctgcgtttcctggcttgaatggagagtgtctcttgactgtgctgactttcggggattcttttcttaacagcagatagcagtggggtcggaaagggtgacctgcagtccacgttgctggaagggcatggcacagctccacctgacctggatctctctgctattaatggtaaatcatttgtttcaccccttctgtcactcactgggggttgcagtaggtctcagtgggcttccaaagtacaattggcctacagtggggtcacatccaacaaacccattgtaagttgaaaatattgtacatcaaaaatatacttaataccttggtaaagggtattaaacttgccttttgccccttgcaaagttgaacaactttaactggactgttataagtccatatactcctcaatttatgatggggttacatcccaataaacccatcattagaaaaaaaatggcaaccagggaccagtctatatacgctacttgccattaaaaatgctgtgctttatcttagacaaaagcatcgtcaaaaagacgccacagttagcaaaaacaatatcaaagaaacctgagtcaacatcattttctgcccctcggaaaaagagcccggtaagtgtctgaaagaagagggcagccacagatgggttgcatagatctgatttagagtccactctgaaccagatgctgagtgcccacggatccaagaacataaaagacacccatgccctttaggacaaaaatcaagactacagatgttcttagatcatttgtagagtttacatttccccaagtacacattcagtagtggataccaatatggagccatgtaaaaaatgagacaggggacttctctgtgcccatgctgtgctgggaaaggcacaatgccaggccctgtcccttggtgggaggacggctaggctgtggtctcactggggtgaggacaagactggtggttgggggaccagcaggtggggagacggcattctggtcctggtgcagcaccaaattggtgggtattctcagcttgtccttgactacccagctgctgctgtctctccacctgccaggtgccaggggaaggaaggttgtggacctccctctttcatctcagcgccgcagaaaaccaaataaaagaaaatagaagcaatagacccactacagtagagaactaccgaatatcaaactgaatacagaaaatccacacaagccagagttctccccctgctgggaaaagagctggatttataccacttcatcaggaattgagagggtctttttcttttcttaaggatttatctgaagcaatggaaatgatggagtctcagacactactgctgacgctactatccgtaaaggtgaaaacagtttcttgttcacgtatgccatggatggaagggtggcctccattcacggggagggagtccccacctgcttgagcttttctttcacatttaacagatggagaacaatcttgctgagtttgaaagaagggcagaaaagaatttattaataatgtgtaagg

SEQ ID NO: 21031 - DNA, 2300 bp, Homo sapien
gagaggtcagaaacaggcacagagacttgaccaaagccaggatctccaacacagtgctccccccacaagaccctgcttggccattctctagcggcagggaagaggcgattgcagggctgcgggatcagaagatcccggtcctgttctgtaggccagtgcaagcctacagttcaatgtttgcaggaggcatgactgtgggctgtcactgcatgtcctggggcaagccaggccaaagccacctttcctaaaggccaggatattctggaagtgaagggggtgcttatctttctgtggccctctttatattccagctatccgggttcatctcctgaatgagctataaactaaacataagctggggttccccagcccttctggcagatcccagataaagatccctacagttgggaaaggggagaaatgaatgccaatcaaaagcaccctgcacaaagtccctgccagggccacaagagccaggcctgtcagatgtgaataactttcctgtagcccaggtcacctccggctgctcctggacaccttaagattctgaagactccaacatcaaaaaacaaaccgagttgggactctctggctggaaagtgtccccacgggctcccacctcagacaaagaggcagagaagccatcccttaaagacccctggcctccagggtgcccaggaaagaaaggagggctcgtggctgtcgtgcctctccagggctgagctcagagcaaccgggggacagatttcctgtatgtcgttttacccatttaagtccaaggatgcagctctgcggaggtggcgacagtcctgtacatgagggtgcatgcacactccctcctgaaacacagttccggccccacaaccggccctgaggtcccttccttggatccagggaatcccagaatcctgctagtcctgtcttaaggggagggtggtgaagtttccaagacgaggacactggcacagagggtgttgggactcgtcccaggtcacccagctgttaagtgtgaagtcaggagggacacgaatcaagaggggagggtggggggacggaatctccaggggctgcatctcaacatctatctgcacggggccactctaaccccttccttctcttccctcctctccgggccctccctccctaagcctaccctcagttcttaccgtgacttctactccgtttacttcccttccagctcccatttccccgcttcccaatagccggctgccgcatcagttagttcagaaccccccgcatttactgagcgcccactgggggccaggcgccgccctcttctcagacacccttccttcaatcgcgcgggcagacgtccccagatcggtctcgcaccccttcccctcaaccgcaccccggctgtcccgcccctggccttgcccactcccccagcctgggcctctcgttcccgcctccgtgcctccccacaacgccgtttcctgcgaccccccaattaccacttaagccacgtcctcttcagagaagctgctcaaagccacaagactcaccccccccacgccctcgaactccctcaccagctccatccccatccactttctccttcaccgtctcgcttccacctcatccccagcaatctctccaagacccccaggctcgttcccgccccctcgacccctgccgtcgcgtcccccatcagccctcagctccgtccctcttctgcgcagcccccaaaggcaggcttcgagctcgagtcgccaacccgaggctgcctggtactcacctggcctcggccgccgcgcgccgccggtcccgggccgggtccccggccggacgaccgcctgccagcccgccgctgctcgagccgctccgccccgccgcgcccgccgctcccccgcgcgctcccgcttccgggttccggagaggcggggacgggggcgtgacgccagcgctcctaggggcggggcatcgcgaaaagccccgcccctactgtccgacagatcaggtcccacccaccgcccctacccactaccgccgatggtgggcgagaccaagtgcgaggggaggacaggcgaagcgcgcgtctggggccgcgctctccacacttagccggcgctgcctcacgcctcgcagccacccctcctgcgtctccacaaatggtccgacccgcaagcaagggggcgggtccggctttgaaaagccggcgggtcgggccttgaggtggaaggcgggaaaatggcggattcctcggggcgaggcgctgggtgagttggggcttccgcaggtctggatttgtagacgccatagggctggagaggatgggc

SEQ ID NO: 21032 - DNA, 2300 bp, Homo sapien
atcctggctaacatggtgaaactccatctctactaaaaatacaaaaaaaaattagccaggcgcggtggcgggcgcctgttgtctcagctactcgagaggctgaggcaggagaatggcgtgaacccgggaggcggagcttgcagtgagccaagatagcgccactgcagtccggcctgggtgaaaaagcgagactgtcttaaaaaaaaaaaaaaaaaaaaggccgggtgcggtagctcatgtctgtaatcccagcactttgggaggccgaggaggatggatcacctgaggtcaggagttcgagaccagcctggccaacatagtgaaaccctgtctatgctaaaaatacaaaaaaaattagccgggcgtggtggcggggtgcctgtaatcccagctacttgggaggctgagacaggagaatcgcttgaacccaggaggtggaggttgcagtgagccgacatcatgccactgcactagagcctgggcaacaaagagcgaaactccatctcaaaaaaaaaaaagcccagacttcaccactacacgatatatgtgtataagaaacctgcacttgtaggccaggcgtggtggctcacccctctaatcccagcacttagggaagtcgaggttggcacatcacctgaggtcaggagtttgagaccagcctggccaacatggcaaaaccccatctctacttaaaaaaatacaaaaattagccgggtgtggtggcgcatgcctatagtcccagctactcaggaggctgaggcagaagaattgcttgaacccaggcagcagaggttgcagtgagccgagatcacaccactgcactctagcctgggcgacagcacgagactcttatctcaaaaacaaaaaaagaaaaagaaaagaaattggtattggcagactgctacttaccaccttcctggtgtgcttctggtgtcactagctcttccattcaagccctctctctggtagaggatcctttccagggagtcctatcgcattgagaatctcctgtggtcttggacagctagctcctcagtctttccttgttgcccgtgaccttggcagtcttgggaccaccagccatattcctgcaggatgcccccagcctgggcctgcctgatgttcttctccccagtagtctggagttgtggcttcagaagcaaccacactctaggccattcccgagtgcatttttcgtggctctcccggacttcatcttcctaggttgggtttcaaggaccctggagttttgggaatcccaaatttcaggacaggttcagtcttgctcatccccacatgcctctcgctgttactgctgtgtggccaaggcctgtggggccgagtcgtcttctgcttggggagctgctggggaggtttattcagagatgaggtcaggaaggatgtgggctgggaagggcatagcagaaagagggtcatggcttgttgggcttcaggattgagaggctgcctctggatggggtgggatgggggctgggatggagcaaactcaggggaagggtcaggtcttggggttgtctgatgatgtcacttgtaaaagccactgtatttttttttaagtgacagggtctctctctctcacccaggctggagcacagctggtataatcatggctcactgcagcctcgatctcctgggttcaagtgatcctcccatctcagcctcctgaggagctgggaccacaggcgagcaccactatgcctttattttttgtagagacggggtctcgctatgttgcccaggctggtctcaaactcctggcctcaagcgatcctcccaccttggcctcctaaagtgttgggattataagcatgagccactgcaggagcctgaggtcacattgaaggacagacagaccctcacgggatgtcgtgactggttgcctctggctttttgggcgagcctagtcgggtggggaactccagcatcgggtcaggtgctatctgcccaggagtgggactccacatgccccttaaacttcctcccaccattctgaccatgcctggctctgacctcccttctagctccaggacacgcgcgccccgagcctgggaggcatgctgaagccaggcggccggcaggatgagtgtgaaagaggcaggcagctcgggccgccgggagcaggcggcctaccacctgcacatctacccccagctgtccaccaccgagagccaggcctcgtgccgcgtgactgccaccaaggacagcaccacctcggacgtcatcaaggacgccattgccagcctgcggctggacggcaccaaatgttatgtgctggtgga

SEQ ID NO: 21033 - DNA, 2300 bp, Homo sapien
gaggcaggaagatcgcttgagcccaagaggtcgaggcaccacaagccacgatcgcagcactgcactccagcctgggtgacagagcaagaccctggctcaaaaaaaataataatgcatatttggtctcaaagcaaagattgatgaagcactgtgtgcaacagaagtggaggcgaacaagctgtggctgccctcaggagggttataccccgtgggggtggggggtgggcaatcctgcagcagatagagctacatttgggagctgcacagcgggcacagggggccgatggggacacagaaggatcaggaaaccctgctaggagtagaggcatcttgaaattaccaggccattccaggcatccccatcctaaggtatggctgggtgttgagcccctgtgtggggcagcaggaagggcctgaactgacctgtagctctcatctaggggggattctgtccgccagggaacactggcaatgtctggggacattggggttatcacagcctcaggggagggcgctgttggcatctggtgggtggaggccagggatgctgcttaacctgctgtggtacacagggcaggccccaatgtggagagtagtcctgccctcaatgtcagtggctttaactctgggttgacaagatgagagaccaggcttggccagagggactggattttatcccgagagcctaggggatgacttaagagaggatagaagtgaccccttgggcacctcctcgggtacgcaggtccccaggcctgaggcacgcagggtcagttcctctccccttccagataaatgacctccgttcccagaagacgcccattgagagcttgtttatcgaagccaccgagaagttcaggagcaacatcaaaacgatgtactctgtcccggtatgtggcggcccggccttcagcctttcccataccctgctcagacccgtcattcccatccgccccttgcccaggcctgcagggtgacgcctagcattcctacagaacgggaagatccacgtgggctacaaggatctgatggagaactaccagatcgtcgtcagcaacctggccactgagcgtggccagaaggacaccaacctggtcctcaacctcttccagtcactgctagatgagttcacccgtggctacaccaagaacgacttcgagccagtgaaggtgggcagcccagcatgccacgcccacctgtgacatgccacgcctacccatgcctcgccatccttagccacgcccacccatgcctcaccatgcttatgccacacccacccatgccctgcccataccacagccactgtgccatgacttgatccacttatgccatgcttacctgtgcctcaccatgatcacttatgccacacccacctgacatgccacacccacccatgccatgccacgcctatgacatgcaacatgctatgcctacccatcccttgccatgattacatgccatgcccacctataccatgccgtgcccatttgtgccacacctacctcctggtggggagccctgcaccctccccaacagagcctcacttctgggtctggggtgtctgaatgggggcgttagggacaatgatgccactccaggtgagggagggttcagggtacccacacgcctgagttatggggtgccaggggtgggttggggctcttcccaggggggcccccgccaacctcctccttgtgttcctcacagcagagcaaagctcagaagaagaagcggaagcaggagcgtgctgtgagtaggctgcacatagatgagagtccgagcaggcgaacattggcaggagcatgcacgtgtgtgtcagtgtcaatgtgcgcatgggcccgtctgcacgcgtatgtgtgcgtggacacgtgtgagtgtgtttttcccccggcatatacggagccgtagtcttgaataagtcacccctgagatcccatgggtcgtcatccaccagtggctggggagggctgccttcccctttccctgcccagcgccttcctctggcctcacaggtccaggagcacaacgggcacgtgttcgccagctaccaggttagcatcccgcagtcgtgcgagcagtgcctctcctatatctggctcatggacaaggccctgctctgcagcggtgagtggctcccccaccaggccccaaaaccctccatgtcccccaccacccctcactgctcaagaggtcttcagggccaggcggggtggctcacacctgtaatcccagcactttgggaggccgaggcaggtggataacgaggtcaggagtttgagaccagcctggccaagatggtg

SEQ ID NO: 21034 - DNA, 2300 bp, Homo sapien
tctatacaaaaaaaaatacagaaattagccaggcacggtggtgcacgcctgtagtgccagctacttgggaggatcacctgggcctgggaggtcaaggctccagtgagctatgatagtgccactgcactctagcctgggtgacagagtgagaccctgtctcaaaaagaaaaagagaaaccaaaaagaaggcaatccaggccaggtgcagtggcttacgcctctaatcccaacactttgggaggccgaggtgggcagatcacctgaggtcggtagttcgagaccagcctgaccagcatggagaaaccctgtcgctactaaaaatacaaaattagccaggcgtggtggcgcacacctgtaatcccagctactcgggaggccgaggcaggagaatcacttgaacccgggaggcggaggttgcagtgagccgagatcacgccattgcgctctagcctgagaacaagagtgagactccatctcaaaaaaaaaaaaaaaagaaggcaattggcggcccccggccagctgggtgggtggctgcaggaatctggggtccccagcaccctctgtgactcccaccctgtggacctcctagtgtgcaagatgacctgccacaagaagtgcgtgcacaagattcagagccactgctcctacacctacgggaggaaggtgagtgtacgaggcctggaactttctacaatgacactccactcacggccaggtgcaccaggaggtggtgcttgatgtgagggccaagcgaagcattgagcagccagtagggggcggctgtggcctctggttctgcagaacacaccattgtccccggttctgtacaaactccttgaggccctcaggcagggcccaggcctgtgtgtgtgtctcagctcccccagccctgctcatccttgctcctgagagagtcctgagccatgcagagggaggccccccaactctgtgcataaggttggggtcctgggtgctgggggtgcagcaagagtcagggtctacttctgtgaggtggctgtgggggctaggttatagctctctccccacgaaggaccacccatgccttgggtggcctacaaaggaagcccctgcccagtggctgccatgctggccttgacttctgcagccccacacccccaacaaccacgcagaaggagacagggagggacagaacagcagaggaagccctgagggccttgtgcgggaccaggaggcagaggcccccagagacagctggagaggaagacagccaggcccagacctgacccccaaccccggcactgcagggcgagccaggcgttgagcctggccacttcggcgtgtgcgtagacagcctgaccagcgacaaggcctcggtgcccatcgtgctggagaagctcctggaacacgtggagatgcacggcctgtacaccgagggcctctaccgcaagtcgggtgctgccaaccgcactcgggagctccggcaggcgctgcagacaggtgggcgctgtgggcaggtgggtgcagtgccaggccccaggcacagccgtcctgccagtgcgccgctcaccagacccaccccacccaccccacagaccccgcagcagtcaagctggagaacttccccatccacgccatcacaggggtgctgaagcagtggctgcgggagctgcccgagcccctcatgaccttcgcacagtacggcgacttcctccgagccgtcggtgagccccatggcggtgcgggtggcagcaggtggccacagccaggatacagcgttcgctgtgaccagcccaggaggcaggaccacccagttcacaaactgagaaactgaggcccaaagcagtcggcccagccaaaccgggtccccagtttggggtggggccaggacacctctgtagccatccattcttgcctgggcaccacagggtggatggcacctgtgcatctcaggtcgtgttggtggggacaacaggcaccttggggacccttgggagctgacgtcctcaaaccccactgcctgcagagctgccggagaagcaggagcagctggctgccatctatgccgtcctggagcaccttccagaagccaaccacaactccctggagagactcatcttccaccttgtcaagcaagtgcctccccacctgccctctgtggggttagggtcgcattgggaacccgcgaggcagcatttcccaggaggacccgagctggcgttctgtggtggtttcgaaccaggatgcagaccactgttgggggttctgggagggggccaggctgctgggccgcccgggtcccttgaggtacctctctgtgc

SEQ ID NO: 21035 - DNA, 2300 bp, Homo sapien
acagcatgaaataaaaagtgcctgagaagtgtgtgcatgggacgcctgctcatatgggatcgggcttggaagaacagggccggtgggtgggggtctgccctgtggcctcagccaagaagggtgcagaatatgggtggaacactgtcctcaaagttctgtcttgatcctccaccaaacagggagctcccagcagagcctcacttggccaggagcgcctgctgtcctggcagccctctctggcctccctgattcagtgcccagcctctggagcctaaatgtcagctgcagcagccacccatccagcagaggtggccagttcctggtgggcccagcaggacaggaacagatgggctcccaggctgccatcggatgggagtcgtgggaactggctggctggtattggttggggcaccgtgaagaacccaagttcagacagcacatgccagaggttgaggggcttctccaaggccacacagttgggaggggcatggctgggatttagactctgccctgccagcctctagaggcccctttgatgggccctgggtttggtctccattgtttgttgtgggtttttttcttgaaacacggtctcgctctgtcacccaggctggagtgcagtggcgcgatctcggcccactgcagcctccacctctcgggttcaagcgattctcctgcctcagcctcccgagtagctgggattacaggcacgcacaaccaagcccagctaatttttgtgttttttgatagagacagggtttcaccatgttggccaggctgctctccaaactcctgacctccagtgatccatccacctcaccctcccaaagtgctgggattacaggcgtgagccaccgcacctggccctccatggtattttctttttttttttttttttttgagacggagtcttgctttgttgcccaagctggagtgcagtggcacaatctcggctcactgcaacatccacctcctgggttcaagcgattctcctgcctcagtctcccaagtagctgggattacaggcacccaccatcacgcccggctaatttttgtatttttagtagagacggggtttcaccatgttggccaggctggtctcaaactcctgacctcaggtgatccatctgcctcagcctccctaagtgctgggattacaggtgtgagccaccgcacctacccgtctatgatatttttcaaggacatcaggcccactggtgtaaccaaggtgcagatgacctaaggtgtgggaaaacatgaaggctgcatgccaggccctggttcctgtgaagcccccaccctcatcctgtcactccagaagagaggcactgcaaggcataggggtactcagcttccaggtactgaggtgggctgggaaggggttctccatgggggtctgggcgttaggggggacccagccccaccttgctcactctcaggcagagctgtctcatgtgccccttgaggcaggtactgtcacactgtccatttcccgggggaagaagcggatccagaaaagttaaactctcccagggccgaggatggaatcagagctggagctgtgacctggaaacccataaccacaatacagatgagccctgctgaggtgggggaagccttggattcctgaatcccaggctacagaaatcgggaagggtgtgtggacgtgaaatagctccgactgggaagaatccaggtaggagtggggtgcggggaggtactttgagcaggcaaaacagaacaaaagggcacactgcacgcgggtctgacaccagaagaccccggtcgtcctatcattcccgaagggttaacatgctctcgaggaaaagcaagtgattcgcctaagtaagaatggggtggcgcctctcctatttttttaaaatagagatagagtagcgctatcttgcccgggctggcctcaagcaatcctttcccacctctgcctcctaaaatgctggcattacagccctgagccaccgcgcccggcccagcgccccgtctcaaaacaagatattacttccgctccaaacaaagatgggccagctaacgagcgcgggggaaacatccgcccggaaggccacttgaaggcacttccgccctctcttaacatggagccggcggaaggggtggtgtagggccgggcgataatggcggcgtcgaggctggagctaaacctggtgcggctgctatcccgctgcgaggcgatggcagcggagaaacgggacccggacgagtggcgcctggagaaggtgaggggatctcgcactgccgcgtagagcccgactcccggggggtgattc

SEQ ID NO: 21036 - DNA, 2300 bp, Homo sapien
aagtggtccacccacctcggcctcccagagtgctgggattacaggcataagccaccttgcccggctgacatttgaagaacttctaaaaatcaacaagaaaaaacatttgcaggatataacaggaaaagaattacgaaatagagaaatagtctctaaattttttcactcatacactaggcaatatttccttttttttgagacagtctctcaactgtcatccaggctggagtgcactggcgcaatcttggctcactgcaacctctgcctcccgggttcaagcgattctcctgcctcagcctcccaagtagctgggattacaggcgcccgccgtcacacctggctaattttttatatttttagtagagacggggtttcactatgttggccaggctggtctcgaactcctgaccttgtgatccgcccgcctcggcctctcaaagtgttaggattacaggcgtgagccaccgcgcctagccttagtaggcaatattttcaactttgaaagtacaggtgaggggccagcgctgtggctcacgcctgtaatcccagcacgctgggaggccgaggcaggcggatcacgaggtcaggagatcgagaccatcctggctaacacggtgaaacctcgtctctactaaaaaatagaaaaaattagccgggcgtggtggtgggcgcctgtagtcccagctactcaggaggctgaggcaggagaatggtttgaaccctggaggcggagcttgcagtgagccgagatcgcgccactgtactccagcctaggagacagagcgagactccgtctcaaaaaaaaaaaaaaaagaaaagaaagtacaggtgagggaatccgttatcatgccagtgccgccaaggttgtgggaaaacccctgtatctcttggagcataaatggtacaatctcactaaggagtaacttggcagtatgttccaaatgtaaaatacacacatcccagacaggaggctgaggcaggaggatcgcttgagtccaggagttggaaaacagcctggacccataaggacatttcctctcaaaaaaaaaaaaaaaaaaaaaaaaaaaaaatgccaagcacgattatgggatcacacctgtaatcccagcactgtgggaggctgaggcgggtggattgctggaactcgggagttcaagaccagcctgagcaacgcggcgagatcccgtctctacaaaaaacacaaaaattagggaggcgttgtgtcacctgtggttccagctatttgggaggctgaggtggaaggatcaattgaggctaggaaggaggtcgaggccacagtgagccatgatcatgccctccagcctgggcaacacagcctctctctctctctctctctatatatatatatataaaaggccgatttggggcacactgtctataagttagctctgctctgccaggaacagtactgttcagtaaagatgccatctaacaccacctgctcgcccttaaaagaaataaaagaaaaagaaagaaaggggcgggtgcggtggctcacgcctgtaacccagcactttgggaggccgaggcaagcggattgcttgagtcccggaagctgttcaagaccagcctggctaaaatgacgaaactccgggcgggcgcggtggctcacacctgtaatcccagcactttgggaggccgaggcggacggatcacttgacgtcagaagtttgagaccagcctggccaatgtggcgaaaccccgtctctactaaaaatacaaacaacaacaacagcaaaaaattagctgggcgtggaagtgtgcgcatgtagtcccagctactcgggagccggaggcaggagaaccgcttgaacccgggaggcggaggctgcagtgagccgagatcacgccactgcattccagcctgggcaagtgagactcttgttaaaaaatttttttcatataattgctgaaaaaaataaataagtttaaatttgcaaaaccatcccgttttttcagacaaacttgagggtcgaggtcggagtcgaccatgtttcgaaggtgtgtggccacgcccagccaggtcagccccgcccccaggccgtcaggcccagccccctttcgtcagaccccgcccccagccctgctgagcgaccccgccagtcgggtccatcctgcagtaaatgcacaacccggacggaagtgcctctccgacagcagatccaggctcggagctccagacgctgggacaggtgacccggggcggtagcgagccggacggccttgcaggtggggcggaggtcccgaggagctcctcgggcgcggtcgtctgtgggctc

SEQ ID NO: 21037 - DNA, 2300 bp, Homo sapien
cctgtaatcccagcacgctgggaggccgaggcaggcggatcacgaggtcaggagatcgagaccatcctggctaacacggtgaaacctcgtctctactaaaaaatagaaaaaattagccgggcgtggtggtgggcgcctgtagtcccagctactcaggaggctgaggcaggagaatggtttgaaccctggaggcggagcttgcagtgagccgagatcgcgccactgtactccagcctaggagacagagcgagactccgtctcaaaaaaaaaaaaaaaagaaaagaaagtacaggtgagggaatccgttatcatgccagtgccgccaaggttgtgggaaaacccctgtatctcttggagcataaatggtacaatctcactaaggagtaacttggcagtatgttccaaatgtaaaatacacacatcccagacaggaggctgaggcaggaggatcgcttgagtccaggagttggaaaacagcctggacccataaggacatttcctctcaaaaaaaaaaaaaaaaaaaaaaaaaaaaaatgccaagcacgattatgggatcacacctgtaatcccagcactgtgggaggctgaggcgggtggattgctggaactcgggagttcaagaccagcctgagcaacgcggcgagatcccgtctctacaaaaaacacaaaaattagggaggcgttgtgtcacctgtggttccagctatttgggaggctgaggtggaaggatcaattgaggctaggaaggaggtcgaggccacagtgagccatgatcatgccctccagcctgggcaacacagcctctctctctctctctctctatatatatatatataaaaggccgatttggggcacactgtctataagttagctctgctctgccaggaacagtactgttcagtaaagatgccatctaacaccacctgctcgcccttaaaagaaataaaagaaaaagaaagaaaggggcgggtgcggtggctcacgcctgtaacccagcactttgggaggccgaggcaagcggattgcttgagtcccggaagctgttcaagaccagcctggctaaaatgacgaaactccgggcgggcgcggtggctcacacctgtaatcccagcactttgggaggccgaggcggacggatcacttgacgtcagaagtttgagaccagcctggccaatgtggcgaaaccccgtctctactaaaaatacaaacaacaacaacagcaaaaaattagctgggcgtggaagtgtgcgcatgtagtcccagctactcgggagccggaggcaggagaaccgcttgaacccgggaggcggaggctgcagtgagccgagatcacgccactgcattccagcctgggcaagtgagactcttgttaaaaaatttttttcatataattgctgaaaaaaataaataagtttaaatttgcaaaaccatcccgttttttcagacaaacttgagggtcgaggtcggagtcgaccatgtttcgaaggtgtgtggccacgcccagccaggtcagccccgcccccaggccgtcaggcccagccccctttcgtcagaccccgcccccagccctgctgagcgaccccgccagtcgggtccatcctgcagtaaatgcacaacccggacggaagtgcctctccgacagcagatccaggctcggagctccagacgctgggacaggtgacccggggcggtagcgagccggacggccttgcaggtggggcggaggtcccgaggagctcctcgggcgcggtcgtctgtgggctctgcgcgccctggaggtcgaggctccggcagcgcgggggttaactcgagccggtcccaggctgcgcggcgacgtcagagttcatttacatagcgcttatttgggttgcgcagtcgtgggcggggtctggacgtcgctgcggaccaatcgcgtgcgtctatgcaaatagcggtcgttctggggaactctgctcccgcggggtgagagttggccgctcttcggccgagctgcccgcgcgtcctttctccgtgcgcgtcgtcaggcgtgtcctctccgcgtgtccacccacaggccgcccgcagaccacccccgccgcgcgcgggacacgacgccccccgcaggacccgcccatcagcccggaaacccctgagctgcttctcccggaggccgatgcccacccgggagcccccaaagactcgcggctcccgggggcacctgcatactcacccgcctgggcctgggcccccggtgagcctgaccgggagggggtccccaggccgggcctctaggcaaaagatttagcccctccagtttgagg

SEQ ID NO: 21038 - DNA, 2300 bp, Homo sapien
ctctgcccacccacgccttcctctctcccagcagggattacatcaggctgtgggcagaacccgactctagacctcgggaagtccttgctcatgtctaatcctagtccttcctgcttttcgtgtttactaacgcctcctcctccacctcccaggcagccagaacgtccctggagcaggttgagaggcccagggctgggtgtgcctggctctcccagaacctcagtttctttttaagtgttgtaagatctctaagaatctttccccctactccagggagggcaattcttcaagtctcatcagggctctgggaggcagaggagggggtgcgcagaaggcactgtcctggccagagctctcagaggcccagctgcatgctctggtgtccagctctgggctcagggcggggtgggaccacagtctgggtggctggggctgcaagactccgaggtgaaaggtcactcctggaagggcttgtccagccggttaaaggttaacctgcccagagccagaggctcgccagcccgggcctcgcatacaaagggtgcttaataaatgctggtcgggcgggccccagccccggtactgggggatggggtgagttggaggtggcggcagctgcgaggctccagggcgcctggaagagacatctgcagtccagccggccgccaggccaagccctttctgcaaagcacagaaagaaaaggaaattaaaagggaaaaaggggcaggcccccagacagggcatgcctgtcgcctccagccgcgcggggcgggtgggcgccctgcccccggaggccagaaattctgcagaggggccccctgacctcgcggccccggccagccggtctcagaccacaacatcccttccccctggagattccgggcaccaggtgttaacccgagcagagaaagggtggggtgggggtcagacgcggcgactttctggaagaggaagcaaacacaatctagggtgtgtgtgtgtgtgtgtgtgtgtgtgtgtgtgtgtgtgtctgtctgtctcgcgcgcgcgtgtgtcttgcgcaggggcgtaccccccccccgggtgccactggccccccatcattgctttgccaggaactgtggggtggggagaggttccgaggggcgcctcgagggtgatcgagcgacccaacgtccaaggccagaggtggaggggagggccttggagagacatcttggcgaggctcaaggaagggcagagggcaggcgcggctgaggctcccgccgcggcccggcaggggttaaggcccgagctgggcgagggcgagggcgggggtgcggggggaggggcagagggaggcgggggagggtcaggccccgcggcccagcgctcggcccccgtccctcccgccggcccgttcgcccggcgccgcgcgcggccacccatgcccttataagggcggccgtcgccggggcaacgagcgcccgcccccagcccgcggcgcgcgcccctgcccccgcccccgccccccgcccgccccgcgaatggaacgctgtgtgtcaaaccggccgcagcgcgaggccggcgcgcggggtcggtggcggtggcggcggcgagagcgaggcttgggcccaggcgcaggcccaggccaggcaggagcggccgcagcgggggcggcagctccagaggcgccggcccagcggccctgcaggcccggagcggcagccgcgggcgccgggggacccagggggcgcggcgatcagccccggcgcgcacccgccgcccctccccccccgccacgggcggccgcgcaacttgcggccaaactttccccccggcctcccgcgctcggatggcggcccgctgagttggccgcagcccccgggcgagcggcggccaggccagaggacgccccctgcgcggctcgggccgggccatggcccgcgcgcccccgccggggccccagggcggcgggacgcgagtcctctgggcccccggcccgcgcctctagcgtgcccctcccggccccgggcccggccccgcgcacgcgtgggaaagttggcctggaaccggcccgaccagttccgcccgggcgcgaggaccggccgcaggaagttgctgcaaaacttttttggggggtgcagcccgtgccccccgcgcgccggggccgaatgcgcgccgcgtagggtcccccgggccgagaggggtgcccggagggaagagcgcggtgggggcgccccggccccgctgccctggggctatggccatggtgaccggcggctggggcggccccggcggcgacacgaacggcgtggacaaggcgggcggctacccgcgc

SEQ ID NO: 21039 - DNA, 2300 bp, Homo sapien
gcttgacacaattctgcagctaccagggaggctaaggcacgagaatcgcctgatcccaggaggtggaggttgcagtgagccgagatttcaccactgcactccagcctgggtgacggagtgagactctgtctcaaaaaaaaaaaaaaataataataatgctgggcacggtggctcacgcctgtaatcccagcactttgggaggccgaggcacagatcacgaggtcaggagatcgagaccatcctggctaacacggtgaaaacccgtctctactaaaaatacaaaaaattagccggcgtggtggcgggtgcctgtagtcccagctactccggaggctgaggcaggagaatggcgtgaacccgggaggcggagcttgcagtgagccgagatcccgccattgcactccagcctgggcgacagaagaaaactctttctcaaaaaaaaaaaaaaaagaaagaaagaaagaaagaaaaagaaagaaaactgagggtggtgggagtaggccctggagtggcagcatgactggcctgttcaagaaacccgaaggaggccagtgtggctggaacacagggggcaacagggagagtgtggggagccagaacagaacagagggagaacaaatgcagatcgcgtagggcctcgtgggctgcaaggagacgcttgggctttgcttggattaaggtgagagccctggagggttttgagcagaggaggggcatgctcgacgcaggtgttcacaggcgccctctggtggcggaggtgagggtggactcctggagagccaggaggcgacttcattggtccagacatgcacgatggtggaggttgtagaagtggagagatgcggacggattctgggtgatgtggcagatggaactgacgtgtgagcgtgaaggctagagagaagtcaaggacaacttcaggctttgggacctgctggactagaagggagagatggaggagctacagggtaggcaggtttggctgggggtgaccagatctctttagcccttgataagctcaagtgtccatgagacatccacgtggggtcctcaagggagcagctatatgtctgagtccagggctcagaggagacagcagggcagaagggagaaacttgagcatccttagcacacaggtggcatttaaagccatgtggctgctgggtgcattgtctcatgcctgtaatcccagcactttgggaggctgagtcaggaagatcacttgaggtcaggagttcaagaccagcctggtcaacatggtgaaaccccatctctactgaaaatacaaatatttgtcaggcatggtggcagatgcctgtaatcccagctactcgggaggctgaagcaggagaatcacttgaatccgggaggcagaggttgcagtgagctgagactgtgccactgcactccagcctaggtaacagagcaagactccatctcaaaaataaaaataaaaaagccatgtggctgaatgagatattgagagggaagccctcatcttaggctggtagaaaaactttggagcccagtccagggattcatttttccccagagtggggcccatttttctgctgggaaaaataaaatcctcagcagctgagaaacattcccaaggtcagatagtgagatttttggcaggctaagtatccaagcctcttgccttccagctagggttcttgccacttccccaagaacaggccttggggagagagggctggtggttggtttgagcccctaggcctgacgtccccctcatctttcccaggttcaagagctgcaggattccctcttgaggctggagccctgcccacatctttcccacaaccaagcaggtggctcaggcagtggttctagcagctctgaggcagacagggaaccctgggagactcaggtgagtgcgagaagttcaatcccatggtcttgatgtccttagccttcaggggaatgagactcaaatctttgtcatgggatccaacagctttggggttgcaaaatgcctacaatcccaggctcttggtgacaattggggtcagttatatcacttcttcttggcaggactccttctccctggctcaccccctgcttcggcgcctccgcagccattccagcacccagatccttgggtctcttcccaaccagcccctcagtcctgagatgcacatcatggaagcccagatggagcaactccgggggtaagagactcaaatgctgagctcataagggcacaggcacctcctccaactgagttataaagccaggagtctgaagctgcaacaggagggagggaaagggtggaaatt

SEQ ID NO: 21040 - DNA, 2300 bp, Homo sapien
agagacagggtatcgctctgtcgcccaaactagactgcagtcacgcgatcatggctagtcactacagccaagcgatcgctcaagtagctgggactacaggcgaggaccaccgcatcagactaccctaggcttccttccttttttttttatttttattttttagatggagtctcactctgtcgcccaggctgccgttgtcttcttagtgcacacttcccccttagccccagaagtatttatttatttatttttatttttttgagacaagagtcttgctctgtcgcccaggctggagtgcagtggctcaatctcggctcactgcaacctccacctccagggatcgagcaattctcctgcctcagcctcccaagtagctgggattacaggcatgcaccaccaggcccggctgagatatatatagtatttttagtagagctgggtttttgttgtgtttttttttttcgtttttgtttttgtttttttgagatggagtctcgctgtgtcacctagagcggctctttgaaggctctaagcctttgcccaggaagttccttctgcctggaatgctgttcctcctgttgcttttctggcaagttctttatgcttcaaagctcaccttacacagcccctccggctattctcgaattagagcctggccaatgtggccggcttctttgaccctcaaaaaaaaaaaaacaactgaggagttgggggcagtggctcacacctataatcccagcattttgggaggctgaggtgggtggatcacgaggtcaggagttagagatcagcctggccaatatggtgaaaccccgtctctactaaaaatacaaaaaattagctgggtgtggtggcgcgcacctataatcacagctactcagaaggctgaggcagaagaattgcttgaacccaggaggtggaggttgcagtgagccgagatcgcaccactgcactccagcctgcgtggcagaacaagattccatctaataaaataaaataaataaataaactgaggcttcaagtggctcttaaatgtttctggggctggtggggtcggtggctcatgcctgtaatcccaacactttgggaggctgaggtgagtggatcacctgaggtcaggagtttaagaccagcctcgccaacatgggaaaaacccatccctagccgggtgcggtggctcacgcctgtaatcccagcactttgggaggccgaggctggcagatcacttgaggtcaggagttcgagaccagcctggtcagcatggtgaaaccctgtctctactaaaaatacaaaaattagctgggcattgtggtgggcacttgtaatcccagctactcgggaggctgaggcaggagaatttcttgaacccaggaggtggaggttgcaatgagccaaggttgcgccactgcactctagcctaggcgacagagcaagactccatctcaaaaaaaagagaactgtcagcccacaatgaagagacaggcagagaagaaaagttcacaggggagccaaataaaaaccatcagctcacgggaacattctagctctttttttttctttctttttgagacagggtcttgccttattacccagaatggagtgcagtgacgtgaccacggctcactgcagcctcaacttccaggtgttaagcaatcctcccacctcagcctcctgagtagctgggactacaagcgtacgccactactcctggctaatttttatattttttgtaaagacgggggtctcgccatgttgcccaggcttgtcttaaactcttggactcaagcgatctgtcttcctcagcttcccagagtgctgggattacaggtgtgagccatggtgctcggcccattctagctcttgagaaataaaatccaagagtcagagctagaagggccatgagtttggaggctgagaagaggaggggctgaaaccttgggagtcaggtatgtgtgccccgctagggctgcaggaagccgctgtccccgagaaggaaacaacacaataacaagtcacgtgaccaggggagggggtttcctgtttcccagcccctcccaggccaggcttggccagcccaggcctgaacaggcagtggtcagagtgaccccaacagagtgtcccgggactcaggcctctgatcaagttacccccagaggatcagagaggtagagagagctgaacctctcatttaggagggccggggaggagagggaattcttgagatcgcattcccaggctcaaatagaggaggaaagtggacaaagacgtagtgaaggtaaagaaggcagagaagaaggggg

SEQ ID NO: 21041 - DNA, 2300 bp, Homo sapien
tttttatttggctcccctgtgaacttttcttctctgcctgtctcttcattgtgggctgacagttctcttttttttgagatggagtcttgctctgtcgcctaggctagagtgcagtggcgcaaccttggctcattgcaacctccacctcctgggttcaagaaattctcctgcctcagcctcccgagtagctgggattacaagtgcccaccacaatgcccagctaatttttgtatttttagtagagacagggtttcaccatgctgaccaggctggtctcgaactcctgacctcaagtgatctgccagcctcggcctcccaaagtgctgggattacaggcgtgagccaccgcacccggctagggatgggtttttcccatgttggcgaggctggtcttaaactcctgacctcaggtgatccactcacctcagcctcccaaagtgttgggattacaggcatgagccaccgaccccaccagccccagaaacatttaagagccacttgaagcctcagtttatttatttattttattttattagatggaatcttgttctgccacgcaggctggagtgcagtggtgcgatctcggctcactgcaacctccacctcctgggttcaagcaattcttctgcctcagccttctgagtagctgtgattataggtgcgcgccaccacacccagctaattttttgtatttttagtagagacggggtttcaccatattggccaggctgatctctaactcctgacctcgtgatccacccacctcagcctcccaaaatgctgggattataggtgtgagccactgcccccaactcctcagttgtttttttttttttgagggtcaaagaagccggccacattggccaggctctaattcgagaatagccggaggggctgtgtaaggtgagctttgaagcataaagaacttgccagaaaagcaacaggaggaacagcattccaggcagaaggaacttcctgggcaaaggcttagagccttcaaagagccgctctaggtgacacagcgagactccatctcaaaaaaacaaaaacaaaaacgaaaaaaaaaaacacaacaaaaacccagctctactaaaaatactatatatatctcagccgggcctggtggtgcatgcctgtaatcccagctacttgggaggctgaggcaggagaattgctcgatccctggaggtggaggttgcagtgagccgagattgagccactgcactccagcctgggcgacagagcaagactcttgtctcaaaaaaataaaaataaataaataaatacttctggggctaagggggaagtgtgcactaagaagacaacggcagcctgggcgacagagtgagactccatctaaaaaataaaaataaaaaaaaaaggaaggaagcctagggtagtctgatgcggtggtcctcgcctgtagtcccagctacttgagcgatcgcttggctgtagtgactagccatgatcgcgtgactgcagtctagtttgggcgacagagcgataccctgtctctaaaaataagaaaaaaaaaagccatgaaaaaagaggtaggcttgaaataggcccgacttagcttcgctccacctacagtgacccaataagaccagagtaagtattttttgattcatgcaaatatatgtaaaataaggaacaagaattaagtaattgggaagggccctggatgctcaggccacacccacatgggaatacctgccccacatggaggctcaggccagctccaccaatcaccaatcagctcctcctctttccctaaatcggccttctccgtccctcttagcctatcacattgcaagctccacctctattccacgtttcagcctatcacggtagaagcactgactattgtagtctgattcggccaaaaacaaaaattcactaatttttttaatccaatcacatttcatactttgctccagtgtagccaatcacattccaggtcccgccgcacccagctccaggcagctctcactccaaaccccacccccaacccagtttcagcctatcagtttccaagttctttctagcctcaaccagtttctgtctctgcttgttctgcagcccgctgaactacatttcccaggaggcgtcggggctgcgccgtacaacttccggctgtaaagatggcggcttcctagtgagtcggcggctgatttagaaggaggttcaggctacggtgagccgaaggtgggtggtgaaagcgtgtggggcccgttcctaggggcccagctccctttgccccaagagatccagctcctcgcctttcctggggcttc

SEQ ID NO: 21042 - DNA, 2300 bp, Homo sapien
gggggatacatgaccttcaattaagagctagtcatgtaccagggttgtgtgatgttctgatgagccaggcctggatcatacatccctaagggggaggtttaagagctccatcagcagtactgaggccatgataggagggttgcttgaggccaggagttcaagaccacgctggacaacatagcaacatttcctgtctctacaggaaatgcaaaaattaagccaggctcggtggctcacgcctgtgattcccagctacttgagaggctgaagtgggaggatcacttgaacctaggaggtcgaggctgcagtgagctgtcatcgcgccactgcactctagcctgggtgacagagcaagaccctatctcaaaaataaacacaaacagctttattgagtgactgcttttcctccctatgagcattttttggaacctatcgtgtgtcaggcccttgtgcccaagcccctgttcaatccccgcatcaacctcgttaggattctcacattttgcagatgggacactaagactctcagaggtccagccctccaaaatactgaagtcctagttccgctggattgaaaatgggcaacgcagaacggggactggaaattttttaaaaattgtttttaaagacggggtcttggccaggcgcagtggctcacggctgtaatctcagcactttgggaggccgaggtgggcggatcacaaggtcaggagttcgagaccagcctgaccaacatggtgaaaccccgtctttactaaaaataaaaaattaggcgtgatggtgcatgcctgtaatcccagctactggggaggctgaggcaggagaagctgttgaaccctggaggaggaggttgcagtgagctgagatcacaccactgcactccagcctgggcaacaagagcaaaactccgtctcaaaaataaataaataaataaaacaaagacaaggtctccgcctgtaatcctagcactttgggaggccgaggcgggcggatcacctgagatcaggagctcaagaccagcctggacaacatggtgaaaccccatctctactaaaaatacaaaaattagccgagagtggtggcacatgcctgtaatcccagctacttgggaggccgaggcagaatagcttgaacctgggaggcaaatgttgcagtgagcccagattgcgccactgcactccagcctgggcgacagggtaagatccggctcaaaaaaaaaaaaaaaaaaaaaaaaaaaaatagggcctcactccgttgcccaggctggtctcaaactcctgcactcactaaaagaaaagaaaagcaacaacaaactagtaggctcaaacgatcttctctcctcagcctcccaaagcactgtgcttaaaggcgtgagctgggccctcggcctgggggttggaaattgaagcctctattttatgtatttatttattttctgagacagagttttgctctgttgcccaggctggagtgcagtggtgtgatcatggctcactgcatcctcgaacttccgggctcaagagattctaccaactcagcctcccaagtagctgggaccacaggtgcaagccacccacgcccggctagttttttgtatttttttgtagggactgggtttatccaagttgcccaggctggtctcgaaccccagagctcaagcaaccctcctgcctgggcctcccgaagtgctgggattacaggtgtgagccaccgtgcccggcctaagcctctcataaggccgtgctccctgccagaggccacccttgaagaagattccctgagacttaatgacctggggcaccccggactttcttaatcgtagctccacccactcgagccgggtgccttcgcgtttcccgtttttaaatgagatagtggcacacccggtggcatcctcccacccgggctcttatcggcggtcccagaccctgcttgagcgcctccgggtgtcaagggcccctgaggacactaaagctctcgaaccccgatgtggacccccgtgcggcgcggggcagcctggctgggaaccctgctcggccctggagaggggccccccgagccgaggggaggagcggcgcatgcccacaagccccccgcgggaagtaggaaatcgaccgaccaggcggtgcgcttcggacccagccagggcatgtgctcggaggcccgcctggctcgcaggttgcgggatgcgctgcgggaggaggagccgtggtgagggcggggccgggggcgggccaggagtgggggtctttggccggggtccactctgaccgcggtgtttgcagggcagtagaggagct

SEQ ID NO: 21043 - DNA, 2300 bp, Homo sapien
cagagctcaagcaaccctcctgcctgggcctcccgaagtgctgggattacaggtgtgagccaccgtgcccggcctaagcctctcataaggccgtgctccctgccagaggccacccttgaagaagattccctgagacttaatgacctggggcaccccggactttcttaatcgtagctccacccactcgagccgggtgccttcgcgtttcccgtttttaaatgagatagtggcacacccggtggcatcctcccacccgggctcttatcggcggtcccagaccctgcttgagcgcctccgggtgtcaagggcccctgaggacactaaagctctcgaaccccgatgtggacccccgtgcggcgcggggcagcctggctgggaaccctgctcggccctggagaggggccccccgagccgaggggaggagcggcgcatgcccacaagccccccgcgggaagtaggaaatcgaccgaccaggcggtgcgcttcggacccagccagggcatgtgctcggaggcccgcctggctcgcaggttgcgggatgcgctgcgggaggaggagccgtggtgagggcggggccgggggcgggccaggagtgggggtctttggccggggtccactctgaccgcggtgtttgcagggcagtagaggagctgctgcgctgcggcgcggaccctaatttggtgctagaggacggcgcagcggctgtgcacttggcggccggagcccggcacccgcgcggcctgcgttgcctcggggccctactgcgccaaggcggggaccccaacgctcggtaagatagagcctgggtccggggcggggtctccccaagccgaagtctgggaatccgggaaggggcgccccatcatcccgggccaggcctcggggctcgagggtggggtttaggggatcttggggagggaacttgggggtccaagggcaggggctagggctcgagggaggcgctggggtcccagaccgagggcgtggaatggggctgcgctaggaccaaagtggggatcaagggttcggatattggagtggaggcaccagggtcagacggcagaggtttgggtcctggcctgaggtcatagcatctaggttccaagggcagtgtaccagggtggacggcggagatccgggaggccgagaacgaaggctccaggtccccagagcggagatcggggttcctgccgggaggctgagtccgcaatgacccctcttgcgctgccgccccagatctgtcgaggcactgacgccgctgcatgtggccgccgcgtggggctgccgccgcggcctggagctgctgctgagccaaggagcggacccggcgctgcgcgaccaggttgggaggcactgcgcgggcaaagaaaggctgggtgagcccagagggagggaaggaaggtaagagggcctcgggcgccccctgctgaccgcgcccctgtaggacggactccggccgctggacctggccctgcagcagggacacctggagtgcgcgcgagtcctgcaggatctcgacacgcggaccaggacccggacccggatcggggcagagactcaggagcccgagcctgcacctggcagtgagtagggcctgcagggctgctggggcttgacttctggaccagtccctgacatccagggtcttccccaccccacccattggttctgaccgtctcacatccactatttgtggccagctctttcggcctcagacactctgatctcctttttctgtttgatcctattctcatcgctgtctcatccctcctcctctcctctctggcccccactctcacctgcagccccaggcctctctggacctaccgatgagacgctggactccatagcactccaaaagcagccatgcagaggtgacaacagggacattggcttggaggctgacccaggaccccccagcctccctgttccccttgaaactgtggacaaacatgggagctcggcgtcccctccagggcactgggattacagctcagacgcctctttcgtcacagcggttgaggtctctggagctgaggacccagcctcggacactcccccctgggctgggtcattgccaccgaccaggcagggacttctgcatgttgtccatgccaaccagagggtacctaggtctcagggcacggaggcagaactgaatgcccgtctgcaggccctgactctgaccccaccaaatgctgctggcttccagtcctccccttcctccatgcctctcctggacaggagtccagctcatagccccccacggacaccaacccctggagcttctgactgccact

SEQ ID NO: 21044 - DNA, 2300 bp, Homo sapien
caaaaattagccgggcataatggcagatgcctgtaatcccagctactcgggaggctgagacaggagaatcacttgaacccgggaggcggaggttgcagtgagccgagatcgcgccactgtgctccagcgtgggcaacagagcaggactccatctcaaaaaaaaaaaaaaaaaccttatttaggaaacatttttcaaatctccaaaagtgtaaactgtatttaaaaaagcaaatgactagcccacaggccgtacatagtttgttgacccctgcttttgtaggaatgaggagctcagctttgggggcttctcaggccttccatcttgtataaggaagacagatatgtcatgcccagaggcaggtggcagaacatcctgaaagggaagggatagtaggaaacagtgacctcccctgggcagccggaagcatttgtttaatcagattgctttcctaccacttgctgatgagtaattcttaccgcttttgggtcatggtggcttgaagaatctgatgagggccgggcacagtggctcatatctataatcttaacactttggaaggccaaggtggaaggatcacttgagcccagaagttcaagaccagcctgggcaacatagtgagacccccatctctacaaaaattttaaacaattaaaataaaaagtctggtgaaacttctggatccagattctctcttcaaaataagttccatcctcaacactcaaactcacactttcacggtatttgagaggccgcactcatccctcaccccttcaggtgtccatggaccccaggggaagaatcttggcttccaaggacctgccttctgggtagggggaggacatgaaccccctcaccaggccgggtgtcacggctcacgcctataatcccagcactttgggaggttaaggccagaggatcacttgagcccaggagttcaagaccagcctgggcaacataaggagaccctgtctttataaaaaaatttttaaaaattagctgagcatggtggcacatgcctgtagtcccagctattcagaaggctgaggtgggaggatctcttgagcccaggaagtcaaggctgcagggagctatgattacgccaccgcaccactccagcctaggcgacagcgaaaccttgtctcaaaaacaaaaacaaaacaggccagcccagtggctcatgcctgtaatccccgcactttgggaagccaaggtgggtggatcacttgaggtcaggagttctcgaccagcctgagcaacatgctgaaaccctgtgtctactaaaaaatacaaaaattagccaggtgtggtggtgcatgcctgtactcccagctactcgggaggctgaggaaggagaatcagttgaacccaggaggcagaggttgcagtgagctgagattgcatcactgtactccaacctgggcaacagaatgagactccatctcaaaaacaaaaacaaaccaggccaggcgcagtggctcaggcctgtaatcccagcactttgggaggccgaggcggatggatcacttgaggtcaggaatttgagaccagcccgaccaacatggtgaaaccccatctctactaaaaatacaaaaaattagccgggcgcggtggcgggcgcctgtagtcccagctactcgggaggctgaggcaggagaatggcgtgaacccgggaagcggagcttgcagtgagccgagattgcgccactgcagtccgcagtccggcctgggcgacagagcgagactccgtctcaaaaaaaaaaaaaaaaaaaaaaaaaattacctgggtgtggtggtgtgcgcctgcaatctcagctactcgggagactgaggcaggagaatcgcttgaacctgggaggcagaggttgcagtgagccaagatggagccactgcattccagcctgggggacagagtaaaactgtctcaaacaaaaacaaaaacaaagcaaaacaaaatggtcactgcttgtatcctgctgaccgcctcccttcaatcctcctatcaccccacccgttccgggcagtgtctctttctgcacattcctggcacatgagtacccagacctagtgcacaaggtgatcatgatcaatggcgggggccctacggcgctggagcccagcttctgctcaatcttcaacatgcccacctgcgtcctgcactgcttgtcgccctgcctggcctggagcttcctcaagtgagtgtccccaccccaaagaccgtgatcctggccctggcgaacccaggcatctgctcgagttggatgggaggggggactgtaccgctgggactagggctggcatc

SEQ ID NO: 21045 - DNA, 2300 bp, Homo sapien
agcggctggttggtcttcccgcccccagcgggagctgggcagatggcacacagctggctggcagcttgtcctggctgcagccaagtctccgcctcttggcaggaagccgaggaggcctgagttcaagctcgctgcgtgtccttggggtggtccctgcgccactctgggctttctcaatctgtaaactcagggattgcaagcttgtctttggcaatcttgcccccattttgggccctagaagaattctcctctgttgttagaaccaaaaaaaaaaaaaaaaaaaaggaagaaaaattttctgatactcagatctgaacccctcccctactcacacactatccttggctccccatttccccaggtaaaacctgctcagcccttccatcaggcatgcaaaaccctctacacacaccatcttacatttcagccacactctcctctctgcctggtgttcccctatccgccctttaaaaatcctttcctctccaagggctgagtgaggtgtggctcatgcctgtaattccagcattttgggaggctgaggagggaggatcccttggggccaggagtttgagaccagcctggggacatggtagcaaccacctatagtctcaagtacttgaaggtgaggtgggaggattccctgaacccaggagatccaggctgtagtgagcaatgatagcgccaatgcactgcagcctgggcaacggagtgagatcctttctcaaaaaaaaaaggagtcgtcttctctcaaccgctgtccattcttctggcccgactgctttcccttgactctcccccaagttcaagggctcctcaagggccaggggcctggggctgtatccctacaagtgccagcttggggttcatgcagagaggtgtttgctaaatgaataaactgtatagtctcccagaagtgcccttagtgggcaagagtaggtgtctggacggaatccagctctggcagcaaattccaggggatgtgagtggccaagcagcaaggagcatttaacccctcgtcctccgaagcccatcctacctgtagcatcgtttagcaaaacatcaccactataataatgcccataatatatggagcatttgttatatgcacgacactatgatgagtgctttacctgcgtagcaaacttatgagaggattaatttcatagagaaataaacggaggctcaggaaagtgaagtaacttgcccgaggtcacacatcagcaaagggcagaggctggatttgagacctgagctctcctgagggcctaccatggccccgccggtaccacagagctgggatgcctgcctcttgctatcagcccttctcagaaccatggcagccatgggttaaatcggctgattatgaaattcaaactctctaattacccacagctccaagactttccttgaaagctttagagaagcccgtcacgatggctcacgccagtgatctcagccctttgggaggccgtagacgagaggattgcttgatgcccagagttcgagaccagtctgggcaagatagcgagacctcgtccctaccaaaagaaaaggggggggcgtaggggggaggttagcaaataatggttcccagggtttggaatcacacagccttgggttcaagtcccagctttgctccttgcttgatttatgctcttgtgccctttatgagcctcagtttccccaccggagattggaaaaagatcttggagtctctgcttctagaatggaaaggtcaatacagagagaagagtatgggggcctcgtttggagaggaacagggcaattgggaggcaggggctggggggcaagggcttgggagacccatttgcagagagagggccccggccgcacactcccaggcgtcccgcagaccctagactgcaacccccttctccgccttgagccaggccccatccctcccccaacctcggtgaacccccaaaaggggcggggccgttgctcccagagcccgcctccactacggaattgccgcctctcattgggctcctaactaggccaggtcagtccgcagctgcgataggccgaagtgcccgcccgtcggcacgtggctccgcctactcgggggaggaacttaaagggccggctgtttcggcggccgcgggatgcccctgcgctgaccgccaggggcaggtgcccgcccgcgtagacgcacccggcctgaccccgcgccaccatgtaaacggcgccagcaggcggacgctggcttctccgcctgggacccctccgccccgacccgggccccgcggccctcgatgaggtgagcggggaacggg

SEQ ID NO: 21046 - DNA, 2300 bp, Homo sapien
cccgccccttttgggggttcaccgaggttgggggagggatggggcctggctcaaggcggagaagggggttgcagtctagggtctgcgggacgcctgggagtgtgcggccggggccctctctctgcaaatgggtctcccaagcccttgccccccagcccctgcctcccaattgccctgttcctctccaaacgaggcccccatactcttctctctgtattgacctttccattctagaagcagagactccaagatctttttccaatctccggtggggaaactgaggctcataaagggcacaagagcataaatcaagcaaggagcaaagctgggacttgaacccaaggctgtgtgattccaaaccctgggaaccattatttgctaacctcccccctacgccccccccttttcttttggtagggacgaggtctcgctatcttgcccagactggtctcgaactctgggcatcaagcaatcctctcgtctacggcctcccaaagggctgagatcactggcgtgagccatcgtgacgggcttctctaaagctttcaaggaaagtcttggagctgtgggtaattagagagtttgaatttcataatcagccgatttaacccatggctgccatggttctgagaagggctgatagcaagaggcaggcatcccagctctgtggtaccggcggggccatggtaggccctcaggagagctcaggtctcaaatccagcctctgccctttgctgatgtgtgacctcgggcaagttacttcactttcctgagcctccgtttatttctctatgaaattaatcctctcataagtttgctacgcaggtaaagcactcatcatagtgtcgtgcatataacaaatgctccatatattatgggcattattatagtggtgatgttttgctaaacgatgctacaggtaggatgggcttcggaggacgaggggttaaatgctccttgctgcttggccactcacatcccctggaatttgctgccagagctggattccgtccagacacctactcttgcccactaagggcacttctgggagactatacagtttattcatttagcaaacacctctctgcatgaaccccaagctggcacttgtagggatacagccccaggcccctggcccttgaggagcccttgaacttgggggagagtcaagggaaagcagtcgggccagaagaatggacagcggttgagagaagacgactccttttttttttgagaaaggatctcactccgttgcccaggctgcagtgcattggcgctatcattgctcactacagcctggatctcctgggttcagggaatcctcccacctcaccttcaagtacttgagactataggtggttgctaccatgtccccaggctggtctcaaactcctggccccaagggatcctccctcctcagcctcccaaaatgctggaattacaggcatgagccacacctcactcagcccttggagaggaaaggatttttaaagggcggataggggaacaccaggcagagaggagagtgtggctgaaatgtaagatggtgtgtgtagagggttttgcatgcctgatggaagggctgagcaggttttacctggggaaatggggagccaaggatagtgtgtgagtaggggaggggttcagatctgagtatcagaaaatttttcttccttttttttttttttttttttggttctaacaacagaggagaattcttctagggcccaaaatgggggcaagattgccaaagacaagcttgcaatccctgagtttacagattgagaaagcccagagtggcgcagggaccaccccaaggacacgcagcgagcttgaactcaggcctcctcggcttcctgccaagaggcggagacttggctgcagccaggacaagctgccagccagctgtgtgccatctgcccagctcccgctgggggcgggaagaccaaccagccgcttcctgcagctgccaccagctgcgcccggccaccgcggggcaccctctgccggtcaataggagagagaactacagctcagctgccagctgaccgcgggagataatgccttgtgcgcacgcgcttgctcagaaggcgccgttcgccggctacctgttggtgtgtatgcagagcatccctgtgccccgcggatatagactggcgcgcctctgttgcgcaggcgcagaactacaacttcagggttttccccaacggcctcttttttgcacgttaggagaaactacatttcccataatcctttgttccagggctggagcggctctgggctccggaatcgcccgcagc

SEQ ID NO: 21047 - DNA, 2300 bp, Homo sapien
actggtggaaaactgtgtgtgtgtgcgggggggtgtttgtttttgaaacagggtctcgctctgtcacccaggctggagtgcagttgtcggatccctgcttactgcaacctctgcctcctgggttcaagcaattctggtgcctcagcctcccaagtagctgggattacaggtgcatgccaccacgcccagctaatttatgtatttttagtagaggggagtttcaccatgttgaccaggctggtcttgaactccagcccataaggagtttgaatcttccacttgtcccttggggatgtttgattttgagcaagaatttaacactgtgaggtgcatttgtcgcctataaaatgcagtgctggtttctcctctgctctgttgctgttggagtaataatacttagtagcttccacttagcaacttcactgtgcaattgctgtgtgctgggtgcccattctttgccctggaagtcaggaaggcagtttggacacagaggtgtcagggctgggagggggattgtgagggctgtaggacttcagggaaggtacctgacttgcctttttgaagaatgcagtcagggaagtcttggaggaaatggcaaggtctgggagagcccagacatagaaggaattggttagaggtgaggacacaggtgggcaatgaagaccgcaggtgcccataaatggggccaaggaggtgggattgaatactagggagttacgggaggtggttgagcaagacggtgtcgaggaggagctagggagtgttatggttcttatcttctagggctgctttaaaaacgtaataaacacaagaagatgccggcacgatggctcccagaactttgggaagccaagtctggaggattgcttgaggccagaagttcgagaccagcttgggaaacatagcaagacccctgtgtcttttttttttttttcttttgagagggagtttagctcttgttgcccagactggactgtagtggcttaatctcggctgactgacacctccgccttctggttttaagcgattctcctgcctcagcctcttgagtagctgggatgacaggcgcccgccaccacgcccggctaatttttgtattttagtagagatggggtttcaccatgttggccaggctggtctcaaactcctgacctcgtgatccgcccgcctcggcttcccaaagtgctgggattgctgggattacaggcgtgagccaccgtgccccgcctttttttttttgagacagagtctccctctgtccgccaggctggagtgcagtggcgcgatctcagctcactgcaagatccgcctcactcacggttcacgccgttgtcctgcttcggcctccggagtagctgggactacaggcgtccgccaccacgcccggctaattttttgtatttttagtagagacgtggtttcaccgtgttagccaggacggtctcgatctcctgacctcgtgatccacccgcgtcggcctcccaaagtgctgggattacaggcgtgagccactgcgcccggctggctttttttttttttttttgagactgattttcgctcttgttgcccaggctggagtgcaatggcacgatcttggctcactgcaacctccgcctcccgggttcaagtgattctcctgcctcagcctccctactagctggaattacaggcgcagagatggggtttcaccatgctggccaggctggtctcgaactgctgacctcaggcgatctacccgcctcggcctcccaaagtgctaagattacaggagtgagccaccgcacccggccgaacctcgcatcttaaaaacacacagacacacaaaagctctagagagcctcgcggagctgtaaactacagctcccaagagacttcgcggccgaggcctccgcccacttccggatctcactttcattgcttccaagtaccgggaggtgctttgcttcttcaaccgaacttgaccacaatgggaggaggcgtggcaaccaatgggcgcatgagttagctggatgcggccaatggaagcgtgcaaagcgctcctatgtgggggcggggctagactgcacaccaatgacagggaggtggtggcgccatcagtgtgggctgtgccgtggctggaagttactgtgaggcggcggctaagaaggcggctctggtggcggcggtggaggctgaggcggcggccgaggcggcgacggaggaaacagaagatggtgaggatggcctccaggcccccactccccctctgctagacaaaatggcgctgtggtcccacccacctctagtatccccctaggccc

SEQ ID NO: 21048 - DNA, 2300 bp, Homo sapien
tcgccctccagggacgtgcccccggcgccggaggcggcctcggccatggcgaggacaggtcaggtcaggggctacggacggcccgggcgacggggagccgcgggctcatggggccggtgcagccgcggagcgcgcgggaggaggagacaaaggccgcgcccgcccgcgccggcctcggtcctcgctcgcccgagcgctgcttctcgtccccgcccgagccgaacctcgattctccttcccggcccgatgcacgtcactctagggttctcagctgagttcgcccgcctagttctttggttcgcgtctccgcccgtgttgttttctgggtttccttctcgcccgcctacctcgctccctgctgctggtccccgcccgcactgatggtgcattctccaacttgtccccacccatgctttcttctggtccccgcctcggagcctcagtttccccatctgcaaactccggaccctggagacgctgtttggaatgtgagatgggcgtaagttgactaagggaggacgtgggaggggcgggccggttggggaagattcctggtgacaataacttcaaccaccccagtagggctgtgatacataattacagcaagccctgcttaggaactttgcacgcaccatttggctgcctagaacactcctcatgcactcttcgtccggttaacaccgactcccttcaggatgtaacctcggagaggatcccatagagttgtcaagtttagcaaataaaaatacagtccgtctagttaaatgtaaatttcagataaaagaataaatgttagctgggcggggcgcacctgtaatcccagctacttgggaggctgaggcaggagaatcgcttgtgctcaggaggtcaaggctgcagtgagctgagatcacacccactgcactgcatcctgggcgacagaacgagaccctgtctcaaatacatatatatacatacatacataaatgtttctatgtcctatgtctacatgggacatactagtactaaaaaattattcattgtttatttgaaattcacatttagctgggcgacctgggttttacctggcatttggccaacccctgactattctgagtagctcagtctgttagactgaaagcccagcgagggtaggaacgaggggccaggtctggttctcaatgcgagcacacagtaggcgcttgctgtacgcttgttacagatgtaacaactagcttgttacagatgtaataactagcttgttacagatgtaacaactagagaatggcagatgaaatataaatatgtcatcatttgttcctattttacaacttaaaatattaaagcctcggccgggcgcagtggctcacgcctgtaatcccagcattttgggaggccaaggcgggtagatcacctgaggcaaggagttcgagaccagcctgaccaacatggccaaaccctgtctctattaaaaatacaaaaaattagccaggcatggtggcgcacgcctgtagtcccagctacttgggagtctgaggcaggagaatcgcttgaacctgggaggcggaggttgcagtgagtctagatcgcgccactgaactccagcctgggcgacagagcgagaccccgtctcaaaaaaaaaaaaaaaaaaaaaaaaaagcttgggcaacgtagtgagatccccgtctccaccaaaaaaacgaaaacaaaacaaacaaacaaaaacaacaaacaaaaagaaacaccgaaaagttagactggcatggtggctcgcgcctgtggttccagctactcaggaggctgaggcgggcggatcccttgagcccaaaagttggaggttgcaagagccgtgatcgcgccactgcactccagcctgggcgacagagtgagaccctgtctcaaaaataaaataaaataaaataataaagtaaataaaaatattgagcagggcgaggtaagggggtattagaactctattctgtcagacagatttttcttaacacgcaagtgcgccgcccgcccgctctgatccagaaccagagaatccgccatgcgaaggcgctcccggagaccccgcccagccagtgcctggaattccaccatcagcgctttattccgagtttcagtgctgtcctgggttaacctgaaagcaatctccgaggctcccctttctggctttcggggagccagagactgaccggacacttggctctgcaggtgcagacctggaccagagagacagagagccaaggaagtccacagtggagagagggctgtgctgggggttccaggaagacttcctggaggaggggatcttggag

SEQ ID NO: 21049 - DNA, 2300 bp, Homo sapien
gcctagctccaagatcccctcctccaggaagtcttcctggaacccccagcacagccctctctccactgtggacttccttggctctctgtctctctggtccaggtctgcacctgcagagccaagtgtccggtcagtctctggctccccgaaagccagaaaggggagcctcggagattgctttcaggttaacccaggacagcactgaaactcggaataaagcgctgatggtggaattccaggcactggctgggcggggtctccgggagcgccttcgcatggcggattctctggttctggatcagagcgggcgggcggcgcacttgcgtgttaagaaaaatctgtctgacagaatagagttctaatacccccttacctcgccctgctcaatatttttatttactttattattttattttattttatttttgagacagggtctcactctgtcgcccaggctggagtgcagtggcgcgatcacggctcttgcaacctccaacttttgggctcaagggatccgcccgcctcagcctcctgagtagctggaaccacaggcgcgagccaccatgccagtctaacttttcggtgtttctttttgtttgttgtttttgtttgtttgttttgttttcgtttttttggtggagacggggatctcactacgttgcccaagcttttttttttttttttttttttttttgagacggggtctcgctctgtcgcccaggctggagttcagtggcgcgatctagactcactgcaacctccgcctcccaggttcaagcgattctcctgcctcagactcccaagtagctgggactacaggcgtgcgccaccatgcctggctaattttttgtatttttaatagagacagggtttggccatgttggtcaggctggtctcgaactccttgcctcaggtgatctacccgccttggcctcccaaaatgctgggattacaggcgtgagccactgcgcccggccgaggctttaatattttaagttgtaaaataggaacaaatgatgacatatttatatttcatctgccattctctagttgttacatctgtaacaagctagttattacatctgtaacaagctagttgttacatctgtaacaagcgtacagcaagcgcctactgtgtgctcgcattgagaaccagacctggcccctcgttcctaccctcgctgggctttcagtctaacagactgagctactcagaatagtcaggggttggccaaatgccaggtaaaacccaggtcgcccagctaaatgtgaatttcaaataaacaatgaataattttttagtactagtatgtcccatgtagacataggacatagaaacatttatgtatgtatgtatatatatgtatttgagacagggtctcgttctgtcgcccaggatgcagtgcagtgggtgtgatctcagctcactgcagccttgacctcctgagcacaagcgattctcctgcctcagcctcccaagtagctgggattacaggtgcgccccgcccagctaacatttattcttttatctgaaatttacatttaactagacggactgtatttttatttgctaaacttgacaactctatgggatcctctccgaggttacatcctgaagggagtcggtgttaaccggacgaagagtgcatgaggagtgttctaggcagccaaatggtgcgtgcaaagttcctaagcagggcttgctgtaattatgtatcacagccctactggggtggttgaagttattgtcaccaggaatcttccccaaccggcccgcccctcccacgtcctcccttagtcaacttacgcccatctcacattccaaacagcgtctccagggtccggagtttgcagatggggaaactgaggctccgaggcggggaccagaagaaagcatgggtggggacaagttggagaatgcaccatcagtgcgggcggggaccagcagcagggagcgaggtaggcgggcgagaaggaaacccagaaaacaacacgggcggagacgcgaaccaaagaactaggcgggcgaactcagctgagaaccctagagtgacgtgcatcgggccgggaaggagaatcgaggttcggctcgggcggggacgagaagcagcgctcgggcgagcgaggaccgaggccggcgcgggcgggcgcggcctttgtctcctcctcccgcgcgctccgcggctgcaccggccccatgagcccgcggctccccgtcgcccgggccgtccgtagcccctgacctgacctgtcctcgccatggccgaggccgcctccggcgccgggggcacgtccctgga

SEQ ID NO: 21050 - DNA, 2300 bp, Homo sapien
gaggctgaggcaggagaatcgcttgtgctcaggaggtcaaggctgcagtgagctgagatcacacccactgcactgcatcctgggcgacagaacgagaccctgtctcaaatacatatatatacatacatacataaatgtttctatgtcctatgtctacatgggacatactagtactaaaaaattattcattgtttatttgaaattcacatttagctgggcgacctgggttttacctggcatttggccaacccctgactattctgagtagctcagtctgttagactgaaagcccagcgagggtaggaacgaggggccaggtctggttctcaatgcgagcacacagtaggcgcttgctgtacgcttgttacagatgtaacaactagcttgttacagatgtaataactagcttgttacagatgtaacaactagagaatggcagatgaaatataaatatgtcatcatttgttcctattttacaacttaaaatattaaagcctcggccgggcgcagtggctcacgcctgtaatcccagcattttgggaggccaaggcgggtagatcacctgaggcaaggagttcgagaccagcctgaccaacatggccaaaccctgtctctattaaaaatacaaaaaattagccaggcatggtggcgcacgcctgtagtcccagctacttgggagtctgaggcaggagaatcgcttgaacctgggaggcggaggttgcagtgagtctagatcgcgccactgaactccagcctgggcgacagagcgagaccccgtctcaaaaaaaaaaaaaaaaaaaaaaaaaagcttgggcaacgtagtgagatccccgtctccaccaaaaaaacgaaaacaaaacaaacaaacaaaaacaacaaacaaaaagaaacaccgaaaagttagactggcatggtggctcgcgcctgtggttccagctactcaggaggctgaggcgggcggatcccttgagcccaaaagttggaggttgcaagagccgtgatcgcgccactgcactccagcctgggcgacagagtgagaccctgtctcaaaaataaaataaaataaaataataaagtaaataaaaatattgagcagggcgaggtaagggggtattagaactctattctgtcagacagatttttcttaacacgcaagtgcgccgcccgcccgctctgatccagaaccagagaatccgccatgcgaaggcgctcccggagaccccgcccagccagtgcctggaattccaccatcagcgctttattccgagtttcagtgctgtcctgggttaacctgaaagcaatctccgaggctcccctttctggctttcggggagccagagactgaccggacacttggctctgcaggtgcagacctggaccagagagacagagagccaaggaagtccacagtggagagagggctgtgctgggggttccaggaagacttcctggaggaggggatcttggagctaggccttgaagacgagtttgtcaaatgaggaagggcatccgaagccgagggaacggcagaagggaacgctggggaggggagagaatctggagagttccggaaaaagcaagtaggactctttccagaagttcgggcaagattttccctggatcagggcgtgggttctccagtactcgtccctcccggtcaccgagatgctctgagtttccggtctgaacctgaacgtaaagaggtgtagtccctcctttcttgaacgggaaaactgaacgcacataggtccttgccacgcctaaggctgcggagtgagcagatggaaaatgcgggactcaaaacctcccctcgctgtaatttgcactgccctgtgccaaactctgtcctttcttccattccttattcctattgtcagcctcgctgcgctaggaccctaaaaatttggtctcatgttgcccggggaacaacatttcgctacacctacctccataccgcctcccgctcccgctctcccttgcaccagccaatggaagcgagtatcttcagacggtgggcaggacgtatcctaagatacccaatggtggtcgagaatagttgagcactttactagtcaagccgcggagtgggcggggccccctgcccagacttgaagccacacaggcaggtcgggcaggcgggtcgcaggttgtaaatccatgtggcgggggctttggaccctggcggcccaagcggcacgtgggcctcgcaggtggggctacaggggaaggggtgcgacagcttggggtgctgcttggaccccagacccactccctgggttttaggggcccaattccctgcg

SEQ ID NO: 21051 - DNA, 2300 bp, Homo sapien
aacaaacaaaaagaaacaccgaaaagttagactggcatggtggctcgcgcctgtggttccagctactcaggaggctgaggcgggcggatcccttgagcccaaaagttggaggttgcaagagccgtgatcgcgccactgcactccagcctgggcgacagagtgagaccctgtctcaaaaataaaataaaataaaataataaagtaaataaaaatattgagcagggcgaggtaagggggtattagaactctattctgtcagacagatttttcttaacacgcaagtgcgccgcccgcccgctctgatccagaaccagagaatccgccatgcgaaggcgctcccggagaccccgcccagccagtgcctggaattccaccatcagcgctttattccgagtttcagtgctgtcctgggttaacctgaaagcaatctccgaggctcccctttctggctttcggggagccagagactgaccggacacttggctctgcaggtgcagacctggaccagagagacagagagccaaggaagtccacagtggagagagggctgtgctgggggttccaggaagacttcctggaggaggggatcttggagctaggccttgaagacgagtttgtcaaatgaggaagggcatccgaagccgagggaacggcagaagggaacgctggggaggggagagaatctggagagttccggaaaaagcaagtaggactctttccagaagttcgggcaagattttccctggatcagggcgtgggttctccagtactcgtccctcccggtcaccgagatgctctgagtttccggtctgaacctgaacgtaaagaggtgtagtccctcctttcttgaacgggaaaactgaacgcacataggtccttgccacgcctaaggctgcggagtgagcagatggaaaatgcgggactcaaaacctcccctcgctgtaatttgcactgccctgtgccaaactctgtcctttcttccattccttattcctattgtcagcctcgctgcgctaggaccctaaaaatttggtctcatgttgcccggggaacaacatttcgctacacctacctccataccgcctcccgctcccgctctcccttgcaccagccaatggaagcgagtatcttcagacggtgggcaggacgtatcctaagatacccaatggtggtcgagaatagttgagcactttactagtcaagccgcggagtgggcggggccccctgcccagacttgaagccacacaggcaggtcgggcaggcgggtcgcaggttgtaaatccatgtggcgggggctttggaccctggcggcccaagcggcacgtgggcctcgcaggtggggctacaggggaaggggtgcgacagcttggggtgctgcttggaccccagacccactccctgggttttaggggcccaattccctgcggcagagcaatcattcgcgttcttccgtgcctcaatcgttcatgacccttgcggcagagcccatatctgggtctccttctggcctcacagtccctaatccggtcacccttcggccttcagaacatccaatttgtgcatcccccagccgcagaacccccccacctggagcatctcgcgatcatcgagccctcggtctacttgacactgaggctgagcctcccaggtgcgctgattcgcctcccctccggttccagattgtgcacgcgccggagcagcggcgcaccagcccccggctccggcgccaccatcttcgcgctaagctctggccaaggccgctgcggcatcgcagtgatccggaccagcggccccgccagcggccacgccctccgaattctcacagcaccccgagacctgccccttgctcgccacgccagcctgcgcctgctcagcgatccccgctccggggagcctctggaccgcgcactggtgctctggttcccaggtgagggtccccaggttccgagcctcctgtaggtcccatgactcagtttcccccttccaagggtttgcactggctgtgctgtcctcctgtcacctgtctgtcacattaggtccccagagtttcaccggtgaggactgcgtggagttccacgtgcatggaggcccggcagtggtgagcggcgtcctgcaggccttgggtgagttgcagcgttgggtgagatgcttggtcctcccaatgggcctgggtggggaccagggggtgtcagactgggaccttcctgcaggcagcgtgccagggcttcgaccggcggaggcaggcgagttcaccagacgggcgttcgccaatgggaagctgaacctgaccgaagtggagg

SEQ ID NO: 21052 - DNA, 2300 bp, Homo sapien
tctacaaaaacaaatttaaggctgggcatggtggctcacgcctgtaatcccagcactttgggaggccgagataggcggatcacctgaggttgggagttcaagaccagcctgaccaacatggagaaaccccatctctactaaaaatgcaaagattagccgggtgttgtggcgcatgcctgtaatcccagctactcaggaggctgaggcaggagaatcgcttgaactcgggaggcggaggttgcagtgagccgagatcgcgccattgcacttcagcctgggcaacaagagcgaaactctgtctcaagaaaaaaaaaaaaatttaaaaatcagtcaggcgtggtggcacaggcctgtagtcccagctactggggaggctgaggcaggagaatcactggaacccaggagttcgagtctgcagtgagctatgatcactccactgtactctagcctgggcaacagagtgagaccccatctctttaaaaaaaacaaaaaaattcagggctgggaggccctggcagttggattctttgagctcaggagttcaagaccagcctcggcagcatggtaaaacccccatctctaaggaaaatacaaaaaattggccaggagtggtggcgcatacctgtagtcctagctcctcgggagactgatgcaagaggattgcttgagcctgggaggtcaaggttgcagtgagctgagatcaggccactgcactccagcctgggtgacaaagtgagaccctgtctaaaaaaaaaaaaaaaaaaaaaattcgagccgggcacagtggctcaagcctgtagtctcagcactttgggaagccgaggcgggcagatcacctgagatcaggagttcaagaccagcctggccaacatggtgaaaccctgtctctaccaaaaacaaaaaaacaaattagccagtcgtggtggcagccacctgtaatctcagctgcttgggaggctgagacaggagaattgtttgaatctgggaggcagaggttgtggtgagccaagattgcgccactgcactccagcctgggcaacagcaataggagtgaaactccatttcaaaaaaaaaaaaaagaaattcagttgaccataaatgtggatgtaatatttttaaagttcatccatgttgtagcatgtatttatactttgtgtctttttatttctggatagtagtaactgtaaaagcttttgaagatcagacaaacatccactatatttttgtttatttatttttgtttgtttgttttattgagatgggagtctcactatgttgcccaggctggtctcaaactcttgggctcgagtgatcctcccacctcagcctcccaagtaattgggatgacaggtgtgagctgccacacctggcttctaacattccctcataaagggaccatgcccttgtgaactcagctcactctggccaccagggtgctcgatctgggtccaggcagtcctgggggcaagacactaagctctgtcctgcgtccttcccctatcttccgggcaggtcatctacacgaacaatcagaggtacatggctgccatcatcttgagtgagaagcaatgcagagatcaattcaaggacatgaacaagagctgcgatggtgagtgctaaggctgcagggagccggggtggtggactccctgcccagtgctctcggcagcccccaatcttcctgggtctcctggtcctgttttccttagccttgctcttcatgctgaatcagaaggtgaagacgctggaggtggagatagccaaggagaagaccatttgcactaaggataaggaaagcgtgctgctgaacaaacgcgtggcggaggaacagctggttgaatgcgtgaaaacccgggagctgcagcaccaagagcgccagctggccaaggagcaactgcaaaaggtgcaagccctctgcctgcccctggacaaggacaagtttgagatggaccttcgtaacctgtggagggactccattatcccacgcagcctggacaacctgggttacaacctctaccatcccctgggctcggaattggcctccatccgcagagcctgcgaccacatgcccagcctcatgagctccaaggtggaggagctggcccggagcctccgggcggatatcgaacgcgtggcccgcgagaactcagacctccaacgccagaagctggaagcccagcagggcctgcgggccagtcaggaggcgaaacagaaggtggagaaggaggctcaggcccgggaggccaagctccaagctgaatgctcccggcagacccagctagcgctggaggagaaggcgg

SEQ ID NO: 21053 - DNA, 2300 bp, Homo sapien
ggaaccaccgggtagctgcaaaggtcaaaggtcagacatgggtttcctgcccacccctgggaacttccttcttctcaactctacactcgcctcactgagcaccaccctggagtacccctccgctctgtcaacgacccctccccactctgttaccctggctaatggggggacgggtccccacgccccagccttcacattgccctacagaggacagcaattgcatgattgtcacctgtccggagtccagcctcctttccggctccctgctcctgttcctccagcccaccctgactccacagggtggggggtacctgtcccagtctgtctcccaagactgggagttgcttgtggctgaggttgggactgacacctcttggggggccctggcatcacccagcatggagcaaacaaagaagggactccagggagggtttccctggagctcctgatcctgggagataggcaggacacacagaatcctttgcttccgggtccccaaatcccctccaggcccaactggggggtgacccacagcgaccccagaaaactcccgtggtttttttggtttgtttgtttttgtttttgagacagagtttctctcttatctcccaggatggagtgcagtggcccgatctcgcttcactgcaacctccgcctcccgggttcaagtggttctcctgcctcagcttcccaagcagctgggattacaggtgctcgccaccacacacggctaatttttgtatttttagtggagatggggtttcaccatattggccaggctggtctcgcactcctgacctcaggtgatccgcctgcctcagcctcacaaagtgctgagattacaggtgtgagccactatgcccggccgcccatggggttttgagtgtcgggggaggaatctcagtcccacgtatccaccacttgtcattcaccatctcacggagcccccagcagtgcctccagcaggaaatgatcctaatcataacaacagccacagagtgacgaggcactgggtataccccgtctcacaaaggggaaaagggaggcacagacatgcgaggcctcttgcccgagctctcccgggacaaagccagctcttccccgctccaagttcattattccttgtgctgcagtttcctggagcatttactgagcatctaagtgaacagggcactgggggcaatgacagagcttggggagccagcgccaccgccatccatggctcagccctccgtgacgccctcctatgcaattactaatcacctactgcttctccatccctaggctagctaagagtttcacactttttctgtttttttttttttttgaaacagagtcttgctctataccccaggctggagtgcaatggcacgatctctgctcaccgcaacctccgactcctgggttcaagcgattctcctgcctcagcctcctgggtagctggaattacaggcgagcaccaccacacctggctaagttttgtatttttagtagagacggggggtttcaccacggtgaccgggttggtctcaaacttctgacctcaggtgatccgtccgcctcagcctcccaaagtgctgggattataggcgtgagccaccgtgcctggcacatttcccacgttttgtggcacttaatcagcaccgccctggtgaagtgggtgcacgtctgtagccagcctgtcttgaggtaagtcaagttcgctgaactaacagcgtgagaccccgaggcaaccccttctcctccctgtgcctcagtttcctccgccacacaagggagacagcaacagacctggcatgattcagcgacctaatcacagcaggtactgagaacagcacccgccagcaagtaaaggcgaacgcgaggctcgaagaggccaggaatgcctgaccagccagccagcgccccacccagcattaatcagaggggtccagccggtgccctggctctgggcccccagccccacccccgccttctcacagccagagtgggagtgttgtgataacccgcagcccccgtttcctccgggccaggaaggagccaggcagaggaagtattaagaggagtaatataagcactcccccctgcgaggcgggggccagagcaggcctggtggtgagcagggacggtgcaccggacggcgggatcgagcaaatgggtctggccatggagcacggagggtcctacgctcgggcggggggcagctctcggggctgctggtattacctgcgctacttcttcctcttcgtctccctcatccaattcctcatcatcctggggctcgtgctcttcatggtcta

SEQ ID NO: 21054 - DNA, 2300 bp, Homo sapien
gccaacatagtgaaatcccatctctactaaaaatataaaagttagctaggtgtgttggcaggtgcctgtaatcccagctacttgggaggctgaggcaggagaatctcttgaacctggaaggcagaggttgcagtgggctgagatcgtgacattgcactccagccttggcaacagagcaagacgccatctcaaaaaaaaaaaaaattagctaggagtggtggcaggtgcctgcaatcccagctactcaggaggctgaggcaggagaattgcttgaacccaggaggcagaggttgcagtgagccaacattgcattccagcctgggcgacagagcaagactccatctcaaaaaaaaaaaaaaaaaagaaagaaagaaagaaagaatgaatgaatgaatacaagaaaagaaagaaaggttgattcagtttccagggcttaactattaccccttgacataataaatctggaaggtcctaaaattttattttattttttacacgcctaaattctggacccaccaaaaaagaaaacaattacttctgattctttgagttttcattaactgaactcatatcacaggcagaaagactaaagtctatcaacatacctgaatagacttttttttgttttttgagacatggtctcactctgttgcccaggctggagtgcagtggtgcgatctcggctcactgcagcctccatttcctggactcaggcgatacttctgcctcagcctcctgagtagctaggactacaggtgcacaccaccacatcaggctcattttttttttttttttttgtagcgatggggtctcaccgtgttacccaggctggtctgaaactcccgggctaaagtgatcctcccacctctgcctcatttctcctattaatcttccttttgtgagttgatttttcaaggaaccttcagagggtgaaggggaagatcacccagtttgatgggaaaggcgggggtgggggggagaatcagtcacacgcataaatatataattacttttttttttttttgagacagagtctcactctgtcacccaggctggagtgcagtggcacgatctctgctcactgcaacctccacctcccgagttcaagagattatcctgcctcaccctcctgagtagctgggattaaaggcgccagccaccacacctggctaattttttttttttttaagacagagtcttgctcttgtcgcccaggctggagtgcaatggcatgatttcagctcactgcaacctccccctcctgggttgaacccattctcctgcctcagcctcccaggtagctgggattacaggcgcccgccaccacacccgactaatttttgtgtttttaaaagagatgaggtttcatcatgttggccaggctggtctcgaactcctgacttcaggtgatccacccgcctcggcatcccaaagtgctgggattacagacgtgacccattgcgcccggcctgccattacctttttaatgttagggccctaggagctgatcaaaaggaggtagtgttgaagagggggactttctgtaggaggggacctgttagcagagcagcaattagccaggcagaggaggagaaggtgtaaaggccctgcgatgggaatgcacttggtggaagaaccttggggaggctacaggaaggagtgaaaagaaaatgaccttaaaggtgtgatcaggtccttgaaggtgtaaggagggagagaaggggcagggggagatagagaaggagaaacaggaagaggagggaggagggggaggagggagagtaggaggaaggaaggggaggggagaacgggttgtattctaagagggaaggggagccagagcccaattgtaatcacgttgtaagatcgccctctggctgcccagtggcgagcaggcgggaagacggggccggtccaccctgttgtctaccctccggtcctcttcacagccggcgtggcagcctaaactctgccaaccgtaagtcagtggagtatcctcccatctcccaatgcggttaccccgtcaacagaatgggaaccacaggccggatgcggtggctcacgcctttaatcccagcactttgggagaccaaggcgggaggatcgcttgagcccaggagttcaagaccagcctgggcaacatagcgagaccctgtctcaaaaaaacaatcaaacaaaaaaaattaaaattagccgggcgcgggggctcacgcctgtaatctcagcactttgggaagccgaggtgggcagatcatttgaggtcaggagttcgagaccagcctggccaacatggtgaaacc

SEQ ID NO: 21055 - DNA, 2300 bp, Homo sapien
ttcttctccctcccggggccgccccctcctcactgaccagcttcctgggatctcactgcagcagagcgctgaggcccagcagcacaatcagcagctggggcgccgcagcggagctggagtcctgggagctggggtagtacttcttgtccgcgattctcacgcttaagacctggttttctcttctgcggtacagatggcaaatcaggcatctgctcgtcctggctcctgccgccctccctgtaagcccaccgcccccgggagttccccccgcaccgccccaatccaagtcaccggggagggaatggacagcggccacccatggctctgtgaccctaggggctaagttatccttttgtgggactcaaactttatcccttggggcaatggggattttgggagcaaaggagatcctgggtcttgggctagggatgtgggggtgagaggaatgtggcaggtggagggtagcgggggaaggctatctctgacctcagtcgctccacctctgcagacgcgtcctgaagcttatggtttaatgtagtgatctctcctggtagggtgggaggacagaaacagggggcgggtcagcatgtggccatgctggggccctgctccactctgggacagaacctcccccttaccccaacctccagccctggtctccctgcccccaccccctcttccatacctgactcacccctccccggccctctcccttctccctttctcaccctcaagctcctccactttcttttgtccttgggccttctctgcatccagggaagccattagggccatctaagaagagttagaatctggggttttggcctggggagtttggctgctgcccctgggacctgggcctcctccctaggtcctggggacagaggggcttaaatgcaaacccctttcaggttttcttccaaccctctctgcaccatggtctccaaccttaaagaacagccacaaccacacactctcccagggccacccataagcatgtgggtcctcaaaatgggagttttgaggccaccccacgtggaaacttggaggctatcgataaccaaagtttagtggacatttccagattgcctgagcaatggcccaagaaaagttagagggccctaccaaatccagaatgcagtgggatttccccgcccaagtgacatgcccagcgagagtttcaagatcccccatatcaggacccaggtgaatatttcagtttcttagggatgaagtgaaaatttcaaaagccccctttttcagggtctggtgaggtcccccttcaaccctgaatagggatttctactcccccaggactggtgcccacgaggagtttcaaggcccccgacaccagtgccctggaaagaatttataaattcacctaagtcccagggggatactgaggtccccgatttgggggatctggagagttttaacaccctgcccctacaccagtgccctggactgggttaggggcccacaaaccctggtaggggaacctaggtcccttgatgtgggggcccaggagcagtttcaggacctcccctgcatctccctggagacccaccctgggtcagatttctggggagagattcttgtccctcccaccgcctagtactaggccatccaaaggagttgaggagcttaccacagtgtggttgcaggtggcggcctgggcctccacatcctgaaagcccttctgggcctcggtcagctcttgttgcaggagatgggtgacattgcgacactccatcactgcccgaaggccgtcccggcaggcctcgctgttggccttgatggtgaagataatcaagggcacccccagaatcacgatgatcaggagcaccagaattcctatccccagcagaagcttacagcgcttatccccgtcttccatgggcactctgcaatagtcatacgaagtagatgccatccagatctcccctttagagtctggcctggagttaggggagggtgctggaatcttctacgggccacccctttattagcataggaaacgtcctgaccaatagcaagttccaggaagtgctctgaccagcagctcttgcatgaggcacctacaggcagaggattaattaggttttcagtttcagtttcccagaaaggaggtgggcttttttttcaccctgctttaaaagcccttgggcccttcccagctgggtgccagccaactgtggctgcctgggacactccatcttaagtccctgtgcctctgctgtgtgttactgagtgcctaggccgtgccagcctgtattcatctgtactatgacctgaagagg

SEQ ID NO: 21056 - DNA, 2300 bp, Homo sapien
caggctcgcccgcggttatctggcagcctaaccgtctccctgtgatgctgtgcttcagtggtcacgctcctagtccgccttcatgttccatcctgtacacctggctctgccttctagatagcagtagtcatttagtgaaagtactaaaagtctctgatatgcagaaataatggcataagctgtctttctgtctgtcccctctctctctctctgcctcggctgccaggcagggaagggccccctgtccagtggacacgtgacccacgtgaccttacctatcattggagatgactcacactctttaccctgccccttttgctttgtatccaataaataacagcacagccagacattcggggccactaccagtctccgcgcattgctggtagtggtcccccgggcccagctgtcttttcttttatctcttcgtcttgtgtctttatttctacactctctcgtcgccgcacacagggagagacccactgaccctgtggggctggtccctacagtaattttaaagggaagagcaacaaactttcggtttgcagggctgggactgtttacagctgcaaaatttagagaggacatcaatctattattatccacattttacagctggggaaatcaatgctaagagaggaaattcatttgcccagaggtgcaccaccctggcctccaatgtgcaattcatgcaattgtgatttccgacctggtcccaaactaaccctaaagttagcaggccagaacagtgctgctcaaataagtcagcttagtcaaataagtcaggcaaaggtcgtgtctttgcacctggagtcctggccaggctggtaggtccctcctcctgggacaagttcaccctcagaattttcagcaagatcatctcccacagcttgttaattggttcttggttctaagtgatttttttgtttattggtttaagagatgggatcccactctatcacccaggcttgagtgccgtggcacaatcatagctcgctgcagcctcaaactcctgggctcgagtgatcctcctgcctcagcctcccagcctcagcctgggaccacaggcatgtaccaccatgcctggctctaagtggctttaatggggtccttctgagggatgttggagtcagggcctggggggagttccccaggccttctgggaggcctgggctctggacttgacctcgcctactgtctggccctgctgaaaagaaaaaaaaacatggaaatggcagacctaacagaatctgggctgtggtcaggatgtggctgaagaagccacaagaaaaacatgcagtcccctttcagcggtcatgcccagcagttgggtgccgataatgggcctgatttcctgtaggaagccctggctctcttggccacatggacagtgtctgaggctggccctgttattcccctttgcagatgaagaaacaggctcagagagtttacctggtatcctggagtcccaggagcactttttctggaagtaggagcttgtttcctgcaggtgccaagacagagaccgacattgtttgttggctgggtcggtctcccagttttcagctggctccagtctcacctgttgctcacacaccctccatgtctcccatagtcccctcggtggggacagaggcactggatgaagccctgctcgtcaccacagagacacctgaacacaaaaaccagtccctggggtcagacccaggccccgcccccagacccaggccctgccctcactccaccacgcaactgtgcaacctcagtttccccaggtggagaccggaccaacagtgatggcctctgcctcttcaggtcatagtacagatgaatacaggctggcacggcctaggcactcagtaacacacagcagaggcacagggacttaagatggagtgtcccaggcagccacagttggctggcacccagctgggaagggcccaagggcttttaaagcagggtgaaaaaaaagcccacctcctttctgggaaactgaaactgaaaacctaattaatcctctgcctgtaggtgcctcatgcaagagctgctggtcagagcacttcctggaacttgctattggtcaggacgtttcctatgctaataaaggggtggcccgtagaagattccagcaccctcccctaactccaggccagactctaaaggggagatctggatggcatctacttcgtatgactattgcagagtgcccatggaagacggggataagcgctgtaagcttctgctggggataggaattctggtgctcctgatcatcgtgattctgggggtgcccttgatta

SEQ ID NO: 21057 - DNA, 2300 bp, Homo sapien
tggagtgcagtggcacgatctccgctcactgcaactttctcctcccaggttcaagcgattctcctgcctcaggctcccgagtagctgggactataggcgcctgccaccatgcccagataatttttgtatttttagtagagacggggtttcaccatgttggccaggatggtctcaatttattgacctcatgatccgcctgccttggcctcccaaagtgctgggattacaggcgtgagtcactgtgccaggccggtttttcttcttatgttcttctctgtacatctgcacaaaaaaactataagcagacattttgccctttggtttcttggggtcaccattagccatcctgactgtattgtttgctagtctgggcagcgcaggacacttgttcgctatttttctaaacttttcccccaatgggtgtaaaaaagcatattattattattattattattattattattattgagacgagtttcgctcttgttgcctaagctggagtgcaatggcgcgatctcagctcattgcaacctccacctcccgggttccagtgattctcctgcctcagcccccttagtagctgggattccagacgcgcaccaccacgcctggatagttttttgtacttttagtagaaacggggtttcaccatgttaggctggtctcaaactcctgacctcagatgatccgcccgcctcggcctcccaaagtgctgggattacaggtgtgaaccactgtgcccggcttaaaagcatattattatagtaaatactttttttccctttctttctttcattttaaacactggggtctccttatgttgtccaggctagattcaaactcctggactcaagcgatcctcccacctcagcctccctgttaccctgttgccatgacagccctgataaaataactgggaaagttctctttcttattgtaagtccaaaaaaaaaaaaaaaaaaggcacagctgcttaaagattgcagacagccagggatgtccccagaccttcttgacccctgaccagataccagaggaagataagatccctaaatcaccacaaactggaacagacgacctctagtcgactttagatcatcaatatataattataatgctaaaattccttctcttaaaagaaaatctccattttgtgtagatgggttgtatgaagacaacccaggaattgaggctcatgaattgagcctgcgtgtctggagtcccaccctgcacatgctagcattcctctcccttcctgtacccaggggaagaaacaataaaacgttatgctttttactgttgagggagaaggggcagttagagtgagagcctctccttctccattcctggccagtgaataaaacctgattgccttttccgattggatgttccttctttgccacctacacaaagtggggaggtaactcggtttgctggtggcatcctcagtagctgggactacaggcaataaattcttttatacgtcgctttttaaacgtattgtgcctgtgaacaaatcttcaagttatacccaagatttcaaagctcatgatggtccatagtactcgctctttaaatcaatagctgcgtatcccacagatgatttcctttgggatgatttcccagaactggaattgcagattcttcacaatgcatttttagtagagaaggggtttcaccacgttggccaggagggtctcgatctcttgacctcatgatccgcccgcctccgcctcccaaagtgccgggattacaggcgtcagccactgcgcgcggccacaaagctcccaacttttccgttaagcaccgagcttttttctagactagcagctgaggccggaaggaattctggggaacgtagtgcagacttgcagagaacgagtctcttggtcctgtgccgtagcatttccggcggaagttgctgggcgcggaaagccggcaagacctttttttccgccatcatcgctcacgcgcgcaaccctggcgacgcgtggtggcgaggctccgcctccccacgccattggccagcagctcctcgggcacgcgtatactgcgcttccgggcaatctccgccccccccccccgcatggccttctgggagttgtagttcggtcgcgagcgctgccgtcgggaggcgctccgaggttcgaggctgtgccccgcgaccccgccttcggcgctcggctcgcaggatggatcccgtacccgggacagactcggcgccgctggctggcctggcctggtcgtcggcctctgcacccccgccgcgggggttcagcgcggtgagcggcgtcgagggg

SEQ ID NO: 21058 - DNA, 2300 bp, Homo sapien
aaattccttctcttaaaagaaaatctccattttgtgtagatgggttgtatgaagacaacccaggaattgaggctcatgaattgagcctgcgtgtctggagtcccaccctgcacatgctagcattcctctcccttcctgtacccaggggaagaaacaataaaacgttatgctttttactgttgagggagaaggggcagttagagtgagagcctctccttctccattcctggccagtgaataaaacctgattgccttttccgattggatgttccttctttgccacctacacaaagtggggaggtaactcggtttgctggtggcatcctcagtagctgggactacaggcaataaattcttttatacgtcgctttttaaacgtattgtgcctgtgaacaaatcttcaagttatacccaagatttcaaagctcatgatggtccatagtactcgctctttaaatcaatagctgcgtatcccacagatgatttcctttgggatgatttcccagaactggaattgcagattcttcacaatgcatttttagtagagaaggggtttcaccacgttggccaggagggtctcgatctcttgacctcatgatccgcccgcctccgcctcccaaagtgccgggattacaggcgtcagccactgcgcgcggccacaaagctcccaacttttccgttaagcaccgagcttttttctagactagcagctgaggccggaaggaattctggggaacgtagtgcagacttgcagagaacgagtctcttggtcctgtgccgtagcatttccggcggaagttgctgggcgcggaaagccggcaagacctttttttccgccatcatcgctcacgcgcgcaaccctggcgacgcgtggtggcgaggctccgcctccccacgccattggccagcagctcctcgggcacgcgtatactgcgcttccgggcaatctccgccccccccccccgcatggccttctgggagttgtagttcggtcgcgagcgctgccgtcgggaggcgctccgaggttcgaggctgtgccccgcgaccccgccttcggcgctcggctcgcaggatggatcccgtacccgggacagactcggcgccgctggctggcctggcctggtcgtcggcctctgcacccccgccgcgggggttcagcgcggtgagcggcgtcgaggggcgggggtcgaatgggggaggcagtcgctgtggggtgggagtccggcgctgacccgcgtcctcccggtagatctcctgcaccgtcgagggggcacccgccagctttggcaagagcttcgcgcagaaatctggctacttcctgtgccttagttctctgggcagcctagaggtaagaggtgcccaccttcggaaccaccagggtctgcccacctcccctgcccattcacggtgccctatgccaggtgcgctgtccccgctgctagccaccctcgccgtgtcccccttccacccccagaacccgcaggagaacgtggtggccgatatccagatcgtggtggacaagagccccctgccgctgggcttctcccccgtctgcgaccccatggattccagtaagggctgcttcggaggcgagagttgtccgggtcccttgcagggaggagcgggggaggagggacgacgggcgcgcggtatctgagcctcggctgccccctggcacacggggtgatgacagggttggctgaggactcagagccctgccctagggtggaccgacatcccctgtcctgattcaaaatgtgtgatatgattggcacagcctgcatcctcgagttaagtgttcagtccacgccacctgtttcactactgttgtgctacttgtgtctttttacaccatagccaagcaaaaccactgcgcagttttctttttcatttccaggctttgcacacgccgcttcctctgcctggggcactttttctctcctttttgtagctcattctccgtcctccgtcagatgtcaccttcacccttccctacccctcctcttctgggcccacaaccctagtgcagccctcccagccccacctgaactttcccaccctttcttgtcatttttatttgactcaggctatattcattcatactagagttggcaaacctttttttttttttttttcttcagacggagtttcgctcttgttgcccaggctggagtgcaatggcgcgatctcagctcaccacaacctccgactcccgggttcaagcgattctcctgcctcatcctccagagtagctgggattacaggcatgcgccaccacgcctggctaattttgtattttt

SEQ ID NO: 21059 - DNA, 2300 bp, Homo sapien
aacacaatgtgttccagacacgctatggaatattacgcagccataaaaaggaatgaggcactgatccatgctacaacctcgatgaaccttgagtacatcatgcagagtgagagaagccagaatgccacctcttgtatgactccattgatatgaagtgtccagaacaggcaaatcgacagagacaagaagtagattaatggttgtgagccacttgaggagggggaatggggagtggctggtaatggggatggggtctccttttggggggatgaaaatcttctggagctagacagaggtaatgattgtacaacactaaatgccactgaataaaatgattaattttatgttatgtaagtttcatctcgatttttttaaagtgctgtgcgaataatttgggggaccagttggggaagggatccaggattctccctagcctcctagaggaagcaacggttacccaaaggcttgaaggaagtaagcagaggggaaatcacagccaatgacagagtccctgggttgagatcaaatgaaaagtgaatttttaaattttgttatttcttttttgagacacagcctcgctctgtcactcaggctggagtgcagtggcgtgatctcagttcactgcagcctcgacctcctgggctcaagcgatcctcctgtctcagtcccgaaagtagctgggtccacaggcgtgcaccaccacaccaggctgacttccttattttttgtagagatggggtctggctatgttgcccaggctggtctcaaactcctgggcttaagccatcctcctgcctcagcctcccaaagtgctgggattacagttgtgaaccacctcacccagccctttctctctctctctctttttttttttttttttttttgatggagtcttactctgtcagccaggctggagtgtgcagtggtgcaatctcggctcactgcaacctccgcctccctgattcaagcattcctccaacctcagcctcccgagtagctaggattacaggccatgcaccactacgccgggctaatttttttttttttttttttttttagtagagacgggggtttcaccatgttggccaggctggtcttgaactcctgacctcaagtgatccgcccacctcggactcctaaagtgctgagattacaagcgagagccaccgcgcccggcctcctttctctttattttttattttttaattaattaattaattaattttgagacggagtctcgctctgtcgcccaggctgcagtgcaatggcgtaatctcagctcactgaaacctccgcctcctgggttcaagcaattctcctgcatcagcctcccgagtagctgggattacaggctccggccaccacgcccggctaatttttgtatttttagtagagacggggtttcaccatattggccaggctggtctggaactcttgaccttgtgatccgcccgcctcggcctcccaaggtgctgggattacaggcgagagccaccgcccccggcctcctttttcttgttttaaaccacaatacaatcgatgcttagggcggcagggggcggggtggtgcccttttctgaacttagcgagctgtggggttcccgcgatccagtccctagtggggcctccccgccctgcgcccggtgccaggccccgccccgccaggcccagcggaccaagagggggcgcccgcggggccccgggagggaggagaaaagactttgtcccaagttttcgcggagattcggcgtcccggctgcgaccagcaccccggagcccccgtccgtctggcgacccccagcccagtccccgaactttcagacactccctgcggccccgccccctcggggaccccctgaggaccctcggattccccccaactcccctgccctctaaaaccacttcaattcctcaactcttcccccggcccgcaggaacccccgccatggcccgttcttacggcggccgggtgctggctgcaatgaccctgctgggcatcgcggcggccgtgctggcggcgctgggcgcgcagctgctgtttcagctgcaggcgggccgcgccgagctgcgggggctgcgcgccgaggggctgggccaggagctgggcgccggccccgggctgccagaggacgcggccgggacgctgctgccgctggccgccgcgctggccgcgctggtgctcgtgctggggttcacctgcttgctgctcgccgcgctctgtggccacctgggcgccgagctggcgcgggggcctggccccaggaggtaggaggactggcctcaccgcctcggaggcccgg

SEQ ID NO: 21060 - DNA, 2300 bp, Homo sapien
gctcaccctgacttagaccttgaagtaactagtagagtccatgtgaatcaatgtgatttaatatatttatgaaaaggtgtggccagttgcatgctcatgcctgtaatcccagcactttgggaggccgaggctggaggattgcttgagcccaggacttggaggccagcctgggcaacatggcaaaacctcatctctactaaaaatacaaaaaattagccagacgtggtggcacagaactctagtgccagctaacagggacgctgaaatagaaggatcgcccgagccctggaggtcaaggctgcagtgagccatgatcacaccactgcactccagcctgggcaccttgacagagtgagacccagtctcaaaaaatatacatacaaaaaagtcagatattaaatttttttatttttattttggagacagagtctcactctatcccccaggttggagtgcagtgggacaatcttgtctcactgcagcctccgcctcttgggttcaagcaattctcctccctcagcctcccaagtagctgggattacaggcatgcaccaccacgcctggctaatttttgcttttttttttttgagatgtagtctcgctctgttgcccaggctggatggagtgcagtggtgcaatctcagctcactgcaacctctgcctcccaggctcaagcagttctcctgccttagcctcccgagtagctgggattacaggcatgtgccatcacgagccgctaatttttgtattttcagtagagatggggtttcaccatgttggccaggctggtttcgaactcctgacctcaggtgatccgcctgcctcagcctcccaaagcgctgggattacaggcatgagccaccacacccggtctaatttttgctttttttttttttttgagacggaatctcactctgtcacccaggctggagtgcagtggcgcggtctcggctcactgcaagctccacctcccgggttcacgccattctcctgcctcagcctcccgagtagctgggactacaggtgcccgccaccacacccggctaattttttttgtacttttagtagagacggggtttcactgtgttagtcaggatggtctcgatctcctgaccttgtgatccacctgcctcagcctcccaaagtgctgggattacaggcgtgagccaccacacctggccaatttttgcatttttagtagagatggggtttctccatgttggccagactggtctcgaactcctgacttcaggtgatccacccaccttgacctcccaaagctttgggattacaggcgtgagccaccgtgcccagcctattttttatttttagacactaggtcttgctctgtcacccaggatggagtgcagtagtgcagtcattgtagcctcaacctcccaggctcaagtgatccttccatctcagctgagtagctgggactacaggctcatgacaacaccatgcccagctaagtttttaattttttcatagagatggggtctcacactgttgcccaagctgctctcaaactcctggtctcaggtgatcctcctgcctcagcctcccaaagtgctgagattacaggcgtgagtcactgtctgctacatggttttttggttttttttctttctttctttctttttttttctgagatggagtctcgctctgtcgcccaggctggagtgcagtggcacaatctcagctcactgcaacctccgcctcctggcttcaagcgattctcctgcctcggctgcccaagtagctgggattacaggtgcccaccaccacgcctggctaatttttttattttttagtacagacagggtttcaccatgttggccaggctggtctcaaactcctgacctcagatgatcctcccacctctgcctctcaaagtgctgggatcacaggcgtgagccaccgtgcccatctgttacgtgttttcttaatgcgtttgcggctctctcctgagaagggccacacagagagccctgccccccgcccttagaggcccctcaggtcaaggtttaggcagattagtgaagtcctaagctggttttctaaagatttctatttctgggagaggagccagtcagcagaccggggaccacacgccgcgctgtccccagcacccaacccaggttaccatggcctccctgttctctggccgcatcctgatccgcaacaatagcgaccaggacgagctggatacggaggctgaggtcagtcgcaggctggagaaccggctggtgctgctgttctttggtgctggggcttgtccacagtgccaggccttcgtg

SEQ ID NO: 21061 - DNA, 2300 bp, Homo sapien
tgttggtcaggctggtttcgaacttctggcctcaagtgatccacccaactcggcctcccaaaatgctgggattacaggcgtgagtcaccacgcccagcctgccctcagtttctttacctgtcaaatggggtgatcacagcggtgctacctggctaggtaagagtgcaactgcagttactggtcattgctgactcttccaggcccagaaagcagcaggccagtggctggctctgggcctgtcctccggatcttcctcgtgatccctcattccagccaccctgctgcccgcagggaccaatggcagcgtagggggtgagtgcctgcccagccctgtcctccaaatgcattggaatcaggcccgggccgcctcctaaggagaacgctggaaaggtcggccaaggagagcagaaaacaagcagtggtggagtcggcagtggggcagaggagggggagctggaagggaaggaccccaaagcagaagcccgcacagtaggcacagcgcacccaagaagggtccaggagtctgcagaaacagaaaggtccccggcctcagcctcctagtccctgcctgcctcctgcctgagcttctgggagactgaaggcacggcttgcagcttcaggtcagccagagaatggggttgtgcgtgcccccaggccagcgctggcagcgcctgggggagcatctaggaccccggggtgcaagtaaagggcctgtaggtgcttctaggaaggatggggacctggcgtgtggattttgtcctccctgggatcctggggtgtgacggtgagacttaaccgacaaggcttcgggacatggattaagaattagctgtgtccttgaatcacacgtgttaagaccgcggcggtgtttacagttagagacttctgaggccccaatggtgtgagttgagcactcccccgggccctggaacgtgtttttaagaccgaaagaggctttggggcttggatttaggacaagctggagcaagaatacagcccgcgcgggccgtgggtgtggactgggatatttttggtcccccggggtagagatcctgcacgccaactagggctcgggtcctgatatcttgcgagccacgccccaaggctgcaggacacgtgtgtttcctaaaaggagagggggtggggcaaggcttggttgtcatggagacagcggacgaccctggcgggccgttctagcacccatgtctctttggccgtcgcctctccggtccggttgcctctctatggtcgtggcttctggaagacggccggcctcggctctgcgggctgaggggcttcgaagtagacaggagggaagaggggcggggcctaggtcctaggggggccggagtgaaacccaggaggtggcgaccgagccaaagcctgagggcggggcccgtggccaggatagaacctgagcctgggaacttgggctaggcccggaactggggtggggcttgaacggattggggagggctctagtttcgggagggtggggcgtgtgcttattgcgggggggtggggaggcatatgtctaacctagggggtggggcctggctgagaggggcgggactcggggagagggcttgtacctgtgggctgggctagaagcataacctaagggcggggcccagtgagtggtgaaaaggccacggggtagaggcaggaccaggaggaaaggggacaggacgtgaagggtaattcggggatcgaggatagaggctagatgaaggcatgtggcgaggcctgacagtgaccgacaaggtggacatgctggctctgggggcggggactgttgtaagattggcagggaaggatgggctcaaaaatatggaatagagcggacccagggtccgggggcggagcctggccaggacctggccaatcccaggcctggggccctggtctggttcctagttagcgggcgggtgtaaaagcctggaaaggggcgatgcctggcctgaggagttgaccaatcccaggcctgggggcggagtctgactcggagcgcgttcccggactcgcggggggcgcagagccgaggcctgggggcgcggctcgctgtagaggcgggggcggtcgtggggcggagcgggtcgtggggcggggctggagcggcccgcggcctcagctctctctgcttccccaggatgcgggctccgggtgcgggcgcggcctcggtggtctcgctggcgctgttgtggctgctggggctgccgtggacctggagcgcggcagcggcgctcggcgtgtacgtgggcagcggcggctggcgcttcctgcgcatcgtctgcaagacc

SEQ ID NO: 21062 - DNA, 2300 bp, Homo sapien
ggagggaatgaaagagggaaagaacgaagaagagcatgaatgaatgaccgagaggatgaatgaatataggtgctgaagtccactgtgaacattttggggggtgtgagcagccattgcagggatctggggaggcctgggaaaggcaggggagatccaaaggatggatttggtgattttgatgcagaagctggagggaggcagtggccgggccaggctgaaacaggggcaggtgggtggagcccctgccctgtgttggtcagggctgggcagggccaggtactacaacaaacacaccccacattccagtggcttaccccagtacaaggttattggttcccagagccaggggcgcagggtggtggggcagggagccaggaaggggtggggaccactcatttctccagcttctcaaccaagaaaatctgaatttccagcttctgtgatctaaacttttcctttcctttccatttcctttttgtttccttttttttttttttttttgatggagtcttgctctttggcccaggctggagtgaatttgcgtgatctcggctcactgcaacctctgcctgctgtgtttaagcaattctcctgcctcagcctccggagtagctgggattacaggcgcccaccatcacgcctggctaatttttgtatttttagtagagacggggtttcaccgtgttagccaggatggtctcaatctgctgacctcatgatccacccgcctcggcctcccaaagtgctaggattacaggtgtgagccaccacgcctggcctaaagcatttcttgtttgtttgtttgtttgtttgtttgtttgtttttaaagttcattcttggctgggcatggtggctcacacctgtaattccaatactttgggaggccagggctggtggattacctgaggtcaggagtttgagaccagcctgaccaatatgatgaaaccccgtctctactaaaaatacaaaaattagtcgggtgtggtggtgggcacctgtaatcccagctactgtggaggctgaggcaggagaattgcttaaacccaggaggcggagggtgagccgagattgcaccactgtactctggcctgggcgacagagtgagactccgtctcaaaaaaaaaacaaaaaaacagttcattctcattcatctaacagcaagtggtggcccgcctgcctccacacaatcattcaggaacccggctcctttcactgggggctctgcagttccctggggcctctgcccgttatatctactagcgagtggggaaggggaacttggaaccctccatctgggcttggcattggtccttacaccccccatccactggcacatctcctggccctacctggggcaggggcaatccctccccagttgggggcacacgtgctagatgcttcagccatctgtccctggtgccacccagtgacctgggggcagaacagctgcccagctcggggctggaccctgggggtcctggttagggtggtctgagcatgaagagtccaggctggaggtgctgggggatggtgtcaggtgctccagacgtcgcaggggacagaaaggaggatgggttcaggccccagctcccccagggccaccaagccagctggggtatgggggaggacagggtgactggtttattacgctttgagaatctaccttcttcctggctggttggtaaatggcccttgcccttggtccactgagagatccagccaccaaaagtttcaccatagacctcatcaaagcccctggctgccctggggtcctccagcggggaggctgaggctcccagaggccaggcggggcagggcaccagtgacgctgtcccctccgtcctccctcccagcggtctctctgtgctgatccgcgtgcgcctggagctgcggcggcaccagcgtgccggccacaccatcccgcgcatctttcaggcggtagtgcagcgacagcccgagcgcctggcgctggtggatgccgggaccggcgagtgctggacctttgcgcagctggacgcctactccaatgcggtagccaacctcttccgccagctgggcttcgcgccgggcgacgtggtggccatcttcctggagggccggccggagttcgtggggctgtggctgggcctggccaaggcgggcatggaggccgcgctgctcaacgtgaacctgcggcgcgagcccctggccttctgcctgggcacctcgggcgctaaggccctgatctttggaggagaaatggtggcgggtgaggccaggcgtgggcatcaggtgggcggggacccaggactggcccctg

SEQ ID NO: 21063 - DNA, 2300 bp, Homo sapien
ctacccgggaggctgaggcaggagaatcgtttgaacccgggaagtggaggttgcagtgagccgagatcgcgccactgcactccagactgggtgagagagcacaactccatctcaaaaaaaaaaaaaaaaaaaaaacaggacagaatctctaaaggtgatgtttaataaggacacaaggagaaaacaagagcatacatttatttgggttcagaaattacatctcatgagaaactgctcactgctattttatctgtagcagcagttgcagtctagccattctcatgggggcagcaggctataatctagaaccttacttttttttttttttgagacacagtctcgctgcatctcccaggctggaatggagtagtgtgatctcggctcactgcaacctccttctcctgggttcaagtgattcccctccctcagcctcctgagtagctgggattacaggggtctaccaccaagcctagctaattttttgtatttttagtagagacggggtttcaccatgttggccaggctggtctcaaacttctgacctcaggtgatctgcctgccccagcctcccaaactgctgggattacagccatgagccacagcagccggcttttgttgcttatttctttcttactgtacacgtgctaacaaaaaagggatggtggagcccccagggtggacatgcccagccccaggtagctgtttcttttttttttttttttgagacggagtctcgctctgtctcccaggctggagtgcagtggcgcaatcttggctcactgcaagctccacctcctgggttcccaccattctcctgcctcagcctcctgagtagctgggactacaggcgcccgccaccacacctggctaattttttttttgtattttttagtacagacagggtttcacggtgttagccaggatggtctcgatctcctgacctcatgatctgcccacctcggcctcccaaagtgctgggattacaggcgtgagccaccgtgcctggcctttttctttttctttttctttttgagacggagtctcactctgttgcccaggccagagtgcagtggtgcgatctcagttcactgcaacctccacctcctgggttcaggtgattctcctgcctcaggctcctgaatagctgggattacaggtgtgtgccaccacgcctggctaattttgtatttttagtagagatggggtttcaccatgttggccaggctggtctcgaactcctgacctcaggtgatccacccaccttggcctccgaaagtgctgagattacaggcgtgagctaccgtgcccggccacaggtagccctttttatcggtgcagctgctggcatcccctgctgcaagcttccagcttccttatttgtgtttgcagcccaatcttccaggctgttctttgttagaaaataagtgatttcttgggctgctttttgttagaagggaagttctaccgaggattttttgtttccaaaaaaaaaaaaaataggcaacgtagagtagctactcacctgcataataagagattgggttgggggctgccagagatttgcgccctatgcggatggcacatctggtcctcaccggtttttcacggtctatttagatcagatacagcctccctgctagcttgtctgtaaaaatccttgccttttttttttttctgaggcggagtctcactcttgtccccaggctggagtacaatagagcgatcttggcttactgcaacctctgcctctcgggttcaagagattctcctgcctcagcctcccaagtagctgggattacaggcacatgccaccaggtctggcaaaattttcttgtatttttgtagagatgaggtattactacattggctaggctggtctcgaacttctgacctgaagtgatctgcccacctcggccccccaaagtgctgggattacaggcatgagccaccgcgcccagccatgtgcccattttttttttttttttgagatggagtctcgctctgtcgcccaggctggagtgcagtggcgcgatctcggcccactgcaagctccgcctcccgggtttacgccattctcctgcctcagcctcccgagtagctgggattacaggagtgtgccaccacgcccggctaattttttgtattttttagtagagacggggtttcaccatgttagccaggatggtctcgatctcctgacctcgtgatccacctgctttggcctcccaaagtgctgggattacaggcttgagccaccccgcctggccgtgcccattcttaagccagtcatattggctgag

SEQ ID NO: 21064 - DNA, 2300 bp, Homo sapien
aacacaaaatggaccaagacatgaatcaacagacacactgatggatgaagagagagattggagtgggggagactcgcacctgtggtgtccacctggggcaggaggcgcaggaagatgggccgggcatagggtgccagcaccttctgcagctcctggtatatcgcgttggggtccagcaggctgtgggggtctgcgacggccgccatccctgccttaccctccactcctggaggcagaggctcagctgaggacaccccgcctctcatcctccccaccagcaggaccagatacactgtcaagcagtagcccctggtctgtaatctccagtctctcccaacctgggatgacatttatggaagcagccacacattttgtggagctcctgcttggctcattgaagccctaagacaggtgggctttcatgatcccattttctggatgacaaaactgaggctcaacatcacccaggtgaactggctccagatccagtgcttcctcctgggctgccatgagcagttgtccaggttgtgcactgcccaaaggcatgtgtacttctaagccccttttggctgagctccctcaggaccatgcctcaggaccaccccctgcaaccccagcttgcctggaacagccaccccatagacggccacgtctgtctggcccagcaggcggctcagcacgccctccacctcggtggtggagacgttctcccctcgccagcggaaggtgtccccgctacggtcccggaagtacatgtagcccagctcatccatcactagcacgtcacctggcagaggggagaggggcagatgggtggaggatccccatccgcacagccagtcaccggggcctagcaggctgcgcacctgagaggtaggcgctgtcgcccttgctgaagacgctgtgggcgatcttcttgctggtggcgctctcgctgacatagccatcgaagcggcgcagcgggtcctgttggttgatctgacccacaaggaggccaggctcccctagggagaaggccatgttcaggctgcgctaggcaggcagggcgtggggacccctgctccgggtggggaccatgcgggggccctgctcaccggcctggcaggggatgcagaggccctgggcatcccgcagcagctccattgtgtcctcattgaccttcaccagccggatggggtacacgtggggcaggatgcggctgttgaaaccacaggagccgacctggaatggggtgaactgagttggaaggagccggggatatgcggggtccttctcagtaacactttgcctgccttgccctggggcttggacctagcacctccagtgtcattctaagctctgtgaccttggctgatctgcaaaagcagggtagtaagcgtcgcctccaactcagggcccctcctcccaccttcccagcctgcattcagtcaagagaagacctctggctggcacccacttcctgatccacaaaaccctccatgctggcaggaagtagatgcctctgtgtggacactacagctacgtcagacactgcagagcttcacctgctgcccgccgccctgcttggcatggttctatgaacagaaatgcttctccaacatgtttgagccactacaccctgtctggtgtgtttctttctgcttttcccccttcctccgttcctcccttccttccttccttcctttttttatagagtcttactctgtcgcctaggctggaatgcagtggcgcaatcttcgctcactgtaacctctgcctcccacgttcaagtggttcttatgcctcagcctcctgagtctgggattacaggcgcatgccactgagcccaaacaattttttttttttttgtatttttagtagagatggggttttgccatgttggccagactggtctcgaactcgtgacctcaagtgatccacccacctcagcctcccaaagtgctgggattacaggcgtgtgtgggtggcaagctacccaggtgccgaggcaagagaccgagggcacgagccattccagtataataaaatatataaaacaacaagagttatactagatctagatcatagacatgattatatatgaatatcattagtcatcagtttgtagcaattactctttattccagtattataataatcctcgctctgtaatcataacctagaaaaaaccgggccatagagagataggagctgaggggacacagtgagtagtgaccagaagacaagagtgcgagccttctgttatgcccggacagggccaccagagggttccttggtctagcggtgacgccagcgtctgg

SEQ ID NO: 21065 - DNA, 2300 bp, Homo sapien
actcctcacctcaggtgatctgcctaccttggcctgccaaagtgttgggattacaggcgtgaagcaccacgcctggcctattcctttttttttttttttttttttgagacagagttttgctcgttgcccaggctggagtgcaatggcgtgatctcagctcaccacaacctccacctccggggttcaagccattctcctgcctccgactcccgagtagctgagattacaggcatgtgccaccacgcccagctaaggctttgtatttttagtagagacagggtttctccatgttggtcaggctgatcttaaactcccgacctcaggtgatccacctgccttggcctctcaaagtgctggaattacaggcgtgagccaccacgcccagccctcctttctttttgaatagtcctggcaccgttgccaaagatgagttgaccatatatgcataggtttatttctgcatcagttccaatcatttatttatatgtctatccttatgccaataccacagttttggttattgtacctttttattgtttgaaatgagaaagtatgagtcctcgtattttattcaatattgttttggctattttggggccatttgcaatttattattaattttaggatcaatttgtcaatttcaacaaaaacattgtaaatttgaaagggattacattgcatccgtagaccaatttgtggagtactgccatcttaacaatattatactttccaatccatgaacgtggaatgtcttaccatttatttagatcatctttaattttttttttcaccaaagttttagttcttttgcttgtttcgagacagggtctcactctattgcccaggctggagtggaatggcaggaacacagctcactgcagccttagtctcctgggctcaagtgatcctcccaccacagcctcccaagtagctgggaccacaggcagctgccaccgggtccagccttggcttcccaacgtgctgggattacagctgtgagccaccaagcccagctacagctctcaagaagtacagtcttgtacttcttttattaaatttatgcctactttatactttatgatgctatggtaaatggaattgttttcttaatttgctactgattttaaaatccactacctgtgtgagttgaactgcgcttacacacatcactgaaatatcccactctcagaagtggcccagcctccccaggcccaccaggccttcttccccttccagccctctgtccaggcaagaactcgattggaggcctttctgggcactcagagggacacaccaccacactaggagggttagcttaaaaaattcaacaagcatggccaggcgcagtggctttcgcctgaatgctaccactttgggaggccgaggcaggaagatcgcttgagcccaggggttcaagatcagcctagaccatatagcaagagcccgtccgtccggaaaatgtaaaaaaaaaaaaaaaaaaaattcaacaagcatattttcatcccctacttttttttgagatggagcctcgctctgtcgcccaagctggggtgcagtggcacgatctcggctcactgcaacctccgccaccccggttcaagcgattctcctgcctcagcctcccgagtagctgggactacaggcgcccgccactacgcccggttaattttttgtgttttcagtagagacggggtttcaccgtgttagccaggatggtctcgatctcctgacctcgtgatccgcccgcctcggcctcccaaagtgttgggattacaggcgtcagccaccgcgcccggcggtgcaggaattttaaaactcaccaaaatacgccctccttcagaaaatccctgccacctcgataggacgtcctcttcttgagctcccctctccggccctccctgatacagcaaggttgagcattcgggcactggcttcccgaactcacttcgactcaggcacagcaggcaaagattcaatgggtagggccggaccgactgcccgaccttcgcggtgcttcacttgcctcactgcgcatgtgccaaagacaatcacccaaagtactcgaaaccaagcggcagggccggcccttgcgcaggcgtactagcgacggccgtagggagcgcttcctcctccccgccgccgccctcgccatggccgcgccggccccgggcctcatctcggtgttctcgagttcccaggagctgggtgcggcgctagcgcagctggtggcccagcgcgcagcatgctgcctggcaggggcccgcgcccgtttcgcgctcggcctgtcgggcgggagcctc

SEQ ID NO: 21066 - DNA, 2300 bp, Homo sapien
ccatccttggcctcccaaagtgctgagattacaggtatgagccaccacgcccggccaaaaacctgcttttttttttttttatctttaagacagtctcactctgtcgcccagggtggagtgtaatggcatgatctcggttcactgatcatgcctcactcctgcctcagcctcccgagtagctgggattacaggtgcgcaccaccacacctggctaatttttgcatttttagtagagacaggtttcaccatgttggtcaggttggtctcaaactcctgacctcgtgatccgcccgcctcagcctcccaaagtgctgggattacaagcgtgagccaccgcacccagccaatttttgtatttttttttagtagagacagagttttgccatgttggccaggctggtctcgaaatcctgacctcaggtgatctactcacgtcggcctcccaaagtgctgggattacacgcgtgagccaccgcacccggccaaaactttttaatgatgctcttggaaaacacacacaggaaggcggaagttaaatgtgtacccaactacgaagtcagatgaggcaggatcacaccctggctgcccctctggtcactagatgccttgggcaggtaagctcacctcttctggcctcagtttctccatctgtgaaatgagtgtaacatctcataggctgtggtacggactcatgaattgatgcatataaagcgttcagtaagccttttctcttaataaaaaacccacaaaaccatcatcagctcaagattctatgcaaagagaagacggcacacccagcatggggtgtcccttgacgctgccagactcaagtgacttgaggttcctggcctttgagcccgcccctcccactcttccctcggccaggccaaggctcctccaagcctcagttaccctgtctttaaaagagcgcgctcctctgattctatagaatcctgaggctcaaagccaaagatgaacagcctggaagcagagccatcagagcggcaaagctgcccagggatccccgagaactcgctggggttagagatcaggaccctgagattcaggctctacacctgattcctcgtgcccccgtccgctacggggctgagttatgggcatcgtttgacatgggccactcggattcccttccaggcccttgcccgtgccgttccctctgcctggccaccggatgaagcaggaagacggactgcaagtagaccatttctagccctgcctagataaaggcagagggcgcagtgaggtcctgcgggacccactgtaggcggggttcaggaggcgggcgagccctgtcggctagacccccagcggcccccgtagtcgaggtgcaggcagtgggcgtgaccatctcggcatgacccccagtggcccccgtagccgagggcaaccggtgggcgcggccctcttggcatgacccccagcgacccacgtagccgaggtgcaggcagtgggcacggccctcttggcatgatacccagtggcccccgtagccgaggtgcagacagtgggcgcggccctttcggcatggcccccggcggcctccgtagccggggtgtaggcggtggctgtggccctctcggcgtgatccccggcggcccccgtagctctcacccggtagaggccgtacgtgctctcggcgtgatcgaagggcacgaggcgctcgtcgcagaagcccagcgtccagcgcgctaagctagctggcccggcaggggcgacggcggcgggtagctcgcgggctagcatcgagacgaggctcccgcccgacaggccgagcgcgaaacgggcgcgggcccctgccaggcagcatgctgcgcgctgggccaccagctgcgctagcgccgcacccagctcctgggaactcgagaacaccgagatgaggcccggggccggcgcggccatggcgagggcggcggcggggaggaggaagcgctccctacggccgtcgctagtacgcctgcgcaagggccggccctgccgcttggtttcgagtactttgggtgattgtctttggcacatgcgcagtgaggcaagtgaagcaccgcgaaggtcgggcagtcggtccggccctacccattgaatctttgcctgctgtgcctgagtcgaagtgagttcgggaagccagtgcccgaatgctcaaccttgctgtatcagggagggccggagaggggagctcaagaagaggacgtcctatcgaggtggcagggattttctgaaggagggcgtattttggtgagttttaaaattcctgcaccgccgggcgcggtggctgacgcctgtaa

SEQ ID NO: 21067 - DNA, 2300 bp, Homo sapien
aacagcctccggccagcagccctacccggggctcaacacacaggctgtggctctggacatccggatattaaaaggagcgttgctggaagtctgcactgtctcgcggtgtttgatggcagcaggcctgggggcgccctggcctgggttctgatccatagccctcatctgtggggaggaaggcggggcctgcttccctggggcatagccaccatggatgaatttcctaagacaacaggctgggcacagtggctcacgcctgtcatcccagcacttcgggaggatgaggtgggcaaatcacttgaggtcaggagttcgagactagcctggccaacatagtgaaatctcttctctactaaaaatacaaaaattagctgggcgcggtggctcacacctgtaatcccagcactttgggaggccgaggctggtggatcacgaggtcgggagttcgagaccatcctggctaacacagtgaaaccccgtctctactaaaaatacaaaaaaaaattagctgggcataggtggtgcacgcctgtagtcccagctacttgggaggctgaggcaggagaatggcataaaacccaggaggcgaagcttgcagtgagctgagatcgcaccactgcactccaacctgggagatacagcgagactccatctcgaaaaaaaaaaaaaatacaaaaattagccgggcgtagtggtgtgcacctgtaatcccagctacttgggaggctgaggcacaacaattgcttgaaccagggaggcggagcttgcagtgagctgagatcgcgccactgcactccaccctgtgtgacagagcgagactcggtctcaagaaaaaaaaaagctgggcacggtggcttacgcctgtaatctcagcactttggaaggctgaggtgggcgggtcacccgaggtcaggagtttgaaaccagcctgatcaatatggcaaaaccctatctctactgaaaatacaaaaattagctgggtgtggtggcatgcgcctgtaatcccagctacttgggaggctgaggcaggagaattgcttgaacccaggaggcggaggttgcagtgagccaagactgcgccactgcactccagcctgggcaacaagagcgaaactccgtcttaaaatgaaacaaaacaaaacaaaaaaacaaatgtattctgtcttagctatagagatcagaagtccaaggtcaaggtggcggcagggctggttccctctggaggctctgaggcagaacccatcccaggcctctcctgtccttggcattccttagcttgtggccatatcactccagtctctccttgtcttcacttggacttctttctcttgtgtgttctcgcctcctatttatttttttgatacagggtctcgctctgtcacccagactggagtgcagtggtgcaatcacagctcactgcagcctccatctcctgggctaaagcgatcctctcacctcagcctcccaagtagctggtgctacagatatgcaccaccacgcctgcctacttgtacaaattttttgcggagacggggtcttggtatgttgcccaggttggtctccaacccctgagatcaagcgatcctccagcctcagcctcccaaagtgttgggattacaggcatgagccactgtgcccagcattcttttcttataaggacacctgtcattggatttaggatcgccttgcacccagggtggtttcatctcaagataccaaatgagtattccaaataagttccaaataaatgcttatttggaataagtattccgaataaggtcacatgctgagtttcctgggtcaggacgtagacatgtcctttgggggacataagtcaaccctctgctgagctccagctgcactgacagggcgaagcactgcattcagccatgctgcggacctgctcagagccttgaaagcaccagagagtctagtctccatgtgctgggctcctgcacattttcccagaatgcatctgctcatggcccacccttcagctttctctaggccccagggacgacagtgtgggaggctggtgggtgcatgggggctgcccagccacgtgcaagtttctgtggggggatccagaggaggcacccggctgagcaggagatgggaattgaaacctgcgcagaggcggctgtgcagggtgagagtggagccgaaaccacagaaagtgaagtttgcttcaacgtcttgtcccggcaggccactcagatgtgagagtgaggaagtgggatggggcctgaccggaaggaggttggtaaacagcaaagagagctgagcggaagctcagctgt

SEQ ID NO: 21068 - DNA, 2300 bp, Homo sapien
aagtgttcagtgtccttgagaggtcttcagggacccaccccactccccagccaacgctggatccagagctcagtgcttgacactcccctcatcagaaaacctgtgatggctccatttgatcacatttccgcttggagtgtagactgcatgccctccctccctccgtccctcccttcattcattcattcattcattcattcattcatgcacacgtttattcatgcattcattcagcaaacatcgagggctgctctgtgccaggcacaaaacaggtgaaggggtggagacgcccaactaaccaaaccaggtcaaatgctgggacataaaggtcgcgcccaaccagtccaggggcacagggacggctctccaaggggctggtatctggtcttttcacctgaggggtgaagcttgggcgaccacgtgcaggaggcgggagcaagagttctctaggcactggacaagaccgcgggggtcagagggacatgggggcttcgggagctgcagggggctgagtggagccagagggctcttggagcgatgaggctgggccctcagtggtgctttcccaaagggcaatgggagagcttcgggaggtcagcacggagagttttggggtgctaaagatggggtttgggcccaagaaaagggacaccttcgctgggtgacgtggctcacacctgtaatcccagcactttgggaggctgaggcgagaggatcacctgaggtcaggagtttgaggccagcctggccaacacagggaaaccccatctctactaaacaaaacaaaacaaaattagccagaaatcgcttgaacccaggaggcgaaggtggcagtgagccaagatcatgccactgcactccagcctgggcaacagagtgagacaccgtttaaaaaaaaaagaacactttaggaggtcaaggagggtggatcacgaggtcaggagtttgagacaagcctggccaacataatgaaaccccgtctctactgaaaatacaaaaaattagccaggtgtggtggcgggcgcctgtaatcccagctactcgggaggctgaggctggagaatcacttgaacccgggaggtggaggttgcagtgagccaagatagtgccattgcactccagtctgggcgacagtgcgagagtctgtcccaaagaaaaaaaaaaggacacctttaagagacacttaaaacgtgaaatatgccaggtgtggtggctcatgcctgtaatcctaacattttgggaggccgaggtgggcggatcacttgagtccagaagtttgagaccagcctgggcaacataggaagaccccccgtgtctacaaaaaatacaaaaattagccaggcatggtggtggcgtgtgcctgtgggcccagctactctggaggctgaagtgagagggtcacttgagcacaggagttccaggctgcagtgagccatgatcgtgccactgcactccagcctgagcaacagagcaagaccctgtctctaaaaaaaaaaaaaggaaaaagaaatggagtccaggtgatggactggtgggagggacagtgttgggggcctgaagaaggaatcaaggatgaagcttcagtgcccccaagtctctctgctcacccctgccaggccacccatcctctaagaccttggcatctgcccccctgccccagcactgacctcagggacagtctgggagtgcctgtccagctctgtctccccagcctggggactcctaggagctgggccagggctgtatcctctctggggtccagcctcaccgggcacagggtaggcacagtgctggtgggggggtgtggcaccaggaactagatgccgcatccctgcccatccccctgttccagcccccatacacaacgactgctggccggtcctgccagatgtctgccctgccaccctcctccaagacgagctatgattttctttctcccacaccccacaacctaaccccggggctgtccccgcagcctctacagaaaccactggctctgggcaacacgggccccaggggagtggggaggacgcaggtgcagcgtggggtggggcaggggcggggcctctgaacccactgtgaccaagcctctcacccgccatccaggtgcccctgagccgaggaacgcaggcggtggtcgtggggaagggaagaggagccccgggagacgacagcagcatgggtgggcggccttcgagccctctggacaagcagcagcggcagcacctaaggggtgagcagccggggaggggacagggtgggagtccaggtgggtgggggctccagccattgggtccaca

SEQ ID NO: 21069 - DNA, 2300 bp, Homo sapien
ggagctcagcctgagggatgggggttagagcaggcttcccagatgaggggaagctggggtctgtaaaagatgaaggactagccgctgggcgcggtggctcacacctgtaatcccagcactttgggaggccgaggcgggaggatcacgaggtcaggagattgagaccatcctcgctaacacggtgaaaccccatctctactaaaaatacaaaaaattagccgagcgtggtggcaggcgcctgtagtcccagctactcgggaggctgaggcaggagaatggcatgaacccaggaggtggagcttgcagtaagccgagatggtgccactgcactccagcctgggcaacagagtgagactctgtcttaaaaaaaaaaaaaaaaaaagatgaggggccagccagatgaagaaggggaataggtcaggcacagtggcgtggtggcatgagcttgtggtctcagctactcaggaggcttaggtgggaggatcacttgagcccaggacttggaggctgcagtaagcaatgatcatgctaccgcacttcagcctgagcaacagagagaccccctgagaaagagagagaaaagaaaagaaaagaggagagaagagaacagaagaaagaaaagaaggaaaaagaaaggaaagaaaaagaaaagaaaggagaaagaaagaagaaagaaagcaagaaagaaagaaagagaaagaaagaaagagagggagggagggaaaggaaggaagaaagggaggaagggaaagagagaaagaaaaaagtaggggagcagcaggactgacacacacagttgggcaggttgttgactgcacaaacgatgcaactagaggaacagctagtggctgcagtatgtatggcctgaactgctggtcacggggctgtggctgccagtagagggttccttctaagttgaataaacatgatggtcttgggggactgtgttccctgtggagggcattgcctatgcaaagttccagagatgggtgagacttgggtgttggggacctggccaggcggagggcttcctccccgggccatcgggagccaggcaggggagctaccagcaggcactgaggagcagcccctctcagtcctgcagcgaagccaggcccctgctgcccgggccttcctggacgccgtccgactctaccggcagcaccaaggccactttggcgacgacgacgtgaccctaggctcagacgccgaggttagtgccccgcgaggccgcacccgggacccccaggaccctcccggccgaccgcggcgcccatggccccctctcctgcaggtgctgaccgcggtgctgatgcgggagcaacttcccgcgctgcgagcccagacccttcctggcctgcggggggcaggccgcgcccgcgcctgggcctggaccgaggtatgcacggcgtccggatccgggatagggggcgggatgcgggcgttcgggttcccctcccacgactgtcgcctaaaccctctcccgatctctctgacccccatccccgccccgtgtctcggctttgtcccccctcgaccggtctgggcagcttctagacgccgttcacgcagctgtcctggccggggcctccgccgggctctgcgccttccagcccgaaaaggacgagctgcttgcgtcgctggagaagacgatccgcccggacgtggaccagctgctgcggcagcgggcgcgtgtggcggggcggctgaggagtgaggccctggggcggagcctgggctgggaggggcgaggcgatgctggggaaaaaggggcgtgacctaagcgaagaatgggcttgaagttatgtaaaatgggggcgtggtcagagaggggcggggccaagcataggatgtgcaagggaacgggtggggaaggggcggggccaaagcgaggcggtgggcgtggtcttgtggtcgaggcactgggggcggggcctagagtctgtccggaggaaaccaggtcctaagggggctgcttggatacaaaaagggcggggcctcagcgggggataggcgtggccttgaggctgaggctcgaggagttgaggcccagagccgggccaatgcgggtgggcgggcctgggaagtagaacagcggaggaggggcgggggtaaaggctgatacatgggcagcggtgggccaaggtggcccctacaaagacccaggtgggaatcctgactgggcccgcccctccgaggctcagttttctcatcattacaatgggtagaagagggcgctcagcgtccctgctcgcgtccccctcgcgagggcccctgcacatccccatctgtgaggcacc

SEQ ID NO: 21070 - DNA, 2300 bp, Homo sapien
actttcacactccctggagaccgtttcctcccattctgtctggagttttcggcctaccccaagacaatgagatattcctgacctttccacctatttccctccaaccccaccttccgaaatacatttgctcaatacatttgcacttcataggcttctttagctgtcttccttttaccccggacgggatgtagatgttaattctggaacaattgcagctacaagaatttgtcatcctgccccttttgagaaaaacattgtttgcccttgggtctaaatccttccagatgggatgggatgtatcttgtcacctcctttttcttacttaatatgaaaagacctttcctcatcaagtccacagagtgtaaatttgtttttacctttttttttttttttttgagacggtgtctcactctgtcacccaggctggaatgcagtggtgcgattttggctcactgcaacctccacctcctgggttcaagtgattctcctgcctcggcctccgtagtagctgggattacaggcgaagcgccaccatgaccggctaattttttgtgtttttagaagagatgggggcttcaccatattgaccaagctggtctcgaactcctgacctcaagtgatccgcctgcctcagcctcccaaaatgctgggattacaggcgtgagccactgcacctggcctgtatcattcttaaaaattaagttttagcggggcatgatggctcactggtaatcccagcagtttgggaggctgaagggggaggattacttgagaccaggagtttgagaacagccggggcaacatagcgagactccatctctacaaaaaatttaaaaattagctgggcgtggttgagtgcacttgtagtcccagctacttgggaggctgaggcaggaggatcagttgagcccaggaggttgaggctgcagtgagccatgatcatgtgatcatgccactgcactctagcctgagccacagagtaagaccctctctgtgaaaataataataagctgggcgcggtggctcacgcctgtaatcccagcactttgggaggctgaggtgggcggatcaggaggtcaggagttcgagaccagcctggccaatatggtgaaaccccatctctactataaacaaaaattagccgggcgtggtggcgcgtgcctgtagtcccagctactcaggaggctgaagcaggagaatcgcttgaacccgggaggcggaggttgcagtgagccgagatcgcgccactgtactctagccggggcaatggagtgagacgctgtctcaaaaaaaaaaaaaaagaaaataataataataataataataatgttcagatgtattttttaaagtttttattgtttttaaaaatagaggcacggtcttgctatgttgcaccactgcactccagcccgggcaacaaagccagactccgtctcaaaaaaaaaaaaaaaaaagtgtgatactaagtcaatcaatttgaaaatgcggctctagagtattggaaaacaatcccttgacagcgtttccatgaaaacatggcccttgtctctggaagagcttgtgcccagaacggtccattatcatgccctggctctattttcacgccaaccctatagggtctctatgatctcattttatagatggacagactgaggctcacatatagcaagcccaaggcggggactgaatgtgacgccaggtctgtggacgtcatgacctttattctccacaaccctcaatgacatccctgtgagatccaaaaccaggatggcaaaacccacgttgcagcagaggaaactgaggctaaggtctcttgggtcccaaaccaggtcctaagtagccaagtccgcctggtggcacagcccgggttttatacatggggaaattgggcggcgcatctggcggaggtctcagtggtaggaggcgcctggaggaagcgcgggttcctaaccctaacgctacccctaacatcccttccacgcgctccgagcgctatgtgcctttaagatcggtgcgggggcggggcgtcctgggtagggctgcaggtgacgtcactccgggccttgggactcggagagcgtctggaggcggggcctggacttcacgcccggcgcgctcctcccctttaaggcgcgcggccgggcggggcccctatgacccctttaaggcgcggccagagtcctcccgcagaaaaacgacttaaaggagacgcgtggcgcgatggcggcggccccacgcgcgggccggcggcgcgggcagccgctcctggcgctgctgcttctgctgctggcgccactgcc

SEQ ID NO: 21071 - DNA, 2300 bp, Homo sapien
atttttagtagagatggggtttcgccatgttggccaggctggtctcaaactcctgacctcaggtgatacacccgcctcggcctctcaaagtgctgggatgacaggcgtgagccaccgtgcctggcctgatctatacattacaaaaattgccgtgtgcggtggctcattcctgtcatcccagcactttgggaggctgaggcaggtggatcacctgaggtcaggagttcgagagcagcctggccaacatggcgaaaccccatctctactaaaaatgcaaaaattagctgggcatggtggtgggcacctgtaatcccagctactcgggaggctgaggcaggagaattgcttggacctggtaggcggagattgcagtgaaccaagattgtgccactgcactctagcctgggtgacagagcaagactctgtctcaaaagaaaaaaaaaattaagtgacacatatttgttagtgaatgtggtttgcaagatcttagatgctcagtaataaaacagccaatcactaatgggtctttccaaaatcagcttgtttaatccttccacttcccagtaaactgggtcctgttcccacccccatgttacagatgaggaaactgacatggaaagggagaaatgggccgggcgcggtggctcacgcttgttaagtccagcactttgggaggccaaggtgggcggatcacgaggtcaggagatcgagaccagcctggccaacatggtgaaaccccgtctctactaaaaatacaaaaaaattagccgggtgtggtggcgggcgcctgtagtcccagctacttgggaggctgagacaggagaaggcgtgaacccgggaggcggagcttgcagtgagccgagatcgcgccactgcactccagcctgggcaacagagcgagactctgtctcaaaaaaaaacaaaggaaagggagaagtgtcctgtccagggatacatagctggtgggaggccagttggggatggtggtccttgacttgcctcactgctgcctggtcctgcctcagtctccccaagtacgctgcctgtcccctctccctgcagggtggctacggaccacaacatggataacacgtcaactgtgctgcgggagtggctggtggccgtgaagagtttgtaccattccgtggagtggcggccagcagaggagcccaggtgagcatctttcccctgctcctagtctgattgggctttgcctctgctcacacaccctctatggctccccattgccccagaacaattacaggccctcagtccctgcctccagcccagccaggcagcattaagctactctgagcctccctcagctttacaaataggccataatcctcttctcagacctttgcccaagccgttccctgtacctagaattctttcactccctttttcttctggggacgcccactgctttgttccctggctcactgactcagtcttggtcccagcactggctttgctgtttatctactccctaaagccctgggcagcatggactccctgcccccacccagttcctttctgggtttttgttttttttttgagacagggtctcactccctcacccaggctggagtgcagtggagtgaacacagcttactgcagcctttaactcctgggctcaagccatcctcccgcctcagcctcctgagtagctgggactacaggcacatgtaaccatgcctagctaatgtttttgtattttttgtagagatagggtctcactgtgttgcccaggctggtctcaaagtgctggcctcaagcgatcctcccacctctgcctcccaaagtgctgggatcgcaggcgtgggccactgcactggaccccactgagcttccttccttccttccctccagtgtgcctcgggctttcttccctccaggcctttgcacaggctgtacctccggccaggaacattctccccacttctctttcctcgtcgtttactttttcccatccctcagatcagcttacacgtcccctcctccaggaagctctctctgagtaccccgaaggcagctcaggccctcgctgggctttgatagtgccttgtgatgtccacatcacagctgcctccccataggtcctacccggacgaggaaggcccgaaacactggtctgactcacgctacgagcatgtcatgaagttgcgccaggcagccctgaaatcagctcgagacatgtgggctgattacatcctggtaagtttctcagccggccggatatggatcacaggcaggtctgggtatccccagggaaggcggagcagcaggatgccaggacc

SEQ ID NO: 21072 - DNA, 2300 bp, Homo sapien
cagtggctcagacctgtaatctcagaactattgtaggccatggggaggatcgctttgagcccaggagttcaaaaccaccctaggcaatgtagagggatcctatctctacaaacataaaaataaaaatgaaaacattatctaggcatggtgacgtgtgcctgtacgctcagctacttgagaggctgagatgagaggatcacttgagcccagaaactccaggctgcagtgggctacgattacaccattgcacttcagcctgagtgacacagcaagatgctatccctttaaaaaataaaaaatgaagaaaaagtaaaatagtaggccaggcatggtggctcatgcctgtaatcccagcactttgagaggccgaggtggacgaatcacatgaggtcaggagtttaaaaccagcctggccaacatgatggtaccctgtctctattaaaaatacaaaaagttacccgggtgtgatggtgcacggctgtagtcgcagctactcgggaggctgagacaggagaatcgcttgaacccaggaggcggaggttgcagcgagctgagaccataccactgcactccagcctgggtgacagagcgagactccgtctcaaaaaaaaaaaggttttgctaccttcttgctcattggttgttcatttatttctcagggctatctcagtgcctagaattttctttgaaggaactgaagacctttgctttatttccatgatccaggggatcctgcaggcccccaaaacggggtccctgcttcatttcatccggtgtagggggtgcttccagaggtctttgccagacccccagggcactggcctttgccccagctgttctgaatggtagcctgacctggcagcccatgctgatgctttgtggggtgttctgcagtttgtagatgcggacaacctgatcctcaaccctgacacactgagcctgctcatcgctgagaacaagacggtggtcgcccccatgctggattcccgggctgcgtactccaacttctggtgtggaatgacttcccaggtagagtgagggcctggggactgtggggactgggctgagcaggggggtgccgtggctagagtgtaacttactgtcacacaacctcgtggtgtgtgttttacaaaaatcatcatggaagctgggcacggtggctcacacctgtaaccccagcactttgggagactgcggcaggcgggttgcctgagctcaggagtttgagaccatcctgggcaacatggtgaaaccccatctctactaaaaaaaaaaaaaattacagaaattagccgggtatggtggcacatgcctgtcctcccagctgctcgggaggctgaagcatgagaatcacttgaacccaggaggcggaagttgcagtgagccgagatcacgccactgcactccagcctgggtgacggagtgagacttggtctcaaaaacaaaacaaaacaaaaactcattatggtaatctttaaacagccctctgaggccagacaggagggaagaatagagggtccttgattgtcccccaccatgctattccagaggtggaaacagaaacacagagaggaagtgacttgcctaaagtcacacagctagcaagtggtggtgtcaggatgggacttcaggcatggcttgatccaggtgtttggataactgtctttctccatcctttgggtgggttcattctcagacagcttgagagtgatcccagcagcgtctagccatcatccattctgattgggccattgctagtctcctctccacactacctctgaactcattactgaagctgggaaaatacaaggctctttcttattggccatgcctggccacaggtcccacactgggcttgagtctggggtcctgggaccacaggcgcacactgctgtgcctggctgtctgtctggtcctgtttcatgccgcccactatcacgggtctccatcctcacctttcaagacccctacgcggaactctcgctctctccccacagggctactacaagcgcacacctgcctacatccctatccgcaagcgagaccgccggggctgctttgcagttcccatggtgcactcgaccttcctgatcgacctgcggaaggcggcgtccaggaacctggccttctacccacctcaccctgactacacctggtcctttgacgacatcatcgtctttgccttctcctgcaagcaggcaggtacgtacatgaggggtctgccatcgcaggggcatctgcctggttctttgggttttgcactaagccagttcagaacacactgaagattcacagaaccc

SEQ ID NO: 21073 - DNA, 2300 bp, Homo sapien
cctgggttcacgccattctcctgcctcagcctcccgagtagctgggactacaggcgcctgctaccacatccggctaattttttgtatttttattggagatggggtttcactgtgttaacctggatggcctcgatctcctgaccttgtgagccacctgcctcggcctcccaaagtgctgggattacaggcatgagccactgcgcccagctagttttttgtatttttagtggggacagggtttcagtatgttggccaggctggtctcgaactcctgacctcatgatctgcccacctcagcctcccaaagtgctgggattacaggcatgaaccactgtgcccggccttcttttttgctttttttggagatggagtctctgtcacccaggctggagtgcagtgtcaccatcatagctcgctgcagccttgaactcctgggcaatccttctgcctcagcctcccaaggagctacagatttccccttttaaaagcacacaagccatgtggattagggcccaccctaatgacctcattttaactcgatgacctctgtacacaaccctgtgtccaaataggatcatatcctggggtactggtggttggcactggggagacacagttcaccccatgacatagtgcatgatctcatgacatctctttgtgaaacctctcagtggcttattggcccattttatagatgaggaaagctgaggcccaggccaatcaagaatatacagcatgccatcatttcttggttcattctacaagcaattactgagtgcctgctgtgtgccaagcccctgtgttgggcactaggggcccagtgtgagcagacatacctggtgtccttcccaaagggctcacaacagacaggcacagggccagggggttagggcagcaaggatgcgagctttggtggtgcaagtccaggtgctgctggggcccagaggaggtgcctggctcagcctagggaggtgggagtggggagggtgacccccatgcccagggcatcatagctgagaagtaacgttacagagcagggaaaggaagggtatttcaagcagggatccagcatgtgcaaaggccctgaggtaggaatgggggttctttgggttggcaggggcatagaggtggggctggggggtagagtgaagctggagcatggggcgtggccagggcttagaggcagggttgggggcggagtgaagctggagcccagggcgtggccacggctgagagtcggggctgggagcagggtgaagctggggcctggggtgtgaccaggacttagaagcggggctgggggtcggagcgaagctgttgcatggccagggtttaaaggtggggctgggggggtgcagggtgaagttggagcctggggcatggccagggcttagaggcaaggctgggggaggctgtggggtgaagctggggcctggggcgtggccagggctgagtggtgcggctggggggcaggttgaagctgtagcctggggtgtggccagggcttagaggcggggctaagggcagggtgaggctgggacctggggcgagtccagggttgagtagcggggccttgggcgcggtgaagctggggcctggggtgtggccagggctgagaggcaggactgggggcggggtgaagctggggcctggggtgtggccagggctttgggctgctgtgcagggttcaaatgacatgggaggggctcctagagggcagcgctgatgtgggcggagccaggtcgactttgtgggccgagccagtctgactgggagccatggagtgggtggggaaagcgtgttggagagaggctggaggctccttaccccagcgactcctcaacgtctgtgccccacagtgaagcacccgcccgcagagccctcccgcttcatctcggctcccaccaagacaccggacaagatgggcttcgacgaggtgagctgggccttccctggaggcggggcgggggctggagggcccttgtttgcaggggctgatctggctggggactctccgggctgcaggtcttcatgatcaacctgaggcggcggcaggaccggcgggagcgcatgctgcgggcgctgcaggcacaggagatcgagtgccggctggtggaggccgtggacggcaagtgagtccgaggcctgggggtgggggggcgggtccgcacgtggatgtgggtgtagacctcgctggtagacggcaagtgattcagatgggggcgggcgtggtgtccaaacagatgtagacctcgtcagtgggcgtcctgaaggggaagtgaatgggaccctggggaagg

SEQ ID NO: 21074 - DNA, 2300 bp, Homo sapien
tgtgtccaaataggatcatatcctggggtactggtggttggcactggggagacacagttcaccccatgacatagtgcatgatctcatgacatctctttgtgaaacctctcagtggcttattggcccattttatagatgaggaaagctgaggcccaggccaatcaagaatatacagcatgccatcatttcttggttcattctacaagcaattactgagtgcctgctgtgtgccaagcccctgtgttgggcactaggggcccagtgtgagcagacatacctggtgtccttcccaaagggctcacaacagacaggcacagggccagggggttagggcagcaaggatgcgagctttggtggtgcaagtccaggtgctgctggggcccagaggaggtgcctggctcagcctagggaggtgggagtggggagggtgacccccatgcccagggcatcatagctgagaagtaacgttacagagcagggaaaggaagggtatttcaagcagggatccagcatgtgcaaaggccctgaggtaggaatgggggttctttgggttggcaggggcatagaggtggggctggggggtagagtgaagctggagcatggggcgtggccagggcttagaggcagggttgggggcggagtgaagctggagcccagggcgtggccacggctgagagtcggggctgggagcagggtgaagctggggcctggggtgtgaccaggacttagaagcggggctgggggtcggagcgaagctgttgcatggccagggtttaaaggtggggctgggggggtgcagggtgaagttggagcctggggcatggccagggcttagaggcaaggctgggggaggctgtggggtgaagctggggcctggggcgtggccagggctgagtggtgcggctggggggcaggttgaagctgtagcctggggtgtggccagggcttagaggcggggctaagggcagggtgaggctgggacctggggcgagtccagggttgagtagcggggccttgggcgcggtgaagctggggcctggggtgtggccagggctgagaggcaggactgggggcggggtgaagctggggcctggggtgtggccagggctttgggctgctgtgcagggttcaaatgacatgggaggggctcctagagggcagcgctgatgtgggcggagccaggtcgactttgtgggccgagccagtctgactgggagccatggagtgggtggggaaagcgtgttggagagaggctggaggctccttaccccagcgactcctcaacgtctgtgccccacagtgaagcacccgcccgcagagccctcccgcttcatctcggctcccaccaagacaccggacaagatgggcttcgacgaggtgagctgggccttccctggaggcggggcgggggctggagggcccttgtttgcaggggctgatctggctggggactctccgggctgcaggtcttcatgatcaacctgaggcggcggcaggaccggcgggagcgcatgctgcgggcgctgcaggcacaggagatcgagtgccggctggtggaggccgtggacggcaagtgagtccgaggcctgggggtgggggggcgggtccgcacgtggatgtgggtgtagacctcgctggtagacggcaagtgattcagatgggggcgggcgtggtgtccaaacagatgtagacctcgtcagtgggcgtcctgaaggggaagtgaatgggaccctggggaaggggcagatcctcacagttgtagaccatggaaggcaagtgagtcctgacccaggggaatgggtaggtttgcatgctgccagtgtagactggtggggactgtggaggggtaagtcagtcagaccccaggagaggaggagagcaggtttgcccgcgagtgtataccatgtgcaggtgagtgaggccccatgtgcccggaaggggtgccagtgctacaagaggtggaccagctgctcaacgccgcagggggtggtggaatggccggggatggcagaatggcaggcagggtgaaccttcttcgtgaccctctcctcctcctctccagagccatgaacaccagccaggtggaggcgctggggatccagatgctgcctggctaccgggacccctaccacggccggcccctcaccaagggtgagctgggctgcttcctgagccactacaacatctggaaggaggtgtgtcctgagtgatgggcggggccagagttatgactctagatctcatcggagatttggacgggaaaggggttgaaagagttccccaaagccccggctaggcat

SEQ ID NO: 21075 - DNA, 2300 bp, Homo sapien
aggtggaccagctgctcaacgccgcagggggtggtggaatggccggggatggcagaatggcaggcagggtgaaccttcttcgtgaccctctcctcctcctctccagagccatgaacaccagccaggtggaggcgctggggatccagatgctgcctggctaccgggacccctaccacggccggcccctcaccaagggtgagctgggctgcttcctgagccactacaacatctggaaggaggtgtgtcctgagtgatgggcggggccagagttatgactctagatctcatcggagatttggacgggaaaggggttgaaagagttccccaaagccccggctaggcatccagcctcagccatgggacccatggcctctctttagtgaatgatgcgccacaccagctgtatcacccccaggtgtacctgccatccttccattgcgcaaatgtggaaactgagcctgggggtaggggtgagcccttttgagcagcaggtggtgtctggggcctgggacctgtaaacaaatcctcattactcccagcctggtctctgtgcttgatgtttagtactagaagtcatggccacagagccactttaaaccagcacctgcccagtgctgctgggggcactcaccagcccaggcatcctcatccaccctcagagggagaggctgtgattggaggagggtgtctgactaggcttcgaacttgggccatcagggccgggcatggtggcgcacacctgtggtcccaactatttgggaggctaaagtgggagagtggcttgagcccaggagttaaggctgcagtcagccaagatcgtgccactgcactgcagactggacagcagagcaaaaccgtgtctcagaaaaaagaaaaatggctgggcgtggtggctcatgcctgtaatctcagcactttgggaggccgaggcaggcggatcaccttaggtcaggagttcaagaccagcctggccaacatggtgaaacctagactctactaaaaatacaaaaattatctgggtgtggtggtgggcacctgtaatccctctacttgggagactgaggcaggagaatcacttgaacccaggaggcagaggttgcagtgggctgaaatcatgccattgcactccagcctgggcgacaagagtgacactccatctcaaaaaaagaaaaataaaatccgggcgtagtggcacatgcctgtaatcccagctgctcaggaggctgaggcagaattacttgaacctgggaggcggaggttgcagttgagatcgttccactgcactccagcctgggcgacagggcgagactccgtctcaaaaaaaaaaaaaaagaaaaagaaaagaaaaacttgttatcgaatgtgaagccaaatgggggtgtgcggctgcaaggcgggaggtgcatgaggcgtgggcatttgaggggctgggaggcctttctcttctgagatccattatggacggcagagggcagaggtttggatgtccagatgtccctggagctaggagaggcagggagatgcactggcttctctacgggtctttcaaaccttctcaaagcaaagctctgtgctttagggtcaggcctggccttggcctccctgtgatgtggcggggcttcctccctcaggtggtggaccgggggctgcagaaatcgcttgtgtttgaggatgacctgcgttttgagatcttcttcaagagacgtctgatgaacctcatgcgggatgtggagcgggagggcctggactgggacctcatgtgagtgggggtctgaggatggggtgaagctggggcctggggcaaggccaggacttagaggtgggggtgggggcagggtggagctgggacctggggatgggtcatggcttagaggcggggcttgaaggtggggtggaactggagcctaggtacatggccagggcttagaggtggggctgggaggcggagtggagctgaatcctacgggcgtggccacagcgctgcagctgagcctagagcctgtatgtctgggtgtggtcagggtggcaggcgtggccaacccttggaagcgtagcaggagggctcacgtggttcctgggcctgaaggcactgtcagggctgtagcctatagggaagggcgttggaaggatcacccagaactcaagggacctggccggaagcctgcaggcttggtcaaggcttagagacttgactgaggcctgtggaggtggatgtggctaaaatttgaccgggcagcctgtgggcgtggctgaagagcatgggggtgtggtcagagctggaggtgtggccgaagagtgtg

SEQ ID NO: 21076 - DNA, 2300 bp, Homo sapien
gtcaggagttcgagaccagcctggccaacatggtgaaagcttgtttctactaaaaatacaaaaattagccaggcgttgtggtgggcacctgtaatcccagctacttggggagctgaggcaggagaattgcttaaacctgggaggcagaggttgcaatgagccaagaaaggtttcatctatattttattttatttttgatacagagtctcgctctgtcacccaggctggattgcagtggcgtgatctcgactcactgcaacctctgcctcctggttcaagcaattatcctgcttcaacctcctgagtagctgggactacaggcatgcactaccatgcctggctaatttttgtatttttagtagagacggggtttcaccatgttggtcaggctggtctcgaactcctaacctcaggtgatccgcccgcctcggcctcccaaagtgttgggattattacaggcgtaagccaccactcctggcctcatttatattttagtatattatttagatttgccttaattcacgttttcattcaaggtgggcaattacatcatctccccatttttcagatgaggagggtgaggccgggtgtctccatttcttaggactgctgtcacaaagtaccacagacgggtagcttaaaaccacagcaatgtattctctcacagttctggaggccagaagtctgaaatcaaggcattggtagagccatgctccctctgaaatctgtagaagagaattcctcccctgcctcttctagcttctagtttgcttgaattccttggcccccgagtattggtttgtagatacgtcgctttctgcctctgctgtcacagagccaccttctccccatgtatctcttcttctaaggacaccagtcatattagattaagtgtctaccctactccagtatgaccttatcttaactaattacatctgtgacaaccccgtttccaagtaaggtcaccttctgaggtagtgggggttagggcatcagcgtatcttttttttgagggacccaattcaaccccttaacacctgggggaggttgaatgttctccccagggctctatgtgaggaatagggacatctgggccctcagtgtccctctgtgtctttcagcccagggggcggtctcatcatcatcgacagcatgccagacatccgcaagaggaaacctatcccactcgtgagcgacttggtaagcaccctcgccctttactccctgagcagagcaggcctgctataagcagtgcacaacctgtggaactgcccatggtcaacctggggttgggggccagctaggcattctctgagactaatgtagtctgatttctacccccatgtgctgcgtggacacttcaggccatggtgagtgatggcgacatgggcctcttgggatcttctccccaaactcccccactgggatcttctaacaggcccccaattcatggattatgggggaaccttgccatgtcccactgtgttggatgctgtgagtcaggggtgcggggctgctcactttccagggtcccttctaactcaaagcctctgtcacctcctaattctttgttgggtctggcccggatgctgtcggtgacctgtttccaacttgcggttgtggctccaaaatgtggctgctggccccatccgtggctgtgaactctcctggtggtgatctcatggatgtcaacccccccgactccctcttctgtgacctccccagtccctggtccagtccaggaaagcgggcatcacctcggccttggcctccagcacgttgaacaacgaggagctggtgcgtggggcacctctttttccccgggtcagggatggactgggctaggagcttctggaattgtccaagcctctgtgggtccccgggaagaggaagggtgtgtgtgtgacacagactggcagaaggcagcgtggattccgacagcgtggaggcaggggagggcctgggactttaccgcgctcagtgatggggcggaatggggcaggacagggacagcgccaggttaggcgcccccaaaccgcaccccatccctccctgcagaaaaaccacgtttacaagaagaccctgcaagccttaatctaccccatctcgtgcacgacgccacacaacttcgaagtgtggacggccaccacgcccacctactgctacgagtgcgaggggctgctgtggggcatcgcgaggcagggcatgcgctgcaccgagtgcggtgtcaagtgccacgagaagtgccaggacctgctcaacgccgactgcctgcagcgtgagcgcagggcctgagcgca

SEQ ID NO: 21077 - DNA, 2300 bp, Homo sapien
atctactcattgatgtttaataaaaatttaagaccaggcatggtggctcatgagcctgtaatcccaacattttgggaggctgagacgggaggatcacttgagcccaggagtttgagacagcctgtgcgacatggtgaaactctgtctctacaaaaaatacaaaaattagctgtgctgatttttttaaaaatttaaagcagtgacagatacaaacatggttactattaggcattaagattacaactggggccaggcgcggtggctcattcgtgtaatcccagcattttgggaggccacggtgggtggatcacttgaggtcaggagtttgagaccagcctggccaacatggtgaaaccccatctctacaaaaaatacaaaaaaattagctggatgtggtggcgagcgcctgtaatcccagctactcaggaggctgaggcaggaagatcacttggaggttgaggttgcagtgaactgagatggtgccactgcactccagcctgggccacagattgagactacacctccaaaaaaaaaaaaattacaactggtttcacatgttaactcatgtaatacctccagcaaccttgtgaggcaggacttgttatcatattcattctacaggtgcggaaactgaggcacgaggaggtcacaagacctgcccaaggccatgcttgtgatgagagacagagtttggttttgaacaatggcctcactcaactccatgcacattctgcatttatgaagctctttcatgtgggctgggggcaggagaccctgtggggctcagcctttcatgctagtttaggtgccagtgatacagcgagcaggttgcagggcaaggggcccacatggagctgcccagtttgatatgtggggagggggccaggcgcagtggctcaggtctgaatcccagcactttgggaggccgagatgggcggatcccctgaggtcaagtgttcaagaccaggctggccaacatggtgaaacctcgtctctactaaaaataaaaaaaataaaataaaaaaaaaaagctgggcatggtggcatgcgcctgtagtcccagctactcggggaggctgaggcaggagaatctcttgatcccaggaggcagaggttgcagtgagccaagattgcgtcactgcattccagcctgggctgcagagggagactccatctaaaaaaaagaaaagtggggaggagtggcagagtttcgttcgggtcagggcccaatcagaggaagggataggggctgggggagtccagagaggagaaacaaaggctcagcttggggcagtcagggaagccttcctggaggagaggatattcagacaagacattgatggatgaaaaggagttcagagtgtgggcaaggacccatgggctggatggcttagagacatagagagagacctagacaggatgcagtagagctgcaaaaagactttacagagagaggctaagagacacatgactgagagagcagtggacagagtcagaggaacagagacccagggagagaaagagaccaggcagtagagttagagagacagagacgtagagacagaggaagagagatactcagagaacaggaccatctgcccggtgctggtgccgggcgtacacacaagagcttgcatttgcctgtacttgcttgagtattgcagggaggcgtttgcccaggttaccagggcaggaatgtccatgcatgggtggcgggggcacgtgcaccatttcagtgcaggtgagggtctgcacaggaggaaacctgcttgggggccgccgtcgccccttgtccccctgcaacgaggaggtgtggggcgaggcgccccttcccggagccaggccctttaacgcccccccagcccgcagcgcccccgccccatcaggcgtccctgggctccgcctgcccgccccgcatcagcgccacgtcaggcgctgtccgcgcccccggtgctgaaccaagatggccggtggcggccgggccccggcgtgagccaagcgcgggctgcagccgggagatgccccagcccagcggccgctgagcccgacccgacagagccggcccggccgcctccggcccacctgcgagctcggagacatgtctctgctttgcgttggaggtaggaggcgaggctgggggtcgggggacccgtgtggacgcgggctggggtcggggtccgcgtggatgcggctcccagggggttcctggggggtgacccgagtccaggtggctggacttttgagaggggtagcccttgtcgacgcagctgggccccggagggggtgatccgtgtagacgc

SEQ ID NO: 21078 - DNA, 2300 bp, Homo sapien
ggcttccaaaagtttccagccttataggggagatagtgcccgacacagacactcccactactattactgctcacagcaataacagaagaaatcacaggcaggcgagacacagggaagggagccaagggggagggacaaggatagaggaaggatgccagaaccaaaaagagagagaggaagtggagtgcaagaatggtagacggcacgtggccagtggctgttacacactggccagggaggaagttgggctgaacaacctagataataaacggcagcgggaggctgattcgccttcccagatctttcccatttctgttctgcttttctttgcatactcccggagacagggagctcactcctgagaaaggaggttcaatgtttcctgggcatggaccactgtccagaagttccaagcaagatgatttgtcaagtagtagcccctatgggtcaaagggctaaagggggccaggcgcggcggctcacgcctgtaatcccagcactttgggaggccaaggcaggaggatcacttgaggtcaggagttcgagaccagcctggccaacatggtgaaaccccatctctgccgggcacggtggctcacgcctgtaatcccagcactttgggaggccgaggcaggcagatcacgaggtcaggagatcgagaccacggtgaaaccccgtctctactgaaaatacaaaaaattagctgggcacagtggcgggcgcctgtagtcccagctactcgggaggctgaggcaggagaatggcatgaacctgggaggtggagcttgcagtgagccgagatcgcgccactacccttcagcctgggcgacagagcgagactctgtctctaaaagaaaagaaaagaaaagaaaagaaaagaaaagaaaagaaaagaaaagaaaagaaacctcatctctactaaaatacaaaaattagcagggcatggtggcggacacctataatcccgctacttgggaggctgaggcaagggaatcgcttgaacccgggaggcagaggttgcagtgagctgagattgtgccattgcactccagcctgggcggcagaatgagactccatctcaagaaaaggaaaggagaggagaggagaggggagaggaggggaggggaggggagggagaggaagggaggggaggggaggagaggagaggagaggggagagaaggggaggggaggggagaagaggagaggaggggaggggaggagaggagaagagaggggaggaaaggaaagaaaagcctaaagaggattatctggggagagagaggtacccatgtgcgcaacgcaggcagtcccttgcacaggctggatctagagtaagacccacttgggttcaaacctgctctaccacttacaggcctggtgacttcatccctccaaatctcagtttcctcttctttcctctgaaagtgaccacagtaactgtgcctactcatctgtgcctacatacaagcacaaaactcatcgctttgtgcttgtatgtaatgagctaatgcaataaaatacctggcgcacaggaggtgcagaataagtgttgccctgttccaggcaggcccagagtgctccggttgtgtcccaaacacacatgtactttcttacctctaaaactttgcacctgctgtaaacttctgcctcaccagctcttgccccaccacccacaaggcaaactcctacacatcccttaaagccctacctacaagatagatttcttttctctgttcaagccctgacctagagagctgggagcatccataggcaccgggttctgatgcggcctactgtcatgtgatgtgagttcctggagggcaggagttctgacctacatgcagcaggcacgcaatcaaagcttgttcaatgaaaaaaaaaatgaatgaatggtcacttgggagaggcggctcccaagcggacacccaggagtcggccaacccctttaacgcccgcatcccctgctctccacgacctcaaagggcctgtaagtggtcgacaaaaaggggcggggatgcggtggttccgggcggggtcttcagcccttccggtgcggcccctttaagaggcggggcctgcggggcgggcgccgagaacgccggggcggcccgaagatggcggcggtggctggatctggggctgccgcggctccgagctcactgctcctcgtggtgggcagcgagttcgggagcccggggctcctcacctacgtcctggaggagctcgaaagaggtcgggctggcctgggggcccgcgggagcccgggaggcgggcccgttcgcgcgtctgggcccgggg

SEQ ID NO: 21079 - DNA, 2300 bp, Homo sapien
gccacttcccttctttatgccttgatttccccacctgaatggggcaatatccctgtgtggcaaaaagcgtgctaaggctgggtggggtggctctcgcctgtaatcccaacactttgggaggtcaaagtgggaggattttttgaggtcaggagttcaaaaccagctggggcaacatggtgaaaccctgtccctactgaaaatgcaaaaatgagctggacctggtggtgcacacctgtagtcccagctactcaggagcccgaggagggaggatcgcttttacccaggaggcagaggctgcagtgagctaagattgtgccactgcacttcagcctgggcaacagagcgagaccctgtctcaaaaaaataaacttaggcctgacatggtggctcacacctataatcccagcactttggaaggctgaggtgggtggatcacctgaggtcaggagttcgagaccagcctgaccagtatggtgacaccccatctctactaaaaatacaaaaattagctggttgtggtggcaagcgcctataaccccagctacttgggagactgaggttggagaattgcttgaactcaggaggcagaggttgcagtgagctgagatcgtgccactacacttcagcctgggcaatagagggagattccatctcaaaaaagagagagagagagagggagggagggagggagggggagagggagggagagagagagagaaaggaaagagaaagctaaatgtgataagggcgagagagagagaaagggaaaagaaggaaagaaaggaaagaaagttaaatgtgataagggctggcaacactggagggtctctgcctctcaagactcagccttgttcacagttcagtcctgcctcaggggccttggctggtgctgtaccctggtccgggttggccctcaccggcccccaccccggctctggctccttgccacccccctctcacagtactgatgtttaaaacacatacgggccctgggggacagagcagggtcaggatcccagaaacagccctacttcagccccggcccttatgctgccccacccctagctgagtcctgcctcaggacctttgctccggatgtaccctcgtccacgttcgccctcattggccctcctcgagctctggctctctgtctgaaaaataaatgtggccggatgggtgcagtgggtcaagtctgtaatcccagcactttgggaggccgaggcaggcggatcacctgaggtcaggagtttgagaccagcctgacccacatgttaaaaccccgtctctactaaaaattgaaaaaattaatggggcgtggtggcgtgtgcctgtaatcccagctactcgggaggctgaggcaggagaattgcttgaacccaggaggcggaggttgcagtgagcccaggttgcactgttgcacgccagcctgggcaacaagagcaaaactccgtctcaaaaaaaaagaaaagaaaaaggccgggcgcggtggctcacgcctgtaatcccagcactttgggaggccgaggcaggcggatcacgaggtcaggatatggagactatcctggcttacacggtgaaaccctgtctctactaaaaatacaaaaacttagccgggtgtggtggcgggcacctgtagtcctggctactcgggaggctgaggcaggagaatggcgtgaacccgggaggaggagcggagcttgcagtgagcagagattgcaccactgccctccagcctgggcgacagagcgagactccgtctcacaaaaaaaagaagaaaatggtggcatcactcccaggggtgacagctgcaaaccaggccctgcgcacgatggggccctctggttactgcctctcttaggccagctggggtggtttgagtttctctttcttgcctggtcctgacctgcagctctgccgtgcgcctgttaatctccatatgatccctgggtgggttcccagaggggttcatgttccctgagggtcacacggggaggcaggatttgactccgggacggcctgattcccccacaggccagcggagcctgcaccaccgtggagacaacctggagaccctggtcctcctgaacccatcagacaagtccctgtatgatgaggtagggaatggctgacgtcctggagggggcgggctgctgggacccgtgccttctctgtcttcctgtctcgtgtccttgtcttcatgctgccccagatcctctcaagacacccggcaccacacttcttcgcccacgaagccttccctgtggcttcagcctccgcttcttccctcctctggggtggga

SEQ ID NO: 21080 - DNA, 2300 bp, Homo sapien
gtgggttcccagaggggttcatgttccctgagggtcacacggggaggcaggatttgactccgggacggcctgattcccccacaggccagcggagcctgcaccaccgtggagacaacctggagaccctggtcctcctgaacccatcagacaagtccctgtatgatgaggtagggaatggctgacgtcctggagggggcgggctgctgggacccgtgccttctctgtcttcctgtctcgtgtccttgtcttcatgctgccccagatcctctcaagacacccggcaccacacttcttcgcccacgaagccttccctgtggcttcagcctccgcttcttccctcctctggggtgggagcagaaaagcctggactttgggagggaggggagggtaagcactcccagctcagggcccaggacagcgtgggtctggaggtgggaaggccagagcagacaggttttcctcctgtgggttccctccggctaggccccaggagttgtctgaatcgactcactaacattaaccagcttgtggccatctgtactctaccaattatacatccggaagatgaaccagacagagccctggggcatcccactacagaccttcttacaggttgattccttggatcaacttttcccttttgttcccttgaggggctctcagtctttaagagacagagtgagacacagacacccccagccctgtggcatcagggctgggctggagggagaggtggactagagagagcccagaaagggcaagtagtgccttcaggaggaagggacatcagagctgggctttgtaggatgaataggagtttgctagggttgctccagggcccagcaggagacctggagactgccttcgtagctagttgagcactgggctggtcgtggggtgaggacaggagaggggtggttatgtatcgactcgaggctaccccaaagaggactgctggatacgtcactgcacagaacgggtcctttagtgttcaccccctccctcagctccggaaccttctgttggaccctgcctctcacaagctactggtgttggctgggccctgcctggaggagacgggggagctgctgctacagacagggggcttctcgcctcaccacttcctccaggtcctgaaggacagagaggtaagccacccctttgccatcccctgcttccccagctctgaatcctgactggggtgtatcaggctgtgtggcaccagcgacctgctgttttccatggcctggtctccccatcctctgtaggatggcagtggtgacacatgcctcctggctgtctggggtcagtcccattgcccgcgaaagggtgtggtgtgagctgagtttgtaggtcagcagatgtcccaaagtcctgatgagggatggagccaaatgggtccttcctggtgcccgcagtctgggtaggacacatgggcaaaatggcaaacctcactttcacattgtagtggggcacttaaaaatggtgagaaaaggttcagtagacaggtggggcgtggagagtctccttggagggagctgtgccctgggaggagagaatggtgagtgtaaaggccctggggcagggaggcatttgaaggggagggagagacaggaggtgaggccagatcaaagagccttgtggcgctggagagggttgggttttggcgggagggccctgaggagcaggccctgggggaaaggatgagggtgtcctcgcccagttttcccaccgggctaggtgttgcctggctctaggtggtcccttaccactcctcctccatacagatccgggacatcctggccaccacgcccccacctgtgcagccgcccatactcaccatcacctgccccaccttcggtgactgggctcagctggcacccgctgtgcctggccttcagggggcgctccggctccagctgcggctgaaccccccggcgcagctgcccaactctgagggcctgtgcgaattcctggagtacgtggctgagtctctggagccaccgtcccccttcgagctgctggagcccccgacctccgggggcttcctcaggctgggccggccctgctgctacatcttccctggaggcctcggggatgccgccttcttcgccgtcaatggcttcactgtgctggtcaacggtggctcaaaccccaagtccagtttctggaagctggtgcggcacctggaccgcgtggatgccgtgctggtgacccaccctggcgccgacagcctccccggcctcaacagcctgctgcggcgcaaactggcggagcgctccgaggtggctgctggtggg

SEQ ID NO: 21081 - DNA, 2300 bp, Homo sapien
tgagctgagtttgtaggtcagcagatgtcccaaagtcctgatgagggatggagccaaatgggtccttcctggtgcccgcagtctgggtaggacacatgggcaaaatggcaaacctcactttcacattgtagtggggcacttaaaaatggtgagaaaaggttcagtagacaggtggggcgtggagagtctccttggagggagctgtgccctgggaggagagaatggtgagtgtaaaggccctggggcagggaggcatttgaaggggagggagagacaggaggtgaggccagatcaaagagccttgtggcgctggagagggttgggttttggcgggagggccctgaggagcaggccctgggggaaaggatgagggtgtcctcgcccagttttcccaccgggctaggtgttgcctggctctaggtggtcccttaccactcctcctccatacagatccgggacatcctggccaccacgcccccacctgtgcagccgcccatactcaccatcacctgccccaccttcggtgactgggctcagctggcacccgctgtgcctggccttcagggggcgctccggctccagctgcggctgaaccccccggcgcagctgcccaactctgagggcctgtgcgaattcctggagtacgtggctgagtctctggagccaccgtcccccttcgagctgctggagcccccgacctccgggggcttcctcaggctgggccggccctgctgctacatcttccctggaggcctcggggatgccgccttcttcgccgtcaatggcttcactgtgctggtcaacggtggctcaaaccccaagtccagtttctggaagctggtgcggcacctggaccgcgtggatgccgtgctggtgacccaccctggcgccgacagcctccccggcctcaacagcctgctgcggcgcaaactggcggagcgctccgaggtggctgctggtgggggctcctgggacgacaggctgcgcaggctcatctcccccaacctgggggtcgtgttcttcaacgcctgcgaggccgcgtcgcggctggcgcgcggcgaggatgaggcggagctggcgctgagcctcctggcgcagctgggcatcacgcctctgccactcagccgcggccccgtgccagccaaacccaccgtgctcttcgagaagatgggcgtgggccggctggacatgtatgtgctgcacccgccctccgccggcgccgagcgcacgctggcctctgtgtgcgccctgctggtgtggcaccccgccggccccggcgagaaggtggtgcgcgtgctgttccccggttgcaccccgcccgcctgcctcctggacggcctggtccgcctgcagcacttgaggttcctgcgagagcccgtggtgacgccccaggacctggaggggccggggcgagccgagagcaaagagagcgtgggctcccgggacagctcgaagagagagggcctcctggccacccaccctagacctggccaggagcgccctggggtggcccgcaaggagccagcacgggctgaggccccacgcaagactgagaaagaagccaagaccccccgggagttgaagaaagaccccaaaccgagtgtctcccggacccagccgcgggaggtgcgccgggcagcctcttctgtgcccaacctcaagaagacgaatgcccaggcggcacccaagccccgcaaagcgcccagcacgtcccactctggcttcccgccggtggcaaatggaccccgcagcccgcccagcctccgatgtggagaagccagcccccccagtgcagcctgcggctctccggcctcccagctggtggccacgcccagcctggagctggggccgatcccagccggggaggagaaggcactggagctgcctttggccgccagctcaatcccaaggccacgcacaccctcccctgagtcccaccggagccccgcagagggcagcgagcggctgtcgctgagcccactgcggggcggggaggccgggccagacgcctcacccacagtgaccacacccacggtgaccacgccctcactacccgcagaggtgggctccccgcactcgaccgaggtggacgagtccctgtcggtgtcctttgagcaggtgctgccgccatccgcccccaccagtgaggctgggctgagcctcccgctgcgtggcccccgggcgcggcgctcggcttccccacacgatgtggacctgtgcctggtgtcaccctgtgaatttgagcatcgcaaggcggtgccaatggcaccggcacctgcgtcccccggcagctcgaatga

SEQ ID NO: 21082 - DNA, 2300 bp, Homo sapien
gtggtgcgtgcctgtaatcccggctacttgggacactgaggtgggaggattgcttgagcccgggaggcagagcttgcagtgagctgagatggcactactgcacttcagcctaggtgacaagagcaagaccccgtctcaccaaataaataaattaataataataataataataggccgggtgcagtggcttacacctgtaatcccaacactttgggaggccgaggtgggcggatcatgaggtcaggagatcaagaccatcctggctaacacggtgaaaccccgtctctactaaaaatacaaaaaattagccgggtgtggtggcgggtgcctgtagtcccagctacttgggaggctgagaatggcgtgaacctgggaggcagagcttgcagtgagccaagatcatgccactgcactccagcctgggtgacagagcgagactctgtctcaaataataataataataataataataatagaccaggcacagtggctcatgactgttaatcccagcactttgggtggctgaggtgggaggattgctttagcccgggggtttgataccagcctgggcaacatagggacaccctgtctctattaaaaaaaaaaaattaaagaaaaaaataataggagaagctgggtgttgggtatacaggaactctctgtactctcttcacaataattctaaaactgctctaaaataaaaggtttatttggaaataaaaggaactggccagtttcagtgcttcacgcctgttgtcccagcattttggaaggctgaggtagggggatcgcttcagcctgggagtttgaggctgcagtgagctatgatcacaccactgcactccagcctgggcaactgagcaagacctcgtctctaaacaaagaaagaaagaaaagaaagaacaactacagttgccttggagaatagggattgtctagggctgggatggagggaacaagaaacacaaataagaaaccgagttggcatccaggctgaagacaattgggtcttcgctgggaccactatggggtgtaggaaaatggacaatttggaactgtttcagagacactgaatccacgggatgaaatgctggtaatgaagggaagagaagatccttagggcctcccaagcttctggtctgtgctcctgggctgccctgactgagcctgggaggctggtggaggggcaagaaaatcagccgggtgccctgtccctaagcagagggtaggatgggggactggcgggtgttgtgtaagtttatattttctttttctttgtttttgtttgtttgtttgtttgttttttaagacgaagtctcactcttgtcgcccaggctggagtgcagtgatgtgatctcggctcactgcaacctccgcctctcggattcaagtgattctcctgcctcggcctcccaagtagctgagattacaggcgcctgccaccatgcccagctaatttttgtatttttagtagagacagggtttcaccatgttggtcaggctggtctcgaactcctaacctcaagcgatcgagttcgaactccaaaaaagaactatcatatggcatatgaggggatgacctcctctgcaaggtgccggatcccggggctgccctaggccggctgcagacttgctgtgtggcctccaagcaagatcttgccctctctgagcctcagatttcccatttgtaaaataaagaccaataatgtccaggttacaggcttgtggggggtcatcaactgagccctgcctgttcgctcaataaacgttggtcgctccttactccttaccactgagtctcagggcgaaagagtggcgcctgtctctttaaattatgcaaatagactgcgggtggcgtaagggggggaacataaaaaggagcctagtcttcggctggaccaatcagcgcgctgagctggcggagctgggcgcctaaatggcccaatggggggccgcgcgggatcagagcccgccctgcctcctggcgccgtcgcgggggtggggactttctaggccacgccccgggggcggagcccgccggcagccgcgccgcagccgcggagggaggggcggggcgggctccggtgtcagcgaccaagccgcaggtggcggcgagcgcggggctcggcccgagctcaggaggtgagtgttgccccccggaaccccctgggataccctggcccgcgcagcctcccacgcgcaccgtgccctgcagccccggcggctgcggagggcaaaggcgcggcgggacgcgagggatggagagcagggggttggggctacgcggtgggcgccccggc

SEQ ID NO: 21083 - DNA, 2300 bp, Homo sapien
tgctctttaaatcgggtcacagctgaccaggaggagggaggggaagggggagtctatcaaaggcattgcctgaggagactccagcacctgggaaagttgggtacacagtaggcattcaatagatgtttgccaaatgaagtgaggaagagggaggggacccatggggaggacagaaaatttctgagaatccctggctcagattcccacttggtggcccgagtcactgtgtgacctggggcacgtgtctcagtttccccatcgtggtgctggttgagataagatactgccttgaggtgtggtgacgagaatcaagccagattgtctgtgatcgcagcccaggtggcgaggccaagaggggagacatgacatagtgggtcattgaaacagcatggtacctgcttgaaccaagtgactggtccgtgggaaggatgagaaaacccttgctactggccctactgtacatacactggggtccaagagagagggaaatgtgagatcctgtttcccaggatcctggaagccagatcgtggaaggtcaggagtggcccaaggtcatcaggcaagacgtcagcggctccggacacccagccaggcaccactcgattcccaggatgggagctcgggtcttgcctttgttgctgatgtggttcctgctttgttttatctgttctggggctgctcacatgtctcagccccaggtttgcaagacttggtgccgggaaggcaggatggggacctctgagtcagctggcaatgtgctgtgtaaccttgggcaagtctccggccatctctgggctttgtgctggtactgtacaggctgggagacttgggttctagcagggctgacttctccatcagacccaaaatgcccagtgtctcaggctcacagtgcttttaggggtccctaggttgatgttttcacttcttttaaaatccaaagggaaaaaaatgaactcttgggttgaaggaaacatttttgtgtataatattaatatatttgtctttatgtcaatgtagttgtaaaatacagttttgttttgttttgtttttgagacagagtctctctctgtcacccaggctggagtgcagtggctcgatctccgctcactgcaacctccatctcctgggttcaagcgattctcctgcctcagcctcccgagtagctgggattacaggcatatgccaccccacccagctaacttttgtatttttagtagagacggggttttaccatgttgcccaggctgttctcgcactcctgggctcaagcaatccacctgcctcggcctcccaaagtgctgggattccaggcatcagccaccacctaaaatataattttaaatttcttttgtagtgaaggaaagcgctcatgaatgcaaaaatgtcttcccctttcttttcttttttttttttttttgagatggagtctcgctctgtcgccaggctggagtgcagtggcgcaatctcggctcactgcaacctctggctcactgcaacctccacctcccgggttcaagtgattctcctgcctcagcctcctgagtagctgggactacaggcatgggccaccacgcccagctaatttttgtatttttagtagagacggggtttcaccgtgttggccaggatagtgtcaacctcttgacctcgtgatccacccaccttggcctctcaaagtgctgggattacaggcgtgagccaccgcgcctggccatgtcttcccctttctgagcgcatttccctctctgagcctcagtttgcccagtctgtgaagtgggtatcggcctacctcaggatggcaagatgttgaatgcctgggccagggttggtgctcagttatttcccaattgccatgattaatatttgttcggtaagaacagctccaggttcaggccggggggctccaggttcaagcgcctcttgtttactcacccatggcctgtgtggttccagggaggtcccatgggtgctgatcgggcgggggaggaaaggtggcggttggatggtaggcggggcggggtgagcttcctgtcccccccccaacccatgcacacaagcctccaacttggtgctgacggaagtggcctcgtggctgtctcctggcgcctgccccgtcagacaggggccccatcccactcgctaccctgtccggtgagtttgagccctggccagtagatacccatcatctcgccttggcccccctcaggaacagaggggaggcccccctgcccggagcctgggtttcaggagaagtagcaggtgtcacttcctgggctggccaaagcctgcatggggccacc

SEQ ID NO: 21084 - DNA, 2300 bp, Homo sapien
aacacctgttttcaactcctttgggtagatacctacaagggcaatggcgggatcatagggtcattctagtccggatttgaacccgggccctccagcaccagaattcactctattgcgtccagtgaaccccggaagcacccggtttaaaaggtctgggggctcagggtatctgtatgtcttacacatgggaaaagggtgggagggttcagtttccctgggtgagtggggcggggctagagctcacatcctcccagcagcctgaattctggagggccagtacctggtggaggaggggatgggcggggaccctgtcacaggatggtacttttttttttttttttttttgagatggagtctcactctgtcgcccaggctggagtgcagtggtgcgatcttggctcactgcaacctctgcctcccaggttcaagtgattctcctgcctcagcctcctgagtagctgggattacaggcgcccgccaccacacctggctaatatttttgttttttgtttttttttttttgagatggagtctcactctatctcccagactggagtgccgtggcatgatctctgctcactgcaacctccacctcctgggttcgagtgattctcctgcctcagcctcccgagtaggtgggattacaggcacccgccagtatgcctggctaatttttgtatgttttagtggagacggggtttcttcatgttggccaggctgatcgcaaagtcctgacctcaggtgatcccctcactttggcctttggaaggtgctgggattaccggcatgatctgcccacttcggccttccaaaatgctgagattatagggttgagccaccccgcccgcccaggatgggacttttggttccggctccttcccggccgacaaatcccttcctggggccatgacttggtgaacccagggacccaacagggtgagcatagactctgaatcaaagtccaaggatgtaccacagtaagaaagtgtgtgcatccagaaccgaggccagtagtgccacatttgacactatgacatttccggtaattgccctccatacagttttaatcatgcatttgctctgagggttcactccccagacctctcccatccagagtacccaggggctatttcttacattttacaggtgaggaaactgaggcacagacaggccacatatacacctcggcttcctcctcgggaagaaacagggatgaaggaggaaggaggggtttcctgaaaccatagcccagctcacacacctggacttccccaaccccagagctcccaacgctgggtccaggctagaatctcctagagattcagaggcagcacagggcagggttcgaatcctagccaacccaaccctaaaaatctacaaatctgaggccaggtgcagtggctcacatctataatccagcaccttggggatctgaggcaggaaggtcacttgaggcccacagttaagaccagcctgggcaacatatcaaaaccccatatctagaaaaatgacaaaaattagccaggcatgctggcgggtgcctgtagtcccagctactcgggaggctgaggtgggaggattgcttgaactggggaggtcgacattgtagcgagcggagatcacaccactgtactctagcctgggtgacaaagcgagatcctgtctctcaaaacaagaaaaaaagaaaaagaaaagactacaaatctgtctgattgttgacttccagaacccttccaaatgccagcaggtggcatctggatgtctgggggcacatcgtaggttttcgggtcctggaattattttcaatatagagatggaatctcactatgttgcccaggctggtctcaaactcctgggttccagcgatccgcccccctcggcctctggaagtacaggagtgagccactgcgccgaccccagcttcaggaatctttgaactccccgcagagagcagaggtgccgcaaggtttaacctgcctccctccctccttatcgccatgggcttatccaatcatttcttcacggaacacacgtgggccaacgctgaccgggctctgtgccaggaacccgcaaggcgctgcttgttcatctccagccacggggagctcattccctagcagcgggccagacccaaggtggggtcgtgagccccgagaggggcgagggtggcaagagcgggatggcagaggtggcagccgggaccggagaggggaagaggcatggccggggagggaggagccggcagagaacttcgcctgggccaccaggaaactcagccgagctgggaagagggggactgg

SEQ ID NO: 21085 - DNA, 2300 bp, Homo sapien
aggaggggatgggcggggaccctgtcacaggatggtacttttttttttttttttttttgagatggagtctcactctgtcgcccaggctggagtgcagtggtgcgatcttggctcactgcaacctctgcctcccaggttcaagtgattctcctgcctcagcctcctgagtagctgggattacaggcgcccgccaccacacctggctaatatttttgttttttgtttttttttttttgagatggagtctcactctatctcccagactggagtgccgtggcatgatctctgctcactgcaacctccacctcctgggttcgagtgattctcctgcctcagcctcccgagtaggtgggattacaggcacccgccagtatgcctggctaatttttgtatgttttagtggagacggggtttcttcatgttggccaggctgatcgcaaagtcctgacctcaggtgatcccctcactttggcctttggaaggtgctgggattaccggcatgatctgcccacttcggccttccaaaatgctgagattatagggttgagccaccccgcccgcccaggatgggacttttggttccggctccttcccggccgacaaatcccttcctggggccatgacttggtgaacccagggacccaacagggtgagcatagactctgaatcaaagtccaaggatgtaccacagtaagaaagtgtgtgcatccagaaccgaggccagtagtgccacatttgacactatgacatttccggtaattgccctccatacagttttaatcatgcatttgctctgagggttcactccccagacctctcccatccagagtacccaggggctatttcttacattttacaggtgaggaaactgaggcacagacaggccacatatacacctcggcttcctcctcgggaagaaacagggatgaaggaggaaggaggggtttcctgaaaccatagcccagctcacacacctggacttccccaaccccagagctcccaacgctgggtccaggctagaatctcctagagattcagaggcagcacagggcagggttcgaatcctagccaacccaaccctaaaaatctacaaatctgaggccaggtgcagtggctcacatctataatccagcaccttggggatctgaggcaggaaggtcacttgaggcccacagttaagaccagcctgggcaacatatcaaaaccccatatctagaaaaatgacaaaaattagccaggcatgctggcgggtgcctgtagtcccagctactcgggaggctgaggtgggaggattgcttgaactggggaggtcgacattgtagcgagcggagatcacaccactgtactctagcctgggtgacaaagcgagatcctgtctctcaaaacaagaaaaaaagaaaaagaaaagactacaaatctgtctgattgttgacttccagaacccttccaaatgccagcaggtggcatctggatgtctgggggcacatcgtaggttttcgggtcctggaattattttcaatatagagatggaatctcactatgttgcccaggctggtctcaaactcctgggttccagcgatccgcccccctcggcctctggaagtacaggagtgagccactgcgccgaccccagcttcaggaatctttgaactccccgcagagagcagaggtgccgcaaggtttaacctgcctccctccctccttatcgccatgggcttatccaatcatttcttcacggaacacacgtgggccaacgctgaccgggctctgtgccaggaacccgcaaggcgctgcttgttcatctccagccacggggagctcattccctagcagcgggccagacccaaggtggggtcgtgagccccgagaggggcgagggtggcaagagcgggatggcagaggtggcagccgggaccggagaggggaagaggcatggccggggagggaggagccggcagagaacttcgcctgggccaccaggaaactcagccgagctgggaagagggggactggcaagcggccaaggcggagggaggcaggaaggcgtgaggcccggtgggagggaggaagcgggagaggggcgggagctctggctcaggtaaaaactctttcttcggctcgcgagctgagaggagcaggtagaggggcagaggcgggactgtcgtctgggggtgagtgtcggcagcccccggaggatctggcggaccccagtggtgggggtttgggggtggggaagttgtggctctggagaagcccctgccggtctccaccgcgcataccctgcagatgtgggaacattc

SEQ ID NO: 21086 - DNA, 2300 bp, Homo sapien
gagaagacctgggctctgctcagcctcctgtgaccttgggcaagtttggggtcctttctctgtgcctcagttttctttttttcttttcttttctttctttttgtctggtgaggggacggagtctctgtccccaggctggtgtgcagcggcaccatctcggctcactgcaatctccacctcctgggttcaagtgattctcctgcctcagcctcccgagtagctgggattataggcatgcaccaccacatctggctaatttttgtatttttagtagagacagagtttcaccatattgggcaggctggtctcgaactcttgacctcaagtgatccacctgccccatcttcccaaagtgcttgcattacaggcatgagccactgcacctggcctgtgtgcctcagttttctcatttgtacagtaatagaaacaacaaaattctgaacatttctggtcttggaagatgcccgctgtcttcccccctgccccccagaaaaggcaggattattacttttcagttgatctatttcatctctttaaactggttaagacaatagcgaagacttggccgtgtgtggtgcctcacacctgtaatcccagcattttggaaggccgagtagggagaaccacttgagttctagatgagcctgggcaacatagcaagacccctgcctctacaattaaaaaattaaaaatggccgggcgcgttggtgcacgcctgtaatcccagcactttgggaggccgaggcgggtggatcacttgaggtcaggagtttgagatcagcctggccaacatggtgaaaccccgtctctgctaaaaaatacaaaaattagccaggcttggtggtgggcacctgtaatcccagctactcaggaggctgaggcaggagaatcgcttgaacccaggaagcaaaggttgcagtgagtcgagatcgcaccactgtactccagcctgggtgacagagtaagactctgtctaaaaagataaaaataaaaattaaaaaattaaaaattagctgggcattgtattgcaggcctgtagtcccagctactcaggaggcagaggctgaaggatcgcttgagcccaggggaatgaggttacagtgagctatgatcctgccattacaggccaacccagagagatcctatgtcaaaaatgaataaataccctggtgtggtcgctctcgcctgtgatcccaggactttgggaggctgaggcgggaagatgacttgagtccaggagtttgagaccagcctgggcaacatggcaaaaccccatctctacaaaaaaaatacaaaaaattagccgggtgtggtggcgtgggcctgtagtcccagctactcaggaggctgaggtgggagaattgcttgagtcagggatagggaggtggcagtgagcccatatcgtgccactgcactccagccagggtaacagagcaagaactcatctcaaaaataaaaaataaaaataggtggctgggcgtggtggcttacacctgtaatcccagctacttgggaggctgaggtgggagaatcacttgaacccaggaggtggaggttgcagtgagccgagatcgcatcactgcactccagcctggaagacagagcaagactttgtctcaataataataataaaaataataatagtccaggcacagctcatgcctgtaatcccagcattttgggaggccgaggcagatggatcgcttgaggtcaggagttggagaccagcctggccaacatggcgaaccccagtctctactaaaaataaaaaataaaaaaaaaaaaattagccaggcatagtggtgcgcacctgtaatcccagctactcaggaggctgaggcaggagaatcgcttgaacccgggtgtcagaagttgcagtgagccgagatcaagtcactgcactccaacctgggtgacagagtgagactccatctcaaaaaaaaagaagaaaaaaataaaaaagaaagactcgttgcccagtgctccctctgggagaagtacatccaaggccctggccctgggagaaaggctctggcactaaccccacccttgacctttttcctgggcggtcctgaagaatgttctgtcccttctccaaggcccccagctgggacggcccaggcgcctataaagggggtccccgcttggccccggcgccacccaccaccatggacccccgtctgcccgcctgggcgctggtgctgctgggccctgccctggtgttcgcgttgggccccgcgcccaccccagagatgcgtgagaagttgtgcggccaccacttcgtacgcgcgctagtgcgc

SEQ ID NO: 21087 - DNA, 2300 bp, Homo sapien
tgtgatggtgatacagagatgaaaagtctttttttttttttttttgagacgggatctcactcccattgcccaggctggagtgcagtggcatgaccacagctaactgcagcctcaacttcctgggctcaggtgatcctcccacctcagcctcccctagtagctgggactacaggcacatgccaccacatccagcttattattttgttgttgttgtattttttgtagagacagggtttcaccatgttgcccaggctggtctcgaacacctgggctcaagccatcctcctgcctgagcctcccaaagtgctgagattacaggtgtgagccactgttcttggccacaacttcttaaatctattcctttttttttttttgagacagagtattgctccgtcgcccaggctggagtgcggtggcacaatctcagctcactacaacctccgcctgcctcctgggttccagtgattctcctgcctcagcctcccaagtagctgggattacaggcacatgccaccacgcccagctaatttttatatttttagtagagatggggtttcaccatgttggccaggctggtctcgaactcctaggctcaagcaatcttcccacctgggccttccaaagtgctggaattacagatgtgagccactgtacccggtcaccacttcgtcagtctattcctgaagctctacttccggggctctgatcctattatcctaagaacactggcccaagtctctgcatttggatgctgcccgggccttctgcctcttctatttataacagctcctacttccaactctcctgtggctccagattatgctccaggcaaaacccacccttctcccaaagaccctgatccccctgtccccccacgatcttgcccctgttgaccgccctgcagtccccttccccctcatctcacccctgcccctggcctcctgactgctcttcaagctgctaagatcactgccctctcaaggtctttgcccatcctgtgccctcctcctggagcaccctttccctggccagctccctgtcctgcctcgggtccaagttccagtctgtgcctgtcctgacaccctggctttctttgttgtctgcgatgatttggctccttcatttgctcattgtctcagcgccagatcacaagttccaagaggccaggccggatccacctggttttttagggctgggcccagggcaccacaggcagaaatgggtcattatctctccctgagtcttttcttttttttttaaacgaagtcccgctctgttgccaggctggagtgcagtggcgccatctcgtctcactgtaacatccgcctcctagattcaagcaatcctcccacctcagcctcctgagtagctaggattacaggcatcaccaggcctggctaattttcctgtttttagtagagacagggtttcatcatgttggccaggctggtctcaaactcctgacttcaagtgatccgcccgcctcagcctcccaaagtgctgcgattacaggccaccacgcctggctaatttttgtatttttagtagagacggagtttcgccatgttggctaggctggtctcaaactcctgacctcaagtaatcgcccgcctcagtctcccaaagtgctgggatgacaggcgtgagccactgcgcccagcgtctccctgagtcttaagggagaaatacctcaaagaagaacttgaccttcctctggggcaacttccctgcttccctcctgggcaaatccagccaggtttccttccctgggtgcaaaattagttccactgggtgcccaactcacacatgctacagatgggtaaactgaggcaataagggccgggccagagccccacttaacaagtgggtctagagtcggctgagcccctggtgtgacccagacccttctctgtgctatcatcagttcctttggcttaggggtctccagcagcctgtctgaacggggcggctgatgcagaggcttccggaactttctgcccctccttgcccgcctccccgcccccagctcccgcagggccctgactttcggtaaatgacagtggctcaggaaaccaaggggcccacacaggaaggagccgagtgggactttcctctcgctgcctcccggctctgcccgcccttcgaaagtccagggtccctgcccgctaggtaagagctggcgatgccgcagggctcggcccagacactgggggaggatggtggtggcgggggatggctgggctggggcagggtgctgccagggcaaaggctagctcgccttccaggcctcggaggaaagc

SEQ ID NO: 21088 - DNA, 2300 bp, Homo sapien
aaacaggctgggtgcggtggctcatgcctgtaatcccagcactttgggaggccgaggcgggtgggtcacctgaggtcaggaatctgagaccagcctggccaacccagtaaaaccctatctctactaaaaatacaaaaaattagccaggcgtggtggtgcacgcctgtagtcccagttactcgggaggctgaggcaggagaatcgcttgaacctgggaggcagaggttgcagtgagctgagatcacgctgctgcactccagcctgggcgacagagctaaactccatctcaaaacaacaacaacaacaacaacaaactatatattaattgtattgttgggtctacaatatagagaaaggtaacatatttgacattaacggcacaaaggaggtgaagggagccaagttgtactggaataagaaaatcattgggccgggcgcggtggcttacgcctgtaatcccaacactttgggaggtggaggcaggcggattacctgaggtcaggagttcgagaccagcctaaccaacatggtaaaaccctgtgtctactaaaaatacaaaaattacctgggcatcgtggcgggcgcctgtaatcccagctactctggaggctgaggcgggagaattgcttgaacccaggaggcagaggttgcagtgagccgagatagcgccactgcactctggcctggggaaaagagtaagactcagtctcaaaaaataaaagaaaaagaaaagaaaagaaaatcacacccagtagtgacttgaatccacaaaaccagattaagagaaccagaaatgcaaaataagaaaatgaaaataaaaaattgcatgcttgctgtcctttattttctttctttctttctttcttttttttctgagtcggagtctcgccctgtctcccaggctggagtgcaatggccagatctcggcttactacaacctccatctcccaggttcaagcgattcttctgccttagcctcccgagtagctgggattacaggcgcccgccaccacgcccggctaatttttgtatttttagtagagacggggtttcgccatgttggccaggctggtctcgaactcctgacctcaagtgatccacccgcctcggcctcccaaagtgctgggatgacaggcgtgagccaccgcgcctggtcttttttttttttttttttttttgagacagagtctcactctgtcgcccaggctggagtacagtggcgcaatctcgggtcactgcaacctctggctcctgggttcaaacgattctcatgcctcagcctcctgcctctttcctcttaattttacttcatagccttgtcatcagggagttgtttgcgggtgtttcttttttcatatctggtccccgtcctcatccccaggagggcttctttctgcccaagcaaactgctaagtccaagcccctcaaagtgggcggctggatcttgatccattctccggctctccgcgcgctctcccccaacccctgctccctcaggttcttatgaactggaggcagacagacagagtttgaatcccagctactacgaaacacaaatcggaccccaaattaacaaaaacagcattccagagcttattcaatattcgtgctgcaacatcgctaggagaaaaatatattatttgtattcccattttacagataccctcaggtatctggtggagacctccgtaacacacctccccggaggatgaggccccgagtgtgaagcatcgggatctcacggtaaacaccgcagccacccgaggtagcttaggttcaatgcttaggcatcctgcaggcggcgcgcgccgccgcccctagttgcagccgggactggcggagtgcctacaactcccgacgtgccgcgcgcgcagacgctccgttgcggtcgtggtggaacaggtggagcttgcctcgttgccttctgggaaacgaagtctcgctgaagagaggcggaactttgagtagcaggtggatccatagccaatgaagacgcgggtcgctttgagtgcggggcagagaagccaatggacgtgcggcattgagagggcgggtcttccggtagtgaaggcctggtgaacggctgcgcgacagaggacacttccttttgcgggtggcggcgaacgcggagagcacgccatgaaggcctcgggcacggtaaggcgggcgcggcgcggcagggggccaagggatggggcacgggccccatcaggggcctgcataagtggcgtgggccgggttggtgccgcgcgcttctgtttgggccccccttggccgcgcgccgccttctcttgttgcac

SEQ ID NO: 21089 - DNA, 2300 bp, Homo sapien
cagccttgatttttatttatttatttgtttatttatttattttttgagacggaatctctctctgtcgcccaggctggagtgaagtggcgcgatctcggctcactgcaacctccacctcccgggctcaagcgattctcccgcctcagcctcccaagtagctgggattacaggcggccgccaccacgcccggctaattcttgtatttttagtagagacggggtttcaccatgttggccagactggtcttgaacggatctcaagagacccgtccgcctcggccccccaaagtgctgggattacaggagtgagacaccgcacccggccggatctccccttttccaacggggtttccaggaggatgcctgaccagggtggaaggagaaagaactaggtgcctaacccactctcctggcgagggcaggaggtacgctccagccggcaacaggtgcccgcgtagccgccgcagtgtcacagccccgggggagggacaggtccaccctgcacagcagagagggagcaagaggactgtccgggggttacgtggggacgcgttgagaaacgctggacccagctggagcggccagggcagagggtaggccagaggaggccaccagggagcagcagaggctggcgagaagcgctcaaaagccctttttttttttttttttttttttttggagacggggtcttgctgtgctgcccaggctggagtgctgtgcagttctcgaccacagctcattgcagcctcgaacttccacgctcaagcgatcctcccacttcagcctcctgagtagctgggattacaggcatgtgccaccacgcctcgctaatatttgtatttttcatacagacaagatctcactatgttgctcagggtagtctcgaattctgggactcaaatgatcctcccacttcagcctcccaaagtgctgggattacaggcataagccatcatgcccggcctctgacgctgtttctttcaacccccaggatttcagattccaccagcttatggagaagggaaccaagtttgagatgcgtgattgcccagaaagttggaggctgagctgagacttgaacccagagaccagaacctccagaggtcaaagtcctcctgggtcccccagagaagggccctgagatgacagctcgttggtcctcatggaagcgtgacccccccagtagactttctcccacacccaaccttggtttcctcatctatatgatagggacaagccagactctacctccctggtggtcatggtctccgcttattcgggttcataaccttaaaggcccctcgcaccacctcagtgagccatttatgcctggcacagggccaactctcagtgcatatctgcaaaggaaccaatgaatgaatgaatgaagtgacaaatgaataaaggaataaatgaatgaggcacttatcatgtaccaggctttcgttaccacgtcccatttattcctctgaggcagggtctattttatccttgttacagatggggaaactaaggcccagggaggagcaaagtcttccccaagtatgtacccactcagaacttgagctctgaatgtctcccacccagcttagcccaagagcggggttcagtgatgcccaccccctaaggctctagagaaagggggtaggcccacatgccagtttgggggtggtaaagccaggtaagttttctttatgggtcccctgaaaccctgaaagtgaaccccagtcctgcatgaaagtgagctccccatagctcaaggtattcaagcacaatacggctttgagtgctgaagcaggctgtgcaggcttggatagtgacatgccctctctgagcctcaatttccccacctgtcaacagcagacagtgacagctgtgatcaggggatcacagtgcatggggatgggtgggtgcatggggatggaggggcatttgggagccctccccgataccaccccctgcagccacccagatagcctgtcctggcctgtctgtcccagtccagggctgaaagggtgcgggtcctgcccgcccctaggtctggaggcggagtcgcggtgacccgggagcccaataaatctgcaacccacaatcacgagctgctcccgtaagccccaaggcgacctccagctgtcagcgctgagcacagcgcccagggagagggacagacagccggctgcatgggacagcggaacccagagtgagaggggaggtggcaggacagacagacagcaggggcggacgcagagacagacagcggggacagggaggccgacacggacatcgacagcccatagattc

SEQ ID NO: 21090 - DNA, 2300 bp, Homo sapien
gaaacttgtctcttaaaaaaatatgtgttggccgggcatggtggctcacgcctgtaatcccagcactttgggaggccaaggcaggtgggtcacctgaggtcaggagttccagaccagcctggccaacatggcgaaaccctgtctctactaaaaaagtacaaaaattagccgggcatggtggcgagcacctataatcccagctactcaggaggctgaggcaagagaagcttgaacccaggaggtggaggttgcagtgagccaagatggcaccattgcactccaacctgggcgacaagagtgagactctgtctcaaaaaaaaaaaaaatgtgttgatgtttattgagcagagactcagtaggatacactttttcttttctcttttttctttttgagacagagtctcaccctgtcgcctaggctggagtgcaatggtgcaatctcagctcactgcaaccttggcctcccaggttcaaatgattctcctgcctcatcctcctgagtagctgggattacaggtgcacaccaccatgcccagctaattttttttttttttttgagatggagtttcattcttgttgtccaggctggagtgcaatggcacaatctcagctcattgcaacctccacttccctggtttaagtgattctcctgcctcagcctcccaagtagctaggattacaggtgcactccaccatgcctggctaattttgtatgtttttttagtagagacagggtttctccatgttggtcagactggtctcaaactcccgacctcaggtgatctgctcacctcggcctcccaaagtgctgggattacaggcgtgagccaccacaccctgcactatttttttttttaatctttagtagagattgggtttcaccatgttggccaggctggtctcaaactcctgaccttgtgatcctcctgcctcaggctcccaaagtgctgggattatagacatgagccaccacgcccagccaagactcagtaggatacactttttttgaagtaattattttattgatgtttaaaaaattaataggctttattttttagagcaattttaggtttatagtaaaattaagcagaaatttcagagagctctcatatacgtcttctattctccttcacccccacaatttcccctattattaatatctttcattagagtggtatatttgttacaatagatgaacaaatattaatacattattattattattattatttgagacagagttttgctctgtcacccaggctggagtgcagtggcatgatctcagctcactgcaacctctgcctcctgagttcaggcaattctcctgccttagcctcccaagtagctaggattacaggtgtgtgccaccacgccctgctaattttttgtgtgtttagtagagacggggtttcaccatgttggtcagtctggtctcaaactcctgatctcaggtgatccacctgcctcggcctcccaaagtgctgggattacaggtgtgagccaccgcacccagcctaatacattattattactgaagtctaccttttacattagggttcactcttgggttgtgtattctattggttttgacaaatgcacaatgatgtgtatccaacatcacaacctatcatactgaatattttcactgccctaaaaatcccctgtatttggctgggtgcagtggctcatgcctgaaatcccagcactttgggaggctgaggcgggtgaatcaagaggtcaggagttcaagaccagcctgaccaataaggtgaaaccctgtctctactaaaaatacaaaagttagctgggagtggtggcgctcatctgtagtcccagctacttgggaggctgaggcagaaggatcgctggaacccaggaggtggaagttgcagtgagctgagaccatgctattgcattccagcctgggtgacagagcgagactctgtctcaataaataaataaatagtcccccatggttaatctatattggtcttgcttttagcgtcctcctcagttctattcattttgttaatttattcttttttattttctgtaaatggtcatatcatctggtttcaattctttttcttatcttattgcattgtccagcacctccacataagcacgaaatattagccatgatttgaggcattcctgcctcattcttaaatatgttgtacatcctgttttaccatcttttttgttttgtgtgtgtgtggaggtggggacagagtcttgctatgtcacccaggctagagtgcaatggcacaatctgagctcactgcaacctctgcctccca

SEQ ID NO: 21091 - DNA, 2300 bp, Homo sapien
ggccccatgatgacgtcacggaggcgcgaccgggccggcgctggggtaagaaggtaggagcgtctgcggcgcgggcggaacccgggttcggggagcagaggcgcggggcgggggctgcttggcctgggaccatcccctgggaaggctggaggaggggtgctgggaggcaggagcacttctggcgtccagtctgaaccgcacctagttgggggcgatgcccatttccagactagacgattgaagcccgacgcgacagcatgttcgaggccacctggccccggactgcccctaggcagcttctggtctcgagagggacagagttgggcgcggactcccccggcctcttgtagggggattagtggtgggggacttcaaaagggatagccgggagggctgcttagaggaggcattgttgaattttgtattctgttattttaccttcacatccgtggggtcttaatccccatgggtcttgattcgcttctaagtgtgcccctcgcccagcctgagccactccctgggtaccgcctgggctcccagctcctgccatctggggagtccacctcctcactaaccccagagggcttgtgtgacccatagattgggcttcccggctctaacgccctccacaccttcccatctccctggaatacaaatcgcccccttttccagcctacctcctgcatcccgcgtgcaggctgcgctctcccccactcattcagacttttccttagatgtctcctttaggaagccctttgacccaggctgggtcagaagccctctccgggcttccccggcgccctgcgtgtccttattaggactctgattgcatgtgttggctcttctctgggagtcccatgcaggcagaaagctcatttgtgccacctctttccccagcatcgcacacgtattaggtgcccagtacatatttattgaatgacgtgtgcaagtgagtgagtgtttactacacagagaaaagtgtctgtatttccagcttgggctgtcataactaataccacagactgggtggcttaaacagcagaaattgccaggcactgtggctcacacctgtaatccaggcactttgagaggccgaggcaagcggatcacttgaggtcaagagtttgagaccagcctggccaacatagtgaaaccccgtctctactaaaaatacaaaaatcagataggcatggtggcacatgccaacatggtgaaaccccatctctataaaaatacaaaaattagccgggcgtggtggcaggtgcctgtaatcctagctgcttgggaggctgaaacaggagaattgcttgaaccgggtgggtggaggttgcagtgagccgagattgtgccactgcattccagcctgggtgaaagagcaaaactccgtctcaaaacaaaaaaaagccccaacgtggaaacagcccaaatgtctagctgtggacaatggataaacaaaatgtggcgtatccatgcagtggaggaatattcagccataaaaaggaacgaagggccaggcgcagtggctcaggcctgtaatcccagcactttggaaggccgaggcgggaggatcacttgagcccaggagttcaaggccagcctgggcaacatagtcagaccctgccttaaaaaaaaaaaaaaaaagctaggcatggtggcctgcacctatagtcccagctacttaggaggctcaggtgggaggatcacttgagcccaggaggtcaaggctgcagtaagccgagatttcgccactgcactccagcctgggcgacagagtgagaccctgtctccaaaataaataaataaatgtactctcacactgtgtggccttttgtgtctggcttctttcacttagtattgtgttgttgaggttcaaccacattgtatcatgtatgtattggtgccttgtttccttgtttcctttttttttttttcttttaagagacagggtcttgttctgttgcccaggctggagtgcagtggcacaatcatagctcactgtggcctcagcctcctacgctcaggcgatccttccacctcagcctcctaagtagctggaactacaggcacaagccactgtgcctaattattttttattttgtagagacggactcttgctatgttgcccaggctggtcttgaactcctggcctcaagcaatcctcctgcctcagcctcccaaagcacggggattacaaacgtgagtgatcgcacccggcctgtgattccattgatatggactgaaatgtccagaacagggaaagccacagagacagaaagcagattgatggttaccaggggcta

SEQ ID NO: 21092 - DNA, 2300 bp, Homo sapien
aggcaggggaaagcgcaaaggtgcagcacgcaccctcggggattttctcagcgctcctcaccccccacgacctccaaaccctccgctatgggcctggccctgccaaggccacatcgccccgcgggtcccagacacccgcaccttctccttctccaggaacctccagggctctgctttcgggcagcctccctcactctctgggcacaaaagcacacaggcacgtagtaggtgctcatgaaaaaaaacatttgagggtgattttagggaggcaagtgcaggtgagggagtgttgcatttctcgacacggacaactgcgtcctcatcccatggggacatataccctctctgggcctttgtcccctccaacaaagcaatttcccttttatccttccctttggtttcaaaaagtgtaagataacaaaacactttgttttgttatcaaaacacaatcaaaggggggaaaggtcagccccccaggggtccctggccctgggctgcccccagcgtctcccccaacacttccccaacttgccacgttcgcttcttttacttattcgccatcggaacggtggaacatttgcgcctccggcctggcttctgctcaaccggccaggagctcggtccctgcggatcattttccccaggggcatattattccggaaacgggctaagcggtcccgggttggggacacgtcggctcctgtgtttttagtttcgctggcctaggtgacccccctgcagaagacggctgtggatctgctgtgccgtgtcttggaggcatttctagggcggctagctgggcaaagggtggtgctgtccctttatttggagctaggtagctcctggggtggtgctgggtcgggagcggccctctcctcccatcagctaggaccaagttgcacctggcccctcattcccaggggcggagagaggagaagatgaaagagcaagcaagttcacaccagggcttgagggcagtgagaacagtaaaccagggcgacgtgcccagagaaggggcgactctagggaagaggcgaccttggatggagccctgaagagccctgtgggaacagggggtgaggagagccagggaagggcgatcccggcccaagaaaccgcagatgcaaaggctctgaggctgaaccggttagggggagaagctgggcgtgtccagaatgtggtgggcggtccagggagaccgcggagggattggaacaaagggtgggcgttgtggggggcagaccgcgtcggcctgtgaggagtcagggtgctcctcttggttcaagaagagaagggaggtggggggagggcggtcatgcgggacagggacgtgacctgtcacacgggtgaggactgaagtctgtggctgcgtcagggagaaggactgtggcggggacaggaggagccgcgggagtggggaggattttcgggctccactgggcgattgtggggtccacggggcgtgggggaatcccctgatcatgggtgtccttgtcacttctgcagcctgactctccttcactgtgtctgactaaagcatgggtcgcagccttccccaacaggggcgggaagtcccccccggggagggtgttgggtggcaccccttgtcctcggctcctgcgaacccaccggctctctgcctccacagtgcagacccgaaggcctcctcccctttgttctttttccctccacacggtcacggtcacaccggcggctccctctgagcgcatctcacacacaatgggggtggggggtgcgctcccagtttcccctcctctcagtatcggcgtccccgagccccgcccgcgccacggaatcccggcctccagaccccgcccgggaagctcgttacctttccagagaggctccccgccggggggctggggaggggggagggctatttttagaatgaatggaagaaaagagaggaaaaaaaacaaaaaacaaaaaccagaatggaggtttgtagaagcctccctgcttccaagaggaacccccctccctgtcccctgcctgaaggtggctgaaggtccccaccaaggctgaaggtgggtgggggttcagagacggggcggagcaggggacttcgaggaggaacacggtggtctgagctggagccacgctttctgttggagggggcagctgaaggagaacagcaagacatatccggcggccctacggactcggagagctggagggaccccggaggtgggcacttgtccgttcgctgaagggaaactgaggctcagaaaggggcttggcagggccgaggtcacggaaagggcttgcccctggacttc

SEQ ID NO: 21093 - DNA, 2300 bp, Homo sapien
agattctttcacaacatcatgccacagtttccccatctgtaaaactggccaaatcccaggacccacttcttggcagtattaggattcaggagaacatttacataaagaatggagcctgggaccgggcacagtggctcatgcctgtaatcccaacactttgggaggacgaggaggaaggatcactggagcccaggagttccagaccagcctgggcaatgtagcaaggcctgatctctactagaaataaaaataaatcatctatggccataccaccctgaacactcccgatctcatctgatctcggaaaaataaatcattagctgggggtggtggcgcatacctgtagtccttgctgcttgggaggctgaggtgggaggatcgcttgagcccaggagtccgaggctgcagtgagctaggattgccccactgcactccagcctgggctacagagcaggcaaggagtgcatttgagggtctgagatactgggctgggcagggcaggggagaatctgacaagttggatccagagtctcagacagcctctcaatgccttggtgagcatgatgactatgtcaccatcattgaggtccctgctctcacacatgatgccacaggacattgctctgtaatcacacagggtgcttttcaaatagcctggcagggaaacaggctagcctgagatcatagagcccagccaagcatgtcttatgtcttacaaagccctgcagaatcgattctagatcttggagttaaagcctgcattgccacactgtttggagatcatggatcccctcctggaaaccatttggattctgtttggaatctgtttggagattatggatcccctcctgcccaggcaggagggagcctcaggatctctgtagccacagccagggtccctaatgtcccataggccacagtgcaggagcctacaaatgcaggaggcacggtgaggtgaggttaactcatccaagagtctgaaggttggaagaggatgagctcagatgaaaaccaccttctaagcataccattagccaccctctcctcccaggcaagcccgttggtagatttcatcttccagcgttcagcaagtgtttcctgagtgtcatctgtttgctaggcattgttctaggtgcttggatacacataaagtcagcaggcagggctctggtaggggggcattccaggcagagggcacagcctgtgcaaggtatcagagaaggatgaacttgttggaatctggtgattgggagaccattgtggctggaggaattgggtctggggagagtaagaaggacgagataggtgggaaccagatacagagggccccttggccatagtgaagagtttggtgttttatttgtttttgtttttgttttttttagagatcggctctagttatgttgtccaggctggatttaaacccccagactcaagtgatcctccagtctcagcctctgagtagctgtgattacaagtgtgcaccactgggcccagctctggagtttctttgttctttttcttttttttgagacgtagtctcactctgccacccaggctggagtgcaatggcatgatcttggctcactacagcctctgcttcctgggttcaagcgattcttctgcctcagcctcccacgcagctgggactacaggcatgcaccactacgcctggctaatttttgtatttttagtagagactggttttcgccatgttggccaggccagtttcgaactcctgaactcaagcggtccttctgccttggcctcctaagtagctgcaattaccagagctgcaccaccatgcccggctctctggggttgattttttcagtgagatggcactggggagccatggcagggctttgagcaggggagggattcaggctgactcagatgtttctgggatggtaaacccacgtgtcagcactctgggccactcccaaacttagaacgttctgggttggccgggatggtccttgcctttctggtcagtaagctggaccctgctgtgaccatgtccctctgtgcccttgcaggtcagtgcaggagcccagccgctgagccatgccgggccccgggcggcctgcagcgagcccaacccctgcacccaggtagtcatgaacagccacagctacaatggcagcgtggggcggccgctgggcagcgggccgggcgccctgggacgagaccctccggaccctgaggccggccaccccccacaacccccgcacagcccgggcctccaggtggtagtggccaagagtgagccagcccggccctcacccggcagcccccgg

SEQ ID NO: 21094 - DNA, 2300 bp, Homo sapien
tgagatttgtattgagcacctgctgtctacagagaatgtgatgatgtcaattaccacactgattcctcatcagaacttgaccatggtgggatgggggggaaactgaggcccagagaggtgaatctacctacctgggaccacactgcgaggaaggatggtgcattcaaactggaaatcccctaggccaaagtaaagaaccggactggctgggcacagtggctcacacctgtaatcccagcactttgggagggtaaagcgggcggatcacctgaggtcaggagttcaagaccagcctgggcaacatggtgaaaccctgtctctactaaaaatataaaaattagctgggtgtggtggtgcacgcctgtaatcccagctacttgggaggctgaggcaggataatcgcttgaacccaggaggtggaggttgcagtgagaaaaaacctggacttggtggaagggactccatggaggagccatggggacgtcaggaggaggggttatttggtgacatccaggggtcagagagacccttcaggggtgggctacaggggagggttccagacacaagtagaatcagaaaggtccctggaggccatgggcttgggtgctgggagcaacaggcatttacttggcagatgctgagccctgggtggggcgaggaggcctggctcctggggagacgacgctgtgcatagccgaggagccccaggtcctggcagcctctgataaggccatccatcgcctggctcaacgagataactaggccgtggctggtgcatgaatgaccagcttgggcccacgcacgagaagggtatgaggaggtgctggtcagacccgggttcgagtcctgactctgccactgctgggtgactctgagcagtggctgcccctctggggccttggttgtttcatctgtaaaatggggtgacagtctatttaaccagaactccctaaaaagggccaggcaactggtaggtgctcaataaatgctccttcccgcctgagggatcacactggagtctttggcaggactcatcctttctaccctgttgtctggctggggaaactaaggcctgagaaggaaaggggctgtccttcagggtgagaacccagggtttggttaaggaacatccgtgggtgtaccttctgtgccagtggtagctcccaggtctgatggcagaggcacagtaaacccatagtacttaaaaaaaaaaaaaaaaaaacaccaaagccataaagttatgaacaggccgggcgtggtggctcacgcctgtaatcccagtacttcgggaggctgaggtgggaggatcacctgaggtcaggagttggagaccagccggccaacatggtgaaaccctatctctactaaaaatacaaaaattagctgggcgtggacgactcctgtcgtcccaggtactcaggagactgaggcaggagaattgctagaaccagggaggtggagattgcagtgagccaggatcacgctactgtgccccggcctgggcgacagagcgagactctgtcttaaaaaaagagagagagaaagagaaaagtaaacaaggcaagaaagaaagagaaaaaaagaaagagaggaaggagggaaggaaggaaggaaggaaagaaagaaaaaacagagaaaagtaaacaaggccagaggtggcaaggggactctgaggaagtggcatttgggcgtgggcgggatgggtgggagaacggatctggtagcggaacggcccagtgcggaggcgaagagagctactcgaggtggattttgtttgagggacagccatgaagtgacaatgacggggagactgaggcggtgccgggttctgggcggcggggggggcaggggtagtgaggggcgaatgagaccatagggctgagatctgcggccgcctcggtgcctccccagccacctccgcccctgcctgcttctgattcaacagcgccgaccctacaaaaacagggcccgcccatctccgaggatggcaaagtcaacagtgcgggcacgcgggcggccagtccccggcggcccgcgtgcgtcacgggggcggatgcagaggaccaggaagttcgccgacgacgcgcccgccctgggccaccggcgccggcccaagttcgccgggggggcccggaggaagcttgggggacgcgacgggggaacgcggaaaccccggggatctgcaggcgcgcccgggccgtgtgccttctctccgcgtgtccaaaccgtgtccccagccgcgcgccatgcgctctgggggcgtgcgcagcttcgcgctggagctggcgcggggcccgggc

SEQ ID NO: 21095 - DNA, 2300 bp, Homo sapien
tggcggccgggaagaggcgctcctcacttcctaggtgggatggcggccgggcagagacgctcctcactttccagactgggcagccaggcagaggggctcctcacatcccagacgatgggcggtcaggcagagacgctcctcacttcccagacggggtggcggccgggcagaggctgcaatctcggcactttgggaggccaaggcaggcggctgggaggtggaggttgtagcgagccgagatcacgccactgcactccagcctgggcaccattgagcactgagttaacgagactctgtctgcaatcccggcacctcgggaggctgaggctggtggatcactcgaggttaggagctggagaccagccgggccaacacagcgaaaccccttctccaccaaaaaaaccagtcaggcgtggcggcgcgcgcctgcaatcgcaggcactcggcaggctgagacaggagaatcaggcagggaggttgcagtgagccgagatggcagcagcacagtccagcttctgctcggcatgagagggagaccgtggaaagagagggagagggagaccaaggggagagggagagggagagggagcttaaaaattgttaaattgttatacatttaaggaaaaaacagtgacactggaggggcgaggccagtggaggtgctgtgtgacctcgggcagagccccacccatctctgggcctttggggtccgtctgcgaaatgaattgagggaggcgctggctcagtagtcccttcagggttacctaatcccgcttctcctcccggacttaacggcctactgtctcccctctagtatccattgaaacctggcctaaggtcccagaccttcctttcaactccaaagacccatcctcccaggcagccttccaggctgatcactgtgcctccaactccgtcgttcctgttccgatccccatcacgggctgagggtgaccgtgtttgtttatgaccgccccctccacccacacacctcactgaggtggtggaagtctcctgagccaggctcagaggcggacagtcacggcaggggatgggttcagcggcagcgcattacgctgccacgagagggcgccagcgtcccgcagacgacgcagaggcaactcccgctggagaaactccatgcgacttttctttggggaaactgaagcccagagagaggtcacgccgtcccgtggccacaccgcagctgtggacctgggggtgcccgagcgtcccctgcattcagctctgtggcgggacgggggctgaggatgactggagcaggcacaagggctgcggggaaggtagggtttgccagaggctgaaaattgggaagggaacatcatttcgtaggtaccgctcctgggcgaatgcgccgaggcgcgaccgagtgacggtatgtcaagagcaggttgatgacccgggagcgaggctcttggaggagtccagctggggctgcacgatgatccatgcacaaccttctgaggtcaggactgatttttactttctcccggctctacagaggtggaaactgaggctccaagaggttgtcatttgcccagagccaccagctaagcgggacttgaatcaggaaaggggtgcagcaggcaccagtgtggagggcggtcccacccacctcctccacttctccctttgcatagcgggggaaacaggcctggaacagtcataggctctctggccctcaactggggcgagagtcccccgccccaaatcgggctggacatgcctcgagtcacgtcaacgaggggcggctggtgagtgattaagccgagaggctgaaggctctgctaggtgacctcaggcctgggccctgcctctgcacctctttttttcctctttacccccggggtccgcgagagaccagctctggcagcctaagggcttcagtttctccccggggtccgcgagggaagggggcagccggcggtgagcaggggcgtttgttattttgctccacgcctgggcagagccacgccccttgtcgcgctattggtggagtcccttcccggggcggggaagagacggtgaccccacccccccccgccctgccgtataaaagcggcgccgacgcacggcgcggggattttctgctccggttggtgagcgcgcctgcgcgttgacggcgattttgcgttctgaggctgcagcgtcggcatcttgagctgccggttcgcgagttcgaggccaggttccgcctgtcgtgggttcgcaccccggacgcgatgctattcgacaaggtgaaagcgttctcggtgcagttggacggcgcgaccgcgggc

SEQ ID NO: 21096 - DNA, 2300 bp, Homo sapien
gtggcacgatctcagctcactgcaacctctacctcccaggttcaagtaattctctctgcctcagcctcccgaatagctggaattacaggcacatgtcaccaggcctggcaaatttttgtatttttagtagagacagggtttcgccttgttggccaggctggtctcaaactcctgacctcaggtgatccgcccacctcggcctcccaaagtgttggaattacagatgtgaaccactgcacccagcccagcattatgtttttgagggttcatccacatggtagcttggatcagagcttctccactgacatttagaggctttgccgacagtggggagggaggggcaggaaacaaaatactcagaggctaagaaatggaacatgggggaaagactaagttgcatctcttaaatttttttttttttttttttaagagacaggatcttgctctgttacccagactggagtgcagtggcacaatcacgattcactgcagcctcaacctcctgggttcaagccattctcccacctcagcctcctgagtagctgagaatacagatgtgtgccaccacgactggctaacttttaatttatatatatatatatattttgagatggagtgtcactctgttgcccaggctggagtgcagtggcgcgatctcggctcactgcaacctccacctcctgggttcaagcgattctcctgcctcagcctcctcagtagctgggattacaggtgcctgccaccacacccggttaatttttgtattttcagtagagacagggtttcaccattttggtcaggctggtctcaaactcctgacctcgtgatccacctgccttggcctcccaaagtactgggattacaggcgtgagccaccgcgcctggcctaattctttattttttatagagatggggtcttgctatgttgtttaggtagacccaaactcctggggtcaagtgatcctcccacctcgacctctcaaagtgctgggattagaggggtgagcccaggtgcacaaggctggagcttggcatgtggggaggtgggcattgtggagggccagcatgctgcaagctctttgtaacaatttgttggaaggatgaaattaggccatccaagaacactgccctccttcagctcttgagtctcagattcagaagctggcgagatggcccggtgcggtggctcacgcctgtgatcccagaattttggtaggccaaggcggacggatcatttgaacccgggagtttgagaccagcctgggcaacatggcaaaaccccctctcttaaaaaaaaaaaaatgcaaaaattagctgggcgtggtggtgcatgcctgtagtcccagttcctggggaggctgaggtaggaggatggcctgagcctggggaggttgatgttgcagtgagccgtgattgcaccactgcactacagctgggccacagatcaagaccctatctcaaaagaagaaaaaaagaatttggcagccaggcacggtagctcacgcctgtcatcccagcactttgggaggctgaggtgggtggatcacttagggttaggagttcgagaccagcctggccagcatggtgaaaccctgtctctactaaaaatacaaaaattagctcgatgttgtggcagttgcctgtaattccagctactcgggaggctgaggcaggagaattgcttgaacccgggaggcagaagttgcagtgagtggagatcatgccaccacactccagcccgggcgacagagcagggctccatctcaaaaaaaaaaaaaaaaattggctagagagggccagagacctggccaagtgcatggaaccacaggtggcccatgggcccatggggctggcatctgggtgttcagttcaggtctggggccagcagggcagaaccccctagaaccctgacttgctccaaagtcagacttgctccagagtctgtggccgccaccatcaccaccaccacggagctgacttcctgggtttctctttcactttgacttgccttagggatgggctgtgacactttactttttttcttttttcttttttttcagtcttttctccttgctcagcttcaatgtgttccggagtggggacggggtggctgaacctcgcaggtggcagagaggctcccctggggctgtggggctctacgtggatccgatggagccgctggtgacctgggtggtccccctcctcttcctcttcctgctgtccaggcagggcggtgagtcccctgaccctggcatggcggctcctcttgctgggtggaggcacgtgtatgtgtggagagc

SEQ ID NO: 21097 - DNA, 2300 bp, Homo sapien
tttttaaaattgtatgagaaaaacaagttttccctggcatcctgtatttttatttgctcaatctggccaccataacttgatgcaattctacagtacctcatggacagtcaggcccagtgacccttcctagggtcccctcgagcctgaaagcatactccagtgtccacactgtacagtggggcagccgaagacaactgcggctgcagagaaagtgcgagtcccagggaaagaaaaaatgcaggtgctaagccaggcacagtggctcatgcctgtagtcccagcgctttgggaggctgatgcaggagcatcacttgaggccaggagttcgagaccagcgcgggaaacatggcggtactccatctctacaaaaaaaacccaaaaaaattagccaggcatggtggcatgtgcctgtggtcccacctactctgggagctggggtatgggggctgaggcaggaagatcgcttgagcccgggaggtagaggctgcaatgagacaagattgcaccactgcactccagcctgggtgacagagagagaccctgtctcaaaaaaaaaatttttttttaaatgtgggtgctattttgggactttgggcttttctcagcctcagtttcccctcctgcaaaatggagtagaacaattatcttcaaatatctgtgagagatggtgtttatgagacacttagggcaaaaaggcaatcatcctcaaaaaagaaactgacaactgcagcggctacctgcttttgtaagtaaagttttattggcaccagggccaggattaaagggaggcaaacaaggctgagtggtgcaaggacaagggtctgatcatgtcttaagagttttagtgttttggccaggcaaaacaccaaaactctttggcctgcaatcccagaactttgggaggctaaggtgggtgaatcacctgaggccaggagttcgagacaagcctggccaacatggtgagacctcatctctaccaaaaatacaaaaaatcagcctggtgtggtggtgggcacctgtagtcccagctactagggaggctgaggcatgagaatagcttgaacccaggaggcaggggttgccgagatcatgccactgcattctagtctgggcaacagagagactcgtctcataaattaaaaaaaaaaaaaaaaagttttggtgttttggccatatgcggtggctgacacctgtaatcccaacactttgggaggcctaggcagaaggatcttttgaggccaggagttcaagaccagcctgggcaacatagtgagatccccgtctctaaaaataaaataaaaaataaaagttttgatgttttgttcatcataaatgttttcattaattttatgtttttaaaatattatttctcttgatggctgagttttgtggggccaccttaaattttgcacaggggtgagatcctcactcgcctcaccctagaacccgttctgctgtgtgtactgggcacattttttgttgttgttttgtttttgtttttgagacagagtctcgctctgtcgcccagtctggagtgcagcggcgctatcccggctcactgtaacctccgcctcttggattcaagcgattctcctgcctcagtcttctgagtagctgggattacaggcgcgcgtcaccacccccaagtaattttttttttgttttgttttggttttttttgtttagtagagacagggtttcaccatgttggccagggtgatctcgaactcctgacctcaagtgatctgcccacctcggcctcccaaagtgctgggatacaggcgtgagccactgcgcccggccaatgcgctgggcatattgattaacctatcttagcctcagtttcttcatctgcaaaatggggctgaacgatgctgccttacttctgagaggattcatgcaaaatatttacttctgcgctctgctggaggggcggggccagctcgcccagtgggggcggggccctgtggtcgggctccccgggaggggcggggccaggccgtgtcagctgaccggcctggccaatggcacctggcggcggggcctggcaggccggggcggggccgggggcgggcctggcggcgcggactcccgggccatggacgagtcgagcctcctgcggcgccgcgggctccaggtgaggcccctgcgcgggcgggcggaaggcagagggcgcggccaagtggacgcggcctgaaaggtgccgggaggggcggggccttcacgggctgtagggaaactgaggcagagggtggggaacgctcagatcgcttctttttgaccacccgcttctcaaagtg

SEQ ID NO: 21098 - DNA, 2300 bp, Homo sapien
acgccctgggctatgcgtctggattggccggtcagcacccgtttgtgaatggactctttggcctttggcctccaggaaatctgattggctcgcatcagcgatctaccccctgattggctggggtgctcctggaccattaacaaggtttccagtcaaaagagaccccaaactggggctgatgaagacaacaccttcacgtgccagattggttagaatttctctggcttcctggtgggtacttccctctttgggcctcagtttcttcctttgaaaagtggaactaataatagcactgaccactcgggctgttgggagaattgaatgcatgagagggcttagcctgttaatatgaacggttattcccactttactattattttattattattttaatcttcttccacttggacctttatttttatttttgagatagggtctcgtgatcatggctcactatagcctcaaactcctgggctcaagagatccttcttggctgggcgcggtggctcacgcctgtaattctagcactttgggaggccgaggtgggcggatcacctgagatcaggagtttgataccagcctggccaacatggcgaaaccccgtctctactaaaaatacaaaaattagccgggcgtggtgacatgtgcctgtaatcccagctactcgggaggctgaggcagggagaattacttgaacccgggaggtggaggttgcagtgagccgagattgcgccactggactccagcctgggtaacagagcatgattctttctcaaaaaaaaaaaaaagagagagagagagagatccttctgcctcagcctccttgagtagctgggactacagtcatgagccaccacacctggtacacttagactttcattccatgctccttcctggcttcctgccctttttgattcccccactcctgctcctagccctccagaggagtcttcccagcccctcaatatgggcatgtcctctcctgctccagcaccttccatagctccccatcaccctagggggaaagtctaacctcttcaaaatcagcactgaaggccctggaagcattaagtcctggccatcagcctctagtgctaagaaataggttcaagttcttgtttccccatataaacaggtaagaaaggctacatgcctctgggcctttgcacgtgctgtggcctctgcccggaatgccctcattcagtcggggaatccgtgctcatccctccaccttcgtggagggacgcctgtgctgggttggtttggagaggaagccggaactgcgtgggttcaaatcctgtctgactctgtcacctatactttgtgaaacccggacagtggctatgcttctctgaacctcagtttccccttttgtaacatagaacttaccatcaggaaatgtttgacccccccaccatggaacaggccccacttcttgacgtcagcagcacccccattcgcctacccggaggcggtttctctattttaagaggctgcgggcgggttggcatctaactggggctggaggcgggactgcccccccaccaacaccacgctgctcgccaatcccgccccgccccctcctttccgcccaagtcccccactcttgcctctggcctcagcgcctccagttctgccccacccccgcgcggccagagaccgggtgtctctgatctgcagctcagcccgtgccttccctgaccactcccgacctggcttcccatcacctgctgagttcgcagtcccgcagctaccggtgcggctccaggttggagacccgccggccccattcctctcaccccctcaacccgcccggagctaacctcagtccccgacccccaccccacctgctcagtcctccctaggttccagcttctgtcaacctctttcatttccctaaataccgccccccgctgcaatgcctcgccacccttggctgcctcctctaccccagggctcccagcaatgactgggtcaggcgcctccttcacttgctgtgagtcccttatcacaactgatcactccgtggggtcaccgctgctctggcgtctacctcccccaacaggttggggtttctaggagggcagctccagaggttgcagaacactccgctgcctctccagagccaggcacacagcaggcgctccataaatgttcgttgggtaagtgctgaatcccaggttccctacctgaaaacttggtggcttcttaagggtgtggtctaagtcccagaggaaaatggccaaatcttaattcctgtttttcttttcttataatggggacactgaggcccagagaag

SEQ ID NO: 21099 - DNA, 2300 bp, Homo sapien
aagccagaaaacccagtcgaggctcaagtttgaatttcagcttcactgtgtggctctgggaaaatggctttcccactctgtgcctcagtttccttgtgtttacaagactaatcccattgactgtttattaagcacctactgtgtgccaagcgcttttacgtggcttctccctcagccagccttgagaaggctggaggtggtgtcatcacctccattttacagacaaagcagctgagaccccagcgaggggcggagacctgtcccacgatcacccagcaggagtcgtggcagaacggagcatcagccagaccctgttgtgggcgttgtcatcaagggagcttgaatggagggtctggtgtcagatacagccgactccagccccagctcatcccccatgatgctgtgtgacccactgggcactctggtgagggagctttccagacatcaacagcccactctgcttccctttctgagtcccctgtccagcactgcctagtgttggagggtagaccaaggctgtgcatgattcaccccctccttccatcctggagctggcagtgaataaaagcccgtatttacaaagatgagctccaacgtctggatttgtgaggggctgagaaaggaggaagggaagagtggggaggggagcggagtgaaatagacccatggctcaaagtcattgcaagtgggttttgaggactgcatagcagttcgctgttgagattcttcctgatgccatcgctggtaccagcctcctgctaccctctccctgcgagtactccatcatagccctgcctttaaaagcttcctccagacatctgggccctgagctatgttttttatttttatgtttttgagacaaggtctcgctctgtaacccaggttggagtacagtggcgcaatcacggcacattgcagcctcgacctcctgggcgccctgggctatgttaataaaataaataagcggcggggcgcggtggctcacgcctgtaatcccagcactttggaaggccaaggcgggcggatctcctgaggtcgggagttccaaaccaccctgaccaacatggagaaaccccgtctctactaaaaatacaaaattagccgggcgtggtggcgcatgcctgtaatcccagctgctcgggaggctgaggcaggagaatcgcttgaactcgggaggtggaggttgcggcgagccgagatagcgccattgcactccagcctgggcaacaagagcgaaactccgtctcaaaaaataataacaaaataagcaatcgtcgcgtcctttctatcctggtcttagcttgcgctctgccataaaactccctctagccgaacccggcccagccctagagcaatccgttacttccggggcgctcagccggcatgcaaacactcttggctacagccccatctccgagtgcgttcggctatttccggaaaccgtcggcatctaggctcaagtccgctaaattctagtgcccgtaggggtcgagatcgttggctgtttccggacgctctgggttgccatggaaactccttcaaccctggctttctccgacttctgctttttgcggcaggccctttccccactctactgccccctgtttgctgagcttgagaacgcctcatttgtcccctggaaccatctatgcttcagtaattcccataagctggcggtcgcctctgggtctaaactcccaaggcctccattgggcactgagcacattcggttatttccagaaacgctccgcggtcttggggatcagcctcagttgtgccagtgcggccgtagagagtgttcggccatttccgaaagcgctcgggcgtctctaagcccagccgagcccagtctcggatccctcgccgacccgattgcactcggctacctctggaaacgctcggctgtctcgggggcaccctctagtccaccagtcccgcgggattacgttcggctacttccggaaacactcgggtgcccccttacctcaggctccgcctcggcctcggttcatccgcccggctcgaatgcgctcgggcatttccgccgggggcgggccaggccgctcggaaccgtggcggcggcggaggcggggatcccgcggctgcggcgacggtggccgcggtggagccacggggcgggcttggcttggtgtgacggcggctgcggcggcggtggcggccgcgaccaggtgagtcctgactggccctcgtggcgggggcggctgggagtgtgcttaaatgcggggcgcccgggggcagtgccgggccccggtggaagccagaacgcaagcgccaggctg

SEQ ID NO: 21100 - DNA, 2300 bp, Homo sapien
tccaagataccggactggagccgaggccccaaatgaagggaggccctgcctggaatggggcttcgaatagtaccgaggggcgcccaggcattgtgcggggcagaatggggtgcgggagggccgggggtcgaacccacttccggtcccctagccgggtggccgggtccacgcagacccaagtgcgcgtctgtgtgagcgctcaggccctgccttcacccgcggagcccccagccctgcctgccccgcccctcccgcctcccggattcggggagcgctgctcccggggcgcgcacaccggggcgtgggggcgggctggcaggcagatccaggcggttttctgggcatcccctctcggggcctcagtttccccacctgtagaatgagggtaacagaggcctaggaatgggtaaattgggcacccgagaatgtggcgcccctccgccctgctcggacacctcttggggttccccgtgactgaaggatgctcagagcctccacctgacactcgggcctcttggtggatagcacctatccttatagccaccctgaatccttgacaagcaacttaacccactgccaaggctttgcatgtgccgttccgtctgcctgtcgcgccttcctatccgctgtgatgatccattctctagaacagcacgtccatcccccgaccctagccctgtccatcacagggcgtctgaacccgcagggctaggctgggaatgtgtgcctatctccgcctccccaggctgggactcctggggaataatcaatgccctgctgccggcagcctcccctcctcctcagctgcagtacccccaccttctcctggctccctgtccctgcctggggctaaggttccttctaagcacctccccatctgcattttgtgcctactctgggccccaggctggagctacctgccagcccactcactcctcctctgcagagactggaggtccatttgcttggactcacctcgaggcctttgcttgtgtagaggcctcttcctggactttgttccctacctcttagttcagctggcctgacccctctatggagctcccaaagcacccggagtggcctccattgcgtcctccctgccctaggtatctggccacctggctgctgccccctcatgtccaactgggccaagtcggcagatctaggtgtaagtcctggcttcctcctggcctactgcacggccctagatacctccctgctctgagcctcagtttccccatctgtaacaggggtgatgaaaagcctgtttactggccgggcgcggtggctcacacctgtaatcccaacactttggaaggcagaggcaggaggactgcttcagcccaggagtttgcgaccaacctgggcaacatagcaagaccccacctctattggaaaaaaaaaaaaaaaggctgggcaaggtggctcatgcctgtaatcccagcactttgggaggccaaggcgagcagatcacttgaggtcaggagttcaagaccagcctggccaacatggtgaaacctcgtctctactaaaaatacaaaaattagctgggtgtggtggcctgctactcgggaggctgaggcaggagaattgcttgaacctgggagacaggttgcagtgagctgagatcacaccactgcactccagcctgggtgacagagcaagactctatctcaaaaaaaaaaaaaaaaaaaactgatttactgagcatgtagtatacctggggcaggttcttgggaactctactcccagcagctccaagggaaggctgtcagtatacccattttacagatagagaagctgaggccctgagagggaccggccccaaggtcacccagtgattcagggaattccaaatcaggatttgggcccatctccgtgttgggggtgagaggagttggcctggctaacgctgccctatccctgtctccctaggtcggcgtcctcagctggccgagcatggtggcagcctgcacccttggctcccttgtctggtgcagccagcagagccgccagccttgggcgcccatggccctccgtgtgagggcgtgagcggcctgccccagcctcacctgctgatggaggactcaatggcccagtgacctgacaccacaccaccaactccctcccaccagctgacgaatggtggacccagtgacgagtggcccttgtaagggtcatggaataatttgaagcgaggcatgagcggcccctgtggtcgcctgtgactgctggagatagaggtcccagcaccccaagccaacccagcggaccctcccagccctgcttcaaccaatggg

SEQ ID NO: 21101 - DNA, 2300 bp, Homo sapien
cctcctgcggatgggagtcaaggtgccaagcacttgcctgagctgggccctgcctcaaactgccccagctgaggttcagccagcaaagagaggggctgggctccttccaggaaccccaccaacatgcaacccccctgtttcccccaccaggcctcacactccccgacttgcccgagcagttctccccacctgatgtggctccccctcttctggtgaagcttgtggaggccattgaaaggacaggtaagttccagcctggctgcagcccctggattctgcttgcttacctctagtgacaggcgactcatcctctcacagggcctccaagctcatgctgcacggaaacaggctgagcctggatgccctgggcctctatgttgaatagggcacagagtgactcctaagggaagatgggaaggtgaacatgaccaggccactgcatgtgctgtgccctctcccagttctccctccccacccctcccatgcccttatctctgggcagcaaagggagactgcaggggggttgagcggccagtccaggcctcacgaggtcggggcagcatttgagagctgactcgcctgtccccttcacccccagggctggacagcgaatctcactaccgcccggagctgcccgcaccgcgtacaggtgaaggggagcctcaatggggttgggaggaggctgggggccccagtacacatgagttggacgtgtgcccccctgcacccgcagactggtccctgagcgacgtggatcagtgggacacggcagccctggctgacggcattaagagcttcctgctggcactgcccgcgccgctcgtgacccccgaggcctcggccgaggcgcgccgggccctgcggggtgagcctggcgggtagcccgggggaaggagggggctgtagcgggtgggagggcccaggcctggctcaccctgccctggccatctgtccgcagaggccgcggggcccgtggggccggcgctggagccaccgacgctgccgctgcaccgcgcgctcacgctgcgcttcctgctccagcacctgggccgcgtggccagccgcgccccggccctgggtcccgcggtccgggccctgggcgccacctttgggccgctgctgctgcgcgcgccgccgccgccgtcctcgccgccgccagggggcgctcccgacgggtgaggggcggggcggagccggagcgagcaggggtggagtttggggtggggcgggcggggcatggccagagtgagcggcgtctagaccctaagaagggaggggatggggtccagagtgagaagctgcgttcttgtgatgacggagcggagacctgggctcctgagtcgtgggacagaaggtgaaggggcctagtcccgaagcatgtgggtggtgcctgcaccttcccttctgctcgtcgcagctccggtactggtctctcgctcgcctttgtgtgagaatctatggagcacttactgcatacagctatgagggagctggcctcgcacatgtgcctgtatcatctcctcctccgccctgcacatactgtctcgtatatacccccaggcgtgcaagcgcacgcacaatcctgtgcacatgcgtgggcggacaggccctacccagccctcaccacactccccttccccctaaggagtgagcccagccctgacttcccggcgctgctggtggagaagctgcttcaggaacacttggaagagcaggaggttgcgcccccaggtgagtcccctgtattgctgtcatttcttcccgttgggggccgtaaatactgatccctgagtgctgccggcatcagcaggctggttgcagtgggaggcagccacagtatacagtcggtgctcaggatgcatttgttttcctgtcccccagcgctgccgcctaaaccccccaaggcaaagccggcctccacagtcctggccaatggagggagcccaccctccctgcaggatgctgagtggtactggggggacatttcaaggtaggttgctggcagggggccagggaccaaggaggtgtcacagggtgagcggggtctccaggtggctcggcagtcccaatgttggatgttcccacagggaggaggtgaacgagaaactccgggacactcccgatggcaccttcctagtccgagatgcttctagcaagatccagggcgagtacacgctgaccctcaggtgggggcctgtccctgcaaggataaccgggggtcacaggtcacagagaccgggagttcagaggggatagaacatgtgcggtttcaagaatggagggccaggcacggtggctta

SEQ ID NO: 21102 - DNA, 2300 bp, Homo sapien
aggtgaaggggagcctcaatggggttgggaggaggctgggggccccagtacacatgagttggacgtgtgcccccctgcacccgcagactggtccctgagcgacgtggatcagtgggacacggcagccctggctgacggcattaagagcttcctgctggcactgcccgcgccgctcgtgacccccgaggcctcggccgaggcgcgccgggccctgcggggtgagcctggcgggtagcccgggggaaggagggggctgtagcgggtgggagggcccaggcctggctcaccctgccctggccatctgtccgcagaggccgcggggcccgtggggccggcgctggagccaccgacgctgccgctgcaccgcgcgctcacgctgcgcttcctgctccagcacctgggccgcgtggccagccgcgccccggccctgggtcccgcggtccgggccctgggcgccacctttgggccgctgctgctgcgcgcgccgccgccgccgtcctcgccgccgccagggggcgctcccgacgggtgaggggcggggcggagccggagcgagcaggggtggagtttggggtggggcgggcggggcatggccagagtgagcggcgtctagaccctaagaagggaggggatggggtccagagtgagaagctgcgttcttgtgatgacggagcggagacctgggctcctgagtcgtgggacagaaggtgaaggggcctagtcccgaagcatgtgggtggtgcctgcaccttcccttctgctcgtcgcagctccggtactggtctctcgctcgcctttgtgtgagaatctatggagcacttactgcatacagctatgagggagctggcctcgcacatgtgcctgtatcatctcctcctccgccctgcacatactgtctcgtatatacccccaggcgtgcaagcgcacgcacaatcctgtgcacatgcgtgggcggacaggccctacccagccctcaccacactccccttccccctaaggagtgagcccagccctgacttcccggcgctgctggtggagaagctgcttcaggaacacttggaagagcaggaggttgcgcccccaggtgagtcccctgtattgctgtcatttcttcccgttgggggccgtaaatactgatccctgagtgctgccggcatcagcaggctggttgcagtgggaggcagccacagtatacagtcggtgctcaggatgcatttgttttcctgtcccccagcgctgccgcctaaaccccccaaggcaaagccggcctccacagtcctggccaatggagggagcccaccctccctgcaggatgctgagtggtactggggggacatttcaaggtaggttgctggcagggggccagggaccaaggaggtgtcacagggtgagcggggtctccaggtggctcggcagtcccaatgttggatgttcccacagggaggaggtgaacgagaaactccgggacactcccgatggcaccttcctagtccgagatgcttctagcaagatccagggcgagtacacgctgaccctcaggtgggggcctgtccctgcaaggataaccgggggtcacaggtcacagagaccgggagttcagaggggatagaacatgtgcggtttcaagaatggagggccaggcacggtggcttacacctgtaatcccagcactttgggaggctgaggctggcagaacacctgaggtcaggagtttaaaaccagcctggccaacatggtgaaaccccgtctctactaaaaaattaaaaaaaaaaattagccaggcatggtgatggatgcctgtaatcccaactactcgggaggctgaggcaggagaattgcttgaacccgggaggtggaggttgcagtgagccgaaatcgcaccactgcactgcagcctggacaacagagcagcaagactctgtctcaaaaaaaaaggggacagggattgagggtcaggtgcggggtcccactgggtgccgacacccctctcctcccccaggaaaggcgggaacaataagctgatcaaggtcttccaccgagatgggcactatggcttctcagagccactcaccttctgctccgttgtggacctcatcaatcactaccgccacgagtctctggcccagtacaatgccaagctggacacacggctcctctaccctgtgtccaaataccagcaggtccgtgctggcctgggagccagggagggtagcacctggctggccccaggcctcagtttcctaggtagacccgaccaggctatgcatctcccctcattccgccacgtatctccaggacca

SEQ ID NO: 21103 - DNA, 2300 bp, Homo sapien
cagcctccctgagtcgcgtaagccaccacgcgtggcctcatggcgtctttgacttggactcctgtttaccaccctccccatcacacccagaatccacacccccactgcgacgtcattgtcccttcagccctccccaaccctggggcctcactgtccttgtctgttttgtacagccacctctcaaggcccaacaaggctgaacctggggcaagtgcagaaagaaacctccactctgacccagtctactgctgggaccttgggacaggacctgcctcccttagcctcagagccccctagccttgccaggcactgtccctgccatgtgtcctgtctggagataacccataaataactccagcccagattgtgcctctcactgcataggtgctcacaggagaaaggttgccatctttatgatcccagctatgctgagctgggggtggaagagaatatcccgtgtggtctctaaaaacactcaaccactggctgtgtgtccttggcaaaatagccttccctctctgatcagccatttatttgttaccagctggagtcagtagcacctacccccagccccaactggatgcttctgagggttcaatgataaaatgggttgtaggcccactctatgcctggcaccaagccagagagcaatacattgtagggttacatttatgatttcttccaatagggctggtgcctggtaactactggaaaaattgtagcaattatatttatggttatttcttcaatcccacccggcatagggtaagcaccaaagttggggtggtgagtcttggggagcctttgccaacggtttggtcgtctgagggatgggctcggggaccatccagccactgggacttcagagaagctccggctcccaaaccagctactgtgtgtgtggccagggtcttccccacaactagaggggggcacagctggggactcaggtatatcttccagctgggtgtgggacattttcttccctaggatccgatgtgtcttgccctgaatgtaaggcctggcagggttggaatgtctcagttattcccccaacactccagcctccatctgggccttttttccaggctattctctctgccttcactgttggggccactgtcctgtgtaggcaccaaggcctgaccatgccatccagaagccccagcctgggacaactctcccccacctgcctctgagccctccatggtgactcttgttccccaaaccttatccttctccccattacacagaagggaaagctgaggctctgtcactcaaatccaaagccaggtggactccaagccaccccacccctatcccagacagcacaggctgcctctctcccccatgggcgtcccttgaaggccaggttgccccccaccccccacaagccttgaacgatgaaaagaaggaaggccagttctcttcaccccaagccagaagtggggctgggtgggtaccctagagaaatgacacgccactccctgcgccagcttctgctttccggcgtggctgtggtcaagcctgagtcagtcccacgggaccacggtgaggggtctggagcgtcggggtcaggagtttgaggggggaagggttgaggggcaggatgtgggggttgggtgtgagggaggtcacgggcgagactggagggaggagacctggccacacaggccttgcccactctcgggggcctgaatatttcagttactcccccaaaaccccggcctccatcccatccccagcctccatccgacgtcacccctgttaggtcacaggcccactctgagagtgggtctcgggcctcaagtcccctagccgcccctagaaggtctaggggtgcgtggagacaccaccattcctctcagcctgtgtctgtctcaaaggccccacctcacctcccctaaaggtagtcttgcgccagggctcacgtgcctgggcagggctgattgccaaggggcccaatggcctcgtgactggggacccagcacctggcaggggtgggggtgggacactcagaggaaggagtggaggagggagagacgctggcccgggacccgaggggcgtgggcatcgggaggcgggcccgggttaggggcgggaccgccgcctggttaaaggcgcttatttcccaggcagccgctgcagtcgccacacctttgcccctgctgcgatgaccctgtcgccacttctgctgttcctgccaccgctgctgctgctgctggacgtccccacggcggcggtgcaggcgtcccctctgcaagcgttagacttctttgggaatgggccaccagttaact

SEQ ID NO: 21104 - DNA, 2300 bp, Homo sapien
gtgaaactctgtaaaatatgggccgggcgcggtggctcacgcctgtaatcccagcactttgggaggccgaggcgggcggatcatgaggtcaggagatcgagaccatcctggctaacacggtgaaaccctgtctctactaaaaatataaaaaattagccgggtttggtggcgggaacctgtagtcccagctactcgccaggctgaggcgggaaaatggcgtgaacccgggaggtggagcttgcagtgagccaagatcgcgccactgcactctagcctgggccacagagcgagactctctcaaaaaaaaaaaagaaactccgtaaaatatttaaagaggttaattctgagccaaacgtgagtgaccacggccctaggcacagccttttttttttttttttttttttttttttgagacagtctcgctctgtggcccagactggagctatctcggttcactgcaacctccacctctcgggttcaagagattaccctgcctcagcctcccgagtggctgggattacaggcgcccaccaccacgcccctggctaatttctgtatttttaatagagatggggttttaccatgttggccaggctggttttgaattcctgacctcaggtgatccagctgcctccgcctcccaaactgtttgggattacaggcgtgagccactgcgcctggccaatccccaccttcttgactgaccatttaaaaaatgtaagaaacacctttagctcatcatgagcagcacaaaacaggcagggacaggatttggccctgaggcaggagaataggtctggaggcagggaacataaggccaaatcaaatggaaacaattcagctatgacaggaaatatcttctccatttaaagagggcatacatccagtaaatgactttgtaactttacttcatcctcttcatttacataggacgtacattaagtaaccagtgaaaacctctagagggcatttaaaccccagaaaattcttaaacaggtctcttgagtccgtatgctccactggctcccaccctgcggagtgtactttcgttttcaataaatctctgcttttgttaagcttcattctttccttgctttgtttgtgcactttgtccaattctttgttcaagatgccaagaacctgcacaccttcaacagttaacagcccacaggcagtagtttgcgactctagtagagaatgcatagggatttccattgaaaatcattttttaagccagttacggtggttcacgcctatcatcatcccagcaccttgggaggccaaggcgggtggatctcttgaggtcaggagttcgagaccagcctggctaacatggcaaaacccctgtctagaccaaaaatacaaaattagttgggcgtggtggcccgtgcctgtaatcccagctgtttgggaggctgcgacacgagaatcgcttgaacccgggagggagaggttgcggtgagccgagatcgcgccaccgcactccagcctgggtgacagagcgagactccatttcaaaaaaagaaaaaaaataattgttccctacgggaacggtataattaggatataattgtttctggccacagatcacatcccttctggttaagtccaggagaatctggaaatacgtagggcaaccaggccagaaggcgttgtaactgcctaagattgaccaaccctaacgcgggaggcgggacgacggtcactgatttgccagcgtgacgccggtctgcgactggccagtgccgtcctgggcgtgtcggtaggacggggctgcgacggtttcccataggctggcacagaaaggggcggggaaacaagagtgcaacgttaccaatcggcatgcgggacgtaacgcaattcttttttccgattggtccgtgaagctcgggaggtcgttgggggctcgaccttgggatagaacgcctgccttttattggtcaatactcttcgggccgggcaatgtggctccccgaggctgcctgcgattggtgaacgcgtcgcggctcggggcggacctgcggactgaagatccttatgcgattggccggggagccggaggggcgggcaatttgggatcgacagtgactcgcgactggtcggcgcggcgaaagcagagcggcgcgccggttccttggttcctgagggcgatggcgcggggtggctggcgccggctacgccgcctgttatccgcggggcagcttctattccagggccgcgcgctgctcgtcactaacacgctgggctgcggcgcgctcatggcggccggtgatggcgtgcgccagtcctgggagatccgc

SEQ ID NO: 21105 - DNA, 2300 bp, Homo sapien
aaattaagtaattaattttttgagacagcgtctcactctgtcgtccaggctggagtgtagtggcgcgatacggtttcctacagcctcgacctcctgagctcaagtgatcctcctacttcagcctcgggagtatttgggtccacaagcacgcgacaccacatccagctaatttttaaattttttgtagagatggggcctccctatgttactcaggctggtttccaattcctgggctcaagcgatcctcccgccttggtctcccaaagtggtgggattacaggcgtaagcctccgcacccggctatttttactttaaaatactaagtcagtgacggaagcttccgcacattctcgtggctcacttttctcttcctggggaaaaaaggcaggaggtatttccgagagagccacccatgtaggaagcgtgcctttgggcgatcagggagctgagcaaccgaaaaacctcccctccaaggaggcggcaggccagggcctggaccagctgccctggagccccccacagagcacggactaccgcgtgggcgcggagggcagggagaatgggaggtggatttctttttattttttgtttttctgaattttcccaatttctctgcagtggattggtgatacttctatagtccgagtgggggaggagggagcaaacatgttaccctaaaaagaaaaaataaatttcccaaatgtaaacggtgcggggacgtgggggtgggcgtcccagtactcccagggcactgggggcgggctggggactgggttggcggcggctgggcctcgaggcgctaagttattctggtctctcggcgcctccgcagctggcgagctttttataaacaggacgagtcaccccccgccacacacacacgctccagccccgcctactgggaggggtggggggagaatctaggggatcaggactctcctgggggccacacacccctggagggtttgaaagctggagtagggggagcaggagacccaaagtgggggctggggtttcgggctcctcctccctccccaaattctgacttccttccctaaagatttggaggaataaaagatggaccatcttagctcccaaaaggctccatcctctgagttttgctttcccaggatggagggagggggtctcccagcccccgggtctttgaatccgagctttgaagagctggaggcttcggctcgtgccctccctgtttcccggggcatttaccgcaggctttaaggggtttccgggacaggtcgcttctctgtccctgctaaaccttttcttcgaattttcttcttgatgacggggcgcagggaggggagggggttcccagagagtccatcagccccttcctccttttctgggaatggtggggaggggaggctctcttgacctctacttctttcttttcaaacctcagaaacgggggaggggtggagtctttactagcccctccctcagtgggggggtcttacgcctcgggaatgggacaggggtccctcttgactcctgtttattctttggtatttattttgaaccccatatatgtgagggtataaaacatctcttgggcctcgatttttcttttctgcaattgggagtcaggggcatttaacaggggtcacagcaccttggactagacggtggcctcaagagtcccctacctggggtgggtgcgggcgggtaagggaaccgcccctcgaagaccggggctcagccaaggcctcagcctctcggcccttcaatctcccagatgccaccattggacaagaggagggcgtagacaatctctgattggctacttcgcccgtcgctcgagagcttaagccagtgagagaacgctgaggggccccgcctccccgaggcggacaggaggcggacgagaggcggagtcggcccccgcgccgctcccgcccctactggatgcacacgctaggccccgccccatttgcacgtcaatctgctcaggagccctgccccatctggctctgcgtgcgtcaatgggccacatctctacgcgcggctccgcctccggatggcgtcacggacttatctacatgtgaggctccgcccctccctttgcaggacgtcacggaggactgcaggggcctgagccgctgctgccgccgccgccgcgcagccccacatcaacgcaccggggtcctgtcaccgccaccgccaaaaaagtcaccgccgctagggtcgccgttgcatcggtgcagggcaaggtgagctcctgggcggccgggtgtgctcaggctccgagcacctgcataaccttcatttgactgatg

SEQ ID NO: 21106 - DNA, 2300 bp, Homo sapien
tgcgtctgactctgtgcctcagtttccccgtttgtcccgggggtcgtcagggagccgccggcctcgaggcggggccgatgcgccctttgccccctccccgctgggccccgcccccgcagctgtccagaaaaggtcccgcgcagccggcgctcggtccagcctccacgcagtcctggcgatgcagggcccccccgcgcccgccccggtccccgggcccggctcccctcggggatccccgcgcggctcccccgggctcttcaggaagcttttggtgaatcagagcatccgcctgcagcggcgcttcacggtggcccatccgctgtggtgaggctggacagagggcctggcggggtcaccgggacgcccggtgtggaggtgggaagggcagggacagggacaaggccagggacagctggggccggggccggagtccgggcttggacgctctgcctctccctcgctttctctgtatctctctccctctaccctaccttaccctacttttgtctcgcagttggtgactctgtctctctctgtctccgtctgtctccacccgccgcctggatataggcccaggggaccagccgtctgtctccttccagctgtgaggcccagagtgggacgggctgaggctcacgtctcctcctgaccctcgccggcctggggcaggcaggctgtgcgtcctggcagtgggaggagggggaaggggcactccttcccttggtgccccctcccaccagcatcctgtcccagtgccagcaaagagatgccctgggggcctcacaatgaactctgggtgtccacggaggaagacctgaattgagggggttttcgaggcagggcgttcgggagtcccaggctgagcgcgcgcctgcgcccggcagctgcttgcgctgcatcctctaagcactcggtccacccctctgggttcgaatccctgcctttccagaaacgactgtgacctcgtggggagggatgggggcaaggctggggttcggagtggggcttgtgggcgccgactgtggctggcatcctgcgcttggtccgcgccgaattggcacccacttggtaagtctggcacccaaaggctgagaggggaggtccctctccaaggtcatagctggggttggagggagaaggtatgaccgtggttcctggtggttccatttcaaccagggagtgggagagtgggggttccgtgtcctggagagcgacctcggggcaccaaacactagcgaagcacattcccttttgaaggcgctagagacagcgcagggacgtcgagggcgcgtcgcgggtactcagaagtgaggatgaacgagggccggccccgcgcaggccagacccgaacccaagtccgagcctccctggctcagtttacccccctggccaatgggcagccgcgccgttcccacagccggggggctctacccccgcaccgcccgcgtcatggaaccacagcctgaccccgccgctcccggctaagtttagagcagaaagaaaaacagcctcccccgccccaagaaaacccgggcccagtccttaaccctccgcgcccgggatccggatttgcacgccctgtggccgctcctggcctcagtttccctatttgtccacagacgcgcttttctggaacccttggggagagccgagagaggggtagggggtcgcgatccgcatgcctccccctcgaggggcagatctgggttatccgccgcctccagtccgcccctaagagcgtctcccattgcaccacagcgcccacggcgcaccccagacgggccagggaagggttaagaagccccgccccttcggctggccgtggggttcatcccggtgctgctaaacccgctggagtcggacggaacaggccgagcgcggccggtcttagtcggagatgcccgaactagccctcatgtagccggacgtgaccgaacatgcccgacccggcccgagcgtcacccggacttgttcgaagcagaccgagcgtaaccggacttaggcgaacaagctcgaacttatccgaagtctcccgagctcaatcggacgtagccgaattctcccgaactcatcgaacaaactcttcgtgaccaagtccaattcgacgtgatcagacccaactcagacccggtcatacttggaccgaatgctgccaaatcccccacctctacccagatctgagcctacgcggggtgccgacccagctcgtggacggggatacggtgacctttgacccaaaagtcttggccgggaccagccggacactggccctcggccgggagctccgagtctcaggcggt

SEQ ID NO: 21107 - DNA, 2300 bp, Homo sapien
actacagaggggatgaaatgagttaacgcatccagtgcgggaggacccaggctgggaagaacactacctgtccgggttcaaatgaccccagtcttgcaccttatggctgtgtgtccttaggcaaatgactgtgcctttctgtgcctcagtagccccatcctcgaaatgggaatagtagtccacactttgtaggtttcgtctgaaaatccaatgacttttcccttcactgctgttggctgagtgctgcatgtttttgaagcactcagtttacataattttgtttagtcttagcctcctattttatgtctgtgattttgggggaggggctgaatctctgtgcctcggtttctccttggggacatgtaactattgtcacttctctcacagtggcggggaggtggtgtcaagactgctgagaccttggctccagtgtccccacaaggccaatcctagcagcatgtgtcccctagggatggctataattaggtctggccccagcagacaacgatggtatttttgtcttggggacagcgaggtctggttcccgccaggtgtctggttgcaagactgcgggggttaggggggcttcctggccagatacctgaggctctctgtttttctgggctgtgtgactcctcctctgagcctctgttttctcatctgtagaatggggagactctcatgtatctggccttagcatggttgcctcaggatctcctgtgggatccctgatcaatgggcttctccaggactgccagaaacatgggtaccatgtctggggacaccaagactgaggcagccgccccggggggaaggcccaggctgagagacagaggtcattccacagcaaggggcacggtcaggcctcagttgctgggaggtcccctgggcctctgcctgtgacatggctgtttctaggtccctcctccttgtgtgacacatgctaagccttggtttccttttctgtaaagtggaacaaggccagcctgactccagcattctgagggtagagcacctggtacagactctgggaatcctcccagacaccagaggccccccccagtcctgggacagtgaggtccctctgatggcaggggtgggcggctgaggtttcgcaggacagaagacttggcagaggtgatgtgcggatgtttgtctaggaggagacagcaggagaggtgaaggcatccagagacagggcctggggaatgtcagagcaggtgggggatcacgtggggagttgcgtggaggggtgctgggagagggggccctgagtttgggtctcgctttctgcaacaaagacccatgcccgtgaccgcgtccatggaagcctcagtttccccacttggcaaaggattaagggtttgtagtttctggtgcgctgtttgatggcactaggcctcagtttctccatctggaaaatgggcagaggaggattagaaacattgcgtgggatcggacattggcaaactctatacctcggtgatgccctcaataatggaaggcaagacagctgtttctctgggcaccttgctttctgactccctcattctacactttttagcagttattggcccagcaagctgcactaaccagggacgtgccgaggaaggctgagtaagatccaggctctgagatcttaggggcagccctctaaagaagtacagttgggcctggcgcaatggctcacacctataatcccagcactttgcgaggctgaggcaggaggatcacttgagtctgggagttcgagatcagcctgggcaacataaagagacacccccatctctccagaaaatacattagcccgggcgtggtggtgtgcatctgtagtcccagctacttgggaggctgaggtaggaggatcccttgagcccaggaagttgaggctgcaatgagctaggactgtgccactgcactccagcctgggcaacacagcgagatcgtctcaaaaaaaaaaaaaaaaaaaaggagcagagagttgcgtctgactctgtgcctcagtttccccgtttgtcccgggggtcgtcagggagccgccggcctcgaggcggggccgatgcgccctttgccccctccccgctgggccccgcccccgcagctgtccagaaaaggtcccgcgcagccggcgctcggtccagcctccacgcagtcctggcgatgcagggcccccccgcgcccgccccggtccccgggcccggctcccctcggggatccccgcgcggctcccccgggctcttcaggaagcttttggtgaatcagagcatccgcctgcagcggcgcttcacggtggcccatcc

SEQ ID NO: 21108 - DNA, 2300 bp, Homo sapien
ccagctacttgggagactgaggcaggataatcacttgaacctgggaggcagaggtcgcagtgagccaagatcgcaccattacactccagcctgggtaacacagtgagactccgtctcaaacaaacaaacaaactagacacaccagttgttggtggatgctagcaggagctggggagagggggcactggtatgcacagctcctggtctcagaccctttacatctggcatcacttttagtccttgcaatgatgccaagagttggagacaccattattattcctcttttccagaatattttaaaaaaagactttgggaggggaagtgacagagccagccagtgaccatgtccctcaccattgagccaagttgtctcccacagtcagttcttgggagtggtgggggggtggagaacagggactgaaccacccaagcatagaacagagagggagtcatttgtcatgcgtcacacagcaagacatgatggtactggggcttgaattcagtctgtctgacatcctggcccaaatgttttccttttctccaacctggggacatggctggggtcactgggagatggtctccatgggaaagaccttgttgagtgcttctgagacttccaaaaacatcggggctcttctcaaatctgatgcagcaagaggcaccctaatggccttaaatgcctccctgcccaagcccagagcccacaggaggcctccaccaagtcatgaccctgggagtacaaaatctcacctctttctgcaccacactcacccgcccagccctgctgctgttcatgcctacttcagttaaccatgatggaaaatgttcttacccatccttgcacttcccaggaaattacccctgagactaagacgcctggtgggtggagacttgagtttccagaactgggagggaggggcaggcctggggtttgagggcaggaatcgtggctgtgaggtggggcctgggcctttctcagggcgaatgagatcctgccatttccgctgagggtctgtgtgttggtgtggctttaaaagcacgagagtctcagagatactcctcctgcctgtcctgagcttccacaaaaggtgggttttctgccagtcctcccccaactcagctgcagcatggctttggggtggggagggtcttagaagcagaactaggatgtttcttagagagacctgacttcccctctttgcccatccctactggtagctgtttggagctctggccagaggtagcctctgtgtgcccatcccagacatgggagccccctcacagccttgccaatttccctgtccttctcatatccctgcctggcatgggtgggggttttagggctccaaagagaccccttctggggctgaaccgcggagcctaccttcctgggcttggcagaaagactgctatctgtacgtacctccgaagaccagaaccttgactgcttccagactccttgttgccattgttgctggggaaggttgagggcccgtcactgctcatgtttcagcacctcctgggcggatgacgccctggtctgggggtgcacctgaaccccggtctccctcccctgccttcagcaccatcaggtcgcggacagctcttcgctgtctcatccacccggagaacccaaagctacctttttctctttcaacacggtgcgagggacaccgtctcggccccgggggtctcctgagaccctgtctccctgccctccatttagcagcgatcagtggacaatttctgtcttctccactccaagtccttgtcttggttcttttccatgcagcgctataggggacggcagacggttttcggggctggtgtgttgggggggggtctcttcagcccctagcttcaacaccccctcaccacgttcttctcccctgttctacccttcagcaccatctgggcatcgacagctcctcggtgtcggccccaccttgagccccagttccaccttctaccgcttcagcacctccggcgcggacagctcctcgctgtcgcctccactcccggccctgggccggacccgggagcagacgctcctcggcgcccgctcacggggacgagtcctgctccctgctatcccagacccctttctctggcgcatggagaacctgggggtcggcgaaggggcagaggcttgcagcaggttgagtcgctctcgcggccgccacagcatgaccagagccccgaagcacctgtggcggcaaccccggcgccccatccgcatccaacagcgcttctattcggatccggacaagtccgcgggctgccgcgagagggacctgagc

SEQ ID NO: 21109 - DNA, 2300 bp, Homo sapien
ctgggctgggggctcagccctggggccaaggcatggttgggggagctgctatcccaagcagggccaacctgggctgcagagccttttggtgtctgaatgcctccctgtgtgttccttcctcagggatccgtgaatgacagattgtcctttgcccaccacctccaggagtgagccctgaggagccaacagagatgggggcatggatggggctggggttcctggggaggagcagaacctgaggaaataaagcccctaccattcatccaaggcctcgtgtgaaaacacgagttatggactcgtgtgaaaacattaactgagcacctactatgtgctgggctctgtgctggggtcacagtggggaccatgtctttactttcaggggatccacagactcaaggcagggacagataagaatcaggagctcacttggctgggtgcggtggttcacacctgtaatcccagcactttgggaggccaaggcgggcagatctcctgagcttaggagtttgagaccagcctggctaacatggcgaaactctgtctgtactaaaaatacaaaaattagctgagcgtggtggcaggtgcctgtaatcccagctactcaggaggctgaggcagagaatcgcttgaaccagggaggcggaggttgcagtgagctgagatcgccccattgtactccagcctgggcaacagagcaagactccatctcaaaaaaaaaaaaaatagggccaggcgtagtggcttacacctgtaatcccagcactttggaaggcaaaggtgggtggatcatttgaggtcaggagttcaagaccagcctggtcaacatggtgaaaccccatctttactaaaaatacaaaaattagccaggcgtggtggtgtgtgcctgtaatcccagctattagggaggctgaggcaggagaattggttgagcctgggagtcagaggttgcggtaagctgagattgcaccactgcactctagtctgggtgacagagtgagaccctgtctcaaaacaaacaaacaaaactgggggtgccgggcatggtggcttaccactgtaatctcagcactttgagaagctgaggtgggtgaattgcttgagcttggtagtttgagaccaaattgggcaaaatggcaaaaccccatctctctctctttttttcttttttgagacagtctccctctgtcacctaggctggagtgcagtagtgcagtcttggctcactgcagcctctgactcctgggttcaagccattcttttttttttttttttaataagatggagtttcgctcttgttgcccacactggagtgcagtgacacgatctcagctcactgcaacctctgcctcctgggttcaaacgattctcctgcttcagcctcccaagtagctgggattacaggcacctgccaccacactcagctaatttttttgtatttttagtagagatggggcttcaccatgttggccaggatggtctcgatctcctgatctcgtgatccacccgcctccgcctcccaaagtgctgggattacaggcgtgagccaccgcgcccagccaatgaccagagagggtctttgatctacccggggcggcacagcacagcgggcaactttcctggagcccccaagctccttaggccacaccccatgggctctgcttggaagcagatatcctagaccctgagttgataaaatcccccccttcccagagctgctggtcccctaccaccatcttccttcgcgccctctctctcactctatcatatgcaaacacatgaacaattaatcttaacacctctcacccagcctcctcactcctacgcctcccttccctccttcccccctccttcctctgccctccccgcccctccccctccatgcccggccaccctcttggccactctctcgtcccctcaggccctcttggacactctgccctccacccactgggagcctcacccaaggaaagtgtgtggattatgtcctggcctggtgcccagacagttaaggggctccgctgagtgggtgttgagggagccctgggcctccctcttggtcaggtcattttctcccctccttccctcactagccagcaggtcatgggacccaggcaggactccgcagtggtggtaagtgccagacatgcctgggcctcctggagcaagcttattcttgagcttgggggcgtctcaggagaggtgctggggtctcgtaatccccctgaaaccatcagagccactctgggagctgaatgggtctcccatgtgtctggggccaggagaccttgtttcgccagtcc

SEQ ID NO: 21110 - DNA, 2300 bp, Homo sapien
ctgtcatacctgtggacgcacacagcccacccgtgtggtgcagggcatgggccagggcactgagggccccggggcagtgtcttgggcctccgcctaccagctggctgccctgagtcccaggcagccgcatcgccaggacaaagcggccacagccatccagtccgcctggaggggctttaagatccgccagcagatgaggcagcagcaaatggcagcgaagatagttcaagccacctggcgaggccaccatacccggagctgtctgaagaacacagaggcgctcttgggaccagcagacccctcggccagctcacggcacatgcattggcctggcatctaggaccctggctccctgcagtggggacttcgtgggaggcactcatggctctctgggtctaatgaataaagtcctccacagcctagatcttgggtgatgtgttctgggttaatggaagtggcttgggtatagtgggggaatctggaacatcccagagggaagagaactctgaagttaccaaccatgcagtatgcatctggggtctgtggccagcatggggacctcaaatctttcctggaggtcaggcactgccaatgtggtctcagctgtgcctctgccatatccacgtacaggtagtggggtggtgtccagcccgtcccagatggaaactgtccccagtgcactctagaaatgtgcctgggacctggcccagagcactcacctcaagtccctcacccctaaaaaatcctacaggatggctgggtgtggtggctcatgcctgtaatcccagcactttgggaaaccaagacgagtgggtcacctgaggtcaggagttagagctatcagcctggccaacatggtaaaaccccatctatactaaaaaaaaatacaacaacaaaaaaaggccaggcacggtggctcacgcctgtaatcccagcactttgggaggccgaggtgggcagatcacctgaggtcagaagttcgagatcagcctgaccaacatggagaaaccccgtctctactaaaaatacaaaattagccggccatggtggcacatgcctgtaatcccagctactcaggaagctgaggcaggagaatcgcttggacccgggaggcggaggttgtggtgagccaagattgtgccattgcattccagcctgggcaacaagagctaaactcagtctcaaaaaaaaaaaaaaaaaattagccgggcatggtggtacacgcctgtaatcgcagctacttgggaggctgaggcgggaggttgcttgaatcccagagtttgagaatgcagtgagctgtgattgtgccactgtgcttcagcctgggcgacagagtgagaccccgtctcttaaaaaaaaaaaaaaaaagggctgggcacggtggctcatgcctgtaatcctagcagtttgggaggccgaggcgggtggatcacttgaggtcaggagttcgagaccagcctggccaacatggtgaaaccctgtctctgctaaaaaatacaaaaattagccaggcctggtagcgggcgccagctactcgggaggctgaggcaggagaattacttgaacccgggaggcagaggttgcagtgagccaagattgcatcactgcgctccagtctgggtgacagagcaagactccgtctcaaaaaaaaaaaagaataaaagaaagaaaaagaaatccataatagaaatgctagaaggttagaaggtttcagtcatgtccccaaaaggccccagtctgggtgagacagaggacagaggaggacgaggacagagaacaaggacatccccagccctgtgggttcagggatcggagggaggtgggagaaattggtgctcccagaggggacaacctggctggacgaggggcagagggagtgacagcaggggtttgggcagctgtggaaccaggagcagggggaaagaggacggcaggggcagggtgtctttagtggatgactggctttgagagcttctgggtcgtcgtgtttagaaggggtggagtccaggtgaagagggcgagaaccgcacccgggggaacaggagcgccccagggaggtcccacaccctgcagccccacctgcgccttgcccctgcacagccccgcgctccgccagcagggagcgcacacgcaggtgcaaggagctggcacctgggcacacacctggccacacacctgtgcagagccggtggcaggccctcccggcgcaggaatggcgtgcccccagctgccgccacttctgcttttggtgctggtggtgctgctgaaagctggtgtgaattacaatactccctttacag

SEQ ID NO: 21111 - DNA, 2300 bp, Homo sapien
gcaaaactctgtctcaaaaaaaaaaaaaaaaagaaaagaaaaaagaaaagcaggtaagtggtcgggcattcaggtgtcatacactgtgtgccaagatgaagtggccgtagggtgatgagaggtggatataaggatggcaaagaccacttgggagagggagggatggaaaaagggaggcggaagatcgcaacgtgccaggaacaagatctgggcctggggggccagtgtccaccccagccaggagacctcttgtttgcaggacctgctacaccctgaccaccccctgccgcccccacaggcagagctgacctgtccggtaatcaaggcaatgcagccggccgcctagctacagttcacgagccagttgtcacccagtgggcggtgcatcctccagcccccgctcaccccagtctcctggacaaaatggagaaagcgcctccacagccccagcacgagggcctcaagtccaaggagcatcttccgcaacagcctgccgaaggcaagacggcgtcccgccgcgtcccacgcctccgggctgtggtcgagagccaggccttcaagaacatcctggtagacgagatggacatgatgcacgcccgtgcagccacgctcatccaagccaactggaggggctattggctccggcagaagctgatttcccagatgatggcggccaaggccatccaggaggcctggcggcgcttcaacaagagacacatccttcactccagcaagtcgttggtaaagaaaacgagggcggaggagggggacataccttatcacgccccacagcaggtgcgcttccagcatccggaagagaaccgccttctgtccccgcccatcatggtgaacaaggagacccagttcccttcctgtgacaatctggtcctctgcagaccccagtcgtcccccctcctgcagcccccagcagctcagggtaccccagagccctgtgtgcagggtcctcatgctgccagagtccgggggctggccttcctgccacaccagacggtcaccatcagatttccctgcccagtgagtctggacgcaaaatgccagccatgcctgctgaccagaaccatcagaagcacctgcctcgtccacatagagggtgactcagtgaagaccaaacgtgtaagtgcccggaccaacaaagccagggctccggagacaccattgtccagaaggtatgaccaggcagttacgagaccatccagagcccaaacccagggccctgtgaaagcagagacccccaaagcccccttccagatatgtccagggcccatgatcaccaagactctactccagacatatccagtggtctccgtgaccctgccacagacatatccagcgtccacgatgaccaccaccccacccaagactagcccagttcccaaagtaacaataatcaagaccccagcccagatgtatccggggcccacagtgaccaaaactgcacctcacacatgccccatgcccacaatgaccaagatccaggtacaccccacagcctccagaactggcaccccacggcagacatgccctgcgaccatcacggcaaagaaccgacctcaggtttcccttctggcttccatcatgaagagcctgccccaggtatgcccggggcctgcgatggcaaagaccccaccccagatgcacccggtcaccaccccagccaaaaacccattgcaaacatgtctgtcagccacaatgtccaagacttcatcccagaggagcccagttggggtgaccaagccctcaccccagacccgcctgccagccatgataaccaagaccccagcccagttacgctcggtggccaccatcctcaagactctgtgtctggcctctccaacagtggcaaatgtcaaggctccaccccaagtggcggtagcagccggaactcccaacacctcaggctccatccatgagaacccacccaaggccaaggccaccgtgaatgtgaagcaggctgcaaaggtggtgaaagcctcatccccctcctatttggctgaggggaagatcaggtgcctggctcaaccacatccgggaactggggtccccagggctgcagctgagcttcctttggaagccgagaaaatcaagactggcacccagaaacaggcgaaaacagacatggcatttaagaccagtgtggcagtggaaatggctggggctccatcctggacaaaagttgctgaggaaggggacaagccacctcacgtgtatgtgcctgtagacatggctgtcaccctgccccggggacagctggctgccccactgaccaatgcctcatccca

SEQ ID NO: 21112 - DNA, 2300 bp, Homo sapien
ccaaagtgctgggattacaggcgtgagccaccacgcccagccgccctactaatttttaaataatttttttgtagagatgggatctatgttgcccaggctggttttgaactcctgtgttcaagtgatcctccaacctcggtctcccaaaatgctgggactacaggtattgagccactgtactcggcctcttttttttttttttttttttttttttttttgagtcagggtctctcattcaggctggagtgcagtggtgcaatcttggctcactgtagcctccacctcctgggttcaagtgactctcctgcctcagccaccaaagtagctgggattacaggcatttgccatcatgcctgactaatttttgtattattagtagagacgaggttttgccatattggtcaggctggtctcaaactcctgggctcaatcgatctgcccgccttggcctcccaaagtgctgggattataggcatgaaccatcgcgcccagcgtccccagcatttattgacacctagttgaggccagccctccagtctgatgggggagtcaagcaggcatgagctgtgatgtgaagggctttttctaaatcacagatctgactccttacttgaaacctttttggaaaaagtcctgactgcaccagtccctgggctggccagtgtctcctttcaggagcctctccacccaaattcccaatatcctgccttcctggcctcagggtctttgcacggctgcagctgtagttctgtgccagctactcttcccccagtcatgcagctgagcgccacctcccagcctcagctgcacagtcctcggaagcctgtccctagtaaccctcaggctaggccagcaccttactgggctcctacggtctccaattgccctgagaactcccagtttgtgtttagctcgttgacagcacagaagggacctgttctgatgaaacatccaaaggatgagctgggtgcagtggctcatgcctgtaatcccagcactttgggaggccgcagcaggcggatcacttgtggtcaggagtttgagaccagcctggccaacatggtgaaatcctatctctactaaaactacataaatcagctgggcgtcatagcatgcacctgtagtcccagctactcaggaggctgaggcacgagaatcgcttgaacccggggaggtggaggttgcagtgagctgagatcgtagcactgcactccagcctgggcaacagagcgagactcaatctcaaaaaacagacaaaggatataaaccccacccaactgccatctgccatgtccctgattttgtccaaagtcacacccacagtatagggaaggttttggagggggtgatcgctgcagagggaggtcaggcacccctgctggttcttgtcccggcaacccccagcggctccccaaggaagccaggcagaggcttctgggccaggctggctttggctggagccagctgcactgagtccaaggtgcgtgtcagccttggcccagccagcggtgactcatgctgggccccagcccagccccaggaggtgatccaggacagcagcctgacttccccttatagcgctgcggctcagggtcagtacccacttttgccgggcccagtggggatcccaagagatcaagtccggccccaccccaaggagcccgcagtctcagagccacacccaagacatcagtgagaaccctgactggcccgttgcaccccctttttggtcccttcccatctagccattttacagcctcaaattctttgagttgtttgtatccccagacatggggcaaattccagcatatagtaggtgctcagaaaatgcccgtgggatgaaagactgaaactgcctctaggtacatggagggggagatttggggttccctctgtgctgagaaccctttgtactcaggatgagccggtgtaggtagcaaccaccatgacctttggccctgccctgcatcctgttccccaacctctggctgtgccttctagaatccccaccccctaagagctgccagggattggccagaacttggctttgagtcacaaagctgctgcggcaccagggctccaagactggccgttcagactgctaggtttagcttcaggggcaggtgagtggggctggtggctttgggggcgggtgagtggggctggtggcttcaggggcgggtgagtggggctggtggaggacttgtttgcgagggttcgtgggggaccctgtcgttctcctctggcccccagtgcctttagagcccttctgggccttctgggtgactgcaaatgatggg

SEQ ID NO: 21113 - DNA, 2300 bp, Homo sapien
tgcgcccagcctaatttttattttcaatagagatggggtttcaccatgatggtcaggctggtctcaaactcctgacctcaaatgcctgcctcagacttccaaagtgctgggattacaggcaggagtcaccgcgtgtggccgacaggccacctctcttggtgatgaggacagcctcccttatggccttcatgccccagttgggggcagagccaggtgagtaaggaggatagaaaaggagtaacgcatgcccactggccaggcagacaaactgaggctagagaccacccacacaagcaaccttttgttgcattcacctttattttttatttttttttgagactggagtctcactctgtctcccaggctggagtgcagtggcacaatctcagctcactgcaacctctgcctcccgggttcaagcgattctcatgtctcagcctcctgagtagctgggattacaggtgcacaccaccacacccggttaattttcgtatttttttttttttttgtatttttgtatttcggccagtctggtcttgaactgctgacctcaagtgatctgcctgcctcggcctcccaaagtgctgggattacaggcatgagccaccacacccagccccgcattcacctttaatactgagcatccattctatgcgaggccctgtcagcaggctcagcataggcaatgtccctgaccttcagggactatggtccactccatcattctggcagattcagaggctacaataaaggagtaaagtctgagggtggggcacttcctgaagacacatctttgcactgggggaagggagtaccaagcagagagcatagcacgtgcaaaggcccagaggtacgattagtcctgcaactgggaggccaaggatcagagagagtgaggggaaggaggtcagggaaaggagggtgtgggctccattcagacagaggtggggagctggaggggtgcatgcagaggctgtaggtcagatccagatgtcctaaggatcccttgtgagtattggtggggtgggtccatctctcctccctcacacccccttcccagccagtcttaatagtggctcattaagccctaacagccatgatagtggtaacaagcatgtaataattatacccggcattcctgcctcatcagcccagcccctggagttgggcaccctcgcccaggacatcacagccctggcagacctggggttaaaacgtgggcggcggaaggaaggggctgcgcaggggcctggactcccaggttctagggttctaagggtggacaagagctcaggcctagtcacagcccgggccctgctgtgactcctagctaactctcgggggatggtcactccacctctctgagcccagtttcccatctgtaaaggcaggaagtaggactcctggttctagaacgcactcagtgaaaatgatcaggatccaagcgctttcagcaacttctggcgaccctcctctcccctcccgtctcttcctgagcaatcacacgcggggtggagggagggagggaaggaaggagggagggtgaggaacgcagacctccccacacccccggcgagcccccggacacagccccaccaggcctccagccccgtatccgcacaaagcctctccagaaggcgcgctaggggaggccctggcggcacagcagagcaggaggcgccaaggagttatttagccatgcgggaccccatccccctccagtccccggaggccggcaccgcccccgcccccgcccccgcccggccggggccccacgcgcggacacggggcggggcctcggggcgggcgggcgcctggtggcccgggcccatcacgccacccgggacgtgccttggcggaggcggcgccggggagatcggtcgtacacagcggtcccggggcggggtgacccggcccgggcgcgcggccgcccccatgacgtcaacccacaaggcagcgcgctgttgtggcgtttaccgcgcgtcgccggggcaacggcggccgggcgggcgtcggcggcttggccccgcccctccatgcaaatgagcgacgtcacccgcacccaatggcgaacgggggcggtgagctcatcgcgccgagccgaggctataagagggcgcacaagtggcgcggcgcaggagccgccgccagtggagggccgggcgctgcggccgcggccggggcgggcgcagggccgagcggacgggggggcgcgggccccccgggaggccgcggccactcccccccgggccggcgcggcgggggaggcggaggatggaaacacccttctacggcgatga

SEQ ID NO: 21114 - DNA, 2300 bp, Homo sapien
ttttttttttttttttgagacagagtctcactctgtcgcccaggctgcagtgcagtggcacgttctcggctcactgcaacctctacctcccggggtcaagcaattctcctgcctcagcccccagagtagctgggattacaggtgcccgccaccatgcccagataatttttttgtatttttagtagagatggggtttcaccatattggccaggctggtctcaaactcctgacctcaggtgatctgcccaccgcggcctcccaaagtgctgcaattacaggcatgagccactgagcctggcctttatgtttcttattaaaaatataagcaaatttggttcacgtgcttggtgtggttaaaaaaaaaaaatatatatatatatatatatacacacacacatgcaaatatatatacacatacacatgcatgtatttctctttttgcacacaaaagaggacatattgtaaaaactgttctctaccttggtttttttcacttaagatatccagacaccattcaatgtcagtatatgaagattgtcttcattcctttttatagctgtattactctattatttggtcgcattgggtttttttcagtcttttgatattatgaataatgtcaataaatagcatcagtcatttaaaaacgaggctgggcgtggtgactcatgcctgtaatcccagcactttgggaggccaaggtggaaggatcacctgaggtcaggagttcgaggccacctcctggccaacatggcaaaaccccgtctctgctaaaaatacaaaaattagctgggcattgtggcatgtgcctgtaatcctagccactcgggtggctgaggcagaagaatcccttgaacccaggagggaggggttgcagtgagctgagatcgcaccactgcactgcagcctgggtgatagaatgagactccatctcaaaaaaaaaagaacagggtcttcgcagatgtaattaaggatcttgagatgacattatcctgaaatttatggtggacttaataagagaaaggagtgtcctttacaagaaaaaggagcggccgggctcggtggctcacgcctgtaatcccagcactttgggaggcagaggagggaggattgcttgaccccaggagttcgagaccagcctggacaacatagggagaccctgtctctactacaaaaaaaaaaaagaaaaaaaaaaggagagatacatttgagactcagagacacacagagaaggccaagtgacgacaaaggcagaacgcggaaggctgcatctacaagccaagaactccaaggattcccagcagccaccagaacccaggagagaggcataggacacacagattgtcctcagagcctccagagggagccaactgtgctgacaacctcacttcattattctgatctcttgaattgtgagaaaatcacgttctgttgttttaaacctcgcagtgtgtgggcatttgttacagcaggccccagaaaactaatagcattcgcctatttactttgtttactgtctgtctccctgagggccacgaattttgtgttttgttcattctgtgagcagaaacaggcacagagtaggtaataagtacttaatatgtgccagacgctgttttaagtgcttttacatggtttcattcatttcatccttacagtaagcaacgttttggagcagacactactatttacagggagcaaactgaggccccgagggtcgtggtcaggattccaacctattaaatgatgttccctggataattacagaatcagaaaactaggagtcggaagggcaacatcaggcacggcccaatcaccacgaagcctcgatttctctctctctactgcaaacgaaaggcattaactggctttgcccacagcgtggagcccaggagaccgacgaaggtttcacctgcgcacgcatttcctcacaatgcaccccgcgccggcgcgcgttgctccgcctccttttgcattacaagccgcggcactttacggctctcgtcctcgttcctccggcgggaacacggcccgccccgccctttcgcccagcgggccccgccctactccgcgtggattggttgaccgcccttcgagcccggtgctgactggcttgcgtctctgccactttctttcagcttagtggcgcgcggcgcggcgacgaccgccgggagcgtgtgcagcggcggcggcggaagtggccggcgagcccggtccccgccggcaccatggtgagggcagggcaactgcggggtctcaccgggaggcgggaacagcagtcgttgggatccctgcgggcg

SEQ ID NO: 21115 - DNA, 2300 bp, Homo sapien
cttgagcccaggatttcaagaccaacccaaacaggcaacatagcaagacctcgtccctacaaaaaatataaaaattagccgggcatggcagcacgcgcctgtagtcccagctactcgggaggctgaggtggaagaattgctttagccttggagattaaggctgcagtgagctgtgatcgctccattgctctccagcctgggcaaaagaacaagatcctgtctaaaaaaaaaaaaaaaaaaaaaattcgtgacccaagtccaaggtccagtcctgtttctgaagatgtggccagaaactcagctttcattttctacctgtttttagaggaattctggtctctgatgaatgttggcagaatgtgcctggggatgtgctgggtgttgagacgcagctctaacagaacaacgcttcctcctctagaagttctcatctctatgtcggaggaaacgggaagccaaccagagaggctgtgaccatactaaatgatttctgcttaataatacctggggagggggccggaggcagtggttcacgcctgtaatcccagcactttgggagctgaaaagggtggatcacctgaagtcaggagttcgagaccagcctggccaacatggtgaacctccctctctactaaaaatacaaaattagctgggtatggcggcactcgcctgtaatcccagctacttgggaggctgaggtgggagaattgcttgaacccgggaggcagaggttgcagtgagccaagatcacaccactgcactccagcctgggtgacaagagtgaaactacgtctcaaataaataaatacatatataatttctgcttaataatacctgggggactaaataatctgtacaacaaaccccatgacacgagtttatctatataacaaacctgcacatgtaccccaaaacttaaaagctaaaaaaaattaaaaatgatttctggccaggtgtgctggtttacacctgtaatcccagcacttttgggaggccaaggtgtgcggattgcttgagctcgggagttcgagaccagcctgtgcaacactatgaaacccccatctctacaaaaatacaaaaattagctgggtgtggtgccacacacctgtagtcccagctactcaggaggctgagatgtgaggatcagttgagccctggaggtcaaagttacagagctatgattttgccactgcactccagcctgggtaacagagtgagaccctgtctccaaaaaaaagagagagaaaggaaattatttctgagctttattgctatgaagaggatggaaccagggaatgagatggaaccactggggggtagcagtgaggtcatttcagccaaggagggccagaaggaaccctcagaggaggtaataggatagcagggaggtgatagccagagaaggccacaaggagaaagtgacagttcacccctcggaggaggtgacagccaggacaggaggagggcccctgggaggaggcgacattggaacactggagctgaggcctgaaggaggccagcttcgcaggtacctgcggggtgtgttccggcagagggaacagcaggtacaatcgccctcccccattagcctcctaggaccatgggggcctgcagagaaacttctggcaccacacaaatatggttgtcgtgtttttccttttttactctgtcctcccccacccccgccaacttcctggcctgaatgctgctcctgtgaccccttgaggcgagtgacctcggggaagtggcattctgtgcctcagtttccttatctggaaaacgggccttgctcgcggggacttccctccctaattctgcgcagtatgcatgcatagggcaggccctcaatgaacccttgcagaataaaggaccggctcatccccagcacctggctcagtgcgtgcaagcggctacacactacggcataagatgttcccattttgcagacggggaaacggaggctggggaataccgggcctagccgacgggggcggggcgcagggcgcgcacgctgcgtctcgggcccgggggcgcgcacgccgagcggctgaccgggggcgaggccgggggcttgacaggggcgtggcctcgcgcggccgagaggctgcagcggcagcagctgtcgcgccagtcgcaacagaagcaggtccgaggcacagcccgatcccgccatggagcagccgaggaaggcggtggtagtgacgggtacgctggctgatgggggctgtagcggcagcggccgggggcagaggcgggggcggctccgggactgcggggccgagaggggcaggtgctggaag

SEQ ID NO: 21116 - DNA, 2300 bp, Homo sapien
ctgaactgagctaagcacctgccccgggctccacacttccatctttcttttgtcttcatttcacctctgtgtttaaagcactgtgtgacatagctccttagagatataacctattgtctgctcattgtcacgtgtgtgtgtgtcatctttgtattcttgcagtggtttcacatttccttacccagtcaagccagtatcccatccttcctcataatgcacaacatttggctcattttatttttctcattgttattttttatttttattttttgagatggattctcacactgttactcgggctagagtgcaatggcgtgatctcggctcactgcaacctccacctcctgggtttacacaattctcctgcctcagcctcccgagtagctgggattacaggcgcccgtcaccacacctggctaatttttgtatttttagtagagatgcagcttcaccatgttggccaggctggtcttgaaatcctgacctcaggtgatctgcctgccttggcctcccaaagtgctgggattacaggtgtgagctactgcgcctggccaagttttttacaaatatttttcttttggtggaactcatctgtgcactctctggtgtgtttttccacctttgttgggtcttggcttaaaatatcctcatgtgggctaggtgtggttactcacacctgtaatcctagcactttgggaggttgaggcaggagaatcccttgagccaggagttcaagaccagcctgggcaacatagcaagagatcccatatctaccaaaacatacaagaattagccagatgtggtggtgcatgcctgtggtcccagatactcaggaggctgaggcaggaggatcacctatgcctgggaggttgaagccccagtgagccatgatcacaccactgtagtccagcccgggtgacacagcaagactctgtctcaaaaaaaaaaaaaaaaaaaatcctcatgcaagaagggaaggaccaagtcccattccctcttgcctcattttcagagcctggggtaggggctacaggtggcataggaagggtctgcaaggtgggtgggacttggcaggtgttgggaagaggaataggggtggcaagtgtcaatggtgaaaagacaggctgaggggtgtggtgggaaggctgggggagaaaggtgagaagtgattgggggggcttccctgatgagtcctcatggagggtgctgaggcagggaacaggggtgcagggacagtgatcagggcacctggtaccctgaccaacttgatgatggcatctcttttaagatgcccaagtctgcgcacttttattcctttattcggcccctagcaccccctccccaccccaaagaaggtcagttgcatgcgtgtggggatgtagctcaaaaaagaaataagatggagtggaaaggaaagaaaggaagaagcaggaattcaaggtgggtgggctgagcttggggccacctagcccacctgctccaatcaagggctggaacaaacctgaggccacttggagaggcagggctgggcagggacagggggtgggggccgaaatcacagcttccccatcagagccagatgtgtgaaggaaatgtcccagatggcagtagtttctcggcaaggaggggaatcctggagatggttcatgtctgtgatcccagtgctttgggaggctgaggtgggaggattgcttgagcccgggagttcgagaccagccctgggcaacatggcgagaccccatctctacagaaattaaaaaaaaaaattagccagttgtggtgtcaagcacctgtagtcccagctacttgggaggctgagttgggaggcttatctgagcccaggaggtgaaggctgcaatgagccatgattacactactgtaccccagcctgggcaacagagcaagaccctgcctcaaaattaagaaaaaaaaaaggggggccaggcgcagtggcttatgcctgttatcccagcactttgggaggccaaggcagactgatcgcttgaggccaggagtttgcgaccagcctggccaacatagcaaaaccccatctctactaaaaatacaaaaattagtcaagagtggatggtgcgtgcctgtaatcccagctacctgggaggctgagacaggagaattgcttgaacctgggaggcagaggttgcagtggtgtgagatcacgccactgcattccagactgggcaacatagcaagactctgtcacaaaaaaaaaaaaaaaaaagaattccctgctctgcttttctgctcgttgctggcatagaaacatctagaacagaaagtat

SEQ ID NO: 21117 - DNA, 2300 bp, Homo sapien
aggagggaacctcaaatccatttccaggaggaggagtttggggccatataaatgtatatatacaaatatatatatttttttaagatggagtcagccggccgtggtggctcacgcctctaatcccagtactttgggaggccgaggccagcggatcacaaggtcaggagattgagaccatcctagctaacacggtgaaaccccatctctactaaaaatacaaaaaaaaattagccaggcgtggtggggggtgctcatagtcccagctactcaggaggctgaggcaggagaatagcatgaacctgggagctggagcttgcaggttggagtgcaatggcatgatctcagctcactgcaacctccgcctcctgggttcaagcgattctcctgcctcaggctcccgagcagctgggattacaggcatgtgccaccacgaccggttaatttctgaaattttttagtagagacagggtttcatcatgttggtcaggctggtctcgaactcctgacctcaggtgatccgcccgccttggcctcccaaagtgctgggattacaggcgtgagccactgcacctggccaggggctagagttttaatttttaaggattttggagtgggctgaagtgtggaggtcattgcttggtgaaagagtgcaggaggtgaagtcacagacagtaagaaactgtattctcatgcagattccgttcctctgtggggtcttcacactggtgggtgtcattggttaaggatttcaaaaacatcttaagaaattcttctaaaaagtcttatgattctaaggtcggaaatcacatctatagcaaatggtcggtatcaggtgctacaagcaacttgcggtcacaaggaagtgggtcaaagtgcagcctgattagtgcttaattataactaagtttctgtccagaattctttttttttgagacagagttttgctcttgttgatcaggcggaagtgcaatggtgaaaacttggctcactgcaacctccgccctctgggttcaagcgattctcttgcttcagcctctcgagtagctgggattacaggcatgtaatcccaccaccaagcccagctaattttgtatatttagtagagacagggtttctccatgttggtcaggctagtctagaactcttgacgtcagatgatccacgtgcctcggcctcccaaagtgctgggattacaggcgagagccaccgtgcccggcgcagaattcttttttttagagatgaggtattgccatcttgcccagacttgtctcgaactcctgggctcaaacaatccacccacctcggcctcccaaagtgctgagattactgacataagccaccatgcctggcccccagaattatgaatcctgtgaggatggcttcaaggtgagcgctgagccagacaaaaggatggggtttgggagcaccctgcttagactggaaagataatgttggagaagacttcctggaagaggggctttttgcgtagagttttgaagaatgagtaggagttctccagaggaggatgagtaactgcaataacacccagtttatcaagtgcctcctatgtgtctggccctgtgctttacccctcatttgaccacctctccagtgagagtctcagtcctttttttcctggtgaggaaacaggcatggcagagaggcatgacacatcaaggttgcccttcctggctccatctagcccgttctcctctgcttcctttgtttttcaccatctttagcctttgaccccaaccaaaaagagaagagaggaaatcccatgggcatagacagccacctcttaaactcttgtctggaatttttcacatagtaacaatgtctttttttcctccaaaaagactcccaggctggaatggtgtcctcatatcgaggaagaggatactgaggcccagaaatgtgccctagctttactaggagcgcccccacctaaagatcctccccctaaatacacccccagaccccgcccagctgtggtcattggagtgtttactctgcaggcagggggaggagggcgggactgagcaggcggagacggacaaagtccggggactataaaggccggtccggcagcatctggtcagtcccagctcagagccgcaacctgcacagccatgcccgggcaagaactcaggacggtgaatggctctcagatgctcctggtgttgctggtgctctcgtggctgccgcatgggggcgccctgtctctggccgaggcgagccgcgcaagtttcccgggaccctcagagttgcactccgaagactccagattccgagagttg

SEQ ID NO: 21118 - DNA, 2300 bp, Homo sapien
caccagtgctacaccatggacgcaccccacagcctggctggcacagaatgtcattgcattgttggatttttgccaatttgattggtgaagacaaacagtttgtgatttgcagttttcttattaagtgtgaacttttttttttttttgagacaggtctcactctgttgcccaggctggaatgcagtggagtgatcttggctcactgcagcctccacctcctgggttcaaacaattctcctgcctcagcctcctgagtagctgggactacaggcacataccaccacacctggctaatttttgtattttttaaagtagagacggggtttcaccatgatggccaggctggtctcgaactcctgggctcaagcgatctgctcacttcagcctcccaaagtgttgggattacaggtgtaagccactgcacctggcaagaatgagcatctctggacatgttgaaaagcagtttcccgctttttcttcaaggtctccgttcaaagcctttgaccatttcttggagtttggcgatgtgaaggacagaggccgaaaagaggggaaaacgtgggggagtggactcccagcctcccagatcccggagaagcctctgtgcatttgacagctgtggacatggtgtcacacgcagttaaggtggcacagtgagtcgggctggcataggttgtacctggtccacctgacaccaggttcaggtgaggccttctcccagcccacccctcctcagtatcatttttgtcactactacccctccagtctgcctcaggcccccatctgcttctgggacctcagcctcctccccaagttgcccaccccagacaccaggctcactccagagggacttcttgagccagtgcccctctgcccacgcacctgccttggctccacatggacctcttcccccaccaccaattccttctatcctctccactcctaaccatgctatcccagccagctacattttcccaagctgctgggagccctcctcactgtcccctccagcatagaggtgccactgtgcaagaactcagtgggagaggcttggaggagcttggagagccaatgataggtttggggaatcttagtgaactcctactcatgcgttgaagccccaactgtaatgcctcctcctccaggaagccttccaggaccctgtctttccctctggaccttccttaactgcatgggactaggagtgtctatgtccagctctgtcctctcttaagatagctccttgaggacctggtcagggctgaggcctcttgggggcccagcgtgggtgatgcttgttgaatgaataaatgactgcatgagctgggaaccagccaagctgagatcaagaagcgagttgatgaggtggcagtcggttggggtgctaatagaggacatgaagtcactgggttctagcaagagggaagcgggactctggtccacccctccctcttgccctccatccacctctggtgagaaccttgaggccctgcaagggggcggatctctgtcttcattcttcccctctgcactccacccagacaccagttcctcttccccctgagtcgctgggtgcagagccagaggaacgccagcgaccccagcagcgctgcggacggtgctggccgtggccgctgcggcccccgtgtccaggtgggccaggacgcagcctctgggcgccgtcgcttttccagcatcgcagaggcaaaagcgtggcagtgggacccaaaaggtaggactgaggctctagaacttgcacctgtgcagggactgcaaaccagacctgggaggaccctttcagcagcccccactccaccctatcccaggacttcccagcgacccgccgttctgggagataccgggagcgtgatcagggggcggggccgtttccaaggcaaccgcttatttgcatagggtcccgtcctggccaacgagggcgccccaaatgttcaggacatagaagaaggggttaactggcccggatctcctcctcgccttccaagcccgctaagcactggggttatctacccattccccagaaggggagactgaggcagcccaccagccaaaggaggcgaccagactggggctgcgttttaccatttcagaagcggcttgagctggtctgagctataataataaacactggcggtggaggcgagggcgaccacagggctgaggtcagggctaggattccggtgtctctacgtaggttgcttgaatggggggcaccctggcatggacgctgctgttgccgctgctgctgcgggagtcagacagcctagaaccgtcgtgcaccg

SEQ ID NO: 21119 - DNA, 2300 bp, Homo sapien
ccttctgggctcaagggatcctcccacctcagcctctgaagtagctgggactacaggctgaagccaccatgcccagctaatttttaaattattattattattattattattattattattgagatggagtctcgctctaacgcccaaactggagtgcagtggcatgatctcagctcactgcaacctctgcctcctgggttcaagcgattctcctgcctcagcctccctagtagctgggattacaggcacgtgccaccatgcccagctaatttttgtatttttagtggagacggggtttcaccatgttggccaggctggtctggtactcctgacctcgtgatccgcccaccttggtcccccaaagtgctgggattacaggcatgagccaccacgtccaggctgagccacatttttttattcgttagtcagttcacactgtaaacatgcaaatattcaggcagggattcccagaagtggacttgctgtgtcagcaggcacatgagtttatcattccggtggcctgtgccagggtgccctccaccagtgctacaccatggacgcaccccacagcctggctggcacagaatgtcattgcattgttggatttttgccaatttgattggtgaagacaaacagtttgtgatttgcagttttcttattaagtgtgaacttttttttttttttgagacaggtctcactctgttgcccaggctggaatgcagtggagtgatcttggctcactgcagcctccacctcctgggttcaaacaattctcctgcctcagcctcctgagtagctgggactacaggcacataccaccacacctggctaatttttgtattttttaaagtagagacggggtttcaccatgatggccaggctggtctcgaactcctgggctcaagcgatctgctcacttcagcctcccaaagtgttgggattacaggtgtaagccactgcacctggcaagaatgagcatctctggacatgttgaaaagcagtttcccgctttttcttcaaggtctccgttcaaagcctttgaccatttcttggagtttggcgatgtgaaggacagaggccgaaaagaggggaaaacgtgggggagtggactcccagcctcccagatcccggagaagcctctgtgcatttgacagctgtggacatggtgtcacacgcagttaaggtggcacagtgagtcgggctggcataggttgtacctggtccacctgacaccaggttcaggtgaggccttctcccagcccacccctcctcagtatcatttttgtcactactacccctccagtctgcctcaggcccccatctgcttctgggacctcagcctcctccccaagttgcccaccccagacaccaggctcactccagagggacttcttgagccagtgcccctctgcccacgcacctgccttggctccacatggacctcttcccccaccaccaattccttctatcctctccactcctaaccatgctatcccagccagctacattttcccaagctgctgggagccctcctcactgtcccctccagcatagaggtgccactgtgcaagaactcagtgggagaggcttggaggagcttggagagccaatgataggtttggggaatcttagtgaactcctactcatgcgttgaagccccaactgtaatgcctcctcctccaggaagccttccaggaccctgtctttccctctggaccttccttaactgcatgggactaggagtgtctatgtccagctctgtcctctcttaagatagctccttgaggacctggtcagggctgaggcctcttgggggcccagcgtgggtgatgcttgttgaatgaataaatgactgcatgagctgggaaccagccaagctgagatcaagaagcgagttgatgaggtggcagtcggttggggtgctaatagaggacatgaagtcactgggttctagcaagagggaagcgggactctggtccacccctccctcttgccctccatccacctctggtgagaaccttgaggccctgcaagggggcggatctctgtcttcattcttcccctctgcactccacccagacaccagttcctcttccccctgagtcgctgggtgcagagccagaggaacgccagcgaccccagcagcgctgcggacggtgctggccgtggccgctgcggcccccgtgtccaggtgggccaggacgcagcctctgggcgccgtcgcttttccagcatcgcagaggcaaaagcgtggcagtgggacccaaaaggtaggactgaggctctagaacttgcacctg

SEQ ID NO: 21120 - DNA, 2300 bp, Homo sapien
cagattctgagctccaagaggtagcaacgtgtcccggctgggtctccggagcccagcacacagtaggcgctcaatacatgtttaatggggtgaagactcacattgacccaaggaaccgtggctcacagggggcgagggaccaaccagggcacacagggccctggggagccacggagctttaggagattaaactgggggtggcaggaggggcatctgccgggcccgggagtgccggttgtcaccaaggctctgtgtgactttgggtgagccacaccctctctgtgcctcattaggagtaggcgctggcgggggcagtggtgggagcggtcattaggatgggagtgacctggacgccgaagcccacgccccccgtggtcccccaggctccggggccgtcgccagcccgaggccctgcggaattgtgcgggcccctcctaccccgccgagccggggcccggaggcccgcgggagaggaagctgggggaaggggcggccggctggacaggaagtgggaagggctggcgtcccccctcccgcgccgaggcccctcggggaggaggcggggctggggccggtcctgcccttcccttcctctccgcgggtctggagccccggcggctcccgacttcccgccggccagaaggcttggggtgggggcggggggttctcacgtactggggggcggcctctatcggggaggcatctgcggggtcagctggcagcgagagacatccagacattcacacacaaacacacacacgaaacgtgagcacagagccacacacaggtcctagggagctggcggcccacccacgcgcggagacacacacgtgcacattcggcacacacttgtgcacgcaacctcactgagcgactcggcccgactcggacccacaactgccaccgcgcagccagggacagtcgccgagacagcgataatttattgggtgtttgcccgccccccacgcacaaggatgcacacgtgcactcacacgggagccgcgtgtttgcacacacgcgggcttgcctaggaaaaaagaggaatagccgtggcaaacacagaaacatctagacccagagtcaaccgcaccgccttcccctaccctgcccatccacacacgacccactggtacccgggcatccctgccctgcgggggtccctgactcagtatccgcccccaccctctctgaacacccctggtggggggatgaagggccctaaaaggggaaaagggcacccactgcctgcaccctgactcccgcagacaaaggtgggatgcgccccatttacagctcacagcaccgaggctgagaagcccaaacagcagtcacccagcacctagtattgtcaccgggtgttacttcggggtggtgccaggtggctcccacagcctgggtactataggagctttgtgtctgtgtgcctgggttgtgtctgtgttgtgtgacttcgggcgggacgctgagtgtccgcaggccctgtgactgtggagctgggtagggtgtggttctgaggaggccgcgatagtgcgccccagggtgactgtgagttaactccgtgggctctgtccacggctgttggaagctgtggcacggccttgcataagcgcgcgcctgcgtgaggctgggtgcctgtgtgcggtggcctgtgtttagttgttccaggacggccactgtgagctgggtgtgtggcagtgtatgtgtgtcgctgggcgggctgtatgtgcggtggttcccacccttgctgagtgtgggtagctctgcggggtgagacacccaatgtcactgcctgaggctttatggggctatccgcagtcgttccagcagcggggtacacttttgctgtgtggagcgctatgttgagtgtcgctgcgaatgtgtgtggctgggtgtacaacaatgtgggtggccggctccatttgaggtgagtgaacgtgtgtgtgcacgcgcgcgtgtgcagccgcgatcagctgtgcgtccctgggtggccgtccgggatcctgacccgcgagtgtgtagccgcgcccccaccccccgcggcgggcactgcgcgtgcgcgctccggcggcgggacccacccgcgcgcccgccatcgcccctttaagagctgcgcccgcgggcggcgtagaggcagcgggcgggggcgcgcgcggcgggaggaggggagcgcgcgtttcccggaacagcccgcgcggaggaaagggaggaaaaaaagccaccctgcggccggggccggagctggagccgccgctgccgccgccgccgcggccgtctggagctcccccgcgcggacgatgcct

SEQ ID NO: 21121 - DNA, 2300 bp, Homo sapien
tctcaaggtggaccagggggctgaggaaggaggcgtgctggggagagcggggcggctcggggagaagggcacgggacccgggattcactgcgcggcctgtcttcaggtgcaccccacgtccacgcgcttcaccttccggaccgcccggcaggtgccccggctcggggtcatgcttgtcggctggggcgggaacaacggctccacactcaccgccgcggtgctggccaatcgactgcgtttgtcctggcccacgcgcagcggccgcaaggtgggggcgggaggggcgtggtgggtagggaggcttggtgggagtccttgcgggcgggggcgggagcctgcagggggcggggctctgcgggaccaggggggctgtagggggtggggttccgcggggcgaggggctgcaggggcgagggacctgcccgggtctggaggcctgtagtgggcgagggacctgcagggggcgaagctctgtggggcgggagggcttgcagggggcggggcctggctgcaggcggaccccgtggaagggtttcgcgaggtagcggggactcctcgggagtcttacaggggcggagcttaaggtgccggaggtctcaggggaggggcctgggggcagcggcttccgtcctggctgtgagcctggaactgaaaaatgcccgaaagtggggcggggcttgagagtctaggtggggcccaggccgggtcgcggccctttcaccactcccacccgtcacctcgccgtgtctgctgacccccaggaggccaactactacggctcgctgactcaggcgggcaccgtgagcctgggcctggacgccgagggccaggaggtgttcgtacccttcagcgcggtgctgcccatggtggcgcccaacgacctcgtgttcgatggtgggcggagccctgggccggggtggggcgggatgggagatggggtctggaggggcccaggatccgggcagggccgagtgtgagggtccccccaggctgggacatctcgtcgctgaacctggccgaggcgatgcggcgcgcgaaggtgctggactgggggctgcaggagcaactgtggccgcacatggaggccctgcggccccggccttctgtttacatccccgaattcatcgcggccaaccagagcgcgcgcgcggacaacctcatcccaggctcgcgtgcgcagcaggtgctgtcccatcccgcatcccttgcttcctgccacctgttcttcgccacttggttccctctttttgccccaccccgcgaatccaggcctcacttgacacccggggaactgagtagcccaggcctctgtgagtccgagagtatgtacaaccaacttccctacaccctctccatcctccccacaccctcaccatccaacccacagctggagcagatccgcagggacatccgagacttccggtctagcgcggggctggacaaagtcatagtgctgtggacggcgaacacggagcgcttctgtgaggtgattccaggcctcaacgacacagccgagaacctgctgcgcaccattgaggtgggcgaacgcccgggtggagcgggtcaggcagggccagtcacagacacagctctgtgctgactgcccgccttgcccacagctcggtctggaggtgtcgccctccacgctcttcgccgtggccagcatcctggagggctgtgccttcctcaatgggtctccgcagaacaccctggtgcccggagctcttgagctcgcgtggcagcaccgggtttttgtgggcggagatgacttcaagtcaggccagaccaaagtcaagtccgtgcttgtggacttcctcattggctccggcctcaaggtgcgtgggcctagggagctgccgagtgcaggaagggggcctgggccgcgagcacctggcttgtggggccgcagggcctgcagctgctggggcttcccttgtacccacagaccatgtccatcgtgagttacaaccacctgggcaacaacgatggggagaacctatcggcgccattgcagttccgctctaaggaggtgtccaagagcaacgtggtggacgacatggtgcagagcaacccagtgctctatacgcccggcgaagagcctgaccactgcgtgcgtggggcgcgggcgcgggcgcggggttgcccggcgaggggtggcagggacccgggcaaactcctgctgcactccaggtggtcatcaagtatgtgccgtacgtgggtgacagcaagcgcgcgctggatgagtatacctcggagctgatgctgggcggaaccaacacactggtgctgcacaacacgtg

SEQ ID NO: 21122 - DNA, 2300 bp, Homo sapien
tgctcacagccaaatggaggaggcgcacagggcaaggtatgggcgggccgtgaagcttccatgccttttccaggcatgccaccctcccagcccctccatattttcccctaaaccccattttttttttgagacagggtattactctgttgcccaggctggagtgcagtggtacaatcatggctcactgcagcctacacctcctgagcttaggtgatcctcccacctcagcctcccacgcagctggactacaggtgtgcgccaccaagcccggctattttttgtttgtttgtttgtattgagacggggtttccccgtgttgcccaggctggtctcaaactcctgggctcaagcgatgcgcccgctttgacctcccaaagtgctaggattacaggcatgagccaccgtgcctggctgactgcctatttttcggcttaggttctatgaagaatgtgtatcaatgtgttgaaacactgtagatcttaaagggagcagactgggtgggggaggggggccagcctgcccagacttcctagactctgggtagcattccttcctccagggtatgggcaggaccctcccggaatgagggtcttcaagggagcaggcagagagtgacctttgccggctttgtggctttttttttgttttaaggggagaagggctccagtgtctctgacctgccttggggaagaggaattctggtttctatggtttccaggggagaaaggggctagaggcaggagggcaggagaaggtcggagagactcgattctgagctttccgatgccctgctcaaagcgcggggcaggccaaggccccataacttgaggctgaggggagtttctgtgttctgagccccaactgtctcatttgcatatatgtgattgattaaatcgttggccactggtgattgagctcaatgtctaaccaagaaccaggaacaaacaccaaatactctttcacactccctatccccagccctcagggtctgcccaagaccccaaactgcctcccacgtagccaatttttcatctgccctgtctgggtggctcaggtggcttggcctgtagttttctttcagtgaactcctcttcatgtctcaaaacccttgccagcagccccctcatctggggagcctgtcttgcaggggccctgcctgtgagttcccacccactggggcgggggtgtcccagtccacttccaactccctcagactggggccccttcagggtgaggcctggacccagagtcttaagccctcatcctccaaggtcaggccctgtctcttgcaaacgttcccaactatccaccttttgggccagctccagtggtggaaactttccggcctccaggcgcttgttttggaaagttcctgggggagctgccccggcctgcccgctgggttcccacgctcccttatcagcgcgcatgaggggggcgccctgcagtgcaggcctcattcctcccctgcctcggccctgcccgcctgtgcgtcccctcccctttccagcgaacagcctcccgctccggcccactcctgccaagccctcctgctgcaggtggggaaacaggccaaacaggccccatccttgtgagccccgtggggacagagtgactttgtcccccgagatggatgggggcggacatggggagccaggggatgggactgcctggtaggtgctgctgcccacgaagggggagtaggtggcagtgtggctccgaggagattctggctttggagttctggtcctctgcctgtttcccctgcagtgtctctgacccagaccccctacctacccccccggaggcccagcttccctgcccagctccaccccctggcttgtggctgggctcatgtgtagcctcattgtcctcttgtaaaggggggataggcagccatgagcccctgggggctgcggagcgagcgaggtgaacctatacgcgccgcgctcgtggacgcctggccacttccgccaggcggggacccgatggccacggtggctctgggttgtcgggcctcgaaccgggtctccagacgttgggcccctccctcccagcgcgggagaggcggggaagggggcggggcgggggaggggccgcagcgcttttctccggaggtcgcgcgcccgagagcccgcgctgtccgccgccgctgcctgagtcgactctgcgccggtgagtgcggttcggggcagggacggcctccgtggggacccaggctggcttggccccggccgcttagagtccccgctgaccccctgctcaccccgggcccccagcccgccgcgatggaggccgcc

SEQ ID NO: 21123 - DNA, 2300 bp, Homo sapien
cagcacattgggaggctgagatcagaggatcgcttgagcccaggggttcaagacaagcctggacaacatagcgagatcccatctcttaaaaaaaattagctggagtatagtggtgcacacctgtggccccacctacctgggaggctgacgtgggagggtcgcttgagcacaggaggtctaggctatagtgagctaagatcttgtatcaaaaaaggaaaaaaagcaggctagaggggccagggggcaggtgatggggtctcagtactgcaggtggtagccctcccctttttggagccagcctggccccagcacctctaagacagttgagtctggacctgccttcatgaccctcattatcccttctgcaccctgaggattgtgtgcgggggaactgggggtgggagacatcacggatcggtagtgggccatcctctttcctctcctctgtctctgtctgtctcccactgtctctgcacaccctcccaaacccactatcagatcttttttctctagtcccccgtctctctcaggattcccacaaagtgatggctggctctgtcttgcaggtggccaacatgagtgctaaggacggcacgtgtacactgcaggactgcatgtacaaggatgtgcagaaggactggcctggctactcggagggggaccagcagctgctgaagcgggtgctcgtccggtaatgccgcctcccatcccccagcatgtccccacccgcatgaaggcagccagagcttacccagaggatgctggggtggtcttgtgtggtcctgaaggccacagggcttgggagcaggatggaagggtccaagtaggcctctctggccatcctccctactgcccacgtggtgccccagggtgtcccgtggtgggggaaggccacgctcacagagtgggacggaggtgtgagtcactggccccgaccttggaatcttcagacaaaaggcctcagtctgctgagaccctcctcagctgtccccaacttcccttcatgcttccctccacaacctgggcatccccacagggcctgggaagttcactgactttttgaaaagagcctctcaagaacctgaagtagagagaaataaggccaaacgacactcccggcagggcaggcgtcattaagcagcgttaattaaatgcatcccctcaggctaattgggacccagggtcagaagtggcagcagctcaggggagcagtggttaaggaggcaggcggctaatgacttccttctccactgctgccagctaggggagctcgggctgtgaagcaggtcaatctgctaattagtccgtaagtgatttctcagggactcggaggtatttatgagtttgtagttgttttttggaagttcagctgtttaaagcagtaattgcctctggaaagcagaatgaagttgggggtccactctgctcccctgagagggtagtgcctgcctgtccaccctgggtgtgcaggtcaggggcctgcggggcactgccctggcttggcggcaggctggcggagggcacagtcttggcagaagacccgcccccatcctcataccctgtgtcctctcccttggccccctgggttcctcagacccttagggcactggaaggagaactgcccagagctagtggagtgaggtggagaaggctgggctgcacctctggggcgtcggggagcttccccgggatgcaggctccagagccgcctccagctcccctgattcaaggctcatgttccgtctgctgagtgagcttgctgggctcatgccagccccttggcactctgctttcactctgggccggcatggggatcagcactgccttcacaagcttccactagcgtgcagggggcagggttgatgtccctgggccataaccacatagaaggtgacctgcggtgcccctctgcatagctgtttttttttttttttcctatttagcaccccatccctaagaaagccccatttatagcagtttttgacaccatggcttcgtgtatatcaaagcagggccttggagtatttgttaccagctgggctagcccagtgcaggccgttagcctagtgcaggccgtgagacagatgggatgtgggggcccaagtcactgcaggagcctccccagctgagctggcaccacatgtggctttggggggtggtttctccactcatgttctctttgttcatgatgtccaaacccgatctgtccctggtatccaaatctcctctcatcactgtccatgggtcaggggtcctgcaggtccccccaagagttcctgattcctctgcccaagccacac

SEQ ID NO: 21124 - DNA, 2300 bp, Homo sapien
tcctgggcccttgattggcttgtcagggcactgcaccccagctgctttctgtgttttttctcatcccccccacccagtccttgtgttctcatcaccatctatttagcaccccacattcaaaaccccagcctcactaccgtaatttatgccttgaatgatcttttgcagaaacatcataagaaaaaagccttttctattcatgcatgctcactgtgcccgcgtcatcctctgcaaatccataggtccatttagggtcactctccctccttctgaagaacttctagaaccttcctcacagtgcaggccagatgctgacagaagattctctcagcatttgtttgagcgaatctttatttccctttctcttttcactgggcatggaattgtggtctggcggtgtttctccctcagcactttgaagatgccctcccagtgtcggggctggctcctgatgtgcagtgtcggcacctcggcacttggggcgactgttgtggctgtgctgatttgctcatgatgcgccacgacctggtagttttcctgctgggggttgacaaggcttcttgggtctgtggatttatagcatttgttacatttgggaatctctggccactcttttctcagatcccccgcctgccctcaggactccagttacttgcacgtgggatcccctgctgtcgtccgcaggtcaccgaggtggtgttcgtttcctgtaggcttcttactgtgggattcatctaggtggctcctgtggctttgtcttcaagttcgctgcccttttcttctgtggtgcctgctgtgacttccacctagtggccgtttcattccgatcctccgtgtctcagctccagaagcccctcgtggctctctcacgatacccgtacgtcttcctcttcagctgttttcctttaggcttggagcattccaagttcacagtagctgtcccaaagcccctgtctgttcagtcggcatctctgtgcttcccacgtctttgtgccgactcattttccccctggcttaggagtctcgttttcctgctgcttcacgtgtctgtagggttctgcttatagataccacatggcgttcttatgaggtgggtccctgcccgatggtccgcacagggctggccatgatttagacgggagttagccttagtgcccgtgtctgttaatggctgggtgcgtcctgtgtctgtcaccctcatgcgtgcgtgatgttaggagtgaattgctctgttgttaacaagggcctggtctcctgctggagggtggggatacagtgtgagccagagtggctgggagcctggccatgatgacggccacctctcatggggacaggcacttgaggttagccctcctggcatcatagagaaaggctggctctgtggcccctcagcccttctcctctgaggcatgaagtcttgttctccatacccttgggggataagcgacttggcaagaaaggagtcttgaaggtgacccacctgacagtcagctaccagaacctggttaaatgcctcactggatggcgtggcccacagggagcatggagccacggggtgggtgggagggccagtgtgttcaaggcctgtcaccctcagccttgcacagctggggctgccctggcacagttccttgggggggttgtgcaccctaactggttcctgtcccttgtcaccctaactggcctcagcatcatcactgttttctgagccctcatccctggctcacagctgcacatgcagaggcctcgcatggacagtagacagggtgcttgtgttagccccgggccgacccctctgcagaggtttgcaccgcgagagacggggcccacctgctctctgcagctgctgcactgagttcctgctccagtcccctgctgctccctcctccagaatacccttcccacctggccttggtcgtgtgctcctggggcccatgaggactggtgccatgagtttgtgggggctccctgagtggggtgggctgggccattctgccttggtgcttcctttgctccgtgtggttcttgtgtcttacgccagttccctttcactcgtgcattgaaaatggttaacggacaggactctcctccgtctgttccagaactcgccgtgtgtgtgtcagagaatgttgctcctgtgccctgagtcaacaaagacggcccctgtgagctcaagggcagttgggaaggtgtagcgaacatcctgtaaaacgtcccatcttgtgagttttgaccctctaccctcgcccggctgcagccactccccactcccacctccagccctggacacctgctggtcg

SEQ ID NO: 21125 - DNA, 2300 bp, Homo sapien
ttgggtgcaagcgatcctcccgtcatggcatcccaaaatgctgggatttcaggtgtgagacaccttgctaggtcctgagtactgctcttattgctgtttcctgtttccgaagtgaatccacagaggctcagaagcaggaggtgcctttcacaagatcacagagcgagctggttggccctccaagccagctcctcccttggccaggcgcagtggctcacgcctgtagtcccagcactttggtagccctaggcaggcggatcacctgaggttgggagttagagacctgatcaatatggtgaaaccccgtctctactgaaaatacaaaaattagctgggcgtggtggtgggcatctgtaatcccagctactcgggaggctgaggcaggagaatcgcttgaacctgggaggcggaggttgcaacgagctgagatggcaccgttgcactccaggttgggcaacaagagtgaaactctgtctcaaagaaaaagaaaaaaaaatctcggaaattagatagtggtgacagctacacagcattgggaatatattttatatgtaaaatgtgactcaatgaagttgctttttagaaaatggaaggctggccgggcacagtggctcatgcttgtaatcccagcactttgggaggccgaggtgggtgcatcacttgaggtcaggagttccagaccagcctgactaacatggtgaaatcccgtctctactaaaaatacaaaaaattagctgggcgttgtgatgggcgcctgcagtcccagctactactcgggaggctgaggcaggagaattgcttgaatccaggaggcggtggttgcagtgagccgagatcacaccactgcactccagcctgggcaaggaaatcgaaactctgtctaaaaacaaacaaacaaacaaaaactgggggaggtggctcacgcctgtaatcctagcactttgggagggcgaggcgcgcggatcacctgaggtcaggagttcaagaccagcctggtcaacatggtgaaaccccatctctactaaaatacaaaaattagctgggcatgatggcgggcgcctgtaatcccagctactcgagaggctgagacaggagaatcgcttgaattcaggagacgatggttgcattgagccgagatagcgccactgttctccagtctgggctgatgagcaagactccgtctcaaaaaaaaaaaaaaagaaaagaaaagaaaatggaagtctgggcttggtggctcactcctgtaatcctagcatttcagcagacccagacaaggaggatcagtttgagttcaggaggtcgagggtgcagtgagccatgatggcgccattgcactccagcctgggcaacacagcaagacccctcaaaaaaaaattaaaataggaaaatgaagctggactgcaccatcgctcagggactgtggggatgtaggattttatcctattaaaagtactcatctcataagaaaaagtttaccagctcctcttccacctaccggtccagcaccttccctgggtggaagtcccatccaccccgcctaagggatgccttatgtgtccaacccagcgtccaacgcgcgcgctccgtttacatagccacgcccaccctcccggcccgcggcggggcctacccacccacgtgtttcgagccggctccgcccctccacgccctctctgcggctttccacagaagccaaagacggaagactgtagagatctcataaataatgcatcacgtcagcggctgtaggggcggggctttgacgcgcctggctggctgagtcagggttatgtataatactatggaggcggggcctggaggggtgcgcgtgttgaggcggagttcgttcacggaagtggccacccctagggcctgaagaggcggggccataagtgccttatgaatatgcaacaacttggggcgttgactgtgggccttgtggggccctcatggggcgtggccaggcgcgtctcctgaataatgtagtgcgctgcctgccggtgtggcggcgactgttggtttggtcggactcggggggcgtggccagccgcgtctcatgaataatgcagcgcgtcagcgggcggcggggcggggcgtggccggcgtggcggcgctggagccgggaagggggcgcgggggagagatggtcgcaagatggcggcgctgaaggaggataggagctacgggctgtcgtgcgggcgggttagcgacggcagcaaggtgtcggtgttccacgtgaagctcaccgacagtgccctgagggccttcgagagctaccgcgccagacaggtgagtggcat

SEQ ID NO: 21126 - DNA, 2300 bp, Homo sapien
ataacatttagagtggactgtgcccccagcagcccccaaggtgagagtgcatagatgggggtgtttatccccatttcgcagatggtcaggatgaagctcagaggagaggcaggagtcgcacaggctgcgcgatactgacccgtgttggggtccagcccagggtcccccgcccccgccccagcccccgccccagcccccgccccagcccccgccccagccccagcagccgggaggcttcggtccctttaagaacgccccgcggggccaagcaggaagggggaggtgccaacgcccgggacggacgtctgcatgagccaacgggtgcggcagtcgcggcagcggcggccaatgggcacggcaggggcggggccaagcggccgaacctggttcccgaggcgcggcggccgcggctgggggcggggaggggggcgcaggaccccaagtgggggtcccggagccagaggcaagtgtcctggggtgctgggggcgccgtgccggccgggccgctgccctggcctaggctggtccgggggctagcgcgccgggggctgcggccgatgggcggggcgaggggccgcgggggtggcgagccgggggggcacgggggtcgggggtgcccgagggggcgcggccgggcgggggtggccagggatgggggtcactgggggcaaaggggatccagtgggggggtcccgatggaggcgtgcagggccaggggcgcccgaggcgtgcgggggtcgggtgccccagactggtggcgtcagacaggcgtgggtcgttgggggcctgggtcgcggcttgactgagggcccggccggggctgtggggcgtcaggagagcgtggggtgttatgggatcggaaaggggggggcgtctggggacactggagtgtttacggcgagacggagcggctgtggggggagctggcccgtgctgggggcggtggtggttggggtggggggtgggaggggaggccgaattgtgcgggcgcggggaattatgggggtgggggctgggagggtctctcaaagtggggctccgagcccgggaggagcaggcaggtgagggttagggaggggatgcggcgggctggtttgatggctgtgccacactcttctgagcttggggcctgggggacggaggggttggttattggttcaggaggtctggggcaaggaagaggctgtagaatgtggtgggacctcgaccactcctggaaaggaggctgctttgagggggtgggaccgaggcctgatgagaggaggatggtctcctggggaaggatttgggccagggtccctgatgttggggttgtgggggatagtgttagattcagagtgtggaaggaaaaaacgcttggggtttctgggtgattacagttggtgcttttggggagggtctcccctttggagaagaggctggaggtgggaggccctggtaaaagattcaatttcccccagtggccttagaggctctaaaaatggcttccctaaggcctcggaggctgtcctctccacaaaaatcccagcacccttcgctcagcttataatcaggcaaagccacagggcctgaagccccaggttcaaatcctcctttggcctttggctttctctgtgaccttgggcaaatgcctttgcccctctggcctgtttcctgttctgcaaaatgttgaggggaatcttccctacttcctggagtatttgtaaacattaaataataattagctctaataatggctaacactatttgagcctgatgccaagggcttgatgcatgggttaatttctcccaacaagctggggttgttgttacacccactgtatagatgaggaaactgaggcctggagcccttgagttacacagaaagtgatcggcagtgtggggaatcagtacagtggagactttgaggggctgtgtaggattctgacccacatctctgccccccacttccagggccaattcctgtccccccagcagcatggcatcgtgtgctgaaccctctgagccctctgccccactgcccgccggggtcccaccgctcgaggacttcgaggtactggatggggttgaggatgcagagggtgaggaggaagaggaggaggaagaggaggaagaggatgacctgagtgagctgccaccgctggaggacatgggacaacccccggcggaggaggctgagcagcctggggccctggcccgagagttccttgctgccatggagcccgagcccgccccagccccggccccagaagagtggctggacattctgggtaaggagcaaaggtggatcagggtgccct

SEQ ID NO: 21127 - DNA, 2300 bp, Homo sapien
aatacaaaaaattagtcgggcatggtggcaggcgcctgtagtcccagctacttgggaggctgaggcaggagaatggtgtgaacctgggaggcggagcttgcagtgagccgagattgcgccactgcactctagcctgggctacacagcgagactctgtctcaaaaaaaaaaaaaaaaattagctggacatgatggtgcacctgtgggcccagctactcaggaggctgaggcaggaggattgcgtgagcccaggagatagacatggttgcagtgatctgagatcgtgccactgcactccagcctgggtttcaaagtaagaccctatctcaaaaaaaaaaaggcagagatataagtaaactagtttgggaagccgaggcaggcagatcatgaggtcaggagttccagaccatcctggccaacatggtgaaaccctgtctctactaaaaatatacaaattagctgggcatggtggcgggtgcctgtagtcccagctactcaggaggctgaagcaggagaatcgttggaacttaggaggtggatgttgcagtgagccgagatcgcgccactgcactccagcctggcgacagagagagactctgtctcaaaaaaaaaagagaaagaaaaaaaaaaaaaaggccaggcacgatggctcatgcctgtaatctttggtacatcgaggtgggcggatcacgtgaggtcgggagtttgagaccagcctgaccaacatgaagaaatcccgtgtctactaaaaatacaaagttagccaggcatggtggtgcatgcctctactcccagctacttggaaggctgaggcaggagaatcgcttgaacctgggaggcagcggttgcggtgagctgagattgcgccattgcactccagcttgggcaacaagagtgaaacttcttctcaaaaaacaaaaacaaacaaacaaacaaaaaacccaagtaaactagttatgaagtggacgttcatcaacttcattgtgccaagacagctaaagggggcacctggtcttgccttggggaggttgggagggcttcctgtaggaggtaacctgggaactccaaccttagaagtgatctccaaaaagccagttaccacctccatgatagctacctccaaaagctggtgtctgactcatccatccatccatccatccatccatccatccatccatccacctacccatttattgagcttctatagatgccaggcatggttcaaggaggtgctgggtacaaatcaggtaaaaatctctgccaggatgaagcagagtgagggatggtccctccaaccacaagcaaaataatgacaagataattctggaaggagtaactgctaggaaggaaataaaactgagtgaaggagggagaagtgtcccggtttcaaaacaagatccacaaaaacttagctaatcaaggatgccaccttcttcccgagccatggggaccttatcaccctccagcagacagtgcatagaggaggaactcctcccagtggccctgctggctcagtcgcctgcgcagcagtaatcgagcgcctccagtatgcaccaggcaaccttctagacattaaactgtgtgggggatgggagggaggtttctgtatgcctttgggcacgtcactcctcctcaggccctcaggttcacttctgtaactaaggcttcaggatgggtcattcagcaaccccagagctgccctgcccgtcaagcttgaactctttaaggaaataacatttagagtggactgtgcccccagcagcccccaaggtgagagtgcatagatgggggtgtttatccccatttcgcagatggtcaggatgaagctcagaggagaggcaggagtcgcacaggctgcgcgatactgacccgtgttggggtccagcccagggtcccccgcccccgccccagcccccgccccagcccccgccccagcccccgccccagccccagcagccgggaggcttcggtccctttaagaacgccccgcggggccaagcaggaagggggaggtgccaacgcccgggacggacgtctgcatgagccaacgggtgcggcagtcgcggcagcggcggccaatgggcacggcaggggcggggccaagcggccgaacctggttcccgaggcgcggcggccgcggctgggggcggggaggggggcgcaggaccccaagtgggggtcccggagccagaggcaagtgtcctggggtgctgggggcgccgtgccggccgggccgctgccctggcctaggctggtccgggggctagcgcgccgggggctgcggccgatgggcggggcgag

SEQ ID NO: 21128 - DNA, 2300 bp, Homo sapien
aaggaaccaggttccttggagaaatggctgattccagggattttacacagcattggatcatgttgtggagcccaagataaataatgctcagagaatggtggcgacatattaaaaggacacaggagcttatttattatttatttatttatttattgagacggagtcttgctctgtcgcccaggctggagtgcagtggctcgatctctgctcactgcaagcttcgcctcccgggtttgcaccattctcctgcctcagcctcccgagtagctaggaccacaggcacctgccaccacgcctggctaattttttgtatttttagtagagatagggtttcaccatgttagccaggatggtctcaatctcctgacctcatgatccgcccgcctcggcctcccaaagtgctgggattacaggcgtgagccactgcacccagccaggagctaatttaaaggggcaggaaaggaaataattataattataatgatgtggatttattaatccacatcagtttatagcgatttttgttgttgttgttgttgttgctttttgagacaaagtctcattctgtcacccaggctggagtgcagtggcacaatctcggctcactgcaatctccgcctcccaggttcaagagattctcatgcctcatcctcctgagtagctatgattatagcacctgccaccacgccaggctaattttttttttttttttttggatttttagtagagacggggtttcaccatgttggccagtctggtctcaaactcccgacctcaggtgatccacacgcctggcatcccaaagtgctggggttacaggcgtgagccactgcgccgggcctgtttgttttttgagactgggtctcactctgttgcccaggctggagtggggtcttcgttcactgcaacttctgcctcctggcctcaaacgatactcctacctcagcctcttgagaaactgggaccacaggctcgggccacaggcccgtttttttttttttttccaattgtagctgtgaggcattttattacaaaaacttggtactcgtatacacaaactaacatgaacttaaaatacattttcttcattttttagcttgaccttcttttttttttttgagacgtggtcttgctctatcgcccaagctggagtgcagtggtgcgatcttggcttactgcagcctctgcctcctgggttcaagcgattctcctgcctcagcctcctgagtagctgggattacaggctcccgccaccactcccgactaattttttttatttttagtagagacaaggtttcaccatgttggtcaggctggtctcgaactcctgatctcgtgatccgcccgcctcggcctcccaaagtgctcggattacaatgacaggatgtgagccaccgcgcccagcctgtaaacccttttgaaaaaattccccagcgcattactccaaaacaacgtggaagtgtaaatggaaaccagggctgggcgcggtggctcatgcctgtaatcccagcactttgggaggccgaggcgggcagatcacctgaggtcgggagatcgggacccgcctgaccaacatggagaaaccctgtctctactaaaaacacaaaacttgccgggcatggtggcacatgcctgtaattccagctactccggaaggctgaggcagatgaatcgcttgaacctgggaagcggaggttgcggtgagccgagatcacgccattgtactccagcctgggcaacaagagcgaaactctgtctcaaaaaaaaaaaaaaaaaaaaaaaaaggaaacttggaccaaaaaaatcagcaaaagtggagcagggatgtctgaacacagatgagtctaattccctgcttggaaagcaggacacctgagtgtggtttggcctctgaccactgtagcatttacgaccttggggagggttaccactctgggacctcagtcacactatctacaaaatgggacacttctctcagccttccttcttccgggccgctttcaagcctgggcttctggaaatacgcaggcgcgagatgaattgtttgattggctattcattgtgatgcacccacgagctgaagctccgtctaagccccgccctttcctgtcgtgacttaacgcacgcaagcggctccagggtacgtccccgccacgcgcgctcgcaggatcggtgcgtggtgacgtttcgccggcgcgggcgccatcccggaagcgcgagcaaggccgccagatgtgcaggtgccgccgctaccgacgccggggccgagtttggggtggggctggggactccagggccgc

SEQ ID NO: 21129 - DNA, 2300 bp, Homo sapien
gatccgcccgcctcggcctcccaaagtgctcggattacaatgacaggatgtgagccaccgcgcccagcctgtaaacccttttgaaaaaattccccagcgcattactccaaaacaacgtggaagtgtaaatggaaaccagggctgggcgcggtggctcatgcctgtaatcccagcactttgggaggccgaggcgggcagatcacctgaggtcgggagatcgggacccgcctgaccaacatggagaaaccctgtctctactaaaaacacaaaacttgccgggcatggtggcacatgcctgtaattccagctactccggaaggctgaggcagatgaatcgcttgaacctgggaagcggaggttgcggtgagccgagatcacgccattgtactccagcctgggcaacaagagcgaaactctgtctcaaaaaaaaaaaaaaaaaaaaaaaaaggaaacttggaccaaaaaaatcagcaaaagtggagcagggatgtctgaacacagatgagtctaattccctgcttggaaagcaggacacctgagtgtggtttggcctctgaccactgtagcatttacgaccttggggagggttaccactctgggacctcagtcacactatctacaaaatgggacacttctctcagccttccttcttccgggccgctttcaagcctgggcttctggaaatacgcaggcgcgagatgaattgtttgattggctattcattgtgatgcacccacgagctgaagctccgtctaagccccgccctttcctgtcgtgacttaacgcacgcaagcggctccagggtacgtccccgccacgcgcgctcgcaggatcggtgcgtggtgacgtttcgccggcgcgggcgccatcccggaagcgcgagcaaggccgccagatgtgcaggtgccgccgctaccgacgccggggccgagtttggggtggggctggggactccagggccgcggggaaccggtccgggtcgggcgcggcccccgggctgcggtggggtggggtgcgccactggccacatctggtcattcctgctgcgcacaggcctcagtttccccgtctgctcaatggatacgcaggcggcgctacgggctggatctggatccggatcaggggcataggaattggggcctcctgtgttctgggtgtgtcgtgtaacctggagctgggcgttgcccggtttgtgcctcagtttccctgtattgtaggggacggggcgtgaggggatatttgagcccctccccacttggggtttttcagagcttggatggctgagttaaattctgttaaataacctggatatagaaccgtggtgcttctctgcctctccctgtgagtttcggcaacggagcccgcccctgtgagcctcagtttcactcggagatgattgtgtctgcctcgtaacggtgattgaggatgaaatgaagtgctctacaagtgtttgcccgtaatatattcttagaggcccctgggatgctctcaaaatgttgattcccgggacttcttcacactcctcttggagaaacagcctgtcctgagctccagtcgttatcacctttggtttcagttgccacagacagcactgtgagatcttcattctaccttattttcattttatggttgaaaaaactgattcagaagggtgaagtggctctcccatggtcaaacagcctacctctctgcgtttcttcaataaatctacatttggagttgggatcagagctcttgctgggtcaatttcactgtgtatgtgggccagactagcagtaatcagggaaggcttcttgggagaggaagttgcggggggacgggagggaggtgccaggaacccctcagccctcacatctgggagccagagacagaaaagagtcctgttttgaaggaggagtgtatcccagaaggtcccagtactgtgtctcactggtactagctatgggcctccctctccaggtgtctttttttttttttttttttttttttcagttgagatgaagtctccctctgtagcccacactagaatgcagtggcttgattttggctcattgcaacctctgcctcccgggttcaagcgattctcctgcctcagcctcctgagtagctgggactacaggtgcccgccatcatgcctggctaatttttgtatttttagtagagacgggggtttcaccatgttcaccaggctagtcttgaactcatgacctcaggtgatccaccagccttggcttcccaaagtgctgagattacaggcatgagcacccggtccaggtatcctctttatacaagatcatgct

SEQ ID NO: 21130 - DNA, 2300 bp, Homo sapien
ttcaggtgtggtggcgggtgcctgtaatcccagctactcaggaggctgaggcaggagaatcgcttgaatccgggaggtggaggttgcagtgagctgagttcacgccactgcacccagcctgggtgacagagtgagactccatctcaaaaaaaaaaaaaaaaaaaaaaagtgccacggcgggtgcagtggttcacacttgtaatcccagcactttggaaggtcaaagagggaggattacttgaggtcaggaattcacgaccagcctggaagacatagtgagaccctgtctctacaaaaaaaagttttattttgaactatccaggtgtggtggtgcgcacctgcagtcccagctacttcggaggcaggaggattgcctgaacccataggtttgagattgcagtgacccatgattcagccactgcactccagcctgggcaacagagaggtgctgtctcaaaaacaaaacaaaaaaaaaaagtgctgagtacagagaagatggggagcaatgagaagttacctataggcttaacaggggtacctgtttatttccttgaacatttgcaggcactactataccaggcaaaagcagacactctcacgtctgggaagatgcctttaagaacctaatttccttttcttttttgagacaacagttttggtctttttgcccaggctagagtgcagtggtgcgatcttggctcactgcaacctctgcctcctggattcaagcaattctgcctcagcctcccaagtagctgggattacaggtgtacaccaccacacccagctaatttttatatttttggtagagatggggtttcaccatgttggccaggctggtctcgaactcctgacctcaggtgatccacccacctcggcctcccaaagtgctgggattacaggcatgagccaccaagcccggtcataacaacataatttctaagtactcagaagatgaggtaaccctgggagtgtgtctgatggggaatggatctagtgtggctcccctatctggaggaaggctgagatctggagaaggaattatgaaatgaggatgggaacactagtattgtgagcagtgacagcagcgtgagggaagacctagctggtgacgggaacttgggttgttatagctcccaccagggggggttccaaaaaagggccacatctctttctagccctgtagtgcctgattgtctgcacctccctccagcagggcccccagccccacatccagcacttgccctccttttgggttgcttggcttaaggactgaagaagccacagctaggtgtacttttccctttttagtaatggtgtctttttattgataacttcccaacagcatctgtaaacatcgggtacaaaaatattccattaaactctttcccgaggtggctccgtttgctccatggaggccttcagagaggcctgctggcccctcaggttccacacctctattcagagaaacacagaactcagcacgctcagggctgaatggatggccagcctccgtctcaagacttctacctatctcagaaacctccttgagataccaaggagaaagtatttgatacttttacggagcaaggggcaggaaaagcagaattagtgggtgcgggggtgggctggggtgaactcagaggagaccgtgcttgtgcacctcaaggaggtcctgaccggtggtgggggacatctggctctggtgtctgggaaccttctaagcattcttcagagcagacgtcaggctcagctctggaaaaattcccctgtgcccagccccacgactccagctggaatgggcgtgccctggcatggcagaggggtcttgcagaatagagatgttctgaggaaggaaggagccagaattaaagacccccccaggaattccacacccctcgggagagagccttgtccccctaggagccctgggtgacagaacggggcagcaaaggagccctggatgacagaacaaggcagggttacccgctgccaccttgtatgctgctgccctgagaccccctcaaggcaccgggcagcagggctattcgcccgtcatctcctcgtcatctgtctggctgcggccgttgatggctggggagccaggctggacatgggacaggtcctcgaagccggggctcagggagggcgagacggtgtcggggctggtgtcacatgagcccgtgctctgttctgaggtggcaatggtggtcgtggtgctgggtgggatggggtcttcatcctcttcctccaggaaggatgcctctgggatatctgggggaaggaggcccaagagttgg

SEQ ID NO: 21131 - DNA, 2300 bp, Homo sapien
gcttggtggctcatgcctgtaatcccagcactttgggaggccgaggtgggtggatcacctgaggtcaggagttcgagaccagcctggccaacatggtgaaaccccatctctaccaaaaatataaaaattagctgggtgtggtggtgtacacctgtaatcccagctacttgggaggctgaggcagaattgcttgaatccaggaggcagaggttgcagtgagccaagatcgcaccactgcactctagcctgggcaaaaagaccaaaactgttgtctcaaaaaagaaaaggaaattaggttcttaaaggcatcttcccagacgtgagagtgtctgcttttgcctggtatagtagtgcctgcaaatgttcaaggaaataaacaggtacccctgttaagcctataggtaacttctcattgctccccatcttctctgtactcagcactttttttttttgttttgtttttgagacagcacctctctgttgcccaggctggagtgcagtggctgaatcatgggtcactgcaatctcaaacctatgggttcaggcaatcctcctgcctccgaagtagctgggactgcaggtgcgcaccaccacacctggatagttcaaaataaaacttttttttgtagagacagggtctcactatgtcttccaggctggtcgtgaattcctgacctcaagtaatcctccctctttgaccttccaaagtgctgggattacaagtgtgaaccactgcacccgccgtggcactttttttttttttttttttttttgagatggagtctcactctgtcacccaggctgggtgcagtggcgtgaactcagctcactgcaacctccacctcccggattcaagcgattctcctgcctcagcctcctgagtagctgggattacaggcacccgccaccacacctgaaaaatttttgtaattttttttttcttttttgagacggagttttgctcttgttgcccaggctgtagtgcaatggcactctctcggctaattgcaacctctgcctcccgggttcaagcgattctcctgcctcagcctcctgagtagctgggattacaggcatgcgccaccacgcccagctaattttgtatttttagtagagatgcggtttctccatgttggtcaggctcgtctcgaactcccgacctcaggtgatccgcacatctcggcctcccaaagtgcaggcgtgagtcaccggacccaggtcccgccctggcactttttaaccacccacaaatctggatcctacactgaaaagagacactgcagtggctcacgtctgtaatcccagcactttgggaggccaaggcgggcggatcacctgaggtcgcgagtttgagaccagcctgaccaacatggagaaaccccgtctctactaaaaatacaaaagtggccaggcatggtgtcgcacacttgtaatcgcagctactcgggaggctgaggcaggagaattgcttgaacccaggaggcggaggttgcggtgagccgagatcgcgccattgcactacagcctgggcaacgagagcgaaactccgtctcaaaaaaaaaaaaaaaaaaaatcctgagtcccgcttgacaccttttgtcaggcaccaccacctttctgggcgaatgcggtagtaccgtctgctctccctgctgctgtcctgaaatccattcaggcacagcggccgagagctttataataaccgattccaggtgttaggtgctttcccagccccgactcctgcgtcctggacccgcagtcctctgcttaatacctttgctttattagaaaacattctcctctactccgttcagctattcgctgagggcccgccaaccgccagcggttgtcagtggcctagaggcagcggacgcaaacacggggagaggtgcaatcgtctcaagtgactcggcgggcggggcccacaaccggaagcgggtgggcgaccttcacccacgtgcgctgcggcttcgttcgccagcatccaagatggcggcagggcggggcccaaggcgcggcgcgaattgtgacgcaggcgtccggcgtgctccgtgcgcaagcgctttcggcggcgattaggtggtttccggttccgctatcttctttttcttcagcgaggcggccgagctggttggtggcggcggtcgtgcgggttcgcgccgggccgagagcgggttgggggctgcgggaggctgcaggggcctgggcggcagaagaggcggccctgagctggctcatgcgggccagtctcggcagggtggctgggcagggctcgcgaggccacggctcggagcccagac

SEQ ID NO: 21132 - DNA, 2300 bp, Homo sapien
cttgaggtcgagcccagtgacaccattgagaatgtcaaagccaaaattcaagacaaggagggtgagtagggctgggtgtgggggctctggctgtgaactgggagtccctctctgcccaggggagtctcagtcctgtgtgggttgtgctgactttagatctgttttgcccttgcttctccatgtgatctgaagaacgtttgttatcttctacctcagttggccttttgagaaactgggggtagtgctggagctcccctgcagaggacactgccagtaatatggtccgcagagcctctaactgagcctccctccccctcaggtatcccacctgaccagcagcgtctgatatttgccggcaaacagctggaggatggccgcactctctcagactacaacatccagaaaggtaccggggttggggttgctgggcagggacccaagatccccaggtcctaggaaaggagcattgatggcctcaggggttggggagcagttcaaatgacttgtgttttgtttaaaataatgggactgggcacagtggctcatgcctgtaatcccggcactttgggaggcttaggcgggtggatcacctgaggtcaggagttcaagaccagcctggacaacgtggtgaaatcccgtttctattaaaaatacaaaaatcagctgggtgcagtggctcaggcctgtaatcccagcacttcgggaggctgaggcgggcagatcacaaggtcaagagattgagatcatcatgaccaacatggtgaaatcccatctctactaaaaatacaaaaattagctaggcatggtggtgcgtgcctgtagtcccagctactcaggaggctgaggaaggagaattgcttgaactcgggagacaaaaaaaaaaagtcataatgtgaatttttttatcactgcaataaggaaattagtgtcacttgtgggagcgacaagaattcagtgtcctttttttgtgagacagagtcttactctgtcacccaggctggagtgcagtgacgcgatctcactgtgacctccgtctcccgggttcaagcgattcccctgcctcagcctcccgagtagctgggattacaggcacccgccaccacgcccagctaattttttttgtatttttagtagagacagggtttcactacgttggccaggctggtctcttaaagtgctaggattacaggcgtgagccatggtgccccgcctagacttcagtgtctgaccttgcctgaaccacttagaggtcggcttccatgttagaaacccagatggatgcctcagttggcatgtgtcagtctcagactccccccagggctcgtggtcagtgctgagatggagatttcctggggcaggctggctgggacagtgtatcttccacacgtagaacactcgggggatcccgacttggtgtccccatcacacttgagaaagcagcagactataggccctggagggtcctgcccctgtgactgaggagccagggctgggctcagtcgccgtccttctggctgtctcctgcagagtccaccctgcacctggtgttgcgcctgcgaggtggcattattgagccttctctccgccagcttgcccagaaatacaactgcgacaagatgatctgccgcaagtatgtgtgctccgatgcttggggggctgtgggggctgccggagtcggggtatgccctcacccacccctcctgtctctgtgcaggtgctatgctcgccttcaccctcgtgctgtcaactgccgcaagaagaagtgtggtcacaccaacaacctgcgtcccaagaagaaggtcaaataaggtggttctttccttgaagggcagcctcctgcccaggccccgtggccctggagcctcaataaagtgtccctttcattgactggagcagcaattggtgtcctcatggctgatctgtccagggaggtggctgaagagtgggcatctcccttagggactctactcagcactccattctgtgccacctgtggggtcttctgtcctagattctgtcacatcggcattggtccctgccctatgcccctgactctggatttgtcatctgtaaaactggagtaaaaacctcagtcgtgtaattggtgggactgaggatcagttttgtcattgctgggatcctgtcaggcactttgaggtgtccctcaggccttggccctgaagtgtctaggtgtgtggagatgggtagaaaattaggtacacccaatggtgtagaacgttgattctcaaatttttttattttatacaaatggggtctcactatgttgtccaggctggtct

SEQ ID NO: 21133 - DNA, 2300 bp, Homo sapien
tttttctgaacaaggaatgttgtttttatgtcaataaatcaggcatagtgagagatggaattaaatgacttcaggatagagctagcagactacatggtgggacaaccgaaactacctcagggttctcacagcctgttctccactggcttcttccatttttaggtcccttccttatgattattctaggagtaacctttggcccatgtcttttcagttccttcatcctttcgtttcttcctgaatagaatcaatgaaactagaaatgttactgcagatggaacctcagatgacttcaaccagcacctattatcaaggacccctaaaccagcctgccggcccatacccggacgttgacacccaaaccacctctcacgaggaaacctcagctacagaaccccttctatgcccctattcagcaggaagcaattagagtggtcatcctcccacaccccaacagcagttgggctctcctgttgagagaggggactgaggggtggagttggcaggatttactgggcaggtttggggactttcacagaagacccctgtgactcagtgttttgagttcttaaccaatcgagtgaaggattcagaattaaccactccaggccgggcgcggtggctcacgcctgtaatcccagcactttgggaggccgaggcgggcggatcacgaggtcaggagattgagaccatcctggctaacccggtgaaaccctgcctctactaaaaatacaaaaaattggccgggtgtggtggcgggcgcctgtggtcccagctactggggaggctgaggcaggagaatggcgtgaacccgggaggcagagcttgaagtgagccgagatcgtgccattgcactgcagcctgggcgacagagcgagactctgtctcactaaaaaaaaaaaaaaaaaaaaacaaaaaaaaaaaacactccagaggaggattgaaaaaagaaccactctcaatggacaaaaagaaaggggaggggtaacatagggatatgagccctagccaccggagccagcaacggcaacccttccgggtccccttccagcatgtggaagctttcctttcgctttgttcaataaactgccctgctgctcactctcctggtccgtggactctttttgatctgtaacacacaccgcgaaggtccacagcttcattcttcaaagttagcgagaccacgaacccatcggcaagaaaaactcccaactcactaacagcctagtcccttcccccttaaaggctggtgtctgtcaccccatacctgagctggtccctcttcactaagtcaggctaccagcatcttcctgctcctccggctgggcccctggaggaggaagctttccaaagctctgtctagcccatgtatccctccagcaggaagctccaaggcctcctctgtactttgaggtcgttctggcccctgctatgctccaggctcagggctattacacaagacacccaattcaactcggtgggctgttgacaccgtccctgtcactgaatcttgtcttcacccctgtgattctctgaagagccagtgaatctctgttaatgttggtggagttccagccactgcactttttttgaggcagactcactgtggctccggctggagtgcagtggcatggtcatagctcatggcagcccccaactcccgggctcatgtaatcctcccacctcagcctcccgagtagctgggactggaggcgggagccaccatgtcgggctaattggtttttctgtagagatcgggcctccctaggttgcccaggcttacttaacactcttgaacgtcaaaacccacgctcagtacccgcttcaagtggaagtcggtgttgagatacaagcataggaacgaactcaaggctaacagctgttctgtattcagagccgcacaatcaaggaaaaacacgatcggaggcgggccctggacgggaacaagaagggtgggcttgactgggcggcccgcggtcttggttcccctttcttccttctggctggccggccgcagggtagggggtccgtggacctcccggcctgtagggggcgtcgggcgcagcggaagggcctgctccggagcctggccagggctgcgcagtcatgatcaccgagaccgcggcggagcctacggtccctgcagtgcctgctgctgaggaggccaccgaagctcggggacgcgaggagccggcgtggccctgggtgagcccaggcccaagcgggaacgggcgcggggcgggcggcgcagacccaggggcgcgggcttcatgccccagccgtgccccctgtcccgcaga

SEQ ID NO: 21134 - DNA, 2300 bp, Homo sapien
cgtggggcctggatctgaatggggtgggaaaaaggggtcagcatctcagaatggagatgtgttttagaatcagagccaacaggatttgctgatgaattggacatgagggatgagcaaaggagagagttgtcacgtgcgcttccaggtctctggcctgagcacctggatggatgggagagccctttcccaaaaccaaaatgactggaagagaagcagaaatggagggaggaaaaaatcaaggttttgctccagaagcctgaagtcctcccaggagggagtgaggcgtctctatccacacagagagcatctgcagacaggagccatgggggagtagtggtgagtatcctaaaaactcaattccagccaaggactgccacctccacttaaccctctgggtcccctggcaggtgggactatggctccatgtttcagaggggacaagcagggctgggggtcacctctgctccaggatatcctccagtgctgtgctaagggcttggattgtagagacttctgctgccctgcgtcttcccacagaagctcctagactgggtggtgcccactgtgcagaggaagaaactgaggcacaaaaggcctggtttcccgaagtaaatggcagcgtctctccttgtctgtcttctccatccagaattcagatggagcaggggcgccctgggcccctataggctcccatcccccaatcttgttttttgacagtctggagtctgaactggagatttaagtaggagagggtggggcttcagtcttgggcagacaaatgggggctcctgagcccccctcagacacttttacccccttggctggttggggaccaggagagagaatccaggcctctaagggactcctggaaaaggggacttggagccgttcccttccctgggcgctgcagctgggggcggggctgcgaccaaaagtgggtaattgcaccccccaactctcatttcaggcacccccatccgcagcagccttggaggccaggaaccctttattcctgggcgcccgcatcgggtggggaccgggaggagggagatgagacgcccggaccgggaggggtcccgaaactcgagcaatggccaaaaataataacacggagaaggctctttgcgcaaaagaaggaagacaaactatgcgtcgctccgggcagccggcgttacctggagtcggcgggcggtggccgccgaagcgattactcaccgcgtggcgcaccccacccgcgggccgctgagtggatttttccgtggcggggtgtgaataggtcccggggaaagagcttcttaccgctctcctcctgggaatccctcttactgcggtgcgggacccagttcccgcgcaggcctgggtcccggctcccacaggggactacatctccccgtctgcccacgcaggagctccctcccgaggcccccggggcgcccagagcaacctcaaacccatcccgcgcgcgaaggggacagcgcagccagggcgaaggcgagggactccgtgccttcctgctttttctcctttcttccagcaaagcctggggccgaggctactcgcggagaatcgaaaagaggcaggatgaggtgggagggctggaacccgcgcgccgagggcgtggggctgggggtgacttttaggcccctgggaaggctgaggggctggagatgggggtaggcgggactcaaggaccgctcggtggggggggcggggccagagctggggtgggggccgagacagaagattgggccgtggaagggggaatggaggagtggggcagggttggggaccaaaggggccactgaagaggcactgggctgagaggagggtgcagggaagtgggcagggttatggaaacgggattgggggtgccgggtcccagactgggggtgggaagcctggagctggcagggttggagagggaggtcctgggccggtaggggttgagttagggggctttgggccgcgggatagggcgcgcgcggttctcggtggggcggaggcgggacgggcggggcgcgcggtgcccgcgggcgggcgggcggcggggaggccggtgcggggcccgccgcccccccggggccgggccgggccgggggcggggccgggcggggccagcggcgcattagcgccttgtcaattcggctgctcagacttgctccggcctccgcgtccgcgcccagcgacgtgcgggcggcctggcccgcgccctcccgcgcccggcctgcgtcccgcgccctgcgccaccgccgccgagccgcagcccgccgcgcgcccccggcagcgccggccccatgccc

SEQ ID NO: 21135 - DNA, 2300 bp, Homo sapien
cccaggccggcctcagcgccccccgcctgccgcccccagccaggccgccccggggggtaggaagtgggggggggggcgagggcggcgccgagtcaactttccctcttaagccccgaaggaatgtcggcggatttcctgaaacccgaccctggccgcccgccggccctcccgcccctcacctggaccggctcccccgggaacagcaggaggggcgcgggggctcaccttgggggccggggtcaagtcctctttccgctcacccccccagcggcctagtgcagcggaaagggggctgggtgtgcggcaatcagcctctttcccttctcccctcaggcgacctgggtgatcgacccactcctccagcctcagtttctccttctgcaaaagggcgcggggtgtccctcctccctgatgcgttttaagcaatgcccaaaggtcacctcccatcattggcagggctctgccggcttttctttgcttctctccctgtcacctggacagaaccactttgcagtctgagcatcagtttcctcacccatataaaagggcaacgctaccggtacctgtcttatacggttgttgcaagaaaaagtgtttcgttggaatgaatgaaagacagtaattgtggaggggttaggcgcgcgcgggcctctggaattagcatgtgtgggcttgaatcctgactttgccaacgcgtcccggagcctaagtttcccacctgtgaaatgggggacagtattggtcataacgcacagggctgtttcccaaggtgcgggcctggcgcgcgggtgggttagaagcggaattctcctgctggattctggcgcaaactgcgggctggaggccctcgccgccgggtcgcagcggcctagcatgggaggggaggggaggggcggggcggggcgggggaggggccgcaccgggatccagatgttcggggtccgccaggcacagccgcgcctgattaagccacgtgggggccggccgggggccgctgagatgaaagcgcggccgcaggccagagtagggggtgcgccgggcccccacccgggacaccctcttcccaggccgaaacctgagccgccctctaacccgcagaccctgcgaggctgccgccccgtctgcgggggcggagcgtaggtgggggacctgcgggctgctgcgcggcgctgcaggcacctgcgccaggcatgccagcgaaagcgggggcatctttgcagaggatccgggtttagaggggcgtccccactcccttatctggcggagaggaagctgggggtaccctctaaccgagattcggctcctggggctacagtccatcgccctggggtgtgatggttatggaagtcagaagtgtcgctatttgccccgttttcccatgagaattagacatgtcagcatcaccccctccccttgctcctgagcatacctctgtgtcccctcccactaagccccagcccaggggtctccagccttggggagacagggccagattccctaggtcagtggatcagggctgggccagagggaggcgaggctgaaggagcaagggaggggctcagagggcttcccggaggaggcaaactgcgcgcaagttgtctcctttctaacctgggtgtcaaaagagaagatgccaggactcagctgccgggtcctgcggctctcaccttcctccctctccgttccctggttggactccagccccatcgccctccctcctcctgcaacaagctctttctctcaggatcctcgctgatccttgtagcctggacacccctttctcctctctcccgcgtggtcggctcacacgtcgcctcctccgccaagctctccgctctcctcgacacccctggggaatagtcccctccatcccatccccctatatatttccttttggccccaagcgccagcagagatcccccgcccgtgggcaccagggaggtgtcctgggacccccgcgatgggatagacggtgggggccgcgatgcacctgccccgcccgacccgcacgcctcgggtgccgcagcgcagctaccccgcccgctctccgcatctcccaccccccgcttcccaggctgcctcgctcgggtgacgtcagcgccccggtccccgccgcagccgctgcatcctccgtgcccggcctgagctggagtcccccgcgccccccgcgttccgcccggccatggctgcggtggcgctgatgccaccgccgctgctgctgctgctgctgttggcgtcgccgcccgccgcctccgcgccgtccgcccgcgatcccttcgccccccagctcggggacacgc

SEQ ID NO: 21136 - DNA, 2300 bp, Homo sapien
agctgtgtgtcttgtgtgtctgacatatgggtcaaatctggatgtttatgaagtgtgcgtgcatatggacaccattgatttcaaatgttatttgtggcgggtgtgtcagctgtaggtcgctgctgagtgaggtttgatgcctgcatgtggttcgtctggaacaaagactcctggggcggtgctgacttagggcaggcaagggtgtgtgtgtgtgtgtgcagagcttgccggaacgtgagctgttcatgcacgcgtgcattcaacatttgcagagtgcttactgtgtattggagatgccagcagttcccttcagcacttggtatctgtcagcttgcacagggtcatctgagagcattttgtgtaacgattgagcacgtattgttgtatcaggccctctgttggagatgctggttgagtgcggtccaacctgcaggagtccactcaagcaggccccttccttcctcctatggggtctccagccccatagccacctccttcttccagcactgacgggaaagaaggctttgagctccttctggatcactgctttctgcccaagactgcacaagtcagagttttctgacttggaggttaaaagaataaatgagctccaagctacagaggggatcctgggagcctggagcttaccagagatggggggtgaggggtgcccccaaaaggtctagatgcttcatagacgcctatagatgcaggactttgagccctggctgagggtcagtgtgttgggagggctggtgcttggggatctgagggtgttgggtccggtggaatggactttgggagtgtaaggtttgaaggatctgtgggcagggatttgggggagtgggagatgagttttgagtagagaatgggagataattggatgtgcagggttttagagtatgagaaaccagaattggtgtatgaagcaggtggtgggaacctaaggccagatgattggggtctcagggtggaggctctgaagagggtatgtcaggggagggtggggaaccatgaggggctggaagtctgaggcctgggcatgggtgagtttcgcccctgagagaggcctgggaaggaggtaagactggagtcggggtgtgcagggtggggagagggagggtgtggttctcagagcttagagacccatttctccatgctccatctcaccctccctcccaccctacctataactcacttccctgtggctccaacgcctcaaagtataaccacgcccagccaacgcccggggcacgcctgccagcgccccagggcactcacagacactccttaacacctgcacgtgccccgcccctcctcagatccgccgctcacttagcccggccccacccccatcagatgaggctccgcccccccggccccgccaatccctcgccccctccacgcacacacccctgatcttccccgccctccttccaaccagactccacccctcgcccaggccccgcccttcctcagaccaggccctctcttcgcttgaccacatccatccccagattcctcctctctcctgcccagacccgcccaacctcagacccatcttctcctttctacctccccgaccactcccccaccgcattcctaacctccaccttgtcccttctcacacctggccccgccctttatcctgcgccccgcctcctccgcaggccggacccttgtccctcctcctcttgccctgggcctgccccttcttcagaccccgccccactcctcagcccagggaccaaccccatcctgcgcctacttgtcctgcttcgccccgtccccacctatccacagacaatacgccctctcagcccagaaccgcttccctttcagacttggttccgcccctcacgccagggtcccgccccaatccggcacccctagcccaggccccgccctggacccacctctctgcatagcaggcccctccctttatcccagacccgccccggccctccgtagaccacgcccctccgattccgggcccgccccaatccttggtttctggtcccggccccgcccctccgcagacctggccccgccccgccccccgcgtctcggtttcccgggcctgcgcgcgcggctcccgtcactcgaacgcgcgacggcggggggaagatggcggagtccggcggtagcagcggtggtgctggtggcggcggcgctttcggcgcgggcccgggccccgagcgcccgaacaggtgagacccggcccgcaggatagacctgcacctgtcttggagcccaggaaacctgtgggcagtcttgggcgtcctgaggggttgagggga

SEQ ID NO: 21137 - DNA, 2300 bp, Homo sapien
ccaaagtgcgcaaaatcatatcaagaaggaagatggccgggtgcggtggctcatgtctgtaatcccagcactttgggaggctgaggcgggcggatcacctgaggtcagaagttcaagaccagcctggccaacacggtgaaaccctgtctctactaaaaatacaaaaagtagccgggtgtggtggtgggttcctgtaattccagctacttgggaggctgaggcaggagaatcacttaaaccccagaggcagaggttgcagtgagctgagtctgtgccactgcactccagcctgggaaacagagactccgtctcaaaaaaaaaaaaaaaaaaaaaatcccataaaaattagctgagcatcatggtgcatgcctgtaatcccagctacttgggaggctgaggtaggagaatcgcttgaacctgagaggcagagattgcagtgagccaaggttgcgccactgcactctagcctgggcgacagagtgagactctgtctcaaaacaaagataaagtagggcagtggcaatatccaaggcattctaaatgaaaatcgatatatatatatatatatttaacatgagcattttattacctgttgtaaagcatgaatcaaagcatgtttggaagatgtcagcatcccctccagccatcctcagtccaataaaatgtgtgcttgttgtgccattagagccatcatcaattcccccagctgaccttcctagcttccacccagcccatactctgaaatccctgcagcctcctgaatataaactttcaatattggtggttgggggtccctctcttgagggagggagggttagagtccctcctgcttccctggcttaccactctgccatcgggggagtctctgctccttccttcactgctgagtcttgatgggatttctggacccttctgttagcaccttgttgcaaaatagagatccttgaacaagactggactggagaagtatgcagagggaaggctgaagctctgtaactccagttctttgggctcaggtatccagagaatagcaatatgcccattgcaagggaatgggaaaaagtagtcgtcggctggacatggtggctcacgcctgtaatcccagcacttagggagggcgaggcgggtggatcacctgctgtcaggagttcaagaccagcctggccaacatggtctttagtctctactgaaaataaaaaaattagctgggcgtggtggcgcctgcctgtaatcctagctactggagaggctgaggcaggagaatggcttgaacctgggaggaggaggttgcagtgagccgagatcgcaccactgcattccagtctgggcgacaagggcaaaactcggtctcaagggaaaaaaaaaaaaaaaaaagaaagtcgttaagggcaacagctaggtttatggactgagagagccgattgcagggttcaggtcttagctaagataactttccgcctccctgtctgtggtggctgcaggagcctccctccctaatgttctgtggctggccactggtcttatttaccgcatcacatttacctccatctgaaaagttcttggttatttgtgtgctatgtctgccccctctctgactgtacactccataagggcagggatcacctctgcttgttcacgcctgtactccagtttgcctggcacatagtaggtgctcagtaaatattccttgaatgaatgaatgcatgagtgaccaacgccctagtctgttttcagagctcttagtccaaacccaggttcaacttggggtgccaccaatccttgcgggggggggtgcctggccccacccttgtgaattgggaggatctgggtcaggccgtctccctcttgggggctccagtgccccagccgatccgcggtccttgtccaacagcccagaggccgctgtccagcgggccaggaggcggatcactgcgtcggcgttgaaatttccactcgcgctccaccgcccttcccgcgggccccgagcgcgcgcctgggcgcgcgcatgcgccttcgcccccgcgccgcgcgccgctcctgtgcgcctgcgccgcgctcacgaccgccggcgcgcctgcgcactgctcgccgcccgtgggcccagccggcgcttgcgcggtggcacgggcgagtgggggggcgaggaggtggaggaggaggaggaggaggaggaggtggcggcgagaagatggcgacttcgaacaatccgcggaaattcagcgagaagatcgcgctgcacaatcagaagcaggcggaggagacggcggccttcgaggaggtcatgaaggacctgagcctga

SEQ ID NO: 21138 - DNA, 2300 bp, Homo sapien
tgagtggagggagcaaggaggcagcaggggagtgtctccagggcccaggagactcagcctggaatccacgtgcccctgatgctctcatcatcattccctatcgcttcccaagctcggcagatgtttactgaggaactctggtggaccagccatgcagcgaggggtcagctcagctcttctcatcaggtcctcagtaaacgtggggacccacggcatggagggactgaggcaaaaacaaagttgacagccagaatgaactcagaatgggccaaagacctaaatgcaagagctagaagtgtaaaactcctgtaagaaaacagaggggctggctgggcgcggtggctcctgcctgtaatcccagcactttgggaggccaaggatcacttgaggtcaagagttcaagaccagcctggccaacatggtgaaaccccatctctactaaaaatacaaaaattcgccgggcatggtggcgcgtgcctgtaatcccagctacttgggaggctgagaatcacttgaccccggcaggtggaggttgcagtgagtcaagatcgcgccactccactgcagcctgggtgacaagagtgagactccgtctcaaaaaaaaaaagtccagaacagataaatccacagagacaggaaacggattagtggctgccaggggctgggggaggggaatggggagtgactgctgatggggatggggtttctttatggagtgattgaaatgttctagaaccagacagaggtgatggttgacagtgtactaaatgcctctgaatcattcactttcaaacaagatcatggtaaattttttatgtggattttattgcagcttttttgaaagtatatttttcatgtaaaagattaaaaaaaaatagaaagaaacaggccacagagagaaaccaatggtgggccgggcacagtggcttacacctgtcatcccagcactttgggggccaaggcaggaggattgcttgaggccagcctggacaacatgggggaccctgtctctacagaaagaaaaaaaaaaaaaaggccatggtggtgcacaccactactcccagctacttaggaggctgagatgggaggattgtttgagcccaggaggctgcagtgagccctgatcgtgccgctgtactccagcctgggccacagacaaagaccctgtcgcaaataaaagaaagaaagaaaacagatgcgggacgtcagtctcaggctgtggccttgctgctccaagctgtgttcccacacacacagtttccagaggtgggcagtggcaacaccctggggagggtccgtcagggctggcagctcctgctacacagcaggtgatcccctcagtcactagcctctcctgttcccctgggacccagtgcctggaggtgggcagcagctcccacattccctgtgtaccctgcggccattacccagccccggcctctgggagaatgaatcggtcaggggatgctgggcatgcatcccttacccctatggcgaggcgtccgggcagaaaatcctcccccacaacacgcacaggtgatggcgacgggcttctgagcaaaatgcgtgagatctggggctctttgctgggcccttggaggagcacaggaggaggcttgagggtcagacatgggaagttctatgtccacaagtcaggggcagaaggctttgctgcagcctccgacatcacttggagctttgggggtacctgtcagagacttggatgccccagggctgggcagaggcctgagggctcttgtccctgtctcccttctcacactggcatcagcccctcctggcattggggatgccatccctgctggtgcatctggttaaaagctggcctggagggtgttcacctcctttgttctgcttgatccagggcagtgacaaggggaccccccggggagcgggggatcctgagcatggcactggatcgaggcgcacgccagctcctgcaggcctcgttttgaagccgaggtctcaactgcagggagcagatggcgtgtcccctgggagtgctggggtgggggcggtgacagggctgtggggccggctctgggcagcatgggcaggtgcggcctcacagtagaggcctggagcccttaggggaagagtcctgctctggctgttgatggtaagtggctccagaagcttccgttccctcgatgaccgtatttcacccctggtggcccatctcagaccctatgagctcccagtcctgggccttggcacctgctgttcctcctcccctgcaaggctccccagtgctgtgtctctgccagtccacggccgcacag

SEQ ID NO: 21139 - DNA, 2300 bp, Homo sapien
ctctttcctatttaatgctgtattcagagcaggtacccatgttactcaacagccattaaaaatgtgatgataaaattatattaacacatttaggatggaagattaggaaaaatacaggccaggcacagtggctcacgcctgtaatcccagcacttttggagaccaacgcaggcgatcagttgaacccaggagttgaagaccagcctgaacaacatagaaagatcccatctttacaaaaaatgagagaattagccagatgtagtagtgcacgcctgtactcccagctactcgggaggctgaggtgggagaattgcttgagcccaggaggtcaaggctgcagtgagctgtaatcatgccactacagtccagcctgggccacagagcgagaccctgtctccaaggcctaaaataacaataatatagttaatataaaaacatacaataatatagatcatggttgtacaacaatgtgaatgtacttaatgtcacagaactatacactcaaaaacagttaaaactatacatatatacacacatatttacatacatatgtatacaaacgtgtgtgtgtatataattttttttctgagacatggtcacactctgttactgaggctggagtgcaatggcgcgatcacaggtcactgcagcctcgacttcccagactgaatcgtcccacctctgcttccagctgatttttttttttttttttttttttttggagagacaagatcttgccacgttacccaggctggtctcaaactcctgggcccaagtgatccacccatctcggcctcccaaagtgctgggattacaggacatgagccactgtgcctggctgttatatatattttactacaatagaaatatatataacaggcacagtggctcacacctgtaatcccagcactttgggaggccgaggcgggtggatcactagagcttgggaggttgaggatgcagtgagctatgatcatgccactgtacaccagcctggggggcagagtgagaccctgtctcaaaaaaaaaaaaagaaaaaccatatacatacatacacacgcacacacaccacacacatacacacacatgttagtaaacggaagaaaagtaagcaagctgttcaaaatatatatgtatactacaatattaaattctcaccaagcccgtatcataggtcaggccctgttcccaccatcacattcattaacttatataaaatgaatggagctttatggagtgggcagtgtgttcatctccattgtagtccgtgttagacatgaggaaattgagcacagagaggtcaaaacacttgctcagagacacatagctggtggtggctgtacccacattttgcctggcagccaaggaggctttctggggacccactcttgaggcacctgcagccaggagcagattgggtggccttgtgctttctccccatcagttcctagagggaaatgcggtccctggaggtagagggaagagcctctcctgggctagttgaagcaagacctcctgcctcaggttggcttcccaaccacgggggcctctaagtggcttcattccttccggggccttctcctagcccattccacctgtcacactgggtttgtgtgacactgagcatcctagagggcacagtcacctgattgtgtttgtcaccaagaggggacctggtgacagactggaggctcataccccaaggctgggcacctgtggggctccttctttgggaggtttcagcaggagggcactgtcctttccccaaagccaagaagccttgctctgttgcccaggttggtcttgaattcctgggctcaagtgatcctctcacctcagcctcctgtgtcgctgggaccacaggcgtgcgccacctcgcgcggctgctttttgtttttcacgagctttgcagatgaacaccgcagtcactctggtggctctttttagaatgaggtcccgagagctttgctcaggtgcagcagctcacaaaaatgatccacagctgccaccctgtccatccagcgtgtcccagctgggatcaggactatcgcattgtctgccttgggctgaggctcattgtctcttcctccctccccaccaggaccaattctgactccgccctgcaccagagcacaatgacgcccacgcagccagaatcctttagcagtgggtcccaggacgtgcaccagaaaagaggtatggacaggggactcgggtgtctctgctggggtgaggcaagtccagcaggtaacccctgttctccaggaggtcacaagcttgtgggcagatggctcttcaaa

SEQ ID NO: 21140 - DNA, 2300 bp, Homo sapien
gtagtagtgatatttaaaaaaaccacacgtacgcacacacaaaaggccgtgatacagaccccctgggaggcccgcccaggtccaggaggggcgtgaatccttctggaacacagggacgcctggctgctggctcctggctgggccccgggtactcgcgtgggccccactgtccctggcaagctcggacctcggtccaccaggttcttattggaaaaagaactccataatggaccaaggtcgtcacgttaacacaatgtcactgtgaatctggcttcaggatgctgaaaatgggccacgggcctgggatgctccgaggtgggcatccctcctctcctatctgtccacaccgaagaccagaggacaagcagtggcgcccgccggaggttggacggatggggtatgaggtttcctagcatggtcctcaatgccttcttttgaaaaccgcatccaggcgggttgcttgtaattttattaaggccatttttttttaagtcctacatacaagtctaatggtaatgaaactctcctatgtacatgtagtttttcttaaaaaaaaaaaaaagtccccgctgtctgcccccagcctctgtcatggtaagagaaagggaccttgacctggacagaccaacagtgtcccccccgcaccttggaacaagacggcagcaggagcaacgtgaccagggagccttctcctatgagtggccacttggctgctcagacacatgccaaaggcattgccgggcaaagagaggaagggatggttgctaggatcaaacccagctctgaggacagaagccagggtgcccaggaccccagtgaaagcagcagccatgacactacaaataaacggactcagcagaaggcgctgtcccggcaggcaggagcgagcgagagccgcaatgcagttttggggggatcagaacagcagttcctattccaagaacagcagaaaacaaagccagccctgatgcctcccttgcagggcccgtggtatggggagggtccaggacagctcccaagtaccctgtcaccctggtcttagaggtgctcctgaaacctgccactaaaacacacactgctgtgtgtctccaagtccacctgccacgaccctgagctgccaagaaggggcagccagcagaccacgctgcccaagagagggggtgtgggctaggagccagagggtagggtggagaggggatgaaatgccagttccacccaggttctcagggaggaccgtggtcctcgtctcggggaccctcgctccctgccagtcccccacactcttggggcagagaggtctcagctgccactggtcatggcatcttcacacacacactctaaggactagcaggcacctctgggagaggctggcaggctgggtctttgagagaccctcaataaaagccaaggccccttcccggaagtctgttctgtggccctggcagaggcacctctgcctaccgtgagctcctgacaaggccctgcccagcctgaccagcccttttgttttgagataacttggggtgaaacccaaaagccggactcacttcttacactcaggtgggtggcgggctgctttggggcgcatggcctccatttccagttagcttaaaaaataggtaaagttggatttctgaaataaaaacatgctctcaggcaagtgttggcttaaaagattaagcgagtcatctacaaccaaaatgtaactagaaactaaaaggaaaaaaaaaccacaatgaaactcccctggccacctctgcctgtaccttaaattaacagcatctatgacaggaccggtgaccacagtgcaggacaggaggggccacggattgtaaagccccaagaggtaacccctgcctccgcgttcgacccctcacggggccttccggtcacttcccggcaaaggtggccaccgatgggcctgcctgcggtgaggcagggcttcgaggggatggagacagggcgaggagggtcgtgggggggtccgccgccctgcatgctctgtccactttgcgcctgccccggtggacgccagggctctgtgtgtgctcagaaatataaaagacagccgtcaaaatagtgtttatttcactttgcgtctgccccgcgctctggcgcctcctccctggggcggcgtggggctcactctctacctgaccacgggctggggatggcggatgggctgggggaccgggaaccaaggaaggcagtgagagctggacaaacagtcggaaaatgcgccacggcccacagccctggcggaccatgcgcgcccctcccctgagcctgcccgccacgcc

SEQ ID NO: 21141 - DNA, 2300 bp, Homo sapien
cacacacagcctcatctcctgcttctcactgagccccaagagcttgtcaccttgaggtcagtccatccaacgggccaggttggttcctgcctcagggcctttgcctatgctgtttcctctacctggaatgactttctgctacctctgcctggctgtgtcctcctcatcatccggtcctcagcttggtggtccctcctcctccagaagcccgccctgacccatcccctttcaaacagatcaatttcctggggactcctaccattgtctgtgtgtcccgtcacagccatgagcccactgggctccccatttgaaggagagactgggtctggcttcttcaccctgtgtgcccatcacccagcacaggagacatgacacacaacagtccttgatgtttgtgaaataattattgtgtctagaaatgtccccacctccaagcttcacatgcttccctccaccaaaactgccctcaccttttccctctgctgatccaagtcctccttttcttttatgtctgtctccttgctacctcctccaggaagccctcggtgacttctctgtaggctccccagaaaacatatctggctctgagtctagattcacccctgccctcgggcagtggccttaggccagtcactttttctctctgggcctcagtttctctgtctatagaatagacgctgtgagtactggaaggtgggagtggagagtgttaactgattgcaggaggttaaggggttttgtaactccagagtgtggctggccagttagcggtaacttttatttttattacaggctgttcccacagcagctggagcacagtttggaaggtatggcacagcctggacaaacagaagccccggacctccccttgctagagccctttaacttgctcccctccagatgggggcctcacaccccattgcgcagattggaaaaccaagtgggcctgtccccttggacaggggttggggcaagatcctgaacgctgtcccctcctccaccagccgagggaccatggggaggggagggaacaccagcaatgagttgggttggggggagtcatttgcagccctccagcgttggggccagaagcggcctccttggacagaggcaggaaaattgagagtcccaggtctcaactgcccctcccctattttccattcatcatcataatcatcattactattaatcattaattaataattattaacttattacctccattgtgcaagggaggaattacgcctgggtaatttttgtacttttagtagagatggggtttcaccatgttagccaggctggtctcaaactcctgacctcaggtgatctgcccgccttggcttcccaaagtgctgggattacaggtgtgagccaccgcacccagcaacttacccagttttgaagcacttcaggaggagtggagggccagtcagtctgatccatagtgggtggacctattttttcagacgctggtgactctgtttcccgaagtgtgagctgagagcgtggccatggagcctgccttgtttggaactggaactcaggtttggcatacagcaagcactcaatcaatcaatcaatcaatgagctgaatgctatggctggatcctgtaatcccagttatgtggggagtatcgcttgaggccgggagtttgagactactagcctgcaggacatagccagacccggtctctaaaaataaaaataaaaataaaaataaattagctggacttggtggtgcgggcttgtagtcccagctacatgggagactgaagcaagaggatgcgatacagccacaccccgtcacacacacacacacacacacacacagacgcacacacacagtgaatgaaagtgggggcagtaccccctgactccctgccccaccagctctctccacagaccccgggactcagtttccccaccatgtcggattcagccgcgggcgacttcgcggggcattccgggcggggacttgaacgcaggggccagcgccatctgtttaccttgaggctggacgttgggcagggctgtggtgggccgtccctggggccggccgtgccttggggataaataggccccgcgggcctcgtgggcggtagaaagcgagcagccacccagctccccgccaccgccatggtccccgacaccgcctgcgttcttctgctcaccctggctgccctcggcgcgtccggacagggccagagcccgttgggtaagccgcgttagcacccgcgccgtgcccacggccccacaacggactgtaggacccgtgagaggcccgggatccaggctgtttg

SEQ ID NO: 21142 - DNA, 2300 bp, Homo sapien
agagacggggtttcaccacgttggccaggctggtctcgaactcctgaccttgggtgatccacctgcctctgcctcccaaagtgctgggattacaggtgtgagccacagccttcttcactctttttcagggacaagacatagtggctcatacctataatcacagctctttggaagattgaggtgggacgattacttgaggtcaggagtacaagaccagcctaggaaacagcaaaacccccatctctacaaaaaataaaaaataaaaataacatttcggggggggctcctagcatgcactaaactgtaggaatataaacaatgaataaaagtaggtctccctctccaagaaggcacagtttaagggggaatactgacagaccaacagataattttaatatcatgcaaagctctctttggaacacatccagtggaatttgtagacaaatttcagatcaatttagtaacacctatcagagtttttaaaatttatttttatacaaggtcttgctcttttggcctccgaaagtgctgggattacaggcgtgacacaccgcaccgggctccatatatatcagcagcaaccatatatcacatgagagtatgagaggaataaatgagctactagtcactctatttatattaacataaataaatatatattaatatacacacacacacataggatctctgtcacccaggctggagtgcagtggcacaatcatagctcaccgcagcctcaaactcctgagctcaagtgattctcttgcctctacctcctaaagtgctgggatttcaggaaagagccaccttgcccaggcttcctatgccaccttaatggcaacagaaaccctaggctcagagaggttaagtcacttgtataatttcacacagctggtaagtggtcaggtctagagtccaccacagaccatgtgcttccagttgttttgctgtatacgtccactaaataataatcatagcaaaaatagtaatggtataataacagtggcagaggcatcaggaacagcagcaaccatcatttccaagtgccaggcccagtacgtaagactatccccattcatttatttttacttatttttgagacagggtctcgctctgtcacccaggctggagtgcagtggtgcaatctcggcttactgcagcctcaacttcccagggtcaagcgatcctcccacctcagcctccctagtagctgggactacaggtgcgaaccaccacgcttagctaatttttttttttttttttgagacagagtctcactctgttgcccaggctggtgtgcagtggcacaatcttggctcactgcaacctccgcctcctgggttcaagcgattctcctgcctcagcctcctgagtagctgggactacaggctcgtgccaccacgcctggctaattttttgtatttttagtggagacggggtttcaccatgttagccaggatggtctcgatctcctgacgtcatgatccacccgcctcggcctcccaaagtgctgggattacaggcgtgagccaccgcgctcggcctaatttttatattttttgtagagatggagtctcactctgtctcccaggctggtctcgaactcctgagttcaagcagttctcccgcctcagcctctgagtgttgggattacaggtgtgaccaccgcgccgagccccactccctttttaaaccaatgcacagggagcatctactatgtgcgaggcaccctccattttacagatggggaaactgagttccaagcagcttttgccaggagtgggagcgcaccgtccctgcccagtctctccagttgggcgttccgagaccacctatgtagggtattcggctagcgctcaattaaaccgaaacaccgtcgcagcgaccacaggtgcagaccaccaagtccacaccgccagccgcccgggcgtccccaattagcagttggggcgggaccaagtcctcgagctgccgccgcagcggcggttgaaagccccaccccctgcgcgtgcgcggtgcgcgtcccgtcttcctgctgggcaccaggcgcccgcgaagagcgcgcgcgcttccgccggcgtcgggctcgcgcacgcgcacggcgacggcggcggtggcggcagttcctgctctaggctgcgagcggctggcggcttcgaggggagctgaggcgcggaggggctcggcggcagcggcggcggctcggcactgttacctctcggtccggctggcgccggggcgcgcggtttggtcctttccgggcgcgcgggggcgacagcggcagcgacccgaggcctgcg

SEQ ID NO: 21143 - DNA, 2300 bp, Homo sapien
ctgagcttcttgacttgtgggggcccctgttcctacagctgatccttgtaggcgaccactgccagctgggcccagtggtgatgtgcaagaaggcggccaaggccgggctgtcacagtcgctcttcgagcgcctggtggtgctgggcatccggcccatccgcctgcaggtccagtaccggatgcaccctgcactcagcgccttcccatccaacatcttctacgagggctccctccagaatggtgtcactgcaggtaacggggctctgcccagggcaggggcttctacagagaagcggcatcaagggaatgtggactggggagaaggaactggcccatcagcttcccctgagcggcttcacatagccactgcttgaggtcagggcactttgtgcccaaggtcttgatggtatggtcttggatcaagtggtgtctctggggcatgtggggagcctgtgtcctctgtaaaactcagtcattgcctgagaattcatccaagcctcatgtggcagcatgcacagcagccaggacaggctgttaggggagctgagcccgggccttaacgtgggctgtgcattcagtgcttcatgaagaacagctgttctcagggcctgggcccctggggcccgcaagaccgtgtccggcttccctggataacacagaggcctcacctgccctttttcactctgctgacgctcacactgctggtgaccccctggtgcttctgcaagagtcagcccagagcagccagactgtgcccggatcacagtaagaaacgccctggatgaggaagtgaacagtacatcttactaagcctcgagtgtttcactgtgaccagataaaatttctcgtgacacctttgggtatgccggcgcttgaaggaagtccttgtggacacaccctgggtattcaccccaaggtgttgggcagactttttccaaaaatgatcgaacctgtcgcttcatggagaactagtggcaacatctgttacagtagtaaaattcaagtgaaaaccagaattttggaaaacttaacgtcgcttgccatgagcttggtgtcttcccaacacctagagacttttctggtgaggtctgtgggggtgacagatggaatgtttccaccattgccagtgaaatgtgtcagcctttggaagacctacttgactcggtgggagatccttcctgaatgaccagcagagtgtcacgaagtcacatggggatggagtggcaaagagttgtcacaggcctgcagaaacccacctttgtccagcttgatgtggcctcagggctggagactcccagccatgcagaaaggctgtaaaaacaaacccatctccctttccagcctcaggcatccatgaggcctggcttccccacagcgtccccagagcccaggagggtggactgagcagaggtggaccccagggcccagctgcctccgattcagccagatagtaaggagatttgcagaaatgggagacaggaccactcttcttacttagcttatttttggagaaataactaacacgtaatgggttatttttaaatgaattaatatattttttaaatttccaagtttagagaatacagttatccaataaacaaaagctgtttggactccctaacttttgagagtgtaaagggtcctgaaagctgccgacacagcgcctcatgaactccaaacctgtgaggttggtattgtcaggcctagttacaggagaaagtgaggctcagagcccaccccccgggttgggccacaccactctttgcctagcggtaggtcttgggagttgatgccactattgacatcgcagggacaccgctgttcccagcgcatggcaaggctgaaaacacaaggccacagagacctagcttgtgctctggggtgtctgagcactggctgggaaaggcgtggctcggcgcaggctcagacccctcatggtccccagggcatcggcccagagggcagacgctggtgcacactgctctctaattgatgcacagcacgtagttcacacccaggaagtacattttaggaaattctctattgaagtgtaaacatgtggccacattacaagtgtctggctcaatgagtggttactaagtgagcatatttggatagccagcacctgaacccagaaccacctgaccagctgtgagaagccgcctcatccctgcaggtggccactgtccaggggtgcgcatccacagcagcccctgggctgagggacttctgagctcatccggcggcccctgtgctcgctgtaacagcagtgatccacttggcctcattttcagctcgac

SEQ ID NO: 21144 - DNA, 2300 bp, Homo sapien
gctgcgaacgtggagaagatcaccacgaagttgctgaaggcaggcgccaagccggaccagattggcatcatcacgccctacgagggccagcgctcctacctggtgcagtacatgcagttcagcggctccctgcacaccaagctctaccaggtgcgctgcgccctcgggcacacttggtctcctgggccatgcaagggtattgacccttgacctttaagttaccccccaagaggggcccgtcctggctggagctcagaatggcccaggaagcaccagctggcccaccctctggggagggcacagacagcacatccccacagaccctgcgaaattccacatgatcaggacagagactttgagaaatacatcacagggatcagaaacatgggctgagattggcacatcaaggtgttttctcgggatggttgaaacaagtccaaggtggaacggcagtggtctgtgcctgccacacactggatgttgtgctgtggagaccgtggtgttcacacctttattgacacccggatgaaacacccactgcgggtgtgtggggaggaggcacagctctgcctccatgaggaaatgagcccaagtgctgagtctgagtggccacatggcagtggtttctgttctgtttttgagcacggctcaggttctctgggatgagcacgtgtgctcttagtgctgagaaacaaatctccgtggctaaaagagaacaggctaggtgtcatggcccacacctggagtcccagcactttgggaggctgaggcagggaagtcgcttgaggctaggagttccagaccaacctgggcaacgtagggagaccctgcctccaccaaaaaaaaataataactgggtatggtggcatgtgtctatggtcccagctactcaggagactgaggtgggatcagctgagcctgggaggtcaaggctgcagcgagctgagattgtaccactgtactctagcctgggtgacagagcaagatcctgtctctaaaaaaagaaaacaaaacgaaatggcagcagagccaggacagcccctaggtgcggtgagcaggcgccaggccccaagctcccgggtgggatttgagggtgggtcttggtgtgtttcctgcattttggggggactgggaaggcagcctgctggctgatagtgaccacaaagctcccttccaggaggtggagatcgccagtgtggacgcctttcagggacgcgagaaggacttcatcatcctgtcctgtgtgcgggccaacgagcaccaaggcattggctttttaaatgaccccaggcgtctgaacgtggccctgaccagagcaaggtagggaggctgcctgctgcatgctgcccagccgctcatcggtcctcacttcccagggaatttggggctagggttgggggttgccagggccagaggtcagaggactctgagcagcagttgagaaacgatgtctcactggagagatctttgtttccgtgtcctgggggtttgctgtggcccctgtgcctcagcccagcaggacgtatttttccaggcccttctggtctgattcaaaataaatcttgtgtgtgtctgtcaagttgtttaatctgagaggctgtaagttttggtcctgtccactatttttggttctaaaatacaacttttgtgaactgatgatagcagaagggaccccgagaacaaggtgtccattctgtcatcccacataaaactagacatcaggccaggcatggtgtctcacacatgtaatcccagcactttgggaggccgaggcaggtggatcacctgaggtcaggtgttctcgaccagcctaacatggtgaaacctcctctctactaaatacaaaaaaatgagccgggcgtggtggcacatgcctgtaatctgagctacttgggaggctgaaacaggagaatcgcttgtacctgggaggaggaggttgtggtgagccgagattgcgccattacactccagccactgggcaacaagagcaaaactctgtctccaaaggaaaaaaaaaaacactagacagcaaggacccattcaccagctggaagttggggggacctggcctgtggctccacccagcacagggagagagcctggtgctccttccggctcatatgcgcggtggttctcctctaggtcaccatggctttgtcattggttactccctctttctaaggcgccctcttgtttggtgggcagtattgggtgggtccccccacagcttcgtgaggtgggctagaggagctgggcatcgggtcagtgccccggcctgctgggggccctgtggggccgcg

SEQ ID NO: 21145 - DNA, 2300 bp, Homo sapien
ctgcctgccaggcaggttgtggcgttagtcacatctctggcctccggctggacctgaactattggccaggccaagcctcgtgccccacccctacactaggcccctagtccacatggagtccacgttcaagaataaagagtggggccaggcacggtggctcatgcctgtaatcccagcactttgggaggccaagacaggcagatcacttgaggtcaggagttcgagaccagcccggccaatatggcaaaaccctgtctctacagaaaatacaaagattagctgggtgtgatagcaggcgcctgtaatcccagctactcgggagactgaggcaggagaatcccttgaacctgggaggcggaggttgcggtcagctgagattgcgccactgcactccagtctgggcaacggagcaagactccaactcaaaaaaaaaaatgagctgtatgtatgtaggggcagatggtgacaagtgccaagcagacatgaagacatgaggggcgtgtgacttcagagtcgggggcagcctgagcaggtggcagaagagccatgcaggtacctaggggaacagcatttcaggaggggggaacagctagtgcaaaggccctgaggcaggacagagcttggcatgttggaagaacagcagaaaagcccacaggcggagggaaacagggcgctgtgagggcagccagtgaggacttgggctttccctgagtggaacaggagccatagagggctgcaagcagacgaggaacaggccaacagcgtcgcagccaccttctcacctctgtggggtgaggaggaagccaggataccagacggaagagggtagtggtggtagtggtggtggtggcggggagcggggggcaaggctgtgcagatgcagagaagtggccagatgcagggccacctggatgtgttgtgggggactcggtgtggggcaaggggaaggtgtgttcacctgtgcccctgaagttcaggtgcaggtgttcgggagccagcgcggctgctgcaggactcatccctgcatcctgcaccttgaaggccaggtgtggggacatcctgcgggctaggatggagggggggtgcagcagtgcctggggagatggcggtcctaacagaggtgaccagtgtcttcctcgatggccttcagtggctttgggcacagggccttgtcaatgaacagtgcattggaaagtcacttatggtggtcccaatgatgtcacagtcgatccagattgggagtccctcccacgttggcacccactcctgcagcctctctgcaactcatgtattaacctgatgttggggagccccccccccgggttccccagggtcacagcagcaagtgaccctcagagaaccccctaatctcagcagcccccatcacacctttgtcccagtagcccgctgtgcagacctgcagaagaagatgcctgggaagtgcccagggtacccgcgtccaagctggaaccccattgccaagctcctggtgtagggcagagagctgcgtctccactaggtgcgcctcccaacgccctggcgtgggccgtgtccttttgaagaatgagaatgtttcattgagcctacgcctcctgaatgcgggagggccacgggatggtcccaagactgtgccaaggcgtgccaggcctcgggtccttgagaaggagcgagggctccaagaacggtgaggtcggagcgggccggggcgatggagcgggagcggcgtggcgtgctggagggccgggagaagcgggggtcgccagtcgaggggactgcctgctagtgtcccccgtgccccccgtcacgggcacggcgcggtggggtgggggagcggggggcgcgcggggcaggcatgggggcgcgacacggcggtgcgcggggtctctcggggtccaggtccaacgggcccccagctccggcccccgcgcctgggtttctctgctgggaaacgggcaggggcgcgggcccgcctccagggcgccccgcgtccccgctggccgccccccagccgcgcccccagcggggcggagcttgcgccggtcccgcccctccgccctccgctctcccgcccgcgcgcccccggcccagctgcggcgcgtgacgcggggcgcgcggctccgtcggctaccgcgggcgggcgcaggcgacgggcacggcgggcgagcgggcggtatggcggcggcggggcccgcggcggggccgacggggcccgagcccatgccgagctacgcgcagctagtgcagcgcggctggggcagcgcgctggcggcggcgcggggctgcacggactgcggctgggg

SEQ ID NO: 21146 - DNA, 2300 bp, Homo sapien
cctgggcttatctcccagggaaaagataagactgggtttccccaagccacacccaggcctattcatttgaaaccagaccccgtctctggttgccagggcaggacagcaagcgacccccacccccagcctggtaggggagggaagtggcaaaagaggactccctggacagggacattaggaggggtccaggccgagctttctggagggaggagaccttggggtgggtggggggacactggcctcaagactgacctccgcccagccttgggtgcctggtccccagctgccagtagagccgccttccattcctgccctgcacccacccgttggcagcctcctggctggacccgccaaaaagaaattcgaggctgagctggggctagtgggtgggtgggtggcgcctctcccgtgaccgatgggcgccatggtgaccagatagtgctggccgagagggtggagggaggtggctgggactgtccacggctgccccacaggcctggctggacctttgagagcatatccccctcgtccccctctgcctgccaggcaggttgtggcgttagtcacatctctggcctccggctggacctgaactattggccaggccaagcctcgtgccccacccctacactaggcccctagtccacatggagtccacgttcaagaataaagagtggggccaggcacggtggctcatgcctgtaatcccagcactttgggaggccaagacaggcagatcacttgaggtcaggagttcgagaccagcccggccaatatggcaaaaccctgtctctacagaaaatacaaagattagctgggtgtgatagcaggcgcctgtaatcccagctactcgggagactgaggcaggagaatcccttgaacctgggaggcggaggttgcggtcagctgagattgcgccactgcactccagtctgggcaacggagcaagactccaactcaaaaaaaaaaatgagctgtatgtatgtaggggcagatggtgacaagtgccaagcagacatgaagacatgaggggcgtgtgacttcagagtcgggggcagcctgagcaggtggcagaagagccatgcaggtacctaggggaacagcatttcaggaggggggaacagctagtgcaaaggccctgaggcaggacagagcttggcatgttggaagaacagcagaaaagcccacaggcggagggaaacagggcgctgtgagggcagccagtgaggacttgggctttccctgagtggaacaggagccatagagggctgcaagcagacgaggaacaggccaacagcgtcgcagccaccttctcacctctgtggggtgaggaggaagccaggataccagacggaagagggtagtggtggtagtggtggtggtggcggggagcggggggcaaggctgtgcagatgcagagaagtggccagatgcagggccacctggatgtgttgtgggggactcggtgtggggcaaggggaaggtgtgttcacctgtgcccctgaagttcaggtgcaggtgttcgggagccagcgcggctgctgcaggactcatccctgcatcctgcaccttgaaggccaggtgtggggacatcctgcgggctaggatggagggggggtgcagcagtgcctggggagatggcggtcctaacagaggtgaccagtgtcttcctcgatggccttcagtggctttgggcacagggccttgtcaatgaacagtgcattggaaagtcacttatggtggtcccaatgatgtcacagtcgatccagattgggagtccctcccacgttggcacccactcctgcagcctctctgcaactcatgtattaacctgatgttggggagccccccccccgggttccccagggtcacagcagcaagtgaccctcagagaaccccctaatctcagcagcccccatcacacctttgtcccagtagcccgctgtgcagacctgcagaagaagatgcctgggaagtgcccagggtacccgcgtccaagctggaaccccattgccaagctcctggtgtagggcagagagctgcgtctccactaggtgcgcctcccaacgccctggcgtgggccgtgtccttttgaagaatgagaatgtttcattgagcctacgcctcctgaatgcgggagggccacgggatggtcccaagactgtgccaaggcgtgccaggcctcgggtccttgagaaggagcgagggctccaagaacggtgaggtcggagcgggccggggcgatggagcgggagcggcgtggcgtgctggagggccgggagaagcgggggtcgccagtc

SEQ ID NO: 21147 - DNA, 2300 bp, Homo sapien
tgccttgtccccacttggggcccaccggagcctggggatggcccctgctttgtgctccactgcatgctcataccccacgactaagtgcccgagccaccctgcccgtctgaccacgtgcaggccctgggaaggtgggactggggccagctatggccccccagggtggccaccacaaggtagagctcaggagagactcactccatggaggatggaacgcagggaagggcaacggaactacagtgtgaacaactctgaggcaagggctttggaaacggcagcaggggagtcctggacccccagccatggcctccgacctggtgatgccacgtgcaggccccgccagccccacggcacagttacaagctggtcaagtaacatgttgctccaggcacaacctccactctccctccatgaagcccaccctcaccctgtgggagaggcctgccacccactgcatagagagaaactgaggcacagagagccatggccctcctccctggcaacatactgcagggaagggctgaacgacagcaagccacccccatggaaaggaaagacaacaagagtaatgacagcaccacagacgctctgggctgtgacgctctgggctgtgacgctctgggctgtggctcagtgcgggtggagaggggcaggagggctcaccgggcgaggtccaggcggtccagcttcagcaggatctgcactgtcatggctgtgctgcaggacagggcgagggggcggtcagcgggtcgccacagacacattgcatggccgctccacacccagggctcactgtgtgtgtctgggatgttcctaagtcctgtgcttaggaccaccagccccgcccagcagaggaggacaccctcactcccacatttcaccgctcagcttcctcaggcccaggagctctgggggaggtacccaggatggggtttcaggccccggcccactcaccgcccatctggagaagcagcctccatgggctgtgcttccagatggagggccctgcccggactcgacaccctggaggcatcaacactcaggaacaaggccctagaggagggccacgcacccgcccctgcacctgcacctgcagcagagccctggggccacccactctctgcaggccccctcgtcccctcatccctctcagccccaggtggctgtgaccacgaattactcgtgaggcctcttgttcttgttttcctgccaacaggagccagcacctggaccagcaccgagtcggccggctcgccgacagtgtgacatccctatttattttcttttttgtgtgtgagtcagggtctggctctgccacccaggctggagtgcagtggcaccatcacggctcactgcagcctccacctcccagactcaagggatactcctgcttccgcctcccaagtagctggaaacataggtgcatgtcaccatgcctggctcgccctgcaattctaagccctctgtggatggaggtgggatgggagcagatccacagcgaccatgaaatgcccagcttgcaactcacagtggaaggcaggcactgcagggacagctcacggggaagaactgacacactttctgtgaccagtgccctggacatggcccggagtcacatcctagggtggaggggggcaccaaccttgcagggcttcagcaccccaaccccagagggccctggaggagggccggtatggggggcccggggaggcctgagagactgggcccagggccgagacacagaaggcttcgtggggggtggggacacagaaaccgagcagagacaaagccgctttctgctctgcccttgggaacagagggttgcagcctgggcaccgtgtccttggatctgcagcctggtgcgcagatgggagtgcctcccacactgggcaggggagctggagcctggacagcaggccagggcctcatttcagcaccacctttctctgctcccatgacgacagccagcgaggccgtgcgcagcctggagatgtggcagggggcacttgcctccctgggctggccccagagcagggaggccactcaccactccaggctgtccccctggtgcagcgcacgcagggcggcatccgggttctggtcgtggagatagatggaggcggccatgagcaggaaggtggtgttggtcacgtccacgctcctgctcatctctcggtccagctcggccacgatgctgtccctgcaagacagagatgctcacgacccacagctggggtggcctctgtgggacctcagagggtccccttccttggaagcagacaggtccagagagggtgagc

SEQ ID NO: 21148 - DNA, 2300 bp, Homo sapien
tctcgaaaaaaaaaaaaatggggaaggaaccatctaggagggaacacaatgagggacgggcccccagctgcagatgtgacagtggtatcagtctgggcatcctcagagggccagtaggtgggcagggctggctgggggcatgtcctgctttatagaagcgcatgtcacaacccccataactgctgctgccctgcccccaggtgacacgcccttcacctcaccaccagaggtggacagctgccaggggatagacagtaacctaccagggtccctagctcaaggcatgggcagtgtggccctgcagatgagggcacacctggctgctcacgacaggtgacgccatgccaccctccacagtgtactgcagtggaggtggcccatgctgggctgaggggtccctggtggggcagggacttcctgtctggggctctccctgccaagctgaagacatggaaatcctctggggtggacgggtgcagctgacgcctcgtccctactgcagaggaagttcggtgtggtcctggatgagatcaagccctcctcggcccctgagctccaggccgtgcgcatgtttgctgactacctcgcccacgagagtcggaggtgaggccccagagaatgggttggcctgaggcgcggggccatcttcaaggcctgttggttatgaacctgggtgggtgggggcatggcgtgcagcgcacagcatccctcagattaggcgcctctcccctctgctcccctgctgctttgtgcctcagtttccctcacctgcacagcagtggggggctggtgatggatcctgcttcaaaggggagggtcagagacagtgctgtgtgtgcacacgccctcatggaccacaaggcactctctgaacctagaactgaaaatatcaattaccgagcagccctctgcaacacccagagccccaagacagcccagggcgcagcgggggcagggccctcccatcagttttcttatttatttatttagagatggagtctcactctgtcaccaggctggagttgcagtggtgagatctcggctcactgcaacctctgcctcctgggttcaagtgattcttgtgcctcagcctcctgagtagctacgactatagctgcgtgccaccacgtccagctaatttttgtattttagcagagactgggtttcaccgtgttgcccagggtggtctcgaactcctgagctcaggcggtctgcccacctcagcctcccaaatcctatcagttttctagtcccagctagttggggactgcaacctgccagtatctcccctggagcccagtgggagggtgggtgaggccacgcctgtcctgcccctgagccacaggccagcgttggtcaaacgcccatgggcggcagccaaggggagagggggctgggctgtggggacccaggaaccttgccccctcctgctgtggggtcggagtgagggtctggcatggggagactgctgtgatcctgctcttccttggcccacggaggcagtgtcccaactaccgcctcccttcactcaaagaaacctggggttcctgggagctgactcctgtgcagaggcagcatggtggggtgaatggtgtcccccaaaaggtacgtccatatcctatcccacatgcttgtgaatatgatatcatttggaaaaagggtctttgccgatcagattaagagataaggagatgaagacatgctggatttagggtgggccccaaagccaaggacttgtgtccttttaagagataaaaggagggctgggtgcagtggctcatacttgtaatcccagcactttgggaggacgaggtgggcagatcacctgaggtcaggagttttcaagaccagcctggccaacgtggtgaaaccccatttctattaaaaatacagaattaacaggatgtgatgtctgtgattccagctacttgggaggctgaggcaggagaatcgcttgaacctggcaggcagaggttgcagtgagccaagatcgcactagtgcactccagcctgggtgacagcgggagactgtcttaaaaaaaaaaaaaaaaaaaggaaagaggcccacagagttaagcccatgtgacaacagactggagtgacatgtctgctagccaaggagcaccacgagtggccagcagccaccagagctgggagagaggcctgggacggccttgccctccagcctccagctggagccagccctgccgccaccttgacttcagacttacggcctccagagctgtgaggaacgaatccctgttgtccttaactgcccgggctgtggtgctttgccacag

SEQ ID NO: 21149 - DNA, 2300 bp, Homo sapien
ggagttcaagaccagcctgggcaacatagtgagacccccgtctctacaaaaaaaaattaaaaaataagacagtcatggtggcatgtgcctggagtcccagctaattgggaggctgtggcaggaggatcagttgagcccaggaggtcaagattacagtgagccgtgatcacgccattgcactccagcctggacaacatagcaagaccttgtctctaaaaaaataagaatgggggctgggcccggtggttcacgcctgtaatcccagcactttgggaggccaaggcgggcagatcacctgaggtcaggagttcgagaccagcctcaacatggagaaaccctgtctctactaaaaatacagaattagccaggtgtggtggtgcatgcctgtaatcccagctacttgggaggctgaggcaggagaattacttgaacctgggaggcagaggtttcggtgagctgaggtcacagcattacactccagcctgggcaccaagagcgaaactccatctcaaaaaaaaaaaaaaaaggccgggcgtggtggctcacacctgtaatcccagcattttgggaggccaaggtgggtggatcacaaggtcaggagattgagaccatcctggctaacacagtgaaaccccgtctctactaaaaatacaaaaaaattagccgggcgtggtggcgggcgcctgtagtctcagctactcgggaggctgaggcaggagaatggtgtgaacctgggaggtggagcttgcagtgagccgagatcacgccactgcactccagcctgggcgacagagcgagactccgtctcgaaaaaaaaaaaaatggggaaggaaccatctaggagggaacacaatgagggacgggcccccagctgcagatgtgacagtggtatcagtctgggcatcctcagagggccagtaggtgggcagggctggctgggggcatgtcctgctttatagaagcgcatgtcacaacccccataactgctgctgccctgcccccaggtgacacgcccttcacctcaccaccagaggtggacagctgccaggggatagacagtaacctaccagggtccctagctcaaggcatgggcagtgtggccctgcagatgagggcacacctggctgctcacgacaggtgacgccatgccaccctccacagtgtactgcagtggaggtggcccatgctgggctgaggggtccctggtggggcagggacttcctgtctggggctctccctgccaagctgaagacatggaaatcctctggggtggacgggtgcagctgacgcctcgtccctactgcagaggaagttcggtgtggtcctggatgagatcaagccctcctcggcccctgagctccaggccgtgcgcatgtttgctgactacctcgcccacgagagtcggaggtgaggccccagagaatgggttggcctgaggcgcggggccatcttcaaggcctgttggttatgaacctgggtgggtgggggcatggcgtgcagcgcacagcatccctcagattaggcgcctctcccctctgctcccctgctgctttgtgcctcagtttccctcacctgcacagcagtggggggctggtgatggatcctgcttcaaaggggagggtcagagacagtgctgtgtgtgcacacgccctcatggaccacaaggcactctctgaacctagaactgaaaatatcaattaccgagcagccctctgcaacacccagagccccaagacagcccagggcgcagcgggggcagggccctcccatcagttttcttatttatttatttagagatggagtctcactctgtcaccaggctggagttgcagtggtgagatctcggctcactgcaacctctgcctcctgggttcaagtgattcttgtgcctcagcctcctgagtagctacgactatagctgcgtgccaccacgtccagctaatttttgtattttagcagagactgggtttcaccgtgttgcccagggtggtctcgaactcctgagctcaggcggtctgcccacctcagcctcccaaatcctatcagttttctagtcccagctagttggggactgcaacctgccagtatctcccctggagcccagtgggagggtgggtgaggccacgcctgtcctgcccctgagccacaggccagcgttggtcaaacgcccatgggcggcagccaaggggagagggggctgggctgtggggacccaggaaccttgccccctcctgctgtggggtcggagtgagggtctggcatggggagactgctgtgatcctgctcttccttggcccacg

SEQ ID NO: 21150 - DNA, 2300 bp, Homo sapien
tctcgaactcctgacctcaggtgatccgcccgcctcccaaagtgctggaattacaggtgtgaaccaccgcgcccggccaggaaatcacttctaactacaagcagccagaaagaggagacagtaaaacacagaaagacagctcggacagagagagagtgggaagaaaatttcttgggtaactgccaaacttcaccttcatacaacgggccccagtaaaacagtgggccttaataagcacattcctttcccttcaggtgcactaaaataggcaagctaaaagcagagtaggggggtatgcctgcagctgcagaaagatgtatgggaggctgggcacggtggctcacacctgtaatcccaacactttggtaggccaaggcgggcagatcacaaggtcaagagatggagaccatcctggccaacatggtgaaaccccgtctctactaaaaatacaaaaattagccgggccatggtggcgcgcgcctgtaatcccagctactcgagaggctgagaaaggagaattgcttgaacctgggggcggaggttgcagtgagccgagatcacgccactgcactccagcctggcaacagcgcgagtctccatctcaaaaaaaaaaaaaaaagaaaagaaaagaaaagaaaaaagaaagatgtatgggaacagacacacaactctccctcccagataagcacaacgaagagacacagaagcagttcaagcctctgataaactctccgaccctgaatccttaaaaactcttagtctgtaaaagagtgttactctgacccaactccgccagaaggcgcctctcaggtttgttttctctaaaataaacctgtcttgactggcaagccacctttcgtgtttctttcctctttaattcttacaactttgtcacccaggctggagtgcagtggcgcgatctcggttcactgcaacctcggcctccgggttgaagcgattctcctgtctcagcctcccggtagctgagattacaagtgcccgccaccacgcccggctaatttttggtagactcatggtttctccacgttgcccaagctggtctcgaactcctgggcgcatgcgatctgcccgcctcggcctcccaaagcgccagaattacaggcgtttgagccactgcgctgggaaactgtgtttatcattctgagtccagcggaatacagtgcccgtccaaaaaagtgctcaatgaagaatgaatgaatgaatgggtaagctctgggagaaataaccaggctggttgggcagggaaacgtccttctctgaactttagggttctcatccgtaaaatgaggataagcaacagtctccatctcacgggaactgaaggtatggctgaacaaaataggcttattgtcactacagtggcataaacacctcccttactcaaaacactttcaagggcgcagagagaacgctgtacgagtgagcagtaccgtaaactgttactgctctgggttctgtcacgggacagtgactactcctcactgaactgtggaagaggtggcccaaaaaacgcgagaagaaaagagaaagtttttagacgcagaacgcggctcgcggccaccagaaagcgtcctccgcctccgcccccagcgtccccgcgcccctgcgcggccgcaccttcacccgctgcgcctcgtttatgcactgctggtagctgccgatgtagaaggcgttctttacgtcgaacagctcgtctacctccccggagccgccggaggccgggccgggggccggaggcgccatttcgctgtcttctcaccagctcctcttcctgaaagacacgtcagccggaagcaagacacgggcacgctaggaaatgtagtttactttttccgagcggcggcgaagtaagccaatgggaagctccacaataatatgcaagggggcggaaggcgtaagtgcgtcacggagagcatctcgggaattgtagtgtgtttctgcaagccaatgggatccggggaaacatgataaggatgcggtcgaggctgggaataggctgagggagctggagagggtgggaccacgcaggaggcagatccaataaacaggaagatttttctcgtgacgtcgtcggcgcgcgccggaagcgcggatcacacgggcccctacaaggggcccctacaagcggccacaaggatggcaggcttcgcggagctcgggctgtcatcgtggctcgtggaacaatgtcggcagctgggtttgaagcagcccacgcccgtgcagctcggctgcatccccgccatcctggagggtgagtatggcccagggccttccccaag

SEQ ID NO: 21151 - DNA, 2300 bp, Homo sapien
ccccctcgccaggctcagcctggaacatccctccttcaccagcccgacccaagctgacctcagcatctcttcctatcccaaacctgtgccttcccccagttcgcctttcagcaatggcctcaccaccagccagttgccccagccagagggtctcaagcatcagcctcctttctgcccccaaccaactctgtcctggcctctccctggctcatgacctttcctgctcacacacccccagaatcaattctaaccctccgcctggcattcaaggcctttctcaaactggctccaatatgcccaggtcccagtaccctttctgctgcctgcctctttctttctttcttttttttttttttgagacagagttttgctcttgttgcccaggctggagtgcaatggcacgatcttggctcaccgcaacctccgcctcctgggttcaagcgattctcctgcctcggcctcccgagtagctgggattacggcatgcgctaccatgcccagctaattttttgtatttttagtagagacggggtttctccatgttggtcaggctggtctcaaactcctggcctcaagtgatccgctcacctggagctcccaaagtgctgggattacaggtgtgagccactgcaccggggccatcttgtttaattctgcaggacccctaagaagcgggtagcaagattttcatgctcatctcacacgtgggaaaagggcgctcagagagggaaaggtgcttgcccaagagagcacagctggttaacccatacccaggaggcctgctgggggcttacctggtgggtgtcaggacgaggcagaagatgccatagggatcctcagacagcttctgcaagatgggaaggacaaacgctgctgtcttcccactgcctgtcttagcacagcccaagcagtctcgacctgggttggggacaaagcagcatcaacaccctccatgtgtggacagctgggtttcagagaccttgcccaggacacactgccagtgagtggcaggctggactggaacccatatccatttgacccgagatgcccacagcttcctaccacctcgttctaactccgtccaggagcacgtgaatttggggaatccagaattcccttccctcatatgcatcttgtgctccctgttgaccccttcatttgtttatttaatccctgacttatcacatcttaggcttcctgtgggcctctctttaatggcgaaactgggttgggctagaggagcagagagaagaccttctcctagaggagcaatcacaggaccaaggagtcctggatctaccagcaattttgacagcctcaacttctatttgtaaaataaagatagcagtaccaggtctgcaggattttgcgatactatcggactagtcatccatcaaaccctccctgtgctgagactatgaaaatttcagagattacatcacttgcgtacgaacacaaagcgagtcagtcatgcaacctaaatgccaacactgtccagtcgtcctccggaaccccggatctcctgtaacgcccgaggttgcccctcgcctcgtgggaccggaataagcaaaggttgcgagaagggaaaggagtcgagaggagcggagaggcctcttggggaaggccctgggccatactcaccctccaggatggcggggatgcagccgagctgcacgggcgtgggctgcttcaaacccagctgccgacattgttccacgagccacgatgacagcccgagctccgcgaagcctgccatccttgtggccgcttgtaggggccccttgtaggggcccgtgtgatccgcgcttccggcgcgcgccgacgacgtcacgagaaaaatcttcctgtttattggatctgcctcctgcgtggtcccaccctctccagctccctcagcctattcccagcctcgaccgcatccttatcatgtttccccggatcccattggcttgcagaaacacactacaattcccgagatgctctccgtgacgcacttacgccttccgcccccttgcatattattgtggagcttcccattggcttacttcgccgccgctcggaaaaagtaaactacatttcctagcgtgcccgtgtcttgcttccggctgacgtgtctttcaggaagaggagctggtgagaagacagcgaaatggcgcctccggcccccggcccggcctccggcggctccggggaggtagacgagctgttcgacgtaaagaacgccttctacatcggcagctaccagcagtgcataaacgaggcgcagcgggtgaaggtgcggccgcgcaggggcgcgggga

SEQ ID NO: 21152 - DNA, 2300 bp, Homo sapien
gagacccactgccccctccccaacctcactgggccacccatgtcagcccgggagggacctgacctccctcacaggcccaaagttatgacctcaggtagtggggacagaggcagctgtctcctgagaaggtgacaggagggtgaggtcacatcgctgtccgtgcaactctctccatctgcttcctatctctccgcctgtctcccccgtgtctctgtttctgggtctctttctcatcccagatgtccctctccgtctgtctctctgtccccaccctctgctcccaacccgaccccacgcaacccccccccccactccccctccaccgcccctaaccccctccctcaatcctccgtcccttccccagtcccggcccccgcccctcccccttatcccctcccccataccctctcccagtgcaaaaagccggcagggggcgcagcggggcggccttggcggcccggggaggcggggcgggcggcggccgcgtcgggaccggccgcgatgggaccggaggcggcgcgggcggcggcggcgcagacaaaggcacgggcggcgtggagggcggcgcggagggcgcgggcccgggagccagggagcgagcggggcgcccggcagcgcggagtcagcgccgcgggggccgcacccgactcgcgcctggacactcgcggggcgccgacctggcagggtgagcccggcctgccgagcctgcgctgggagcgcgggggcctcgaagtcccagggccaaggggagggcgtgggggttccccagaagtttcggacccgggactgggagcggcgcgaggggtccccaagttccagggctggagggagcgcgggggtcccgaagttctggattcagggtctgagaggggactgcgtgggaggttcccaaagttctggacccggcgttggaggaggctgcgaagaggtccccaaagctgcggacctggggtggggtactggggtgggaggggtccggacgtcccggacccagggactggaggggtggcagggggtcctcgaagtttaggagtctaggacaacgcggaggaccggggtcccggacccagttagaggaggagtcacgaagggagtccccggagttaccgacctggggttggaggaggcagaagaggtgtcccccgaagttctggacccagagacagggggcgtcgcgggaatctcggaagttccagggtcagagcccgcgtcccggagttggggcgtgcactgggtgtcctgcctcgggtggggatgggatcctgaattaatattaacccccccgtcccccgcactcgggtgcatgggatggggcctcatccaccggccagattggggatcccgggcaccgggcggtgtcggacccccctccgggagccccgtggccggcggcatccgaggcgcatgactagttggtgagtaactttccccaaacgctgcaagtcgcagcaggagctgccggaccggaagggcctgggttccggggacccctgtgttccccaactcccacccggcgcaggacccgcccccagtccaggccagagctgccgccccacccccactcaggggctccggtttcagaccctgtgaccaggacagcagctgcccaggacaggatagggggggcatcccccctttgaccacagaggccgctgggccagggcctcccctcccccacctgtcttccccctcctccaaactcctccttggtcccctgcagattcggggttgctgaatggcccaatggggaggttggggagccctggtctcccagtgtggattctgctctgccctcatggtgggcattgggattggctgtttgtctacatcttgtctttttaacttggctgggggctccctggggatttggactctggacttcaaggtgtgcttctgccctagggtgggagctgctgggggtggggtccctctgcagggtgtagtggggaactggtctcctggtactacacacctctcaacgccccattttttggtggagagccccgctctggccagtcatgggtgaatgtggtggaaagaactcagcagagatttggcctccacagctcagcctgggatggaggggacttcacgggggtgcaataaccaggacaatgagaaatttacatctggatgtcagcggccaccaggctcctctcagagggccatctcctgtacagggtgttgtgggggcttcccctagacaaagaaagatggggtctgcttgctctgagttatctataataattatcttacctttttgtttctttttataatttctttcttttttgagacagggt

SEQ ID NO: 21153 - DNA, 2300 bp, Homo sapien
gcacctgtagtcccaactactcgggaggctgaggcaggagaattgcttgaatctgggaggcagaggctgcagtaagccgagattgtgccactgcactccagcctgggcaacagagtgagactttgtctcaaaaaaaagaaaagaaaagaaaagaaaaactcaaatgtaagatcagagctttagggcgccacaggccttggttccagggagctgcaggacctctgtccacaaacgaaccaacggcgccgcaccgtgtgattttggagacggtgccagagagggggcggcaccaggattgacaagtgggacacatgggcttggggctggggaggtggatcctagttcaactccggaaggatgctctcctggcaagtgtgggaagggggtgctccctgtgaccagaggtgacaaacgcaggccagtggaggctgaggggatgcaaccatgcgttggagacatttcctcagcctttggattttggaaccctcaaacaacagcaaagataaccttaatccaaccattgtgggcatttttaccatcgtcttgggagggacagaggtggacagacgtccctgcttagggatgggacgggcaggggaacagaggcttctctctctttgtcttgcttcccgttccctcccgaagttgatctcttccgtttcctggcaacacccattgagcacttactgtatgcagaccctgagacccactgccccctccccaacctcactgggccacccatgtcagcccgggagggacctgacctccctcacaggcccaaagttatgacctcaggtagtggggacagaggcagctgtctcctgagaaggtgacaggagggtgaggtcacatcgctgtccgtgcaactctctccatctgcttcctatctctccgcctgtctcccccgtgtctctgtttctgggtctctttctcatcccagatgtccctctccgtctgtctctctgtccccaccctctgctcccaacccgaccccacgcaacccccccccccactccccctccaccgcccctaaccccctccctcaatcctccgtcccttccccagtcccggcccccgcccctcccccttatcccctcccccataccctctcccagtgcaaaaagccggcagggggcgcagcggggcggccttggcggcccggggaggcggggcgggcggcggccgcgtcgggaccggccgcgatgggaccggaggcggcgcgggcggcggcggcgcagacaaaggcacgggcggcgtggagggcggcgcggagggcgcgggcccgggagccagggagcgagcggggcgcccggcagcgcggagtcagcgccgcgggggccgcacccgactcgcgcctggacactcgcggggcgccgacctggcagggtgagcccggcctgccgagcctgcgctgggagcgcgggggcctcgaagtcccagggccaaggggagggcgtgggggttccccagaagtttcggacccgggactgggagcggcgcgaggggtccccaagttccagggctggagggagcgcgggggtcccgaagttctggattcagggtctgagaggggactgcgtgggaggttcccaaagttctggacccggcgttggaggaggctgcgaagaggtccccaaagctgcggacctggggtggggtactggggtgggaggggtccggacgtcccggacccagggactggaggggtggcagggggtcctcgaagtttaggagtctaggacaacgcggaggaccggggtcccggacccagttagaggaggagtcacgaagggagtccccggagttaccgacctggggttggaggaggcagaagaggtgtcccccgaagttctggacccagagacagggggcgtcgcgggaatctcggaagttccagggtcagagcccgcgtcccggagttggggcgtgcactgggtgtcctgcctcgggtggggatgggatcctgaattaatattaacccccccgtcccccgcactcgggtgcatgggatggggcctcatccaccggccagattggggatcccgggcaccgggcggtgtcggacccccctccgggagccccgtggccggcggcatccgaggcgcatgactagttggtgagtaactttccccaaacgctgcaagtcgcagcaggagctgccggaccggaagggcctgggttccggggacccctgtgttccccaactcccacccggcgcaggacccgcccccagtccaggccagagctgccgccccacccccactcaggggctccggtttcagaccctgtgaccaggacag

SEQ ID NO: 21154 - DNA, 2300 bp, Homo sapien
ttcccttgtgcagatgcctcgtgaagttagaagcagccagggaaaccgagtctgtgcctcagtttcccctgtgggatgaacagtcgctcttgtgctgggtcagactggggcttcaggatggatgggccagccctagaggagcacccagacctggtcatgtaataaacaggtaacataagagtcacagaaagggtctgggctcacacctgtcatcccagcactttgggaggccgaggtgggaggatcacttgagcttaggagtttgagaccagcctgggcaacatagtgagacctcgtctctaaaaataaactttaaaaaagaaaaaaaaaagagtcacagggattgggacaggggagggcaagatcccttccaaggccagggtagtcagagaggcttcctggaggaggagacagggtggtggcgctgagcctggaaggacaaggcagaagagatgcctgcagcgagggcattccaggtggaaggaacagtttgggcaaaggcctggatgggggaagactcagatcttggcgcaggagtcaatctccaaaaacaacctgacctggaattcacctaaaggtaatttgaatgtaatgtaaccgccagctcagatatactattcttcttagaaggaaacagaaataaaggaacagggaaaggagacaggagcagaggtcttggagatgaaaagcaaaagcctctctgaagttgtcaaaacactcaagtgtcggccaggtgtggtggctcacgtctgtaatcccaggactttgggaagccgaggggggcagatcacttgaggtcaggagttcgagaccagactggccaacatggtgaaaccccatctctactaaaaatacaaaaatcagccaggtgtggtggcatgcacctgtagtcccaactactcgggaggctgaggcaggagaattgcttgaatctgggaggcagaggctgcagtaagccgagattgtgccactgcactccagcctgggcaacagagtgagactttgtctcaaaaaaaagaaaagaaaagaaaagaaaaactcaaatgtaagatcagagctttagggcgccacaggccttggttccagggagctgcaggacctctgtccacaaacgaaccaacggcgccgcaccgtgtgattttggagacggtgccagagagggggcggcaccaggattgacaagtgggacacatgggcttggggctggggaggtggatcctagttcaactccggaaggatgctctcctggcaagtgtgggaagggggtgctccctgtgaccagaggtgacaaacgcaggccagtggaggctgaggggatgcaaccatgcgttggagacatttcctcagcctttggattttggaaccctcaaacaacagcaaagataaccttaatccaaccattgtgggcatttttaccatcgtcttgggagggacagaggtggacagacgtccctgcttagggatgggacgggcaggggaacagaggcttctctctctttgtcttgcttcccgttccctcccgaagttgatctcttccgtttcctggcaacacccattgagcacttactgtatgcagaccctgagacccactgccccctccccaacctcactgggccacccatgtcagcccgggagggacctgacctccctcacaggcccaaagttatgacctcaggtagtggggacagaggcagctgtctcctgagaaggtgacaggagggtgaggtcacatcgctgtccgtgcaactctctccatctgcttcctatctctccgcctgtctcccccgtgtctctgtttctgggtctctttctcatcccagatgtccctctccgtctgtctctctgtccccaccctctgctcccaacccgaccccacgcaacccccccccccactccccctccaccgcccctaaccccctccctcaatcctccgtcccttccccagtcccggcccccgcccctcccccttatcccctcccccataccctctcccagtgcaaaaagccggcagggggcgcagcggggcggccttggcggcccggggaggcggggcgggcggcggccgcgtcgggaccggccgcgatgggaccggaggcggcgcgggcggcggcggcgcagacaaaggcacgggcggcgtggagggcggcgcggagggcgcgggcccgggagccagggagcgagcggggcgcccggcagcgcggagtcagcgccgcgggggccgcacccgactcgcgcctggacactcgcggggcgccgacctggcagggtgagcccggcctgccgagcctgcgctgggagcg

SEQ ID NO: 21155 - DNA, 2300 bp, Homo sapien
acccactgtctggcccccatcctgcctgcaggcctgtgccctggtgccccccactcttccctgggctgcgccctgtggtcatcacagggccacccttctttatccagggttccgctgagggccttcctactgactccttgaccccgggactggccattcccttacccagttttcctcacagtcttggcaccagggttatagtggtagctgagaggcacgactgacctcaggccagtgacctctgacttagaagttccatcccacccagggatgttgcagagaactggggaagtgactggagcttgagcctgagcatctggggagtcaggagggcatttgggggtgaggggctccaggcatagcctaggacagacccttgatccaggcatctccctgtggcccacatgcctggactctcctctctcctcagaaacccaaggacttggacttcgcccagcagaagctgaccgataagaacctgggcttccagatgctgcagaagatgggctggaaggagggccatggcctgggctccctcggaaagggcatcagggagccggtcagcgtgtacgcagcaggcagcctggggtgggagtgggtggggcctcagtccttccacctgcagcctgccgcttggctccttcacagccaagatggcttacagctggcagttgatttttgttttttaaacagaaggcatcttcagatgagaagctgatcatttacatgtgcaggtgtttacagggctcctttctgtcctggtgtagattttttaaccagcttgttggccctggtcattttggccacatttgtgaccatcataaaagctaagtggtatttctgtgtagtttccgtctggaactgctttcccattcccgggaacccatagccgggccagccagggtcccgaacacaggcccaaagtttattaaaccccgatcataacctccagcaggcatttcatttaatactgagcttagttcctgctgggtaaggcattccgaggtaaccagggccctctgggcaccccctcaaaagccagctcttcgagggtgagtactccttgtttctactgtgagtcgcgtcttgattttccctttctttgatgtctcagtgtgtgtcccaaacacctgcatctcatggactgtttgtgcccatgcccagttcctggcatgccaggccctgggctcaggtgcacaactgactctctttttcactccctaggggaaccccctcggaaggggaagggttgggtgctgacgggcaggagcacaaagaagacacattcgatgtgttccgacagaggatgatgcagatgtacagacacaagcgggccaacaaataggtatgttcacaggccagtgtgtaaggccgtctgccctcgctggcgtgctggtatgcagagaaatttcccccaacaaagttgatgttccctgctcccccaaaaatgccacacacaaaaaaaatcacaaaattctgtgagggaaacaaaagggtctatggatgtggatatgccccattcttaccttccaggtttgctgaaggagcaaacctcacactggccaagggcagatgcgcatggcctgcctggtgccccggctgtgagcccctcaaggcctccaggccagcctccgtggatgtgcgtgtggaaataggccacgcctgtctcttctcttgctcaagttttctctcacagatgacagccacctaccacataacatgaccagcaaacggactgttcctagtccagagggccttgccatcatgcaagtggaagggcgactgtgacagccactgccacagaggatggcagttggctgtgtccctttgtgagggtcttcaaatccttttccttctgcagggccttgggcctgtaaatatcctcatctttctattcttttttttttttagttgccccctcacctaatttccacctcagttttgaacaaaatcgttctcttcctgaatagatcaaaaccactgatgtgaaagataagccttgaagcagcaattgcccttaaaacatcatccctgccctggatcggcctggagccagtgcccaagtacggtttggtgtgtacatgaaaacaaacgtctctgcagtctctggggcggaggtttcgctggcttttctttctctcaaagaaaaaaacatgcaccattttcaatgtgcttttgcctctcctctctgttcacatgcttttagcagcaagtcccctccaaatctgtcttggttccccttcagaaggtggcgctgcccccgaaaggcacctcagcctgtgagtgctgaggaaccagct

SEQ ID NO: 21156 - DNA, 2300 bp, Homo sapien
gcatggtggcacgtgcctgtaatcccaaatactcaggaggctgaggcatgggaattgcttgaaccagggagacagaggttgcagtgagccgagatcatgccactgccctccagactgggggacagagcgagactgtctcaaagaaaaaaaaaatgcgtgctcacagaacctgctctatttcacttaatcctcgaagtaaggaggcagtaatccataatcctcgcatggtacttcagaggcaagctggaccctttttatttatcttttttttttttttttttaagtagagacagggttttgctaggttggccaggctggtctcgaactcctgacctcaagcaatctgcccaccttgtctggactcttttaagggggtctctgccctcacgaagttcacaggtgtgtgctggctgaaaaggagcaagacaaaccttctctgggcccatctccttggaatccattaaaagcagctctgtgaaagcagttctatctgctggaggaaggtgtcaaccaacacacataactgagcataacagagtaggaagggtgggaccacaaccctcgcaaatcgtggttaggaaagaagagatcaatcttttttttttttttcttcctttttttgagactctccctgttgcccaggctggagtgcagtggcatgatctcggctaactgcaacctccgcctcctggactcaagcaattctcctgcctcagcctcctgagtagctgggattacaggagtccgccaccgcatccgactaatttttatattttaggtagagatggagtttcaccatgttggccaggctggtcttgaattcctgacctcaagtgattcgcccgcttcggcctcccaaagtgctgggattccaggccgtgagccactgcgcctggcccaggatcactcttttcccattcacagactcagcagggcacagaggctctgagaacttccttcccttctaaaagaagcctcttgacagtgagtggcgggacccccaaccaatgacaatgaactagtgacagttcattctgcgctgggtccttgcgcgatctcccaaccacccactgaagaggcgggtcctgttatgaatgacattagggtgaggaggcaaagggagacagactcaacgacccattcaagaccagacagcccagatttgaacctggcaaaaagggtattcgtgcatccaaagccccgaagaatgagtaaaaagattaagcaacattttggggtccaggggctgcatccttaaccatcaagatatcccgcttcgcaaaacctccaacttcaagagacaacccgtagggtccatttcccatcacgatcaccgcctcccccacccgcctcccccagtcccatccttcagcccttttcccggggcgcccccttgttctctgctggcaaagggcagggttcccgggtcaggtgacccaggttcaaatcacacgattctaagctttctgtgcttccgtttccccacctatggaatgggcagccagtaaaggggctggtgtgggggctgaaccggttctaaagagggcaagggcccgatgcagcgctgggcgccgttatctcctcccgagcgggggccgctccgagttcgggaggaatgaatgaacgactgaaccaatgagcctttgtggacgcggcccgccgtctcccggcctctgcgggcgaggaaatgggggcgccgggcccgggaggccgcagccggccacccaggccaacccggcggggacgcggccgccgccgcagccagagggccgagcctgcgacgccatcacggagcccggggcgggcccccaaggccgagcccgagcttcccaccccgggagccacccaccgacgacgccagggcccgggcctcaccccgagaccaccgcgcgcggagccacccccgccgccgcctcaggctcctcacccgccgccgccgccgcgcgaggcggggacatgcaaatgaaccaacggtctccgcagcgccgcgccgcgcaggcgcaagccgccgccgagtcctggtgcgcaggcgcgggccgccgcggcccggctctcttgcgcaagcgcgctgtccgcttcttctgggcggacgctctggaggcaaaacatttccctgctgggggcggcgaccaccgtgagcgtcccggaaggggcggcaaagacgcctccgtcgcgcacgaggtggcctcgttggctttaccttggttcgcggtcgtccttggttatcgtgagcgtccgcgagtctctgggaggccaagcctaggggcgccacagcgcctgcgcgcgtacggcggccggaa

SEQ ID NO: 21157 - DNA, 2300 bp, Homo sapien
ggcttcactccccaacccacaacccctcccttccacccacccctgagctgactgagttgggaaggtctggctctgtgaccacccctgacctgagtcctccaaggtcccctagatctggtacagggctgagttggaggaggaaagtacagatttggaacacataagatggtgcctggagatggccaagtaagaattacctggagaacagcctaggctaaaagggggaagcagcattaccagtccctattatccatcagggcatgctgagggtaaaacagaagatgagtaaggcccctaactggcagccagtttccttctctcagccaggaatctgctcatcaagaaaactgtgctgtccaggtgcggtggctcaggcctataatcccagcgctttgggagtctgaggcgggtagatcacttgaggtcaggagtttgagaacagcctggccaacatagcaaaatcctgtctctactgaaaatacaaaaaattagccagggccgggcacggtggctcacgcctgtaatcccagcactttgggaggccgaagcgggcggatcatgaggtcaggagatcaagaccatcctggctaacacggtgaaaccccgtctctactaaaaaaatacaaaaaaactagccgggcgtggtggcgggtgcctgtatttccagctactcgggaggctgaggcaggagaatggcctgaacccaggagacggagcttgcagtgagctgagattgcgccactgcactccagcctgggtgacagaacgagactccgtctcaaaaaaaaaaaaaaaggccaggcaagatagtgcacaccggtaatcccagctactcaggaggctgaggcaggagatcgcttgaactccttttgactccgtttcaaaaaaaaaaaaaatacaaaatttagccaggtgcggtgttgcgcacctgtagtcccagctactcgggaggctgaggcaggggaagcccttgaacccgggaggtggaggttgcagtgagtcaagatcatgccactacactctagcctgggcgacagagaaagactccgtctcaaaagaaaattaaacgtgtgccatgacatgctggggactctaaaagactccatccacatgtccctctaccagccacacccactctggttcaaacaccagcctcccctaagggcggcgtcacctgccactcccagagcctagactccacctcactcacgtgctcaaagcccggtagtggcttcccaaccctctcagaacaaaacccagcctccttatccgcaccttctctatctaagccttccaagttcctcttccccgcctttctcatccttcccagcactcaagagacagccttcaaaaccacttctagataaagagcagccctgctttcccgtcccatcactctgttattatttgcacaccattacctgtatctagagcaacatcgttcactcatttatttgtaccctgtagcctccttgtccccactgcctaggacggggcccgacacgcagcaggcactcagtgcacaggtgctgaatgaataaataaaatgaatgaaaataaagcgaatgccagggaagccgaggattttgtccccaggcggcttctgtaaaattctttcattttttttttccccccaaaccacgtacccgagggtcgcgccagcccgaccctgcggcacccccactccccactccgcgcgggacaggcctcggcagccgcagcgtctcacccggtcttcgcggccacgtggggaaaggtggggcgcgcggttgtcacccagggagccgcctctagccccttccggccgccgtacgcgcgcaggcgctgtggcgcccctaggcttggcctcccagagactcgcggacgctcacgataaccaaggacgaccgcgaaccaaggtaaagccaacgaggccacctcgtgcgcgacggaggcgtctttgccgccccttccgggacgctcacggtggtcgccgcccccagcagggaaatgttttgcctccagagcgtccgcccagaagaagcggacagcgcgcttgcgcaagagagccgggccgcggcggcccgcgcctgcgcaccaggactcggcggcggcttgcgcctgcgcggcgcggcgctgcggagaccgttggttcatttgcatgtccccgcctcgcgcggcggcggcggcgggtgaggagcctgaggcggcggcgggggtggctccgcgcgcggtggtctcggggtgaggcccgggccctggcgtcgtcggtgggtggctcccggggtgggaagctcgggctcggccttgggggcccgccc

SEQ ID NO: 21158 - DNA, 2300 bp, Homo sapien
ccatcttacacatattcatttatatctcacgtctccctaaaatgtataaaagcaagctgtgccccaaccaccttgggtacatgttgtcaggacctcctgaggctgtgtcacagacatgtccttaaccttggcaaaataagctttctaactgattgacacctgtctcaaatacttcggattctcagtcctctgtggagcttctgccagcccttccaggtggctgcctttcctggccactcagagagcccacactctctggcttcactccccaacccacaacccctcccttccacccacccctgagctgactgagttgggaaggtctggctctgtgaccacccctgacctgagtcctccaaggtcccctagatctggtacagggctgagttggaggaggaaagtacagatttggaacacataagatggtgcctggagatggccaagtaagaattacctggagaacagcctaggctaaaagggggaagcagcattaccagtccctattatccatcagggcatgctgagggtaaaacagaagatgagtaaggcccctaactggcagccagtttccttctctcagccaggaatctgctcatcaagaaaactgtgctgtccaggtgcggtggctcaggcctataatcccagcgctttgggagtctgaggcgggtagatcacttgaggtcaggagtttgagaacagcctggccaacatagcaaaatcctgtctctactgaaaatacaaaaaattagccagggccgggcacggtggctcacgcctgtaatcccagcactttgggaggccgaagcgggcggatcatgaggtcaggagatcaagaccatcctggctaacacggtgaaaccccgtctctactaaaaaaatacaaaaaaactagccgggcgtggtggcgggtgcctgtatttccagctactcgggaggctgaggcaggagaatggcctgaacccaggagacggagcttgcagtgagctgagattgcgccactgcactccagcctgggtgacagaacgagactccgtctcaaaaaaaaaaaaaaaggccaggcaagatagtgcacaccggtaatcccagctactcaggaggctgaggcaggagatcgcttgaactccttttgactccgtttcaaaaaaaaaaaaaatacaaaatttagccaggtgcggtgttgcgcacctgtagtcccagctactcgggaggctgaggcaggggaagcccttgaacccgggaggtggaggttgcagtgagtcaagatcatgccactacactctagcctgggcgacagagaaagactccgtctcaaaagaaaattaaacgtgtgccatgacatgctggggactctaaaagactccatccacatgtccctctaccagccacacccactctggttcaaacaccagcctcccctaagggcggcgtcacctgccactcccagagcctagactccacctcactcacgtgctcaaagcccggtagtggcttcccaaccctctcagaacaaaacccagcctccttatccgcaccttctctatctaagccttccaagttcctcttccccgcctttctcatccttcccagcactcaagagacagccttcaaaaccacttctagataaagagcagccctgctttcccgtcccatcactctgttattatttgcacaccattacctgtatctagagcaacatcgttcactcatttatttgtaccctgtagcctccttgtccccactgcctaggacggggcccgacacgcagcaggcactcagtgcacaggtgctgaatgaataaataaaatgaatgaaaataaagcgaatgccagggaagccgaggattttgtccccaggcggcttctgtaaaattctttcattttttttttccccccaaaccacgtacccgagggtcgcgccagcccgaccctgcggcacccccactccccactccgcgcgggacaggcctcggcagccgcagcgtctcacccggtcttcgcggccacgtggggaaaggtggggcgcgcggttgtcacccagggagccgcctctagccccttccggccgccgtacgcgcgcaggcgctgtggcgcccctaggcttggcctcccagagactcgcggacgctcacgataaccaaggacgaccgcgaaccaaggtaaagccaacgaggccacctcgtgcgcgacggaggcgtctttgccgccccttccgggacgctcacggtggtcgccgcccccagcagggaaatgttttgcctccagagcgtccgcccagaagaagcggacagcgcgcttgcgcaa

SEQ ID NO: 21159 - DNA, 2300 bp, Homo sapien
cacaaccatgccaagatgattgtgcaggagaacaaaggcttgaaggtgctcatcgaagccaccaaaggtaagagctgggggccgacacgagccagcgaacaaagtgggcgggtcagatgtgaccagagtgagggtcagggctcaggactgctttaggcacggcaggctcaaggctccactcgcccctcggcttagacctgcctgcatggcagccctcgtgaagagtctccccatgttttctagtggctccaggagaattccaggccagcactcaggggccaggagcaggccacaatcccatctctggagctgtctggggaaggggcttgctgtgtccaactccaggggctgagagtggggaagggggacctccccagagggaaataagaggactcgggggggctggctggcatgcaccatggcagtctcagctggatgtgtacacgcttgatcatattcagccacaaatccttaggcatattcatgtgtctggctccagggtgaccatggtgagccagccctgggaggtcacagtgctgaccgtcagaccctaaagcttctgtcttaacccctacccccatcccatccactgaacccaccagaaaagtcctgattgacacacagaaggtgttaggaggatgagttcccctttcttgcctgccccgtcactctggttctgtggccaggcctgtgtgggggttctggctctgtctgctgaggagatgggcccacctcagtctcccttccacacctccagcaaggctgaaaatgagtcccgaccttctgcaaagtcaggctgcttttccaggaggtagctcacatctttcctgttttatttataggagctccaatcagttaggtttctgccagagacaggatatgtatatatgaagagactttttggtaaggaatgggatcatgcaattatggcaagtctgtactccatagggcaggctggaaacccccaggcagtccccttttcggggaaacacctcagtttccttctaaggacttcagctgatggaatgagtcccattcacattgttcaaggtcatctcctctacttaaaggcaactgggctgggcatggtggctcatgcctgtaatgtcagcactttgggaggctgaggtagaaggattgtttgggcccaggagttcaagaccagcctgggcaacatgatgaaaccctgtttctactaaaaatacaaaaattgctgggcgtggtggtgggcacctgtaatcccagttacttgagaggctgaggcacaaggatctcttgagcctaggaaggagaaattgtggtgagccaagatcacgccactgcactccagccttggtgacaaagcgagactctgtctcaaaaaaattaataataataataataataatagatagctgattgtggatggtaaccatgtggacagaatacctccacggcaacacctagattggcattgggtggaactgcagagggctacaggtggtcacaggaactgaccgtcgcagccctgtgtaggtgcaggatcttcgccctcttggcgtgagtgccggcacctgcttcctggtgcagcgcctctgggctccatctgcggctcctgtgttcagttttggccacgtcagcccagtccgtatgtgtccctctatggttctggagtttcctgttgcacttagagaagccattcctaccccatgatcataaaaatagtcttcagatgtctttttttttttttgcactattatagttttctttttttaggtgagaccatgagttggtatggaatttatttggggcatgatggaaggaagcgggttggggggcacattcttaagtcttcccagcagccagcagggggcactgcaggcccaggtagcccctggtgttccctggggccttcctggtgcccgtggccactccaataggcagaagggctggactcttccagtggagcaggatctccaccaaaacagagggccctgcggctggttcttcccgcccccaccaccgtctccctttctccctgcagcgttcctggataaccctggcatcctgagcgagctctgtggaaccctgtcccgcctggccattcgcaacgagttctgccaggaggtcgtcgacctcgggggcctgagcattctggtgtccctgctagccgactgcaatgaccaccagatgagggaccagagcggcgttcaggtatgaagtccccctggcccattgcgtgctgtccttctgggtcccagtcaaccggacgagctatagtcagaacaagccagccctgcctgccagtgtcggaaccaaag

SEQ ID NO: 21160 - DNA, 2300 bp, Homo sapien
tgcttactgtggacgaagccattgtaagtgttttgcttccatttcatcaatgctcacatcagccctaggagacagccgggaaactgaagtggggagcttgtgttatttgctgaaggtcctgtggctgttactggccattacttacgttaaaaagagcagggattcaaactcagccctgggtccttccaccaaggaatattctccaccataggctcagttttcttatctgctaagtgggcactgtcacgtccacctggaagtgaggtggggagatggtattggagaaagcccagtggggacctggcacccaattgatgttcaactgacctcagcttccccctcttctctggagggcagaatggaggccagatcctggaagttgccaggaagcaaaccacaggtgggaggtatgggagaggaggtccaggtaggcatatcgtgagaatatcaggagtttgatgatggccttgggctagtgatttcccgtcacatcctccccatttgaaacttgtggatcacacacttagcaggggcttgtgcagccctgaaatgtgagccctttctaaggttggtttcagccttgctccctcccaggattccctggttctgaacttgatctccaccaaccctggccagcacctagaggaaataagagctggtatctggaaacatttgtagccctctccatcctgaagatgaagggtgagtcatagaacagagtggcttcgggggaggtgccgatgacacagccatgcctgggatggcaggtgtctccctaaactgccggcatttttctgcacttcacagaggagctgaggctcacaggccgcacatgacctgctcagggtcaaatgctttcaccagataattaaaatgagagctgagttgtaaattttcccagggaagcaaccccagagaggaaagatcaaggcataggaatcattttcccccctcttttccaaatgaaacagctgaggctcacaagggcttttgcccaaggttgtgtggtgggccagtgattggacaaggattcaaacccaggtctctgaggcccccagtggctcttctctgacacactctttccaaaaagcaggctgctctagattcattctctggtttagcaaccagagaatgctgtgtaaccttgggcaaggagcttgacctctctgtgctctggtttctgtaaaaggagccagtggtctctctgacctcatgggattgtggttaagattcagttaattcaaaaaaagacttggcagggagaaggcccaacagggatgtcactggataccgtggcggggaaagctgggacgcagagaggtcagacactcagaaaaccacgcagcgcgtttcagtaggattccgccccttatttccatgtcttcacaccacctcgagatggagagggcagttcagagtgacctccagcgaatctgccctctccgtgtcgtctgcaggggattagtggggagtaaggggatagagaattatccaggagtccttcagccttgatggtccaagttcacatccgcttctgtgctaggtggccagagggcgggctctacacgagagcctcaggggaccctgcgccaggcgtccgaggccacgtcgggttgccgcgctccgggtcggactgcaccttgaacgctccagccctcccctgggggcgtaccgcccacggccgctgcgactggccgcggggcctgccagtcttcggctttgcggccaatcccggtctccccccaagctacgccctccgttcctctcgcctctgccccaccggtagcgccagtttcttcgtagccccgcccctggcccccagcgattggccgacagttctgcctgttttctgccaagattccaatcctcgcctgcctccaggccctcgcctcccagcgcctagcaccctgagggaccactcaggcaccccaggcctctcccaatagccccacctctgccaatcagcgattggctttaggggctgcccatctgcttcatactcgccaatcactgtcgcttccagcgctgactggccagggagcagccaatcggggcgtggcgtggacccctcccgtggcgcgctctgggggtgcgcgaggcggggccgtggcggctggaggtagcggcggcggcgacgcgtccgggccggtgagggggcgcggggggcgccgggggggcccaagcgtcagcggcccgcgcctgtcgggctgaactgaggtgaggcacgggtcctgtcatggatcccggggcgaggggcggatgaggcggggcatgacagtagcgtcgcgagggcaggaaga

SEQ ID NO: 21161 - DNA, 2300 bp, Homo sapien
ggagagaggtcggagagagaggagaaaaacagactggggggtgggagggcagggtcctaggggaagggtggggcttcaacagccctgacccactggcttgcaggggcccatgggctggcactcatggtccctaagtgccagccagccagtctgcactagggtcccggggagggcgagcaatgaggacttagagatgagaaagatgccgccaccaacctcattactgaaaaaagatttctggtctcagtttacaagtcacaggtacagagaaaatgtcctattagtctgttattttatgtatttttattttattattattattattttgttttgagacagagtcccactctgttgcccaggctggagtgcagtggcacaatctcggctcactgcaacctctgcctcccaggttcaagcaattctgctgcctcagcctcccaagtagctgggattacaggcgcccaccaccatgtctggctaatttttgtatttttagtagagacaaggtttcatcatgttggccaggctcgtctcaaactcctgacctcaagtgatcagcccgcctcagcctcccaacatgctgggattacaggcacgagccaccgcacctggcctcagcagtcattttgaattaccgtgctaggcccggtacccatcacattagggtttttccgactaaatttagcttatttatgcctgattaaaggattattttcataattaattttactattaaataaactttatttcattttgatgataattccagaacactagtagacagctctcctgagcacataattttacataattatgtaattactggcagcaaatgggtatttactgcattcaagcaggaaaacccagcttcaccacagactgattcttctaaaacgtttaaaaataagtatatgaaaatgtgttctgaattaagaactgggtgagaaaattcctaattaaaaaaaaaaaaagccttagctgggtgtgttggcacatgactgtagtcctaactactcggtaggttgaggtgggaggatcacttgagcccaggagtttgagaccagcctggacaacatagcaagaccccatctctaaaaataaaaataaaaataggccggacacagtggctcacgcctgtaatcccaaccgtttgggaggccaaggcaggaggattgcttgagcctaggagttcaagaccagcctggcaacatggagaaaccctgtctctacaaaatagacaaaaattagttgggtatggtggcgagtgcctgtaatcccagctactagggaggctgatgtgggagaatcacttgagcctgggaggttgaggctgcagtgagcaccccagcatgccactgcactccagcctgggtgacagagcaagaccctgttctccccaccactcccttgccaaaaaaataaataaataaataaaaataaataagctcaccccactcagacatgtaggtcttcacaccaaaacaggaggtggccaggagcatagacgccctttcaaggaggttaattacaaagggaagaagagggaggagggtgatggaaccatcagggatcacttaaggtgggagacacttaggggaaggagctaccaggtgaaggagaaagctagaagctcaaccgagacgcagtggctccctaggtgacagtgtggggtgcagaaggcggtgggagccgctttcactgagtgtggcgggctcgtggttaggggctggaaggtggtggtgaggaatacaggagactacataggaagcacccatttccagatgagaaaactgagactccgggaaattaatattatacctgaatccatagcggaggcgggaggcaaatcccatggtctccactgccctacactcccgctaggtggtgagggtgggtgttgatctctgacgtgggagggcagggccatgctaggtgagtccagactcaccccaggactctcccctaagaagccgctagagcctaagaggctcgcccttcccccatccagcctgacttctctataaatagcctgggttcctagggagggagggaacttgtgaccctctggcaggtgctgccagtcatgtcccctccccccaggcggtcctcggagtacagctggtggtgaccctgctcactgccaccctcatgcacaggctggcgccacactgctccttcgcgcgctggctgctctgtaacggcaggtgagccccgccccggcggtgggaggggcccgcggagtcacgcccccttctggctccccacgccccgcctcacaaattgcaaagccttgattttgg

SEQ ID NO: 21162 - DNA, 2300 bp, Homo sapien
tcctgagtagctgggacttacaggcttgagccaccacgttgggctaatttaactttttttttaatttaatttttttttagagatgggtgttttgctgtgctgcccaggctggtctcaaaattctgggttcaagcgatcctccagcctaagcctcccaagtagctgggactacaggcatacgccaagccaccatgcctggctggactcaagtcttcaacacttcccacctggtcccttctgtcccttccccactcaggaggggtgagccacggtcctcatggcagtgatcaatggctgtggaggtccagctgagcatgcagctcctgccacctccagcagcgccactgctacatgcacagatgatgcaaactcttcagccagttacccacccttctgttctgaggacctccccgacaatgatcctggccttccttccacatgggctgaagacctacctactcactggcaccccaaccccgcacatccagaccagggccagggactgagcaagaggaaaagggtcaaggtagcgggtaccctgggggaaactgaggcatggccagagagaaagagccttcccagcctttggatctcaccctcacggtggacaagaagtcaggccagtccctgatgttagtgcccacaggctaagcacccagtgtgaggtccataaaactatgggccgctttctaaggctgggagcccccagggccacaagtgagactggtttgacttctccatcccagggagactgcgcttttgccctccaccacgaggtggcgtgcgatagtgcgcttaggattcagcacttgccagccgaaagttaaaaaaataaaatataaaccaggcccggtggctcacgcctgtaatctcagcactctgggaggccgacgtgggcggatcacctcaagtcgggagttcaagaccaacctgatcaacatggagaaacctcatctctactaaaaatgcaaaattagccagtcgtggtggtgcatgcctgtaatcccagctactcgggaggctgaggcaggagactcacttgaacccaagaggcggaagttgcggtgagccaagatcacaccatttcactccagcctgggcaacaagagcgaaactccgtctcaagaaaaaaaaaaattaatacacaaatacataataaaatgtaaaaacgaaaaggtaattactcaggccccacacacaggaacccacccccataaagatgctcagacactcagtcatacccaatatatgtctacactcaggcagacacactcatccacagaaagacaaatggcaaaaccggggcacaaacaccagaagccctttcctcctagcggtgaaataaagaacatcagatccctgaagctgacatttggtccttgatccagccacgcctgaagctgacactatggctagtattttctgtcacatgagccaaaaattttccttttttgcttgaacccatgttagttgatattttgtggagcacagccagagtcctagctgatagagatgaataaggcacttgccaggtgaaaaagattgaggcattcttttttgcttttgttttgtttttattttaagattgaggcattcttgaaggcattgcaagatgtaggatatttacaaaggcctggaggtatgagacagcatggtgggtgcaagttgtactatagggtgcacaatagtgctagcagcagatttaagtcaggcagaagggtctgaattcagtctgagtacttagcctacttagtacttaggagtactaagtacttcgtctactaagtgggagccattgaatgttcttgatggggggagggaattctactctcagaaatgtcccttaggtgggaataaatgctttcgctgcaaacctttgagataagtgtaggaaagagaaaactaagccttaagagaggtcggccacgcaggcctcccagacacaatcttcactttgatcgatccgaaccagcgtatctgaactacaatttccggcatgcaacgcgagcggcctcctcgtccctggtgatttgccggctcaagacacactgattggtcggacgggatgctcgtcagaccagagtcgggctctaattggtcgagtttccgcagagtgcccggagccctaggccggtgggtgagtgcaccgcgttctcgcacgcgtcatggtgagcgagcgtcccgcgaagtggggggttctgcagggccgaggtccagccgaaggggtccagggagacactgagggaatggattggggtttcttcttggggattggaggctctgagggattcgggggcacg

SEQ ID NO: 21163 - DNA, 2300 bp, Homo sapien
gagggggctggggagttggggtgcataagggccagccccagccagcttcgctctgctgggctagcccttcccccagagctggcccagctgccggcctcacgtaaccagagcctgcctgttgcatcagaggtgggcgggtggcctccggtaaacagagcagccctccgggggcccagggctccccagccacctccacactccccaagccttgttctgcaccatggagtggaggcagaagcccccagcctggcccaggccctggcatgtccttggggcaccccagtgtatggcactgggcactggatggggacaggagggacccactgatgacacagtatgaactctatagttttcatgtccaaagagaaagttgtgctcagactagaggcccacactgcccatgtcacagacgggtaaactgaggtgtggggagagacacaagcctcccaggccccctgttccctgtctcagtgtcccccacactccagcatctgccacatgcctccccctgagtttgggggaccagcccctctcttctctggaggagatggacaccaggcagctttgcagccccattgctctccacctgtatctgcccctcctcttcaccccctgcccgctatactggcttcaccttcctcatcttccccggccagagaatgttctatgctcttcctctgcacttttgcaagtgcttttccctcttgaaaaagcccttctcgggtcttgtgtagtggctcacacctgtaatctcagcaccttgggaggccgaggaggaaggatctcttaagcccaggagtttgggaccagcctgggcaacatagtgagacatcctctcttaaaaaaaacaaaattagctggacctggtggtggcctgcctgtagtcccagctgctggggaggctaagttgggaggattgcttgagcctaggaggtcgaggctgcagtgagctatgatcatgccactgcactccagcctgggcaacacagtgagatcctgccttgaagaaaaaaacaagaaaaacctttctcctagtggcaaactcctacacatacttgaaagcccagcacaaatgccctctcttctgagaaaccctccctgactcctctggcacagcccttgccccaattctggcctgtcccagcctcccatccctcctctggcccaagcctgaccccacagggttaggggagtgcatggatcccctgcctgccccagacgggccgggggcttctccagaagtgcccatcccagagccatctttatcctgtaattcttttcacattgatacattcaccaacccctgctctgatcttcctgtgggtctggcctgtgctgggatcccaggggaaggggtggatttagagttctgggctggggtccaatcctggaaggcccctcacagctgacctttgaagtttagaaaacagcctttagcggggagaggtaaggagagggaagtggttggtggaagcagtgtggttgtcttggactgtggaggggcaggcggtgcgggcttgagggaccagtagctgcggagggtctgtcactccctgtgggagcacatatctggccccaggaggcacagttgagtgaggccacacaggccacccgagagccccgtcttgcagtctttccattctagcgagcgcgagggtcagcgttgcctgcgagaagggcttggttcctcggggcgacggggtccgggatcggagtctatttcactcaggatggaatcaatccaggcaagttgggccgagttaggaaaaggtttagaattagggttagggtcacagtagggtcaggggtcggcagtaaggtcaagggcgcccagtgagggcggggaaagcctggccagtctgatccagccccctccctccgttctgcttcttccttatccgcgcccccacccatggcgccccagcatcctttcgcgtctgagtcccaggcccatgaactcccgggtcggggccacgcccaagtgcacgcccatcgccgcctccagggtgacgccctgtatgcaaataagcccgtcccgcccaatcagctcccgggggcaggaccgcccgctcccaaggcacctgcggccgcgggcccctgatcttcgtgcagccgccgcgggtccgtgcgcccagcgtcccagggcccaggccgagcaggtgcgtgtcatatcgggttgagactcctgtggtgtcctctgaacggcttctgcgggctgggtgggttttggaggtccgggtgtactgctgggcgtcccagggtggggtgtgtgtctaaaggggtgtgtgtcgtggggtggt

SEQ ID NO: 21164 - DNA, 2300 bp, Homo sapien
ctccctgactaccaagcttaaaagatgacccctccacctcacggaggaccttggcaggcattttgttcctttctcttaataccaatttcaactgattaggttacatgttcacaggaaaagttaaaagcttggacttgggagagcagagcttctctgagcctcagcttcctcatccacaaaaaaagaataacagcaccagcctcaaagtttgctacagagatgaatccaatgccatcaccagggtgactgctcaggagagagaacccaggcgtgtctgggagtcaaaggaggctaacacaagtctctccatctcaccactgtgccttgagtggcagagcccagcctgccacctccaaactgtgtgacctcttaccagataggcctcctcgctttgaatgtgagcataacggccaggggcggtggcccacgcctgtaattccagaactttgggaggccgaagcgggaggatcacctgaggttgggagttcgacaccagcctgaccaacgtggagaaaccccgtttctactgaaaatacaaaattagccaggcatggtggtgcatgcctgtaatcccagctattcgggaggctgaggcaggagaaacacttgaacccgggaggcggaggttgccgtgagccatgatcacgccattgcactccagccttggcaacaagagcaaaactccgtctcaaataaaaaaaaagaagaagaaaggtgagcataacagacaaggcacggtggctcatgcctcatactcatgccctccgttatccatggttcccgaatctgtggattcaaccaaccgtggatggaaaataggaaaaaaaaaattccacaaagtttcaaaaagcaaaacttcaatctgccctacacgaagcacttctttgaatccatgtgaatgaagtgatgtgtaggcctgtattatgtattctagatgtgagtaatctagggtgatttaaagtataggggattagctgggtgcagtggttcacacctgtaatcccagcactttgggaggccaaggtgggtggatcactcgaggtcaggagttcgagactagcctgagcaacaaggtgaaaccccgtctctactaaaaatacaaaaaaattagctgggcatgggggtgtgtgcctgtaatcctagctactcagggggctgaggttgcagtgagctgagatccccccacggcactccagcctgggtgacagagcgagactccgtcaaaaaaaaaaaaaattaaagaattagcctgatgtggtggtgtgcacttgtagtcccagctactggagaagctgaggcaagaggatcgcccgcgccagagagatcgaggctacagtgagccatgatcgcgccaccgcaccccagcctgggcgacagtgtgataccttgtctcaaaaaaaaaaaaaaaaaaggaaacaagacgcacagcgattactacgccccggggattcttccaatgcattacaaatatcaggttgttgagttttttttttttagacagggtctcacttgtcacccaggctgggggtgcagtggcacgaccgtagcccactgcagtgcagccttgacctcccgggctcaagcaatcctcccaccttagccgcccaagtagctgggaccacaggcgtgcgccaccacgcccggctaatttttgtatttttttagagacgagatctcactatgtcacctaggctggtctcgggctcaagcgatcctcccgcctaggcctcccaaagtgctgggattacaaagccaccactcccagcctcagctactgaattcttgaaacaatcctggggggaccggtaattaaagcagacacggagcctttctacaggtttcaaaactagtcagcggcagagctgggattggacggcagttcaatcactgctcctcgcacggtccctccgcgcccggcctttgtcaggccgcccctccacaagttaccggccccctctgtcccgcccgcaggcccgcaccacctttcttccccttgagctgcatctccggctcctccatagcgaccgcggccgagcgaaccgggaaacggcaccggaagcccggaggttgggacgcccgcctaagccttccctgctgaaaccggacgccgcacggctcctgttccggtgtcagagggcccgccctccccgctcctcagtctttgcggacaagaaaggggctgtgtgagacgcagggaaggaggcacacccgggggtggcgcagtgaggagggggcgcgacggccaggaggctggtggagcgacacccaggcaggagagggggaagaactctctccctttc

SEQ ID NO: 21165 - DNA, 2300 bp, Homo sapien
cagctcctagggaggctgagtgatggcttcagcccaggaagttgaggctgcagtgaactatgattgcatcactgcactccagccttagtaacagagcgagaccctgtatcaaaaaacaaaaacaggccgggcacagtggctcatgcctgtaatcccagcactttgggaggccgaggtgggcggatcacctgaggtcaggagttcaagaccagcctggccaacatggtgaaaccccgtctctactaaaaatacccaaaaaattagctgggcgtagtggcggaagcctgtaatcccagctactcaggaggctgagacaggagaatcagttgaacccaggaggcagaggttgcagtgagctgagatcacgccattgcactccagcatgggcaacaagagcaaaactccatctcaaaaaacaacaaaacaaaacaaaacaaaaacgaaagcaagacacaggttccatgtgaggcctgacattccatcatcatggaatcccagagggctaatcccagaggaggtatcctaccctgtggagaggaaacactggcatccggttcaggattcacaggctcaggggtgcagggaaagagactgaggaccacagtgtctgagccatctgcagcctcctctccggggtcttcagggtccccaagttctgaggcaggggtctgctgggtctggatgaggtcttctgcaggctgggtaagctccatggggaaagctggcggaggtgtcagaaggggagagatgacaataattatcaacagttataataaagtaggcaccgactgcatacctagccttgcactgtgagggtgggtaaactgaggtccaggttaattaccagagccagggaaatgaaaaccagagtccaactgctttcgaggtctaccattccccaccaccaaagcacctacaatgtgcaatgtttaagagcctgggctctggcagggcacagtggctcacggctgtaatcccagcactttgggaggccgaggagggtggatcatgaggtcaggagttcgagaccaggctggccaccatggtgaaaccccatctgtactaaaaatacaaaaattagccaagcgcggtggcgggcgcctgtgatcccagctactcgggaggctgaggcagaattgcttgaactcgggaggtggaggttgcggtgagcagagatcgcaccactgcactgtagctggggcgacagagcaagactctgtctcaaaaaaaaaaaaaaaaaaaaaaaagaaaggaaaaaaaagccggggctctggggtcagctgtctgggttcgaatccctcaatttataggccgtgagaacttgggcacgtgacttaacctttgagcctcagtttcctccacgacaaaatgtggaaatgagacctacaacgaattatgtctgtacatagcttatcgggggatctgctaagcgtggagctcaataaatattcgctatggttgttgggaggggctccccataatgagtgacggctcaacaaaggtgcgattggtcccagtcccacccgagcctcctaaatcgatccaggaggtccactcacctccccacgagcctcctctgtccccccgcgccgaaagcccagttctctcaaaacttgggggcccaagtcacaaacttttctcttccaatggatatagcaggaggcaaactggagaccggaccctcagcgatctggcttcctctgccgggacagaaagcaacttgatactcgaccgctacccccaccccagagctcccccactgcgcttgcgcacccccgccccccaaaagtgaggaagggcccgggcagtaagtgctgcctctggccctttaagacttaggggagggcgtgggttccgctggggtcctgggagggcagttgcgcctgcgccttcttttcccctcctcaccgactcggagggaatgggcggggcctaaagggctctgagaatttcactacgcctgcgcccgctcacctttaccctgcccacagatttttccagagggagccaattggctccggcttcgggtagatgggcggggctatctcaagaagaagaagtaggggaagtacgcggggcgtctggaacttaaaggggcagcgtaccttggccgtcccgttccacaacaaggtcccttctgcggtctcaaaggcttataagcaagggcgggggcagagggctaaagaagggagtttttgcggcccgagtgggtaatgcgtggaggactcccccaactcgtctctcaaggaaaagggggttcagaaagggagagagttcttccccctctcctgcctgggtgt

SEQ ID NO: 21166 - DNA, 2300 bp, Homo sapien
aagaaaggggctggctgccagaccattcagctaaagccaggaacaacagcctcttgccagtggctgctctgtcttggaaccctccattcatgcagaacggatggtgtcctgccctttctccaacaccttccatgactgctccgggcccagcaggatgtggctccacatattttattcaaattcatggtctttcacccaactaggccttggcttatgctaagctccctgcctgggacaccctccccactccagattttctcacccttgtgaattcctggcgcctgaccccctattaaggtgcagttctaacatcccctttcccaggaagcccttcctccaggtagagcccctgctcctccggccccatctctcccttggggctaggagtgtctatgtctacctctgtcttgcccagatcaggggctcctctgggacaggcctggagctgaggcctcttgctgtccccagcatcatccagcagaaggctggacatgacagtgtgacagtagagcttgcaggaggtgtctagtgaatcagtgaaccaaatcttcagcttggtatctgaggctttgtttggcaaactcctgttcatgcttcaaaacccacctcacagcctgggtgcggtggctcacacctgtaatcccagcactttgggaggccaaggcgggcagatcacgaggttaggagttcgagaccagcctggccaagatagcgaaaccccatctctactaaaaatacaaaaattagccaggcatagtggtgcgcacctgtagtcacagctactcaggaggctgaggcaggggaatcacttgaacctgggaggcggaggttgcagtgagctgagatcacaccactgcactccagcctgggcaacaaagtgaggctccgtctcgaaacaaaacaaaacagaaacaacaaaaaacacccgacctcgcatgctccctcctccaagaagccttccttgacgtcccagcagcattttctgggaaagacaaacttggaggccagggctcctctgtcccaacaagaacaaaaagggttgatgaggacttcagatactcccaacatcgtggccttttccacaactctgcctttggcctccgggaggcagtgaagttcggggattcccaggctgcatttagtggttagggtagagtaggttagagtaggttagggtagccgttagggtagagtaggttagagtaggaagaaagacattgtcataggaagtctctctggccgggcgcggtggcttacgcctgtaatcccagcactttgggaggctgaggtgggcggatcacttgagcccaggagttcgagaccaatctgggcaacatggcgaaacctcatctctaccaaaaaacaaacaaacaaacaaacaaacaaaatagcctgccgtggtggcgcgcgcctactagttccaactattcgggaagctgggtaggaggattgctggagcctgggaggcagaggtcgcagagagccgcgatcccaccattgtactccagcctgggtgacagtgagaccccacttcaaaaaaaaaaaaaaaaaaaggccgggcgcggtggctcaagcctgtaatcccagcactttggaagccccggcggctggatcacgaggtcaggagatcaagaccattctggctaacacggtgaaaccccgtctctactaaatatacgaaaaattagccgggcgtggtggcgggcgcctgtattcccagctacttgggaggctgaggcaggagaacggcgtgaacccagggggcggagcttgcagtgagcggagatcgtgccactgcactccagcctgggcgacagtgagactccgcctcaaaaaaaaaaaaaaaaaaaggaagtctttcggattccaaaatcagtcaaaatcagtgctctacaccttcgggcgccgagggacagcgccccgtgcgcgcagccagccttttccctacagcttcaagggaaccaaggtaaattcaatcatcgaacccgggccctttaagaagcgagcatgaaggggcggggtcgaaccaaaccccacctctggagcgtccgcggtcggcgcctgaattacaacacgcatgcgccaagcccacgcggttccgggtcccaagatttggctccaagagctattcgcagagaaacagcctcgcacaaaaagccaccgcccccgaaacccgcgggaaatctgtttcctgtgaaaggcctggcctccgggcattggcggtttccctgatcctctctcccaaattttccggcaggggattgatcgaggcgacatttaggactggggtgggcgaggga

SEQ ID NO: 21167 - DNA, 2300 bp, Homo sapien
aatacctggccaggcctggaacagccatgaggggaccccacacttgctcagggttccaaggggaagaaatgagaacagcctggtgaaggcagaggttgctgaggtttacaagttggtagttgggagcactggtccagggtctggctttgacctctaccctgctgtgcagcctgaggcaaacctctagccctctctggtccctgaggcatcgtgttagcaggcaggaggcaggggtggactaggtgggctttgccgctgcgttgccgcctcagagttcagcaccacggacaggtcccaggccggcctcccagcaggggactctgggagctgggaaggagaactggggaaagggacagctgtcacatacagcctccccttctggactccgttcacaccccttcctcagggataatttcttatgggggcggggagcaaggattgggtttgcagatgatgttctaattttccatctgcgcccacctcctgagccctggtgaccggggttcgcaggagtgggaggttttggggagggaccacctccccaggattcctagtctctggaacaatgtgaagtcaggaaatgcactgctgtgtcccaacgactggcatgggctttgctcacagtaggcgcttaataattgtccactttatccctatgggtcctagcccctatagggaaatggacccacaactgaagtttctctgtgggcctaagaagtatctttgttgagctgtgtgaagtcaggaggaggatgggtgggcaggggtgagccccttcctccagctgggagttggcggctcctccaaaatcccagaaaccaagaatagaatcttggtgacaaccaaatcctggaattgaagctgcgaatcgtgtcagccagcaaacccagattaaaggatggcttagaggccagcctgctgcctggactgaggatgctgggaggactgggacagactgctgccctctaggagccgccagtctgatggaggaggctgacttgaaaaatggtatttcagtcttggctgtgttaaggtcggtaataataatagcagcagctaaaatgtaccccttactgcatgagacagttctaagcattttatatgtattgactcatccattcctttcaactacctgatgttatccccatctgacccacaaagaaagtaaggcacagagaaggtaagcaacttgcccaagatcacacaaaaggaacagtgagccaattccagatttgattcactaccagcacccaggcttctgaccacagacttcattgcttggattgttttttgttgttgtgttgtgttttgttttgttttcagtctcgcgctgtcacccaggctggagtgtggtggtggaatcatagctcactgcagccttgaactcctgggctcaagcaatcctcccacctcagcctcctgcatagctgggaccacaggtgtgcgccaccaagcccagataattttttttttttttgagacagagtctcaccctgtcgcccaggctggagtgcagtggcgtgatctcggctcactgcaacctccacctcccgggttcaagtaattctcctgcctcagcctcctgagtagctgggattacaggcgcctgccaccacgcccagctaatttttgtatttttagtagagacggggtttcaccatgttggtaaggctggtctcgaacccctgacctcgtgatccaccctcctcggcctcccaaagtgctaggattacaggcgtgagccaccacgcctggctgctaattttttaaatagaggtaagatctcactatgttgcccaggctggtctcaagcttctggcctcaagcagtcctcccacctcagcctcccaaagtgctggaactataggcgtgagccaccgcgtccagccactgctattctgaggtcaagtggccctgggttcgaattctggctcagccctttgctggctccttctgtgacctagaataacacactggtctctctgagccctggtttcctgatctgtagagtgggggagtttggtcctgcaatgctgaatatctgggagggttgggctgtggctcacccctccctccctctccattttgttccagatccaggatgggggccccgtttgtctgggccttgggccttttgatgctgcagatgctgctctttgtggctggggaacagggtgagttggtttgtggggagggagagattggggtctaggggatggacaagatggggcagcttttgaattccagagccttctcctgctggtctcctggcatgggctagagaataaaatgagaataga

SEQ ID NO: 21168 - DNA, 2300 bp, Homo sapien
ctctactctttttggtgtatactctcaggagtggaattgctgggtcatatggtaactctaggtttaatttactttttttttgtagagatggggttttgccatgttgcccaggctgctctaaaactcctgggttcatgtgatcctcctgcctcagcctcccaaagtgctggaattacagacatgagccactgtgcttggccttttttttttttttttgaaacaggttctcactctgtgcccaggctggaaagtacagtggtacaatcatagttcactgtcaccttgaactcccaggctcaagcgattctcttgcttcagcctacccagtagctggaactacaggtttgtgccaccatgcctggctaatttttatttttttaatttctttttatttttattttttgagacagggtctcactctgtcacctaggctggagtgaagtggtgtgatcttggctcactacaacctccacctcccggttcaagtgattcttgtgcctcaatctccccagtatctgggactataggcacctaccaccacacgtgactcaattttttttttttttgaagtttagtagagatggggccaggctggtcttgaactcctggcctcaagtgatccaccagcctcgacctcccaaaatactgggattacaggcatgaaccaccatcctcagcctacttttccttttaaaaaaaaattatatgtaatcccagcactttgggaggccaaggcaggctgatcatgtcaggagatcaagaccatcctggccaacatggagaaaccccatctctactaaaaatacaaaaattagcaggcatggcgacacgtgcctgtaatcccaggtacttgggaggctgaggcaggagaattgcttgaacctgggaggtggtgtctacagtgagccaagatcgcaccattacactccagcctgggcaacagagccagactccatctcaaaaaaaaaaaaattttatatatatatatctccatcctagtgggtgtgaagtgatatctcatggtggttttgacattgacaatgagcatcttttcatgtgcttgttggccatttgtatgtcttctgtggagaaatgtctgagctcccatgtccatacgaagggtgtggccccgacatcagagaaggagccttcagcattggaatgagagggggtgtcagggaatgatctcccagttaaatctcttccagaaacaaagaaaagacattaagatttggccagtgtggtggctcacgtctgtaattccagcattttgggaggctgaggtgggcagatcacttgaggccaggagtttgagaccaacctgaccaacatggtgaaaccctatctctactaaaaatacaaaattaggtgggcgtggtggcgcacgcctgtaatcccagctactcaggaggctgaggtgggaggattgcttgagtatgggaggcggaggtagcagtgagccgagattgtgccattgcacgccagcctgggcgacggagtgagaccctgtccaaaaaaaaaagaaaaaaaagaagtcaatatgggaggtgaaagggttgggagagcagagcctcaggaggaggggccaggcatggggagaggggtgatttcgccccgcagtgaccttggattgggccctctctctggtgggctggctgtgctcatggctggtaggccttgggccaaggccagccccccctcacgctcctatcccatctcccagacaccgagggctgtgaccgcggctggcataagttccagggccactgttaccgctattttgcccaccggagggcatgggaagatgccgagaaggactgccgccgccgctccggccacctgaccagcgtccactcaccggaggaacacagcttcattaatagtaggggctctggggagggggccacctgcctggagggtgggcaggggtggcacttgtagcccttttgccagggcatcgcatccctcccctggttttcaagacgtcatctttccaaagctgtgttcattaacgcaagccctgactgcttcttaatgcatgaaatctgtcaattcacttgttaattcatacattcacttcattcattcattcaccaaatatttactgagcacctgctatatgccaggcaccattccaggaatattgacacagcacagcagcaatcaaggctgactttgctttgtccccagggagtgaccatttcttggggaggatatagacaaacaagtaaatatctaagtaaataagtctatactgtaattcaacagatcctatgtgtgctgataacaaaacagggcca

SEQ ID NO: 21169 - DNA, 2300 bp, Homo sapien
cttccatgcacctgcgcacacccttcacctaccgtgtgcctgaggacacctggggctgcttcttcgtgtgcaatctgctgtatgcgctgggcccccacctgctggcctaccgttgccttcagtggcccgcattcttccaccagccaccaccctccgaccccctagccctccacaagaagcagcattgagagagctgtggactcaggacccaggactctgtttacgtgcccagtcagccctacctggggaagcgggggttgggtgttttagagacaggagggacatctccgggtgtctttagtcttggctatggtagtttcagtccagtgggtgggatggagaccaacgaccaagtgttcctgcaaggagagcctcccacagctgtcaccatgctccaactcccacacaaacgcttctaccccttccagaacttacccatcatccccccatggatcctttcagtaaaaaccctttcaatttccaaaatatcactgcctaagtgtttcagggtgcaggggcaagggatcctcttcttggcccccatgagggcccacctatcactgccatcgtggttgccaggagtgagaggtgctgggatagcagaaggcggcctctggttggtatgcacggctcatcttccagatgggaaaaccgaggctcagtatggacaagagacctgcccaaggtcatggccagagagaaaagttcctgctctaccaataaatcataactaatagcatgatacatttattaagcacctactgtataccttgactgctacatgctggatctcactccatattccagatggggaaaccaaggctgcaggaggtgaaggtcctggtctgagatcattcccccgctcagtccccaaggcatggctgagctaagagatggagccccagcctgttggaccacagaaaccacaactctgcctctcctatctggtcgggttgggctcattttaggggaaactgagtcctggaaggaagccaaggtgttaggagaaagactcactgtttgctattgtttgattttttgaaattgggtgaaaggccaggtttaggggcgacttgggcctggagtaagtcagggaccttgaccagatgtcccttttccttttctttctttctttttctttttcttttttttttttttttttgagacggagttttcactcttgttgccccggctgatatgcaatggcacgatcttggctcaccacaacctccacctcctgggttcaagcaattctcctgcctcagccccctgagtagctgggattacaggcatgtgccaccacacctggctaattttgtatttttagtagagacagagtttctccatgttggtcaggttggcctcgcactcctgacctcaggtgatcctcccatcttggcctcacaaagtgctgggattacagacgtgagccaccgcgcccggcctagatgtccctttttcttgcccctcccaacccctaccggagatctactgtatgtctagctactggatcttcaccaaagagtcagcagcaggctcagagaggccaactgtctcctccaaggtctcacagccagtgaggggcagacttgaattggggcctgtggctccagtccacagcagagtgtgactatcgtgaggcccccaccctgcacagggagcgcctttggggtgctggagaccaggactccactatgactacccaatggacaggtggcctgcaggccaaatgatctctttcaccagatcccccaggtcccctgccaaagcacagtaaccaagatagaagactcagccccctcctccatttcaaagatggttaaactgaggctcagagaggttcttccctggcctaagttcagctagcagggtgagggaactagctctgcactccaagtccagagcgcttctttctccgcccgcgctccagccactgctccaggggagcgtgggcccccgcggcccctttaatacaccccgcctcgcccgccttcctcctccccttgcaggcagacgccgggattgcgccgcctgcagggacctgcccagtcttaaccgggtgtgcggggagcgcagtccgggtgcgtaggggccgctcggcgggggccgcgcgggcaagatggtaagtggggctgcgggcgcgggtggtgtgtgccccgtctccccaatcttggattctatatctctctgcctctgaatctatatccctctgagtttcttctgtctcttccttttctctgtctctcaccctctttgatctctctttttggcactctaggttctctccctctccatttctc

SEQ ID NO: 21170 - DNA, 2300 bp, Homo sapien
tgcttggcatggagtcgggctcctgggccagcttgtgttcacacagccattcagcaaacactaggtgccaagtgtggggaccaggtggacaagatctactccagtcagccaggctgctggggatgaggtctgaggctgctactgagaggaaccagggagccgtggtggggcggtctgcagagtgtctcagtggggtctgagaccagggaggtgccagatgcagtggcagagccaaggctggggtgatataccaccctttgttctttcctgacgctgtggctgaggcagagcaaagagtaacattggtgggcttggcctgggtgcccatgaatgagggctgcccagaaggcagtgggccaggaccctgagcacagcggggtagttctctgcagccagtggttcagggaatcctggcactgggtcccaggcattcagccatccaagtcacttctcagttctcagcaacctggaggctcaccaggctcagggcatggactttaccccttgccaggggacgaggcctccaagtgctgtgtgcgtgtgcaggtgcatcctgtacacgggacaaggccaagcccctaggctgagctgggcacaggcaccctggccttgtgtggagaaggtggggtgggggtggcaggcagggctgcctggaggaggggatgctggggcccgcttacaagaaggctcattttacagacagaaagcaggcctggggggtgttgaccctgctagagttggggaaagtccaggggaacctgaacttcacccatgggcagtggacacctggggaaggaggctgagtcagacctgcggccagaagaccctcttgtggcccagttcaggaagacctgtgacccagttggcatcaagctaaggggctgcgtgcagaatggggcctgaggtaggggcagtggttagaatttgtgccagctgcagactggggtcccgcagggcaggcgtcaggtgggcatggttcaccttgctgtctgcagcatccacaagtactccacatgggccagagtctggttggagggggtgacaaagacagatggtctccttattctcccccccaatactgtggccccctcccagctgttcaaaacctcccacagcctctcacagctgtctcgcttctcatcacaccccagcagaaccgacctcctttccactgctcagttccaagcctgagccactttcctccctgccaggaacaccgttcccaaactcttcaccaaactggctccatcccgatattctaacttcagcccccacccgctaggaccccttctaccctctccccgaaatgaagaaccctaaacccgggactagcctgcaaagggacagccccggagtcaaagcctcacacttaaagacccctcgcagtggctcacgcctgtaatcccagctcctcgggaggctgatgtgggaggatctgttgagcccaggagtttgaaaccagtctgggcaaaaaagtgagacctctgtctttacaaaaaataactagctgcgcgtggtggtgcatacctgtagtcccaactacttgggaggctgaggtaggaggatctcttgaggctgggagttcaaggaggagggccactgcactccagtctgggccacagagtgagacctctcaaaaaacaaacaaaaaaacttcacacctgcctggaaacacgtttacatttgtggccaccttatgaaaactcaaatctaagcccactgaaaggcattttgcacccaagagctggaggttgctccatccgtgcgcacagggaatgccgacttgatctttgggtggggatgggaaactctggggaatgcagaggtttagaagcgcagagtccaggagaaaatttccttagaacgaagttgtggaggcaggggaaagagggggcacgccaggacctccagggcgcaccccttggcctaagagcagaagcatcccgaggtgttgtgtcccagcctttgacagtgagggaaactgaggctgagtagcgggacggccattggagacgagggtgtcgatggtgaggggcgaaggggcggggcagctgccagggggagggccggggaggggccttggaggctccctgggaacacgcagggcggtcacggcggcctgcccagggcgcagcggggtcgacctttgtgcggggcgggtccctggcagcctcggcccggactcgccgccaacgaggagccgagcgccctggagaacgcgtcggggctgagccggggtccagcagccgccgctatggacatcccgccgctggccggcaagatcgcggcgctgtcgctga

SEQ ID NO: 21171 - DNA, 2300 bp, Homo sapien
gtcccggctactcgggaggctgaggcaggagaatctcttgaacccaggaggcggaggttgcagtgagccgaagtcgtaccactgcattccagcctggatgacagagtgagactctgtctcaaaaacagaaaaaaaagaaggaaaaaaaaaaactagctgggcatggtggcaggtgcctgtagtcccaactactcgggaggctgaggcaggagaatttgtttgaacccgggaggtggaggcggaggttgcagtgagccgagattgcaccattacactccagcgtgggtgacagagcaagactccatatccaaaaaaaaagatttcatctaccatctttacatttgtttacatttctcttgactgcaaaacacattatgtacagtctgtgtgcataagttttgataaagtttaactttctgcaatgtgtatatgttttatggtagtaagtgataaaacagactagcatctacatatatcttatacattcattgacactcctaacttttttttttttttgagatggagtctcactctgtcgcccaggctggagtgtagtagcacgatcttggctcactgcaatctccacctcccgggttcacaccattctcctacttcagcctcccaagtagctgggacgacaggcgcctgccaccacgcctggctaattttttgtatttttagtagagacggggtttcaccgtgttagccaggatggtctcgatcttctgaccttgtgatccgcccaccttggcctcccaaagttctgggattacaggcgtgagccgccgtgcctggccacacctaactttttcttgatttttttttcagtatttctaggctacgtggttcatctgacttttttcgaattgttgcaaatctccaaaaattttttcaatatattcattgaaagaaatcagcatattaagtggacctgtatagttcatacccatgtagttcaaggtcaactgtaatatctagtgtaggtgtgcagtaggcggtagcatctaggtttgtggaggtacagtctgtgatgctcacacattggtaacggcgcctaatgatgcatttccagaatggtcccctccatgaagtgattcctgactgtatttgtgtctttgggtctgaattgagtctctttttttttttttttaacataaatagagatggggtcttactatgttgcctaggctagtctcaaactcctgggctcaagctatcctcccacctcagtctcccaaagtgctgggattacaggcatgagccaccactcccggccagtacttggattctttcttgtcacagaaagttcaggaggctgggtgtggtggctcacgcctgtaatcccagcactttgggaggccaaggtgggcagatcgcctgaggtcaggagttcaagaccagcctgactaatatggtgaaactccgtctctactaaaaatacaaaaattagctggatgtggtgccacgtgcctgtagtcccagctacttgggaggctgaggcaggagaattgcttgatcctgggaggcggaggttgcagtgagccaagatcgcaccactgcactccagcctgagcgacagagcaagactccatctcgggaaaaatgaaagaaagttcaagagacagacaacgataagcacaataattaccacagttttacacaatcaccttttcacctctcccttcttagcagcaatttcggggagggccagcctatggcctggtctctcattttcttaccaaacctacaagggttggggggtggtctcttgtcattgcattctgcagatgataatcagtgactgacacccactatctcatgtcatatggtgccccactatgcagctatgcagcctgcactgtggagcagaaacatcaccccctcactccaccttcactggcgctcaacacacaggtgcatggaggagtccgacgtgccctgttgtgtggcgccatcacctgtgtttgcaagatgaggacaggaccccaaaagggaaggcgacagccttcccaggtcgggtggccagcctcttggacctgctcgtccaattcagggatgattgctttctcggtgcctccctggccccaagggcctcagagattctaggtcaaggagaaaagctactgaatgaagattcttatgcttaccagggctgtagccagcaactgcagccagggtggagggtacctaggattggtttgtcactcaagtgccgaaccctagtgcttagatccgggtgcttcaatgcgcacacaccccagctctgagacacccagcaggtgaagaagtcgccctgtggc

SEQ ID NO: 21172 - DNA, 2300 bp, Homo sapien
cgtggcgcaccgcccgagtgtcttccagtcccctgacgaggacgaggaggaggactatgagcagtggctggagatcaaaggtaagttgtgggagctgctgctcccccaccaccagtgcccgtgctctagcaggtgggatctgtggtgggcagggcaagtgctgccaggggcatgggtgctttcggctgagttgcagccaccagacctctgagctgagcctcaggccctctgaggtgaggagagcaaaggagggtgaggggcggggctggggtgttgctgggcatcagcgcgtgggcttcatcttgggagcagcgggatccatcttccactcacacagcggctcatcccagccaaggcaggggcgcacgcccttctcgcatttgctccaaaagggcatcctcacatcccttctaggaggagcttctaaggctcttccgctgagcccttgaggccccaaagcactgcccctcaccatgggttacctgtcccctgagtttaggccagaggtatgagctgcaggttggagggtgctctcttctatccctgggaaaggacggtcactggtcacgggtgagcttgtccagaccgcccagtgtaggagggcaaaggggggtggctgtggtgacagcattgccagcaagtccagccctgtccacattcaggacgagtccctgtgacacctgaactgtgtgaagggctagccggtgaggtcacatcaccctgacagcacagactgaagcgactgtggagttgtgccatgacagccttgagatcccttgcttctggctgtgtgtccgagcggatcagaggccagcttggcccccgggccattagaatggagctggcgtgtgtcctttccttaaaggggtgccccagcagctccaagggtaccctgttgggaactgctgcattacaaggggtattggccatctcggggcccttgaagcccattatgacccactgtctgcatggcctcagaaacgcacctgttcctgtaaacagcaaccaggtcaggattgttgctgggcccatggcaggagggcgacctagggtgaaagacagtcacggaatgctctcgggacctcacaggggccctcgttgggctacacactccccacctctcccccattcccagcagcccaagcaacaaggggaataagattagccacaggtctggcatgttgcccagttgccaggcacttgctggcagcgagaaatttctcttgtgcatctcctacaaggactgcagtctgtgtagtagctgacaaactcacagcctcagaaacaggccaagggaaaaatgcaaaagcaagttccacatggctcagtggggaggctaatccgtatataaaaatatatctttatagctctgttcactgaaaaggccccgaaataatgattaagcctgtggcattgagcatccctagctcccagatgctggtctggagatgcagtttctcatggaaaccgacttcttggagaagtggctggctctgggtctgggcaggaagtgtatgagatgatcttggagcgcctgtcctggcagatggcaaggaggccatcagagactcctggggccatgtccagagccctcaggagccagcttgaagaggttccaccggccgcagagcttctatgatgacactagttgccatggatcgaaacccacccagtgtgtttaaatcagagctcataatggtattttttaaaaaagaacgtgtcatctttgaaggatgaaagggaaccgatgtattatgctgaaaactggtaaagaaagaaaagaattaagcatttcccccaccaaaaccaggggaagctggatatattttctgctagcttccagcctggagctcaccacagcctcacacacttctctcccacctagtgtgtctcaccaagacagtgagaccgactcccccctcgtcatggtgttttgtgcctggactcgggacgcccgacagcctcctgcatctcacactcttctccccccaccccctctgtcgttgtggtccatagagagagtgtgcctattgactgtggggtgtgtgagttgaaccccagtactgacagcctccttaaagtttcacccccagagggagccgagactcggaaagtgatagagaaattggcccgctttgtggcagaaggaggccccgagttagaaaaagtagctatggaggactacaaggataacccagcatttgcgtgagtatctccggggaagggaaggctgtgctgttgaatgcgtttgctgcacagtcgcacgtgtggggctgggtgcttgctagtgtgggccggat

SEQ ID NO: 21173 - DNA, 2300 bp, Homo sapien
ccacagggtcgttttattttcatcctggctactaggtaatcattctggccagagaatccacaggcaacaagaccagggaggctcactggctccaagcaacagacaatgatgtcttcagactagggtgatagtatggagacagggaagacacctcagaggttccccatgggactcagaataaaatccaaattttaaaagtctgagccgggcatggtgactcacacctgtaatcccagcacctgggaggctgaagcaggcagatcacttgaggtcaggagatcgagaccagcctggccaacatggtgataccccgtctctactaaaaatacacaaaaacactggccaggtgcggtggccggcgcctgtaatcccagctactcaggaggctgaggcagaagaatggcttgaacccgggaggtagaggttgcagtcagccgacatcgtgccactgcactccagcctgggcgacagagcgaaactccgcttcaacaaaaagaaaaaaagaattctaaaaggccattttcaaggccccgccagatggttcccctcccttctgcttcatccttgacattcttcaaaaggacaagcccatcctaccagggcctctgcatttactggcccccctctgtgtggaaggctccaccctccagggattcccatagctggcattcattgtcttaactcaaatgtcctctgcttgaaaaggcctttccctgggccaggtgtggtggctcacacctttacgtaaccccagcactttaagaggctgagatgggaggatcgcttgagcctaggaattccagacctgcatgggaaacgtggcaacacaaaaaacacacaaattcgctgtgtggtggcgcgcatctgtggtctcagctactagggaggctgaggtgggaggatcacctgaacccagggagccacagtgagccactgcactacagcctgggcgacaaagtgagaccctgtctcaaaaaaaaaaaaaaaaaaaaaaagaaagaaagaaagaaaaggtctttcctgactacccaatatcagaagcctccactctgatcatatcatacgtaacctcacatcatacgtaagtttttgtaaatattttctcattaatgcactgacaccccagtagaaagcaacctccaggaaggcagggccctgtttcggtcaccgctgcatgcgtagcgcccagcacactgcttggcacacagtgagcacgccctaagtatctgctgatgggtaaatgcattctattctggggaagcagaaaggccaaggcttgcagcaaagtgagggtcaaaagacgcgggaaagtgtgtcaagggagcctcaaagcacttcggaaaagcagcttttccagaaagcgggacacaggccagaggccagctgcgacgaaaagaggggtgcagggacagcccaaggttgtcgccgtattggggaacggaggttggagcagccctgaaggcggttgtttcggaaacgggacgcagggccgagccgggtggcggcctctacggagatccgtgcgtcctcagcaaaccaagcgggggcggccagcaacctgggtctggggtctcgagaaaccaagaggtgcagaagccgacgctgtgggctgccccggggctgaagcgagggatccacgggtcgcagcaggacggacccgaggagtcaggggagacacctagccccagggacccaggcggccgcctgagaggaggcgggggctgttacctgcaacatcccggttgtccatcttgagactcatccaatcccacaatgctccggcgccccttaaggggccctgttatagtgtgcatcgcctgatgggagatgtagtccgcctcggtcagactcgccctattactgcgtgaacgactgggtttttttttttttaacctccagaaacggaagcctcagcctatcagcgatgcctaagtcccagtcacgataaccaaacggcgtcgcccttttacaccttcccggagcggcagtcatcccaaatacaaactacatgttccaggatgctttgggcggcagatctcgcggaagccgcgaggagagcccggccccgtctcgcgcgcctgcttccgcctccctgtggcggcggcttgttgttgtggaggccaaaatggcggctcaggcggcggcagcggcccaggcggcggcggcccaggctgcgcaggccgaggcggccgactcgtggtacctggcgcttctgggcttcgctgagcacttccgcacttccagcccgcccaaaatccgcctgtgcgtgcactgcctgcaggccgtgttccccttcaagc

SEQ ID NO: 21174 - DNA, 2300 bp, Homo sapien
tcttttttttctgagacagggtttcactgtcaccaaggctggagtgaagtggcgtgatcactgctcactgcagccacgacctcccggggcttagctgatcctcccacctcagcctctggagtagatgggactacaggcccgcgtcagtacgcccagctagtttttgtattttttgtagagacgggatctcactgtgttgcccaggctggtctcaaactcctggggtctagtaatctgtctgcctccgcctcccaaaatactgggattacagacataagccactgagcctggccctagaaagtttattaaaggggccgggcgcggtggctcaagcctgtaatcccagcactgtgggaggccgaggtgggcagatcatgaggtcaggagatggagaccaccctggctaacacggtgaaaccccatctctactaaaaaatacaaaaaattaggcaggcgtggtggcgggcgcctgtagtctcagctactcaggaggctgaggcaggagaatggcctgaacccgggaggcggaacttgcagtgagccaagatggcaccactgcactccagcctgggtgacagagcaagactccgtctcaaaaaaaaaaaaaaaaagaaagtttactaaagggcagaatgacagccactctcccgcattctttgaggcaccaagatgacacaaatcaagttgggtcaggggagggactcactctgacggaagaggatggactgatggatggtagaagtcaccagtggatggagaaaaagcaggagctgcttttagttcccctaatactgaaactgaacagcggggcctggaatccagaacccctgtttctcctcctcataggcctcaaatgaccaactccagactccgggtctcagcttccctcgtacgacaccaggcattattgatgggggcacaagaccctccaaaaaccacgattaccaaacttctgtgtccaaggagaatcatgcccttccaggttcctgagagaccagacttcagattcccgggagaatgccaggggtctcgccttcgccaacccctaccccaagtcactttaggtggaagcgtttggggctgatgctccggaagctgaaccaggaggagctaatagcttcaggaccctgtgatgtccccatcgccaccaacaggtgggatcctcctgaaaaccagacgatttgcggatcctgttgctcccaataacaggcaactttcagagtacggtgacggggctcctggagccctgtcaccagaaacgggaaataaggcgtggggggcgaggctttcgtgtcccttgagaggctggtggctttggggtccggcagaggcgggtgggggtcctgcggctttgacggaggtcgcgcccccaggtcgccgaggagcggccccccacccgccgcggtcgcgacccgtcagcccagatcttgcaaggagcccgcgactcctccctcgcggcccggcccgcgctcaccgccttctccaggtggctgcgcgcctgctcgctgttcttggtgtggtgatagagaacggagcccagctgcaggtgtgtacgggcctcgatgcgctgcggcggcttgaaggggaacacggcctgcaggcagtgcacgcacaggcggattttgggcgggctggaagtgcggaagtgctcagcgaagcccagaagcgccaggtaccacgagtcggccgcctcggcctgcgcagcctgggccgccgccgcctgggccgctgccgccgcctgagccgccattttggcctccacaacaacaagccgccgccacagggaggcggaagcaggcgcgcgagacggggccgggctctcctcgcggcttccgcgagatctgccgcccaaagcatcctggaacatgtagtttgtatttgggatgactgccgctccgggaaggtgtaaaagggcgacgccgtttggttatcgtgactgggacttaggcatcgctgataggctgaggcttccgtttctggaggttaaaaaaaaaaaaacccagtcgttcacgcagtaatagggcgagtctgaccgaggcggactacatctcccatcaggcgatgcacactataacagggccccttaaggggcgccggagcattgtgggattggatgagtctcaagatggacaaccgggatgttgcaggtaacagcccccgcctcctctcaggcggccgcctgggtccctggggctaggtgtctcccctgactcctcgggtccgtcctgctgcgacccgtggatccctcgcttcagccccggggcagcccacagcgtcggcttctgcacctcttggtttct

SEQ ID NO: 21175 - DNA, 2300 bp, Homo sapien
ccttccagttggtggccttccagagcttcttgtgttagacccggcttctcagtgggatgcagcagcttctgtggaaaaaagcccccaacttctgctcttctgttgcatcacacacgttgccactgtccccacacacagcctctagctgaggagcctcacctctggggccacacttctgacggcaggtgctggccccgccactctgaggaccccgagcccctcctgtccgtgccacaagaggggaccacaggaggcagacgcttgggctggcagagggcctgtggtctgggctcctgcgtgtgggtgcatgtgtgtcaggggctcgggctctctcccacagctgtcctcctggccccctgtgtcttggcagtagctgctctcgatgcagctctgtgctttcccagtgcctgtgacattcccagctgctgctcacccttgccctagagatctccagccccaaggctgcccccagccgtggatctccaggcctcactggctcctccgcactcccttcgtgaatactctctgctgcatccaggatggtctgaaaactcccatctgggcaggtgctttcattttccacccctgactgagtcagcttccaggggtgacaccagggcattctgaccctcagctaggagtggccgctgttgccgcatgagtggcagagaccatcgggcttcagcctcacctccctggccctctgccttttttatgggcttttcagtgcctggagcacctcctgctcccccttttcctggagaactggcccctcacttcccatacttgccacacatgctgccctgccccatgcagtcctcccacagagtgcgatgagttagggtctcctgctgtgctccggatccaccttccagcaaccaccgaggctcttgtcaggtgcaggttgctctgaatgtgtgtggcacatgcgagtcgctggggacagcgttaggcttgtgtgcttgggaccctgggtggtctgatgggctgtggtcagtggcctggactagcctgggaactgttggaacatggaactttagggcacagtggtccctgagttggagcctgttgtctgaactgccttcctggtgtgcatcttcagtgccatcccgcagttctgcctgtgtcagcccttcctggagccccctccctcccctctgagagactgactttgcttatagccaagcatctttcaaatgcctcttgctcagaaggactaaccttgccccccaagacccattctccagttgaaactgatttctcgtgttatgctttgctgaacgtccttcctctctgcctgacctctgactgccagccctacttccgtgtgacacctgggggccttgctgtggccaggtcacctctgagctctgttcctttctgaagcagctcccacccatgggcctgtggggtctgactccaagtgcgagcccctcctctgatgtcagaagggcatgtcccctcctgcccaggcacccactggggctctatagcttccattcccctggctggattggaggggagtaagcctaccctctcaggccaagcgggccgccttcttgttacctggatacctggcagcctctgttctcaggacaacctgtggaagccccagagcgagccagtaaccaggtgccaggtgtttgcctgagaattaatcgttgttttctttctttttcagtggttgatatcacagcaagtatcctttccgtgttggtatggttccctttaaggaattctccacttaaataaaaagaatgtatcaaagcttgaatcccacctcccgacatgccctgtgagttgaggctcggcccacagagcacctggagtgtcccccacctggccctctgctgcccttgggcgctgtgctcctctttgtgcttctcttcgtaccttgcatccagctccaagccctgccctgcagcaagctcaaggttcactgggggaacaggaaaacttggaatttcagggcaggcagggacgtgtgtgccctgcagaccttggcagggtaggagccccaagctgtggccctttcaaaccgacctttttcgcagtgtctgtacttccttaactggacgtcactagatcccgcagttcgaagatgttaaatttgaagcagcaagtctgttgtctgaattgtactgtcaagaggtaagaacatattaaggtttctgaaagcaaagtgtctctccgtgtcgctaagacatgacagcacattggtaaattggggttccgggagttggaatccctccggctttttttgtttttttggtcggggtgggaggacagggtctcactct

SEQ ID NO: 21176 - DNA, 2300 bp, Homo sapien
gcctgcctgattcctgggccaggaagccacctcccaccccctcagagcacagcctccccctgccgtctcaggtctggctgcgtgaagaccaagtgcagctccagcagggtctggataggcctctcctgggccttggtgttggacccaacactgggcagtggacaagcctcagtcccacagctgcccgcctggctgtgccccatgccccaaaagcctggctgattcatgggagtgcggcaggggcggcttcatcttgcaggaggtggccctggcagaaggggaaggcagatgctccctagaggaaggagcaggggtggctgggctgggcctggcttcctgagaggccaggctcaggtggatgctcgggtgtgggtgctgcacaggtgaagagcgtgaagccgtgtctgaagcagctgcagcagtgcatccagaccatctccacactgcacgatgatgagatcctgcccagcaaccccgctgacctcttccactggctgcccaaggagcacatgtgtgtgcttgtctacctggtgcgtccccaccagggcccgggccagggctgggggcgggggcagggagagggagagggccctggtaacccctgctgtctggtcttgtcgctaggtgactgtgatgcactccatgcaggccggctacctggagaaggcgcagaagtacacggacaaggccctcatgcagctggagaagctcaagagtaagtcaggtgctcggctggccacatggccacagcgacccctggcggacggcctggccagacgctagctgtaccagggcccagtgaccctgtgtgaccgcagcgcccagccaccctgcctggtgggtctcgtcacccctagttgataaatgctggtgtccaacgtcagagcagagcagacaggcctggggtcgggggtacctccctgactggtcaggtcccttgtgcccagtcatgctcagttgaaacaggtggtagctgcttttcccaattattatcagtgttgtgacagggacactcgggatgaggccaggatcagaactcagccctcactgaccaccagcatgtcctttggaggtcgtgagttctttccagatgctcaagtgtctaatccatccagggacctttgactagcacaaacccagagcagacgtccctggctggtatagtgtgcccattagtcggtctgtttgctccctcgtgagtgctgctgggggagaaggcatcagagccaaggcagcccaaagccggataggccctgtgcttctcttattcccatatgaggatggttgcttggggctgttgggaggtggggcccagcccaggtccccctacccgactgcctgaggctctgctgcatggtgtcatgatccagggtggtttccacatttctacatttctagaacctgccatgtccacaagctcttgagcacgtagggtgagggtgagggtgagagccaacccttcttggagcactgtgggaaccaacctctggctccagctccgtctccccacctggacagcaagacacactccttcactcagagggtgcagtggggactaggggagatgacggggtgggtgcctagccagtgtggcaggagacaggaacgaggtgggggcacggtgggctgggggtggcgcctcctctggcctcccctgcatgcttacccctgactctcacccatagtgctggactgcagccccatcctgtcatccttccaagtgatcctgctggagcacatcatcatgtgccgccttgtcacgggtcacaaggccacggcgctgcaggaggtaaggctggaagcaggaggggcgggaaggcccaggagtttgttgggtctcagcagtgtcagacaagagactgaattcgccaagtgcatactggcaggccagcccatcctgctgtctcgctgtcggccagcgttttacagccctgcatgggcaccactgatcagagaatctcatacaaaaaccagtggaggccgggcgcagtggctcacgcctgtcatcccagcagtttgggaggccgaggcgggtggatcacttgaggccaggagtttgagaccagcctggccaacatggcgaaaccccgcctctactaaaaatataaaaattagccaggtgtggtggcagacacctgtaatcccagttacttgagaggctgaggcaggagaatagcctgaacccaggaggcagaggttgcagtgagccgagatcgcactactgcactccaacctgggcaacagagtgagactccatctcaaaaaaaaaaacccaaaaaactaatgggccatggcccaaa

SEQ ID NO: 21177 - DNA, 2300 bp, Homo sapien
aggtgctcggctggccacatggccacagcgacccctggcggacggcctggccagacgctagctgtaccagggcccagtgaccctgtgtgaccgcagcgcccagccaccctgcctggtgggtctcgtcacccctagttgataaatgctggtgtccaacgtcagagcagagcagacaggcctggggtcgggggtacctccctgactggtcaggtcccttgtgcccagtcatgctcagttgaaacaggtggtagctgcttttcccaattattatcagtgttgtgacagggacactcgggatgaggccaggatcagaactcagccctcactgaccaccagcatgtcctttggaggtcgtgagttctttccagatgctcaagtgtctaatccatccagggacctttgactagcacaaacccagagcagacgtccctggctggtatagtgtgcccattagtcggtctgtttgctccctcgtgagtgctgctgggggagaaggcatcagagccaaggcagcccaaagccggataggccctgtgcttctcttattcccatatgaggatggttgcttggggctgttgggaggtggggcccagcccaggtccccctacccgactgcctgaggctctgctgcatggtgtcatgatccagggtggtttccacatttctacatttctagaacctgccatgtccacaagctcttgagcacgtagggtgagggtgagggtgagagccaacccttcttggagcactgtgggaaccaacctctggctccagctccgtctccccacctggacagcaagacacactccttcactcagagggtgcagtggggactaggggagatgacggggtgggtgcctagccagtgtggcaggagacaggaacgaggtgggggcacggtgggctgggggtggcgcctcctctggcctcccctgcatgcttacccctgactctcacccatagtgctggactgcagccccatcctgtcatccttccaagtgatcctgctggagcacatcatcatgtgccgccttgtcacgggtcacaaggccacggcgctgcaggaggtaaggctggaagcaggaggggcgggaaggcccaggagtttgttgggtctcagcagtgtcagacaagagactgaattcgccaagtgcatactggcaggccagcccatcctgctgtctcgctgtcggccagcgttttacagccctgcatgggcaccactgatcagagaatctcatacaaaaaccagtggaggccgggcgcagtggctcacgcctgtcatcccagcagtttgggaggccgaggcgggtggatcacttgaggccaggagtttgagaccagcctggccaacatggcgaaaccccgcctctactaaaaatataaaaattagccaggtgtggtggcagacacctgtaatcccagttacttgagaggctgaggcaggagaatagcctgaacccaggaggcagaggttgcagtgagccgagatcgcactactgcactccaacctgggcaacagagtgagactccatctcaaaaaaaaaaacccaaaaaactaatgggccatggcccaaaagcttgcacaccaaggggatagcgcacatggtctctggggatttggggggtcctttgacagtgattgttataccccaccctgccattaggaacactctacccccagtacccaccctcctgagagggcatgggggccctcagtaggctggaggtcctttacaacccagacacctgttggacagagtggaagagacgagtaacagacaagggtccctgtccacgatgggatctgggctgccctttgccctcatggtggacgtgtctgctggggctttgtaccccagtttggtcagacaggacatgggctcacccaccagctatggggtctctccattgctgctcagacgccaggtcccaggttgcagtcctgtgatggcagtacactctctcccggcagatctcccaggtctgccagctgtgccagcagtccccccggctcttctccaaccatgcagcacagctgcacacattgctggtgagtaaccctgtgacaacaccccgggagaatccagaatgttctcagtaagtaagtacctaaccagatccagaacattcccagtgaaggaccccctgacagcaccctaatcagaatccggaatgttcccataggtaatcatataaccttcccaggcacgatccggaatgctcccagtgagcatcttgtcccaccccacattggcttgggtctgaaaggtggggacagtgagcatattacctgcctt

SEQ ID NO: 21178 - DNA, 2300 bp, Homo sapien
atactcctccagggcagccgtgcaggccccgggcacaccacgtgtctctgatctgagccccctccccaggggccggccctgatgacaacaccaccttcttccagggcctgtactgtgtctctgtcaactgcatggacaacgcggaagcccagttcaccacggccctgcgggtaaggtgccggccctccttgctgctcggggcgggccacacttctgagtaaggagtcgggcgtggtctgtgatgaggacagcagtcgcgctaggtcagctatgcaaagccgcagccccagaggcaatgcacagtagtcagcccatgccagccttggcagtgacgcgctgtttatctggataagggacagctatggggccaggggcttcctgagctgacccaagggcagacgtgagggagaggtgcgacgcgtccggggacaccactttcatgcctgagtgggaacttttgcggcacccacccccaaggctggattggctcaagtgtcagctgacaactcagagccatcctgggttcagggctcccatggggagtggtggagctgggccatctcccaggtgctctttggacagaggaggactcttggtcctgctgggccggagagggtgaagcagcaccccaggctcctggccttagacgggggccccgccaggccctggaagaaggctggtgccacatcctcacggagcgccccagcccagggctggaccattgtgtccccacctcagcctcaacctcctcacaggaaatggaggctgtggacacctttttcctggtggtgccaggaagggccctgaggagaggtgtcagggagcagaggctgctctgtctgccactcgggcaaggtcaccagggagtcctgtgtgcgccctgactgttggacagggttcccattccacggcaccccgcaggcctgtgggtgctgccacccccgccactggcctcagagatgcacaggagccctgacatgcagacagcatgcttgggagggaagggctgactcagcacccactcctctgcctcctcacctcgctcccaggaccctggctcactctgactgcagcagggccaggaccctcctcgtggccctgccatcctgccatctccgtctccgtctcactccccacaagtggttgctattgctggtttggttccgcgtcaaagttcccaaggccatgtaccctaaggagtcctcaccccgaggccaaaagagagcctctttttcatggcccacccaggagtgatggagccaggatgcaaccccaacacccctaaccccaaacacacacgcctcctgtggccctgaaacaaacatctcccaccttgctacgtctcagagcatctgtgcttgattcggaagatcctctgggcctcctgggtgtgtgccaggaggggatctgtgcaggtggggtctgtgcttcctgggctcactccacctcttgcccagccccactgggaaccagggtctgagcagggcttgagctacatagattggaccctctcttgacgaacgatctcatttgccaagaagagccagggaccatggcccatccaccacctgtcatcagcagcatttctggtctctgacacagcatcacctacctggagcggggcctgtgctggccccctgtgggacaacagctcccctcttccccacttccccctatgaagagtgacccccgcctaggaccagcatatgccttgatggcagtggacacctgggtcccacaggttgctggctgtggcctggaggaagggtccaccaggtctcagtcctgagagacagtggaaaatggaccaaaacccgacatgttctgagggtaggattggggtggctggttttcctcttctgtgttctctaactgccccgtaacgcagatgatggttttataatgagaagaagtaatagctgtgttatccttgagcttaggaggcaaaacaagtgtgtttgaaatgaaaagaacaagtcttttccaaagtagtctccgtggagattgtgggtgctctgacactgccacatgggtcacagcacccgacccagccccctaatgtccccgcctcccattccagctcaccaaccaccaggagctgtgggccttcatcgtcaccaacctggcgagtgtgtatatacgggaaggaaatagacaccaagaggtagtaggtgacatgcttcatgttcggtatcctttctctctgttctcttctttttggggaaccagggggttgtcctgggcaccagcacatctcagcagaccccagggtgttcaccttttgagggatgggcggcacc

SEQ ID NO: 21179 - DNA, 2300 bp, Homo sapien
aaaaaaaaaaaaaagatgtttttgggacaggcacggtggctcatgcctgtaatcccagcactttgggaggctgaggtgggcagatcacttgaggtcaagagttcaagaccagcctggtcaacatggtgaaacctcatctctactgaaaatacaaaaattagccaggtgtggtggcacacatctgtactcccagctattctggaggctgagacaggagaattgcttgaacccaggaggcagagaggttgcagtaagccgaggtcgtgtcattgtactccatccagcctaggtgagagcaagactccatctcaaaaaaaaaaaggccgggcatggtggctcacgcctgtaatcccagcactttgggaggccaaggcgggcagatcacaaggtcaggagatcgagaccatcctggctaacacggtgaaaccccgtctctactaaaaatacaaaaaattagccgggcatggtggcaggcgcctgtagtcccagctatttgggaggctgaggcaggagaatggcatgaaccaggaaggcggagcttgcagtgagccgagatcccaccactgcactccagcctgggcaacacagcaagactccatctcaaaaaaaaaaaaaaagatatttttggccaggcacagtggctcattgcttgtatccctttgggaggtggatgggggagaatcccttgatcccaggagttcaagaccaccagcctgggcaacctagtgagaccctctttttttttaatttaattttattttttgaggccgagtctcactccgtcacccaagttggagcgcagtggcatgatctcagctcagctcgtggtaaccttcaccccctgtaggctcaagtgatcctcccacctcagcctcccaagtagctggggccacaggtgtgtgccaccatgctcagctaatttttttatttttggtagagactgggtctccatgttacccagactggtcttgaactcctgagctcaagcgatccacccacttcagcctcccaaagtgctagattacagcatgacccactgtgcctggccctagagatgctatctcttaaaaaaaaaaaaaagatattttccagccagacacagtggctcaggcctgtaatcccaacactttgggaggcagaggtggaaggatcatttgagcgcaggaattcaatatcagcctgaccaacatagtagatctgagatcccatctctacaaaaaccaaacaaaaaaattagctgggtgtgtggactcatgcttgtggtcccagctaattgggaggctgaggtgggaggatcacttgagcccaggaggttgaggctgcagtgagctgtgatcatgttactgcactccagcctggacaacacagtgagatccgtctcaaaaaaaaaaagttatttttctagattataaaatatgacatgttcataattaaaaggctgagaagcaaaacagaaaaaaattgcatgtctctgtcatccatcccttcccactgcccacgtctcccacgtggaggttttgcttgtcagcctgtttggtaatttttttttttttttttttttttttttttgagatgaagtcttgctctcttgcccaggctggagtgtagtggtgtgatctcggctcactgcaacctctacctcccaggttccacggattctcctgcctcagcctcccgagtagctgggattacagtcgagcaccatcacacctggcttatttttgtatttttagtagaaatggggtttcgccatgttggccaggcttgtctcaaactcctgacctcaggtgatctgcctacttcagcctcccaaagtgctgggattacagacgtgagccactgggtaattttatatttgcctttctccacacctctgtattggaagcttttttttttttcttaatggcaatgagtgttttgaagccacatctactctgtagtttaaccattctcactgtagccatttccacaggacagataaagcaagatgtgtgtcttggcctgtaaagtttcacgtgatctgagggctccctcagcatggatgctgttaacaaacgtggtgcccgcccaccgcaacacacagacacataactgtgtggtaagcctttgcagaggccagcgaatgggccctgcagctcaggccctggtgggccttggcctcagcactggggatgccactaccccgtcaaaacctgtagctggctccttctagaatgtgctatcaccctgccctcagcctctgagcacagtgagggctgtatgtccccactggacagtgcaagtggcctgggggtgtgtca

SEQ ID NO: 21180 - DNA, 2300 bp, Homo sapien
aatcaggactggaacccagacctcactggctctgatttgtgtagaaacccctggaagctgcctggagcagggcaaggagggttgagcagctggttcactgctgctcctggcccatgttttaggtgttgtgggggcatcttacagagctcttttgggaatccccctctgctccctgtgtccctgggcccttgtcgggtgacaagcggcgcccaagaactctcagaccaaggtcctggccttaagtgactccagatctcggggagacacagccagacacagccaagccagtcctgtgaggtcaggctggggacatccagaaaggtggcagccttgggggccgggatagtgttggtgcaggcagggcaaggttggctaggcaggggctgccacagagatgggcaccacagcagtcagagcacaagtgccggagcagacggctgaatggccacaatgggctcaggtgagggtccaggggcccagaagagcttgggatgccctgtcctgagcctgttaggctagagtgtccacaagagcgggacaccccccaggatcactcaagtcttcaaaaccagattctgtggggtaccccaagctggcattgggggaacctacccaggagcgctgaaggaggactctccttccccaggctgctttcagacagaggtccttggctttctacagggagcccagccaggctcacaataagccaggcctagcggaagagagcagtttttcttgctctgaggtttcaaaagggcttggtgaattttaaaaagctccaagacccacctggagctcactttcaaggtgcagctacagggcagtgtagagttgttgggctttgtgtctcaggaggagcatctctgcactctggagaagtatctggtggcgtcaaagccaggtctcaggagttggttttggggatgtgtccatcttggcttcccaagtgctccctgggctgccaggagccatcatctagggaattttccaggtcttacctgaaccccacatccaggcttacagggctttgagtcctcggtccagacagggtcagtccagcactgctggtcgcctgtgtagcacaggctcctgtctgccgtctccaggcccttgccatagcaacagggatgggcatttatgggccctgatggctcttactgagctcttcctgccacatcctgaggatgctagggctgcaactggggtggccctgtgcagtcacaaagcagggagtccggattggaggattcttacatgctggtgcccccagagcccctgcgtgtctgcgggggcctcccatgagagccaactcaattgtggaagacaaaccggaggggctgctgcccttctcagaacctgaaacctggaaccctatatgaatctgcatttctgatcagcccccattgtgggtctagggctaacggccatcagtgctttttctctgcttgaacaggtagaagcccccaaagttgtccattggccatgcccctgtgagggcatgagccagaagtgagggcagtttgtttttcagtgatacttcagagagggccatttgagatgggctctgaggtaagcataggagttcaccagacgcagaaggaggtcacaacctgggctgggttcagtaggtgggttccagattatccccaccccaacctgggctgggttcggcaagtggggtccaggctcctcactcccccttgctgctcttggttgacaggagagtaacaacatggtggtgcctgccatgcagctcgccagcaagatcccggacatgtcggtacagctgtggtcgtcagcactgctgagaggtgagtgcaatggccacccctcttccccagccccagcctggccctccccagagatcaaggctgctgggcatgtcctgctcagccttagctcggactaggcctccgtgggccgcagccccagttctagcatgggtagggggtgctcctcaggagaccctggttgagggcagtgggtgcatttgtggcatccgcttgactcggggtctggttcagtctctataggacacagaggctgcgacttggtatctggtagacttgggctgttagccgtggcgctctcagccttgcttcttcccggaaaggcagacagcagccatacctattgggtagggctggccagctagctctgggagcagggcgggcactcagcgggtatcattgctgttaccgcagctcccccatttccagattacgaaactaaggtccggagactcgcctggggccctggggaggtgacaggagacggggtgctccatgtgcagtgggctg

SEQ ID NO: 21181 - DNA, 2300 bp, Homo sapien
gcgggacaccccccaggatcactcaagtcttcaaaaccagattctgtggggtaccccaagctggcattgggggaacctacccaggagcgctgaaggaggactctccttccccaggctgctttcagacagaggtccttggctttctacagggagcccagccaggctcacaataagccaggcctagcggaagagagcagtttttcttgctctgaggtttcaaaagggcttggtgaattttaaaaagctccaagacccacctggagctcactttcaaggtgcagctacagggcagtgtagagttgttgggctttgtgtctcaggaggagcatctctgcactctggagaagtatctggtggcgtcaaagccaggtctcaggagttggttttggggatgtgtccatcttggcttcccaagtgctccctgggctgccaggagccatcatctagggaattttccaggtcttacctgaaccccacatccaggcttacagggctttgagtcctcggtccagacagggtcagtccagcactgctggtcgcctgtgtagcacaggctcctgtctgccgtctccaggcccttgccatagcaacagggatgggcatttatgggccctgatggctcttactgagctcttcctgccacatcctgaggatgctagggctgcaactggggtggccctgtgcagtcacaaagcagggagtccggattggaggattcttacatgctggtgcccccagagcccctgcgtgtctgcgggggcctcccatgagagccaactcaattgtggaagacaaaccggaggggctgctgcccttctcagaacctgaaacctggaaccctatatgaatctgcatttctgatcagcccccattgtgggtctagggctaacggccatcagtgctttttctctgcttgaacaggtagaagcccccaaagttgtccattggccatgcccctgtgagggcatgagccagaagtgagggcagtttgtttttcagtgatacttcagagagggccatttgagatgggctctgaggtaagcataggagttcaccagacgcagaaggaggtcacaacctgggctgggttcagtaggtgggttccagattatccccaccccaacctgggctgggttcggcaagtggggtccaggctcctcactcccccttgctgctcttggttgacaggagagtaacaacatggtggtgcctgccatgcagctcgccagcaagatcccggacatgtcggtacagctgtggtcgtcagcactgctgagaggtgagtgcaatggccacccctcttccccagccccagcctggccctccccagagatcaaggctgctgggcatgtcctgctcagccttagctcggactaggcctccgtgggccgcagccccagttctagcatgggtagggggtgctcctcaggagaccctggttgagggcagtgggtgcatttgtggcatccgcttgactcggggtctggttcagtctctataggacacagaggctgcgacttggtatctggtagacttgggctgttagccgtggcgctctcagccttgcttcttcccggaaaggcagacagcagccatacctattgggtagggctggccagctagctctgggagcagggcgggcactcagcgggtatcattgctgttaccgcagctcccccatttccagattacgaaactaaggtccggagactcgcctggggccctggggaggtgacaggagacggggtgctccatgtgcagtgggctgcctggggctgctgcctcaggatgggcattgggcgtcctgccccaatgagcgcctgtttgcctgagggctggccatgggctccctggagggctggcgagaagcctggcattgggctttcactgcccagccagccctgttctgccctatgagggcggctggcgcatgggctttgtgatcccaagacagggctcaggtccagtgacgtgccaggcacccagagatccaccagtgcagctgggacttgaccttagggctccatctgcaccgagtgggagggcctgggcagtgacagggcaaggcgggcccccatgctcatgtcccactctcagacctgaataaagcctgtgggaacgccatggatgcccatgaagccgcccagatgcaccagaacttctcgcagcagctgctccaggaccacattgaggcctgcagcctccccgaacacaacctcatcacggtacgggtgtgggtgttaggggacgggatcaggactagcgggctccccacctgcaagaggaaggggcaccttggc

SEQ ID NO: 21182 - DNA, 2300 bp, Homo sapien
cacacaggtgcatgtgcaaaggagatggcctgtttagaggtgaatgaggtgggagcaccagatagttgtttaccccctttccccttactctattcaggagcacttgaccaagccataattagcatgctttgcacatttccaatctgaaatgattggcaaagaaatgcccgctctcttgttccagttgggtacctcaggcggggtcactgggcattttgtttttcacccagcatctgtggactcagccacacaccggcctggcagacagctccccagtgcagcaactcccatgggcccaagggattataggcaggcttggagctcagaacttgacaggggacatagtggttttctttttcttttcttttctttttttttttttagacaaggtctggctctgtcgcccaggctggactgcagtggctcagtgtctgctcactgcatcctccacctcctgggcttaaggcatcttcccatgtcagcctctagcgtagctgggactacaggtgctccgccacgcctggctaatttttgtattttttgtagggatggtgttttgctatgttgtccaggctggtctcgaacttgtaagctcacgcaatccatccacctcggcctcccaaagtgctgggattacaggcatgaaccactgcacctggcccctgcagacatagtggttttctttttaatgatgttaattagtaggggcactatgggtgggttgtctggagtttcccttgtctagagttagatgtgatgggagctcagggctcatacccagccgtgggtccatataagtcttcgtgtgtctagcttgggtgctccaggaagtgtatttgggatgtctctggcttctattccacaaacttagaggagaagtttgtacccaagatgagctagtcatctccattcacacaacaagcattccttggcttatggctgtgagacaaggctagagtccccgggaggtactgttcttctgcagctaagagctgggatcaggccggcagacttgtccatctatgacataatgtgtggccgctgctgttacctcaccattccatgtgtttccagtgctttttaatttaatttttatttttttgagatagaatcttgctcttttgcccaggctggaatacagagatgcgatcttggctcactgcagcctccgcctcctgggttccagtgattcttgtgcctcagcctcccgagtagctgagactacaggcacacacccctacccctggcaaattttttttgtatttttaatggagatggggtttcaccatgttgcacaggcaggtctcgaacttctggccgcaagcgatccacccgcctcaacctcccaaagtgctgggattacaggcgtgagccactgcccccggcctccagtgctttctttatgcggcttatttgagaagcggagggaaggactagttggtagtgaagcatgtcagtggcatggctgagctggggagcagagtttcagaaccatgctttgtttggcaccatgggtataccaggctcatgtgctttttttctgtacacgctttggcatgtgatgtgtgtggctctgccttgaggacattatgctgagtaagagaagtcaggctcaaaaagacacacttatgattgcacctatatgaggttcctagactctcaaattcttaaagacagaaggaagaaggggggttgccaggggttgggggcagagagatgagagtgagtatttaatggggatagagtttcagctggggaagatggtaagttctggagatggatggatgatggttgcacaacagtgtgactgcacctaatgccactgaactgtgaactcaaaatggttaagatgtaaattttgtgtacgttttaccacaataaaaaaatgaacctttctgaattcagaaatattctatacctttatgacaacatgtattctgtcctctcagaattagcttggggacaaagggacaaaggcacacacactcatttcctagcttgtgctaagtactgggggtgggggtggggttaaaaaaatgcacgtggttctagaaggctcttaatgacatcatcttgggatcacaatgttagagtgcggatattctatgggttttcttcagtccctggacaggtggggtcatcctaggacccctgcaatctttaggggatttagggagaaacagtgtccaggaacatctgaggtctctgttcccgtgcattgcttggggattgaaggtatttctttctttctttctttttttctttttagatggagtcttattctgtcgccaggctggagt

SEQ ID NO: 21183 - DNA, 2300 bp, Homo sapien
tttgaatgcctgtgttgcgttcttcttagtatatacttaggggtgcagttactggatcatatggtaactttctgttaatctcttttcaggaattaccagactgttatccatggcgcctgcactattttacattccctgacacttacacagggctctcaaactctttggagacaagttcagactcaaagtctgtgccagtttcctacagagagttgagacttgtcagagcctattacctggtgctgttgtgctgtaactactatttgggggatgtcaggcattgacagaaacagagggtaggactagggactcagagtcacaaagccacatggctctcatcatgttggctcacctcctttttggagataggctctcgctctgtcacccaggctggagtgcagtggtgtgttcatggctcactgcagcctcaacatcctgggctcaagtgatctacctcagtctcccaaatagctgggactgccaggtgtgggccactgtgcccagcttgagctcaccccctttgttgagggggaagcacccacagccagcccagggaagtgagtgactgcctcttgtcctgcagcccagggcattgtttgagggcagcagggctggctgtagtttctcctaggccccaggctgggtacccacccctctgcctggccctttcttaactcagaagcacatggtctgagcagtaggtacttgttcaatgaataaatgaatggaggaaacctccctcttctctgttgccagccagcagggaagacccagccatagcattcaggcagtcagtttgggagttcagaagggaatttccagaggccaccccaggttttcctttggcctgtgcttgaagggacttgatagaaaaggacagtctataaacagtcgtggcacatgatacttagtggtcaaataggcggaagccacccccgaataattatttcttcaggacttataaatgtgtcagcttgtgtgcactttttgttgtgggtgtgtaagacagcccagcatattgatagattttaggttttctccacaaaatgcaagtttcacccactcttgggtgtgtctcactcagcactagcccacacttgctttaagtggaaattatggactgtgattggctggggtgtccccattcctgtcacccaggaccacatgagcacagtggagggagcagggccggaggagggctggccctcaatgtgcccagcagctccctcccatgtctgaggcacacagtctacacacaactcccacttgtgtgtacatttattcttatgggcacaggggcagtcttgcctgttcatggacttggtgtctgcccttgaatttggcctgtcaggtcctctttgttaagcaggcacgcactgcctagtgctgggtgttaaggatcaaaaaatgggtgtgactgtagaaaaacagattgcatcacaggacaggtaatgcacatgggcctggaccaaggtgtgaatgatgctcagtctttctaatataagaatcctgcacgttggagcaccaccaagacatttctgggttggcaagcacatggagtagacactgttctagtgatgggagtcaggtagtgccgtggtagttgcttttggaattcacaacttctctcaggggtatttgcaacatctagcaaaaggacaagtggtcaggtgcggtggctcactcctgtaatcccagcactttgggaggctgaagcgggtgggtcatttgaggttaggagttcgagaccagcatggccaacatggtgaaaccccatctttactaaaagtacaaaattagctgggtgtggtgatgcacgcttgtaatcacagttacccggggaggctgaggcaggagaatcgcttgaacccaggaggcggaggttgcagtgagccaagatcacgccactgcactccagcatgggtgacaaagtgagaccgtatctcaaaaaacaaacaaacaaaaaacacaaaaaagcaaaaagacatgtgtttactctttgctccagcaaatccacttctggaaatgtatccgaaacatggtcagaaataaggaaggattacaaggattgtgttcattacaacactccggaaacaaacaaagctgggaatgacttagatgtgtcagtgttcagactgggcaacttgtggtggtggctctgcctacagggtggtgcctgagcccctgagtgaagggaggaaggagtaggtgatgtcttcatttgtggtggtgatgggatttctagttgaaatgacaagcagaaaaaagaacaatgtaaaggaagaagagatggagtgtgc

SEQ ID NO: 21184 - DNA, 2300 bp, Homo sapien
acatgtgtcattgcttgggctcctatcttacgtcatagatgaagttttggagtactgtgtccctaacccttatgtccataagccctgtgtttttatcacatgggtttgcatcccgcagtgtttttaggagtgctgcctctgttgcgctacagcagaacttaaccatactttgaaggcaaaggcaaacaccaaaaggtttgctctcattcgtgacagtaaagtcgtaatcacttaatatctcatctggacctcttggtgtgagagggcaaggtcaagcccaaattgtacaggtccagtgctccccatgtcctttggaatcttcaggtctgactctttgagtggttgatggggccttctgatggctgactgggtacttttgtgccttggtttccccacctgcaaaaaggcggctgatgagagtatttaccttacaggtggttgtggggtagatgctcaatcagtgttgggtgttttgcacttaaaaattagaagatccccatgcttctattaattacaaaggagcaacagatttggatgaaaccctgaggatcccagagctgaaagtgagtttgaagtgtccgatccagtccttcaactcagagcactcctatctgtgacacctctgcccacgcatccagtatgtgcagcacacctgctctgtgactgacactcttgcagaagtggggccacttcagggacatggacaaggtgttgtacctgctgtcacagagcctgttatctggtgagtgattgggacattctgagggctcataccttctggctgcaggttcttcccaggggcctcccagagcttcttccatagccccaggcagggcaagtctagattcagtcttgcctggagacatctgaggatggctgttccatcctcctcctcacatgtatgcagctctcctttgagccccacctgtgcctgtcacttcaggtgaaagcagtgtaaacatgattaacaaggccaggctcggtggctcacgcctgtaatcctagcactttgggaggccgaggcgggcggatcacgaggtcaggagatcgagaccatcctggctaacacggtgaaaccctgtctctactaaaaaatacaaaaaattagccgggcgtggtgatgggcgcctgtagtcccagctgctggggaggctgaggcaggagaatggtgtgaacccgggaggcggagcttgcagtgagccgagatcatgccactgcactccagcctgggcaacagactgagactgtgtctcaaaaaaaaaaaaaaagattaacaaaaggccccttgcacactgtggaaggcttatcagagtggccacctagacagaggcatggtagcctgagttcagacctagcctggactttcacccagccagacttcagttgtgcctgtaccttgtgggatgacacatgcccgtctccaactcatgcaggctctcagtgagaggtagttggctccagccagcttgcacctccccactgctggtcttatcctaggaccactgcagggagacgatctctcagtttggggtctttgaaggctcagggagctcctagccagctgactaggctggggtccatcctgataacatgagagagagaagatgtctgtatctctggtgtgtctttacttttcaggccaccaagggttaagaacccagcgtcagccagtgagtagtagacatctgttctccttttgagaaagcctgtagttcaggactcaccacggctttcccttccttggcctgaaaccctccctgctcagctgcttggcgcatgctgttcccctgcctggaacgtctcgcctaattccttttcctgccctggcctcagtctgggagacgccatctcagtccccatgtcttggagttttaaatgaaagcactttacttgtttgctcctctttgccctgtagggcaaccctgggaatcacatgcttcatgagtctaatttacagaaacgtaggcgtaactcagcagtgcataccaagcccatactgtttgctctacactgaaaatgaagatgaatggtgaaaaaaagtttctgccattgagagcttaacattgagttgcagtgagagatgaagctcctgagtggcacggagattgttgccagggctctggtgaggtacgctgtggcctggtggttgtggccactcagggaggcttgtggcctatatagaaggcgggctgtgggaatgagctggggggtttgggttgactgtttagaatttgagagtctctagcatatggcacagaaggtagatgatttaagctgcgtggacatcttcgataaacact

SEQ ID NO: 21185 - DNA, 2300 bp, Homo sapien
acagcatgtggcacacagcaggtttagggggatagtcgaggcccaggagaggccggtgatgggcccggagatgccttggggggcaccggagcccatgccgccctcccggcagtggcttcttccgattgcctcctcagcaaatgttctcatgtcaccaggtgcgcctattcttagccgcacgtcccttcacctctgtacagagcctctcagatggggagggtctgtccccacccactggaagtaggatgggaagagcagaaccaaggggcgggtgggctggaaacaggcgccttggctgacagataaaattaccaggtctgcaggggcttttgttggtgggcgtgttcgctctttcttccctctttggcacagtttgttcttgcccaccctcctcagacaagagcaaggctctgggcagtgtccctgcctgctttcgaaggtcaggttcgagtgcagagaagatggctagtcctggactgacccaggcaggtagtttcatacacctgttgactttttttcttttttggagacagtcttgctctgttgcccaggctggatggagtacagtggtgtgatcaaatatctttattttattatgagacaagagtctccctctgttacccaggctggagtgcagtggcatgatcttggctcactgcaacctccatctcccaggagatactcctgcgtcagcctcccaagtagctgggactacaggcgcctgccaccatgcccagctagttattgtatttttagtcaagacagtgttacaccatgttggccaggctggccctgaactcctgaccttaagtgatccgcccgacttggcctcccaaagtgctgggattacaggcgtgagccaccacatcctgcccacccgtgaacttttatccagtcctttctcttgtctttgtttcctgagggtgggcacaggcagtcagtggcagagaaggtggtctgctcctagcgtggctgggggaggctctgaggggaaggaggaggggaactggctggtcagaggtgagggaggcctgggtttggtcttggttgctgaggggacaacaaaccagcaggccggtctctgggaacctttcttggggggtgggaccctgggaaggcatcctgcacaccctgtgccccacagtgtggcatttgcaagtcattgggtgtgtccattttctgggggtggggtgcacagctttcatcatatttccagaggggtcctcagcccctaaaagcaataacattggcatgtgggcagttctgggtttcagggagagccctatccagcagttgtggggctggtggagacagtcaagggtctgctcctgggatccaggcaggactgtgaggtggcactggagcggtgaggactgggtggagggcaaggggaagaggttggcctaggagctgcttcccccatcgccccataaggactcggggactacctcaaacattagcatcccaggggagcacatgcagagaggctcatgggggtgctgcggtgagcaccctcttaccctgtgagaaggcagtaggccaggccacagccagaggacagtggccctgctgggcagtgtggtgaccaccagaacctggtgacagccacatgggtgccctcacattcacatggcggagcacagcaaactatagattttaagtgtgtgcggtttatctggtaaacctcggtgcacatgtgcagatgagcagccactacctagggtggtgtgtttctcgcgcctctccctgctgccctggcttctgagagcctgttatcatggctgggttcacttttgttaaggacgccatcgtcaagggtactggttagtgcagttgacaggacctcgggcttcggggcgctggggagccttcctctgggcaggcgcacggagcgccctgactgagtttttgtctcccaaagcccaccccagcatcactgaaggggacaacagccacctccgctcaggccaactccacccccactagtgtggcctctgtggtcacctctgccgagtctccagcaagccgacaggcggccgccaagctggcgctgcgcaaacagctggagaagacgctactcgagatccccccacccaagcccccagccccagagatgaacttcctgcccagcgccgccaacaacgagttcatctacctggtcggcctggaggaggtggtgcagaacctactggagacacaaggtgagtggcctggacccagccgggctgcttccgcctctggcctccaagggtgctgccccgtgggttctttccaacacacagcagaggctggggcagggc

SEQ ID NO: 21186 - DNA, 2300 bp, Homo sapien
ttgtgacacacaggcagaaccttccagagcctcaagtgctcccagcttctgaggagggagagggacagcccaccccactgcccaggggcaggctcgcatgatcaccctcttcaggcagcgtgggagtgcactgtgtcctgggggatttaggaataaaaagacatctacggggtgatcacagcattggagacggctgggcgggtggatctgagtggccgagttggcccccagggagcccctgctccccagacatggagaccaaggacgtttctgcccacaggttgaggttggggtgacacgagtaggccaggaggctgagtcctctcctggtgactgcatcagactctcagagcagaggagtcggcaggactgtgaggggcccagggcaggggcagggcctggcagcctcagagccttcccagcacagacttgggagcagcggggtgggtgtgtgcagagaagcacctcccgcgcactgcccaggatacagagggaggagggcatgggggccaggtcgagctgtgcccccagcacctggggttgggaagatgctctccccactctcttagggtactttggtgcatcaactggtgcccccatgtggttgcacccagggtccccaagaggcagagctctccacacttgcgtggggctgggcctggcgcagcctcagagtggccctcaaatgtagagttgcttgtaacccactcccttgcccctcagtcgctctcgtaactcccggccacaggatggtaccgagactaactgcagcgtgccccaagggcatggcctccagctcccagctgcaggagggacctgggggagctatggggaggtgaggctctgacacagcccggctggtgcctttggtgcctccttttcgacaaggtgatgtcggcaaaagagccacctggggctgctgtaggaaatgaggattgggggccgagttgggaccagtgcctctccttgcccctgcctgtgcgggcatccgctctcccagaccagtctgtctctgccgttccctcatcagggctcagtctccctctcctgttgccaaggataggacctcactgtgggagagactttgagccctgctggaggcatctcctgacacctcccagagcccccagcctcgcaccatgtctggttctggcgccgctcacgctggccatgggttggacgtgtgcaaggagatgtgccgttgtcaccagagcatgtaagctgcaggtggcggtctcatgggtcaggggcttagaaggggccaggccagtccaggcaggagagggaaggccgagagtctcgccacatccatctccccaccccccagcccctgcagtcctctgacattgtctgtgatgaccaagagcaattaaggcccctaagtgctgaacacaaaaaaggtcggcacaaatacgcccagacctcacgcccgagcacatgcttcatgtacacttccccagctacctcttgcagcccccaaggagactatgcattctgtcccccagacaaggggaccaagcccttgctgcccctgtagcctgctgcccaccttgtgcagtgggtgcagcccaaggcctggggcctatcccgggtgtgagtcctgccctgccactgagtgacaatgtgatctacaggtcacttggtctctcttggcctcagtttcctcatcaggacatggcgcatttgggggttccccgtcctaagaatgaactgagtacctcagcacccacaaagcacttgctgggtgacttgcctgtcacccttattaactcgtacacaagcaagggtgcccaccacactgaggcagggcttggcatggtccctgctggtcctcagtggtgtcatgtccagcgatgggtgggacaggaggccgacgttttctgaagctgttcggcgttggccggccccatgtccacatgtcattggtgcccagtaggcatttgcagaacggacagactgtggcgactgagactccagcatcctgggctgggggcggccagggccctgactgtcgtcctggccctctgacgtgagccatgtgctgtctgcttgcagcaggcaggatgtcggccgccactgtgctgtcccgggagccctacatgtgtgcacagtgcaagacggacttcacgtgccgctggcgggaggagaagagcggcgccatcatgtgtgagaactgcatgacaaccaaccagaagaaggcgctcaaggtggagcacaccagccggctgaaggccgcctttgtgaaggcgctgcagcaggaacaggagattgagcagcggctcctgcagcagggcacggcc

SEQ ID NO: 21187 - DNA, 2300 bp, Homo sapien
acaaacaaacaaacaaacaaacaaacaagagatgaggtctcggctgtgatgcccaggctgttttcgaactcctgacctcaagatatctgcccgcttcggactcgcagtgttggggttacaggcgtgagccaccgcgcctggcccttggctctgccttttggcaagtgacatccatgtgggcctcagtttccttatctataaactcctactttacgtggagacaggccaccctcgccccacccctggctgttccattcttaaaagatgtggacggcgaggcgctggggtccacttgcttcccagcccatcatcacagcgacatcacgacccggggacaacaaagctcctttgagtttgcccatactggggagctcaaaaggtccaggctcgaatcctcccgactcccttttgagtcttggagcaataacctcaacatgcgtgactctaaaatagggtacccgcgcctgccttccccggatggagcgatcgcttctccactagtccgcaaatgggggccaccgttagagccaggtgcgaggaacagcgagtttattgcaggttccaaccgggaacctggcacccacggctggttgggaagggacgccctccgcgcagaggctgagagttccgcgcaggcgcaatgcttccgtcccctctggtctcgccctctcggggcctggtcgcagggaatcgcggatgcgcatgcgcctccagctcccgggatcgcggggaacgtggattccgaacaagggcaactgcggactcccccgtgggaagaaagggagggaagcggaagggaaaaagcgcatgtgcagcagcacgcggcagcttcgcatattccctcgaagcgcgcctcttgcgcgtgcgccgccctggcccagtgcccttggctgcaggaatggctggaaccacccggcttctagccggagtccccggcgcgcagccagcagttgcgcgctacctggcccgcggagggcctggcggacgggctgaactgcagcagctcggcgatcagggccttgcagcgctcggacagctcgaggccttcgggatagagcacgccgcgtttctggcgccggggcaggccggcgatgtccgagtcgtcgaagggcatgcacccggtgaccatgacgtagagcacgacgcccatgctccacacatcgtacttcttggggtcgtaggggatgcccaggagcacctcgggtgacgcgtaggcggctgagccgcagtaggtggtgctcaggtctgggtagccatgggcctggcggccgaagccgaagtcggtgagcttgacgcggcgctcgtccgggctcagcagcacgttttcgcacttgaggtcgcggtgcaccaggtgatgatcgtgcaggtagcgcacggcgccggcgatctgcgcaaagaggtcgcgcgcctgaactccggggatgcgcccgttgcgctgcacggcttgcagcaggtcggtggcggccgcttccatcacgatgtacagtttcccgttgcacacctcgatgaactcgaagacgtgcacgatgtgcgggtgtcgcacgccccgcaggatggacagctctcgcggcaggaacttgttgacgaagtccgggggcgctcgccgccggtccaccaccttgatggccacggtacccttgtacttcttggatgtggccaccttcaccttggagtagctgccctctccaattgtgcggcccagcttataaccgagttcgctcagaagtttgtctcccgacatggtggcgcctagggcgcacggggggcaggaggcggctgctgtcggggggcggccggactccaatctcgggtctaagccatggcgcttggcacctacacccccgcacccccatgtgcccactgccagacattggccgctgttgtgccttttattgccccgtaacaatttttgccttgtgaagtgactgcgggcgtcactccgccttagggtgggggtccgggaccccgccccggggccaccctagcctccctgctttgtgactcataatcatcctgaatggtcagtttccgatgagaggccactagcaagggatacccatcaccaccagggagcagaatccgttccagggattggggtgagtccgacttcgagcagcagctgccccccaacatcatgtacccagcccgtgactacgtggagccctgggcttcgcgtagagtccctagacggggcgaaaacgggaaaaggggccttaactggggcacctggctcctttgagagctcggagtttctgactggcctgcgcaacaccccagaggcaaggtgaacgcgagggcct

SEQ ID NO: 21188 - DNA, 2300 bp, Homo sapien
tttttttaatttttggtagaggtgggggtctcactatgttgcccaggctggtcacaaactcctgggctcaagccatcctcccgcttcagcctcccaaagtgtggggattacaggcatgagccacctggctcacaggcaatctgtttttgtagagcccccaggctaagaacactttccatttgtaaatggttgtctcagtaactgaaactttctggccagccaaacccaaaatacttgtcatctgtcccttttatagaaaaagtctgccaatctcagttctgggatacaagaaaaacaagaggaggttggccgcggtggctcatgcctgtaattccagcactttgggaggctgaggctggaggatcacttgagcccaggagtttgagaccagcctggtcaacatagctgcaccctgtctctacaaaaagtagaaataaaaaataaaaaaaccaagaaggggctggggaggacttttcacctcacactgatttttctactgtctgaattattacgtttttaattaccatgctcatttttgtgtgtgtgttaaaattgaggaataatgtgcataacatgtaatttaaatgtaaagtttgatttgttaagagacatgcattctgccgagcacggtagctcatgccgatagtcccatcactttgggaagccgaggtgggtggatcacttgagcccaggacttcgagaccagcctgggcaagatggcgagatcccatctctatagaaaatacagaaagctgggcgcatgcttgtaatcccagcttctcaggaggctggggtgggaggatggcttgagcccaggaggcggaggttgccaagaaatcactccagcccaggcaacagaaccataccgtcttaaaaaaaaaaaaagaaatgtatgtattcactcttagattacgtttaaaagtttctatttgtctgttaacctggggactgagtatgggcgccttttaagttctctttttcaattttctgtgctgagcccgataacaaaatttaacgtgttacttaaacatttgaaaactttacgccgggcatggtggctcacgcctgtaatcccagcactttgggaggccgaggtgggcggatcatccgaggttgggagttcgagaccaccctgaccaacatggagaaaccccgtctctactaaaaacacaaagttagccaggcgttgtggcacatgcctgtaatcccagctactcaggaggctgaggcaagagaatcgcttgaacccaggaggcggaggttgcggtgagccgagatggcgccattgcactccagcctgggcaacaagagcaaaactccgtctcaaaaaaaaaaaattgaaaatttaaagaatatggattcctgtgacaccatgcaggcgggggctgccagcagggaaccactgcatagaacatcttgtaaattccctccaggttccgggttgcggcctcagctttgccttggggagccgcggccttctttgggcctcagtttccccatcttagaaatccaagggtggctgagggccagagcacaggctatgactcagtttaacccactgtaaaacgtaaataactagagggaccgatttcctgggctgttacgagaaggaagaggagctgggaaagacctcaacaaactgcagcacttagcgttattacagaagctatgatggatccccgggctccgcctccggtcacaccgccgggaaaactgaggcccgcctgtgtccccggaaccccgcccccgagccccgagtgcccagactctgagaccccggcgcagagtgatactgacccgacagtcctcgacgcggcaagttccgtttgtagtcgatgggcccatagccccccggcggaggcatgtcctgcttcacctttgacgccgccatactcgcagtatcccacacttccggtcccgggcggaagtgacttactgccaccgccatgatgagtgtggcggaagcacttgagatggtccgcggcacggctaggaagtcccggacagtagtgtaactatccgaccgcgcgggaaagctctggcggcggaccctgggtaggaatgcgctgccgggctgcagctgaggggtctttactcctcttttgcccagacagggcgtgactcgccttggttcttgcattataggccctcgcgttcaccttgcctctggggtgttgcgcaggccagtcagaaactccgagctctcaaaggagccaggtgccccagttaaggccccttttcccgttttcgccccgtctagggactctacgcgaagcccagggctccacgtagtcacgggc

SEQ ID NO: 21189 - DNA, 2300 bp, Homo sapien
ccaggcaggactgggagatgggggtcattgcagggaacttggaaactgccagaaagcagggagaagaaaggaaagattgtggccccgcctgccccagcctcacacactgattattttgagatgaaggggacgtggttttgtgaggcccagagccccgtgatgaagtcaccccctcttcgtcgcgatcatcaggcagagttatttttaggataaaaaaagtttttaattgaaaagaaagtagaaagccaacagtcttgtgggcagtcacccgtgcagctgcctgcacccgccctcctctcaggctcctggtgggctctgcccacagcccttgcccttcccgcgaccctcgccctgccccctgcctgcctccccgcccccctccgcctcttcccccagcagcaccctggcccctgaggtctgtgctgcctgtgctcccccgacctagcctggtctgacctgagtgtgggtttcgggctttcacaggcgcctacaaatcgaggacttcgaggctcgcatcgcgctgttgccactgttacaggcagaaaccgaccggaggtagcaccgcaggggccaaggttgggaggtcactggccggaaggccccaggctgcagggcctgacctgcatccccgaaggtggccagaatgcacgtgggggccatcgccctgtgccgtcagctgcatcctcaggcgtggagacttagtggagacccaagggggcgaaccggaaggcttcctggaggaggaggcagcactggggttggggcaagagaaaagctaggagttggctgggggaaaaggagacagggtcggagggaggcttgaaggggtgctactaggggccctaggcaggggcccctcagggcactgaggccccacccccaccatcggccccatccccacaggaccttgcagatgcttcgggagaacctggaggaggaggccatcatcatgaaggacgtgcccgactggaaggtgggtcccggctgggagggcagaggtgccagccacggcagagacagggcctggggttggggagctcccacagctttctatagaaaccccaggaccaagggggtggtgggtgccaggtcccacaagggaaggctgtagcgcctgccacgcacaggggccactgatcctgggggatgggtcctagcaggctgtatatgggtggctgtgcctctacccataccccactgtccccacaggtgggggagtctgtgttccacacaacccgctgggtgccccccttgatcggggagctgtacgggctgcgcaccacagaggaggctctccatgccagccacggcttcatgtggtacacgtaggccctgtgccctccggccacctggatccctgcccctccccactgggacggaataaatgctctgcagacctggcctgcctgttttcctggggactgggggaaagaagggggagagggcccagctaggcaccaccggatcacatgtagcatggggacgcagcagatatgcacagggtgacctcaaaacacacctaggggctgcccctggatccactggcggcctcctctctgcctccgatatacctggactctcctgcctcccttttgaaaccatgcctgtcagcagcccacttacctctccaggctgggggcccctgggtcagctttgggtcagaccttctccacggaggtctggagagtggggggagccttgacctcccggatacaagtgatcctcccgcctcagcctcccgtgtcactgcgattacaggattacaggcgtgagccaccataccttgtgcagccctgccaattgtaggcatggcgagggtatttgtctgcggaggggctcctcgctccctgagagggaagctcagagacacggggatatctgcagggaaagtaagtcgggggaagcaaccaagattggccaggtgcctctgctgtgggctcctggcacgaaagggtgaagtccgtctgagtccaccgaccaatggtgacgcgcagcgccttcgcggcgcttcctgattggcgggcatgcagggtgggcgggagggaggagaagagggggcgtcccctccctccacggatgcgcttaaaaggcggtggcggtggcggcagcgcccggcgcccgggctcacctcggccatgagcagcgcagccggcccagacccgtcggaggcgcccgaagagcggcatttcctcaggtcagctggggagagggaagctggagacgggcatggttcccatggggccaggagcagcccgtaggaccggaggcagggtcatagctgggacagaatggggtccggg

SEQ ID NO: 21190 - DNA, 2300 bp, Homo sapien
tagtctgaccaattgtgtaggtcacccgaatattcagttttgctccgagaggtggagacggaccccagtcattcagtgaagtggatggcagagcttcacctccagctaagtagccacattttctggcaacaaataaccttttttttttttttttttttttttttttttggagacggagcctcactctgtcacccgggctggagtgcagtggcacgatctcggctcactgcaacctctgccacccgggttcaagcgattctccaggttcaagccttagcctcctgagtagctcgtactgcaggcacccaccaccatgcctggctaattttttgtatttttagtagaaacagggtttcaccatgttgggcaggctggtctggaactcctgacctcaagtgatccacccgcctcatcctcctgaagtgctgggattacggatgtgaggcaccgcgcccggcctggccacaaataatctaattatgtcactgcccctgaaaatcggtcaccaaagggtctcatagccccaggccccaaggcctccccgctgagtgtgccatcaaacactgcagccttaaaaacccatggaccccagatgcccccagtcctgtccacccctttcagcgtcctgaagcttgttccgtggctcccactgcctgaaatcagcccatcgcccccatcgaagtccttcatgctccattcccctttcttggttccctccgccttgggagctggggacgtctaggtccggttccgtgtcccacgctttggagcagtagaaccaacgcgcggccagcgcatcttctgccaccagagggcgcccgcgcctcgggctttggctcccacaccgcggcccgccaggcctcgattcaacccgcgcgtcgcacggtgaaactgagggcatccccagctcaaggctgcagacgctactcgggggtacggggtgggagggtggcattgggaccgggttcagaagcttggcggaacatttctggctccatctgaggctctgtctctgtgtgtctctgagtgtcccatcccactctgtccccagcaccgcggaggcagccgccctggagcgggagctgctggaggattatcgctttgggcggcagcagctcgtggagctgtgcggtcatgctagtgccgtggctgtgaccaaggtacctgacccctgacccccaaccctgaccccaaccagacggccaactctcctgagctgcatgactgctgtgaccagggtggttcacccctcaagaactccctttttgcttgggcctaccccagcctgatgggtaaactgaggcccagagaggctcatggctggtgcaggccagatggggacctgagacccctggtatcagagaaggccagggtggaggttattgcagggacagtgccacgaccctggaagtgcaacccctcctgcacatgtgacccgcctgcttctgccacctcctgggtcttgggcaccagggacatctgctcctgcgatctgaacacccctaaacaaccctgttctgcaggtggggaaactgaagctcagaggtggcgaggggcctgccctgggtcagagggggatggaagcagagctgcaacccaggtgtgtctggctctggagtaaacccccacacctcgaggggccaggaggatgacacaagggtgatagcaataatcatactatggagtgcttcaccgtgcagccagcagtgctgggcatcagtttcctctgcaacagcataataaatggtactgacgagtcagtccctaaacgtgaacgcctcagaaaactgtcccatacagtcgaggctctagcgtgactgcctcctcttcctcccctgccctcctcatccccctcgcctttctcctccttcctcctcctcctgccccctcctcttaccctcctcctcctttctctctccctcctcctccccttccgcccctttcttctctcctttctccttcctctccctcctcctccccctcctcctgttctccttcctccttcccacttaccctacctcctccccatcctcctcctccccattctctccctcctcacccctcctcctctttttcttcttattaccacggtatactttttaaaaactcaatgtttttcttcatgtggacttaaatgtttgtatttccaaatgaaatagatcccgggtgaggcgcccaaaggagaaggaaaatcaaaaccccagaaagaaacccagtagtcactactcgcctggcgctcagtggccaactgtctggtttttgcactgaaagccccttgtctgtccagaagcccctcagtc

SEQ ID NO: 21191 - DNA, 2300 bp, Homo sapien
atcccactctgtccccagcaccgcggaggcagccgccctggagcgggagctgctggaggattatcgctttgggcggcagcagctcgtggagctgtgcggtcatgctagtgccgtggctgtgaccaaggtacctgacccctgacccccaaccctgaccccaaccagacggccaactctcctgagctgcatgactgctgtgaccagggtggttcacccctcaagaactccctttttgcttgggcctaccccagcctgatgggtaaactgaggcccagagaggctcatggctggtgcaggccagatggggacctgagacccctggtatcagagaaggccagggtggaggttattgcagggacagtgccacgaccctggaagtgcaacccctcctgcacatgtgacccgcctgcttctgccacctcctgggtcttgggcaccagggacatctgctcctgcgatctgaacacccctaaacaaccctgttctgcaggtggggaaactgaagctcagaggtggcgaggggcctgccctgggtcagagggggatggaagcagagctgcaacccaggtgtgtctggctctggagtaaacccccacacctcgaggggccaggaggatgacacaagggtgatagcaataatcatactatggagtgcttcaccgtgcagccagcagtgctgggcatcagtttcctctgcaacagcataataaatggtactgacgagtcagtccctaaacgtgaacgcctcagaaaactgtcccatacagtcgaggctctagcgtgactgcctcctcttcctcccctgccctcctcatccccctcgcctttctcctccttcctcctcctcctgccccctcctcttaccctcctcctcctttctctctccctcctcctccccttccgcccctttcttctctcctttctccttcctctccctcctcctccccctcctcctgttctccttcctccttcccacttaccctacctcctccccatcctcctcctccccattctctccctcctcacccctcctcctctttttcttcttattaccacggtatactttttaaaaactcaatgtttttcttcatgtggacttaaatgtttgtatttccaaatgaaatagatcccgggtgaggcgcccaaaggagaaggaaaatcaaaaccccagaaagaaacccagtagtcactactcgcctggcgctcagtggccaactgtctggtttttgcactgaaagccccttgtctgtccagaagcccctcagtcccagtcttgggtcttgggctctgggcccggtgtggctgggatcgcaggcatgttcatggcaggtcaggactgcgctaagcctttggggaggatacttgaaaggggagtaatctgctgtctgtgtggttggagcttaaagtacagctggggctcaagagacacccagagtgcctgtcaggcggtggcactgtcatcgcatttgataaaggccaaactgagtctgggagagaaggggctggggccacgcagaatcagggcagggctggggccaaaatgcctggagagacagagtctgagagatacagagatggccagagacagatggagagagacagataacagagagatacagagacagccagagacaaatggagagagagacaaatggagaaagagagccagagacatacagaaagacagagacactagagtctgagagatacagacagacacagagacagccagagacagatggagagagacagagacacaaagagagccagagacacagagagtctgagagatacagacagacacagagacggccagagacggagagagacagagacagacagacagagacacagagagtctgagagatacagaaacagccagagacaggtggggagagagacatgaagagagccagagacatacagagagacagagacacacagagagacagagacacggagagtctgagagatacagagagacacagagacagccagagagagacagagaggccccagggcatcgtggctaaggttgggctcccctactccacagcctccaggaggggctgaggtctggaaacatgggcgggggtgggcccgcggtgagaaaggtggaagaatgtctgcaactcaggcggagaataaacaaaccgcactccgggcgacgggcagtggctggatgcacgtttttcctgcaccgacctggcagagcctgagaccgggcctctgcatctccagcggggaaactgaggccccaagaggcccaacccctcatccagaacagctcacctcctgtc

SEQ ID NO: 21192 - DNA, 2300 bp, Homo sapien
gggaggcggcgtgctgtctgatctgagtagggaggctgcaggctcagcctaggacagagagggtggctctgtcaggtcagaggggatggttaggaacctctagtctgagggtggtggctagggtcagagaaggattaaagtctgagggaggatccagtgtcttctggtgagtggccccagaatcaagtcagagataggagagaaggcaaggctcctaggctgaaagtggaggctcattcaagaggtgacggaggctgggtgcaggggtcacacctgtaatcccagcactttgggaggtcgaggtgggcgggtcacctgatgtcaggagttccagaccagcctggccaacatggcgaaacccagtctctacaaaatacaaacatttgctgggtgtagtggtgcacgcctgtagtcctagttacttgggaggctgaggcaggagaatcgcttgaacccgggaggcagaggttgctgtgagctgagatcgtgccactgcactccagcctgggcaatagagagagactgtatcttaaaaacaaacaggctgggcgcaatggctcacacccataatcctagcactttgggaggccgaggtgggcagatcacaaggtcaggagttcgagaccagcctggccaatatggtgaaactccatctctactaaatatacaaaaattagccaggcatggtggcgtgtgcctgtagtcccagctactcgggaggctgagacaggagaattgcttgaacccgtgtggcagaggttgcagtgagccgagattgcaccattgcactccagcctgggtgactgaagacagaggctgggtcagatggaggagggcgattgaatagtaggataggagcagaagcagaaagtctgagtgcagaagctctggtctgattgggagggaaacacctccaaggactgggagagacttgtctgagggcggaggcagagttctagggggcgacaagtctcaccaggacccatgtgccagagagaaaaggctgggtctgatgggggaggggaagtgggggtggggcagcaggactctggtctgagggcagaggctcagtgttggaggggagaggagaggaggcagggacaggatggactctaggctgagggcaggccaccctcccagttcccaatccccccggaccctcctccctcaggctgggacgcagagaccggcagcgattcggaggacgggctgcggcctgacgtgctggtgtctctcgcggcgcccaagcgctgcgctggccgcttctccgggcgccaccacttcgtggccggcaggttcgtgcccgatgacgtgcgccgcaagttcgctctgcgcctgccgggatacacgggcaccgactgcgtcgcggcactgtgaccgccacccgcggccacaccgcagggaccctcgccaataaacagccctcccaccaccgccgcctcgcctccgcctcctttgtgcaccgggcccgctgcgggggtgggcacactcgaagagggacttcacacggtccctgggtgatccaaggcggggagcatgagaagggcggtggagtgggacttcccgctggcctagaaaacttcagctagggctgggggcggtggctcctgcctgtaatctcagcactttgggaggctgaggctggaggatcgcttaaggccaggagtttgggaccagcctgggcaacatagcaagatcccgactctacaaattaaaagaaaaagaagaaagaaaactcgagccagaagaatggagggtagattcagggtgggactcccagactgtttggggtggcctaaagcctataggatcgaagtgagacgcgagacaggacttccagccacctaaagcgggtccgagcagcttgaggctggattccaagtgacacttccctcaggcagcttgggatgcagcttggaggactgagtgggctcggggagggagttccagcaggccacggggaacccaggacagcctgaggacggaggcacagccagacgcaccaaggggggcgacccagaggggttgctcgagcgccgtcacccagggccagggggcgtggcctgaatggggcgtggccagggcgggatctgcggtcgcatcccgcccccactctcagtcccagcggccgccagacccgccggagttggacccgagcacgccgcggagcccggaccctccctcggacgctctgccccggccatggcgtcgctgctgccactgctctgtctctgtgtcgtcgctgcgcacctggcgggggcccgaggtgaggcgcctccagcccccgcgcccagcccctg

SEQ ID NO: 21193 - DNA, 2300 bp, Homo sapien
ggttttaacctgcaccccgtgggtctccttcgagaccatttcctcttgtcgatctcccgtctccaccaagtggcttcaaatttttgtctctgctggtccctgaagctttcagtgcccacccctccaagttctctgaaggatactactttgttggggttgggggcaggttttgctctctcacccaggctggagtgcagtggcacaaacacagctcactgtagcctcgacctcctgagcccaacttatcctcccgcctcagcctcccaagtagctgggaccatgaccagctaatttagctatttttttaatttttatttttgtagagatggggtctcactatgttccccagactggtcttgaactcctgggctcaagtaatctcccacctcagactcccaaagtgttgggatcataggtgtcagccactgcacccagcctgaaggccactactgttcaggcctcctgggcagtgctgtgcttgtgggtgaccttttgaacaggcactggtctccgtggctcccatgcaatctattactttctgtcattggagccaagtgtcggtttccttcatcagagagctttccctattgtccagacactcggtcaatgtctttcatttttcactccctgccgtcccctttggagtctcccgacgctctccaatccagccataccagatggtgtttgaatttcctccccagcagcaatggagagaacgtgggccccaccctggaagggctcccagccagcaggctgaggaccttttactgagcccacatctggagactgtcctcatagcaaataggctccaggaggttctgtgactttggagaagagattcatgtccaggccattactttttttttttttttttttttttgagacctggtctccgtcaaccaggctgcagtgcagtggtgcaatcatggctcactgcagcctcaaattcccaggcccaagtgatcctcccacttcagcctctcaagtcccaaatagctgggaccacaggcgtgcaccaccacggggtctcactatgttgcccaagctggtctcaaactcccgtgctcaagtgatcctcccgcctctgccgcccaaagtgctaggattacaggcatgagccaccgcccagttccttttcttgtgcactaggagccttcgatgctgtgtcctaaggactagaaacaaagatgtgaggattcgctctgatttggggtacactgcaggggagtctctcagtaaacatccttccttcattcggtaaccacgtggtagcattttctatgcccagaactgtaatctgcgaagatgaataaacaagcgaggtcactcttcagctggaccttgaaaggtgactggaattgatttctgcagtggagaaaagcgctgcgttctgacctcctcgttgccatcaaccacgcacgcctgcgccccgccttagccaggtgaacggggcgtggaaagctctagaggaagagccaggggccccagtggcccacctgatggggctgaggatgcagggagcattagggggactgagcaggggtctggggcttggggcttctggaaatgaatgggggctgtcgatcaagctataagaggtgtggggttctgaggaggagggggtggcttggaggaagagttggggtgctctggggagtgagggtctctgaggaccgagggctttgaggagaagggggccctgaggaggagcaggaactctgaggagatgcgagtggggctgaaggaggcgtgcaccgcgcgagatgtgagggatgggggcctctggctggagcggagccagcgctgccctctctcaaggggaaggagggcgcttatgagaagtgccgttgcctcggcaaccccaaacccagtccaagcccggagagggggaagttcggggcgagtcccgggggcggtgcgtggcgccggttggctgacggagatgaaggggcgtgtctgtaggcggtgcaatacacgggttggctggcgatagcggcggtgggcgtggcttaggcgcgagcgagagcgggcgcggcgctcaggcagcggcggttggctgcggcgccagtggtagtgctccaggctcgacggcaccctcacagcgcccgcccggccctgccgctcatggccgccccgccgcgccccgcgccatcgccccccgccccgcggcgcctcgacacgagcgacgtcctgcagcagatcatggccatcaccgaccagagcctggacgaggcacaggccaggtgctgcccgcgggctcggcaggggccacgcagggtcgtggcagtgaggttggcggg

SEQ ID NO: 21194 - DNA, 2300 bp, Homo sapien
cctggggacacagtctcgtggccacttcagccgccagccagtgaagtatccccggggcggtgtgaggcctgtaacccaccagctgtccagtctggccctggtggcttccaagctgtgcgaggagacccccatcacatcagtgcccagagggagtttgcgggggcgggggcccagccctgcagctgcctcccctgagggcagccccctgcgccgcaccccgctgcccaagcattttgagattacccaggagacagcccggctactctcgaaattggacagcgaggctgtgcccagggccacctgctgcccggacgtccagcctgaggaagccgaggaccatctctgaccaccctggcaccttaaataaggaagaggcccagattgtgaagacggacccatatatccctacctcccaccacctagtggccaaacaccccgccaggagttcaatgctgggagaggtccagagggttcctataaggaaaaactatttaatacatgacctaggggaggcctaaaacccttttggggataatgtcccagagtccccccactagacacaggtcactgccaagcatcagggccactcgggctcagaggtcactcagggtcaatactcagggtcagtgcaggttatgagatccttggggtccaccctagtctctgacacctgggacaggggtgcttttgctactttggttgtggtcactcccccacacctgcctgcctccttcacggactcgaagtgaccttcctggaggaggtgggcagctcagactccacatgctggtggtgcctgaggtctgatggcctctaataaactgtgtcctatatgcccttgggtgcatctctgctaggggagaggccagcatgggtagcactccttgcccccattttacagattaggggaatcaaggcctcttttttttttttttttttttttttttttgagacggagttttgctctgtctccaggttggagtgcagtggcacgatctccgctcactgcaacctccacctcccgggttcaagcgattctcctgcctcagcctcccgagtagctgggactacaggcgcctgccaccatgcccggctaatttttttgtatttttagtagagacggggtttcagcatgttggccaggatggtctcgatctcctgatctcgtgatcgtcccgcatcggcctcccaaaatgcagggattacaggcgtgagccactgcgcccggcctcaaggcctccttcttgcatcatcaaacaccctgcagcacctacgtaaaggcagttggagctgggtcgcagcacccggctgagtcacgccagcccggccctcccggagctctgcgtccccgatccggtcctgcataatcaaatacagtataacaaagtaccgataaccgggacaatggggctgtgtgctccggaccgtgggagcccggggccgccgcagggaggccgagggaggaagccacagggcagggcagggcagggccgggctttgcagggggcagcgctgtcccagggtgaggggtacgggggcgggattgcaaaaccctagcgtgcgcccgatgatcagctggggccgcagaggtgggcctcgcacaggaggccgcggctcgctgatactgcgagctggcaaagccgaagctgggcgggggtccgggcggtgggagccaagtcggatcagggagtggcttgtaactcggcggccgattggacacgaagaagagagcggggtggggctgggagggttgggggtccggagcgggggcgcggacccaagaccacctggagctccgcccgggcagcgcggggtcacggcgggaattttcgggtcgccgagtgactcagccccgcaggctcgaaactgcgggcgcatgaggtgtgcaggtaccggggtgggggtcccgcgccggaaataggggcgactgaggggccgcgaggcggggaggaaacaggggggctgcggttccgggcgacaccgcccccgacgcggccgtggaggcggggctcccccaggtggcggggcggggcagggctcccccaggtggtgggggcggggcgccggggagaccccgcctcccgcgccctctcagcaacccgcacagggcgcacccggacgctctaccgctcccgccgcagtcgccgggccatgggcctcgagcccgccccgaacccccgcgagcccgccttgtctgcggcgtgactggaggcccaggtgaggcctgcacggacgggaggcgggcgggtgcgggcctgggcccgggggaagggcgcggcacgtgcctgcggggccaggac

SEQ ID NO: 21195 - DNA, 2300 bp, Homo sapien
cggagtttcaccatgttggccaggctggtcccgaactcctgacctcagataatccaccaacctcagcctcccaaagtgctgggattacaggcatgcaccaccatgcctggccaagcagtacacttataagggcatcgtctatccccaaacaccaaaactgcaaaggatgacaggtgcacagtcagtggtggtccatgccctgtgcataggaggagttcaatggtagtccacacccagtgcagagtaggtgcaaagtcaggggtggctggcagagccacctgggcccactcctctttggtctcacttcctaccacctttccctcattcattacagggtggggctgcgtcctaacataccaggcatgctcctacctcagggcctttgcactggctattccttttgcatgtccaggaacaagcccttggctctccaggaatctcaaagaactgggattttagtgttggggtctcattcttgggtttctccctgcagattccaactccacagagtgaccagagagaggacgtggctgaagacaccaaagatgggggaggggaaggtgagtatgttagagagaggctcaggagttctgggggtgccctggccccagggtggcttgctaaaagatgactcctggggggatatacagagaacttggaggtgctctgcactgaccacccaccccgtacacagtgtccagccaaggcccagaggactcactcctggggacacagtctcgtggccacttcagccgccagccagtgaagtatccccggggcggtgtgaggcctgtaacccaccagctgtccagtctggccctggtggcttccaagctgtgcgaggagacccccatcacatcagtgcccagagggagtttgcgggggcgggggcccagccctgcagctgcctcccctgagggcagccccctgcgccgcaccccgctgcccaagcattttgagattacccaggagacagcccggctactctcgaaattggacagcgaggctgtgcccagggccacctgctgcccggacgtccagcctgaggaagccgaggaccatctctgaccaccctggcaccttaaataaggaagaggcccagattgtgaagacggacccatatatccctacctcccaccacctagtggccaaacaccccgccaggagttcaatgctgggagaggtccagagggttcctataaggaaaaactatttaatacatgacctaggggaggcctaaaacccttttggggataatgtcccagagtccccccactagacacaggtcactgccaagcatcagggccactcgggctcagaggtcactcagggtcaatactcagggtcagtgcaggttatgagatccttggggtccaccctagtctctgacacctgggacaggggtgcttttgctactttggttgtggtcactcccccacacctgcctgcctccttcacggactcgaagtgaccttcctggaggaggtgggcagctcagactccacatgctggtggtgcctgaggtctgatggcctctaataaactgtgtcctatatgcccttgggtgcatctctgctaggggagaggccagcatgggtagcactccttgcccccattttacagattaggggaatcaaggcctcttttttttttttttttttttttttttttgagacggagttttgctctgtctccaggttggagtgcagtggcacgatctccgctcactgcaacctccacctcccgggttcaagcgattctcctgcctcagcctcccgagtagctgggactacaggcgcctgccaccatgcccggctaatttttttgtatttttagtagagacggggtttcagcatgttggccaggatggtctcgatctcctgatctcgtgatcgtcccgcatcggcctcccaaaatgcagggattacaggcgtgagccactgcgcccggcctcaaggcctccttcttgcatcatcaaacaccctgcagcacctacgtaaaggcagttggagctgggtcgcagcacccggctgagtcacgccagcccggccctcccggagctctgcgtccccgatccggtcctgcataatcaaatacagtataacaaagtaccgataaccgggacaatggggctgtgtgctccggaccgtgggagcccggggccgccgcagggaggccgagggaggaagccacagggcagggcagggcagggccgggctttgcagggggcagcgctgtcccagggtgaggggtacgggggcgggattgcaaaaccctagcgtgcgcccgatgatcagctg

SEQ ID NO: 21196 - DNA, 2300 bp, Homo sapien
tgctcctcggctcctcgcccgacttcaacagccagtttggcctcgtggacatccctgtggaggtcagtggccctgtggaggtgaccctggggctcagcttgatgggtccctcctatggcagtgaccctgagctgggctgcaggtctccagctcaccatccctccctgccccgacagttcaagctggtcattgcccaggtcctgctcctggacttctgcctggcgctcctggccgaccgcgtcctgcagttcttcctggggaccccgaagctgaaagtgccttcctgagatggcagtgctggtacccactgcccaccctggctgccgctgggcgggaaccccaacagggccccgggagggaaccctgcccccaaccccccacagcaaggctgtacagtctcgcccttggaagactgagctgggacccccacagccatccgctggcttggccagcagaaccagccccaagccagcacctttggtaaataaagcagcatctgagattttaaaaagccctgcctccacctcgtctgtgccacacggtgtttgctgggggctcggggacagagggtcactgaggaaggtcccagcaccctccccacaggcgtgtgatgttggtgaaaccctctggcactttcagcacttgaacatggacttgtccctgcccagagaattcagtgcatattttctagtttaacaagcacccccatatttctgaggtctctttcacattttaacaactcaggtgctgagagaagccttaggatgtgtgatatttttttctttcccataatacataacagcatgcctttctctcgggtggtgtctgagacttgaggaatatgatctgcatcattacaagtattgactctgtccggtggctcaagcctgtaatcccagcactttgggaggccaaggcgggcccatcacaaggtcaggagatcgagaccatcctggctaacacagtgaaaccccatctctactaaaaatacaaaaaattagccaggcatggtggcgagtgcctgtagtcccagttactcgggaggctgaggcaggagaatggcgtgaacccaggaggtggagcttgcagtgagccgagataacgccactgcactccagcctgggcaacagagcgagactccaactcaaaagaaaaacaaacaagtactgactctgtcatgctctttgggggcctgcgctgctctaccatctcatgtcacagtcagggagctctggctgagcatcagccaggatgtgacctggaaacctggcttggctcttaggttgatagtgttattcctttcaatggactcactcatcacaactcaagaactgcagagtaggcagcacggagccagtcagagaatccttgcctccttaacagccaaagcctttggacacaaagttataaacatactttaaagtctatttccagccccaaaattccactgtgctgggggtgggagcatttttataacaggcggcttgtggcaaccccagagctggtgcttttggacaaacctccactccctacctaaaagggctgctccctggtgtgctgtaattggggccttgagcctgatccagctttgagggtcacggaaggggcgtcccccaggccaggggttctccagcccgagtattagaattttggttggaatcggacagaatatcaggcctccaccagggggcgccatggctccagcgaggcccaggtggtttcagggctccgagagacaacctgggcaaggggatcaccagggtcgcgggttgtgggagctcctgggagaggccccccgggacaggtggactctgcaaccattcagggaggagggggctggggctccgtgggatttggggtagcacaaagatctgagagggaacctatggcccagatgaagtcttaggatgcccaggtcaggggcactgcagcctcgagtggtcgctcagggggccctggcccgacccagtttcaagcggctcaggtagagaagggcactatcaaggcttccgggctacgggggcgtggtctgatgcgggggcgtggcctccgctgggcagggcgacgcggaaccgaggcggcggcggcggctgcggcggcaggaaatcggggctcggccccgccggcgcgcgaccccatccccatcccggtccctgcagagcgatccccgggcccagatatggacgcagcagagccgggtagggggtcggggatccgggaggggcctcccccgaccatcccctgcttcctacattgagggcacacacttgtcccgctccgtcctgagagccaggagagga

SEQ ID NO: 21197 - DNA, 2300 bp, Homo sapien
gcactgtgcctcacaggcgacggcttggcccacctgcaggccaccgacccccagcagctgctccgcctcatcccccatgtgcaggtgttcgcccgtgtggctcccaagcagaaggtatgtgcacagccctaggggtcaggggcacagcggtaggcacgcagcccctgctcagcctgtctccgcccatacaggagtttgtcatcaccagcctgaaggagctgggctacgtgaccctcatgtgtggggatggcaccaacgacgtgggcgccctgaagcatgctgacgtgggtgagtgctgtgggctagggtatttcgtttgtggacgaggtgttgaggacatgtcactgagctagaaagacagacctggcccttggtgacagccacgggggcactaattcctgtgaggatgggagggggtggcaaggtcaggggctttgagggcaggaagggatgcgaatatcccaggaacagagcagggcggaggccagaggccaggagagaggcaacaagttgggagagtgactcagaaaacccagagctgaagccatgaagatggttcatagccccagatctctgtcaaaagcacacagatggctgagcactgtggctcctgcctggaatcccagtgctttgggaggctgaggcgggaggatcacttgagtctgggagttcaaggcagtggtgtgatccactctaacctaagtgacagtgcaagaccctgtcttttttttttttgacggagccttgctctgtcacccaggctggagtacaatggcacgatctgggctcactgcaacctccatctcccgggttcaagcgattctcctgcctcagcctcccaaatagctgggattacaggcacgtgccaccatgcctggctaatttttgtatttttagtagagatggggtttcaccatgttggccaggatggtctccaattcctgacctcaagtgatccacccgccttggcctcccaaagtgctaggattacaggtgtgaaccactgcatcccaccgaaccctgccttttttttttttttttttttttgagacagtttctctcttgttgcccaggctggagtgcaatagcacggtctcagctcactgcaacctctacttcccgggttcaagcaattctccttcttcagcctcccaagtagctaggattacaggcgccagccaccatgcccatctaatttttgtatttttagtagagatggggtttcaccatgttggccaggctggtctccaactcctgacttcagatgatgcgcctgtgttggcctcccaaagtgctgggattacaggtgtgagccacctcacctggcctttttttcttttttctttttttttttttgcaagaactcaggtgttaaattgaattttaaagatcaatcttacgttggtttttttgcttttccaatatttatctgcttttatctactaaagcatttattgagtgttgtttgcctcctagaatcatgctccttggctatttcttttgaaatcagtttaggttgttttgttttgttttattttgagactgtctcgctctgtcgcccaggctggagtgcggtggtgtgatctcatctcactgcaacctccgcctcccgggttcaagcgattctcctgcctcagcctcccgagtagctggaattacaggcacatgccaccacccctggctaatttttgtatttttagtagagacggggtttcgccgtatcagccaggctggtctcaaactcctgacctcaggtgatccgcccacctcagccttccaaagtgctgagataacaggtgtgagccactgcgctcggccaaaatcagtttagttttgacctatctcgtgttgtgtgttttttcattgcatttgttgtgggggtttattgttggtggtttgttttcttaaagtagtttgtagaaagcaacacgggcactctctgaggtctccttagggtgtcaggtgaaatggggaagtctgggaactgtcctcacgggagccagctgggggacttcaggaccagtggctctgaagccagcaatcttcccctccgtggagcctgctcctccgggtctgacaccctcctgccccccaggtgtggcgctcttggccaatgcccctgagcgggttgtcgagcggcgacggcggccccgggacagcccaaccctgagcaacagtggcatcagagccacctccaggacagccaagcagcggtcggggctccctccctccgaggagcagccaacctcccagagggtgagtcccaagaggggaggtgctgcaccccatcctggccaggg

SEQ ID NO: 21198 - DNA, 2300 bp, Homo sapien
gagcttggccccagggtgccatgctgagcctctgcccctctttacccaaggtggtcatgatcacgggagacaacccgctcactgcatgccacgtggcccaggagctgcacttcattgaaaaggcccacacgctgatcctgcagcctccctccgagaaaggtgaggccctagcctggcccacagtggggaagggggaccctgagtccaagaacagctcccatcgcaacagcccacctgtgtaccaggcctcagcagcacagtgtcttcaaatgcctggcaccactaatcacagccctggcccactgggcacctcggacagcatgtgagcgttcactgggtcgcaggtcccaggatgtgcggcatgtaggtgtttatttaccataatgaggcgatagtctgactgccagctcgggtttcctgtgcactcatgggcagatactgctcctaccacgcttactccccatcctcagtgtcatcctcatttcacaccctctttggcccggcaagctgcccatgtaccgagtgctcccttcccgagcacagggactgctggcatcctcagccacagttgatggcagtttgcccagtgctcagcctgaccagaccccaggcggagcgctccgtgcgtgttactgcgttggtccctccaccccatcctgcaccacacggggtggcttgccttccccacaccacagaggaggaagctggctgggtcagctctcggggccctgctttgtagagaagggacagaggctcagaagtgaacccacttgcccaggtcacttccaatccatggctaaggattggaatccagacagcctgattccagagctcaaggctccaacctctccccagtgacctctttgagcaatgccctggattcagattgatgaagaggcagacatagagacccagcccctcccagctagaggtgtggggcttaccagatacctgccccagagctagaggtgaagcccctgtgggcgcacgcagttcaggacctgcatgagtgttgacagggccctaagaagaaccacatggagcagtgttgccacagggctgctggcagcaaacattcacaggtctgggccagagcagcttccggaacctccaggccacctctcagaggactcggtccctgccctccctctgttctattggtcgcaggcctccccctgtcccagccccagctaccggggtcttccagggcctggggattgtgggcaggtggcatggagcggatgagcagaactgttgattgacaagcgaagctggtctagcaacagctgcagcacaagccaggtggaagtgtgctgcccttcagcttgagatggtccagggtgagcaggcagtgccaggagggctggcgggccgcccttggccatcctcagcgcccagcatccaagccagggccagccagcaagaaaggggaagtggagcaagaagatgttgagaactcaggggccctgtcagagttgggagggggcccagccccgagaaaacaggatttcagagaggccacgggcgcagggataaatgaggtgagggcctggtgtggggtttcccaaggagagcgcaatagcccccttctgtgtgtttcaggttagggggccttgcatgaggtgggggcatggcttagctggggtcagactgcccaggttctaatctggctgtgtcccgggctctcaggcaagtagctcaggccccaggctcttggttccaccctgtgcacctgagggacattctttgtggagtccccagagaagggctgggggtcacctgggtgggtagggaggtgcgggctccagagaggagagactggctggtgctggggtccgagtggagggagggtgcttctgagcccggtcagccaagcccccagccctaaccctaggtgctgcccgcaggccggcagtgcgagtggcgctccattgacggcagcatcgtgctgcccctggcccggggctccccaaaggcactggccctggagtacgcactgtgcctcacaggcgacggcttggcccacctgcaggccaccgacccccagcagctgctccgcctcatcccccatgtgcaggtgttcgcccgtgtggctcccaagcagaaggtatgtgcacagccctaggggtcaggggcacagcggtaggcacgcagcccctgctcagcctgtctccgcccatacaggagtttgtcatcaccagcctgaaggagctgggctacgtgaccctcatgtgtggggatggcaccaacgacgtgggcgccctgaagcatgctgacgtgggtgagtgctgtgggctagg

SEQ ID NO: 21199 - DNA, 2300 bp, Homo sapien
ggtgagggtgcccctgtctgtccgcaggcccgggaggtcaagcgggaggccctggagtgcagcctcaagttcgtcggcttcattgtggtctcctgcccgctcaaggctgactccaaggccgtgatccgggagatccagaatgcgtcccaccgggtatgggacggtgctcggctccaccctctgcatgggaaatagaggcgaggagatgacaattacagcttcgtggtaggggtgggcacccaagtctcacaggctgcatgttttagctgagcaagatcatagctcaggtgctaacattgccactggcccaaggacactctgggacccgcctgtgctggctcctctctcctccacagaccactcccttcactccccgcatcatgggaagatgggggcacttctctccacttccccgttccaccgccgtcctggagagaaggaagctgaggctggggagttgggtggggggcactgtctgcctgtcctggtggcttctggtggcttgtgttttctattttgggacttagggtgtcttttagggtgtaaggggtgagtgagccgtctcagaggatgatggctctgggtcacatgggtgatgtgattagtccccaccaagcccagaggtcatggtcccatcctcctctttgctgaaatattacccccatgggcagctaccaagccaaaagggtccacctcaggggcaggttgttcatttgtattgcaaatccaagctaagggtgtcttcagaaggacgcacatacacgtgtcatttgtgtaaaatgacctgggtgggggtgggttgtggcccttggaagcccattcagcatctcggttagaggcccaggatctcccactgtggcctaccttagaaggagacttggcagccttgtctctggcctagagcttggccccagggtgccatgctgagcctctgcccctctttacccaaggtggtcatgatcacgggagacaacccgctcactgcatgccacgtggcccaggagctgcacttcattgaaaaggcccacacgctgatcctgcagcctccctccgagaaaggtgaggccctagcctggcccacagtggggaagggggaccctgagtccaagaacagctcccatcgcaacagcccacctgtgtaccaggcctcagcagcacagtgtcttcaaatgcctggcaccactaatcacagccctggcccactgggcacctcggacagcatgtgagcgttcactgggtcgcaggtcccaggatgtgcggcatgtaggtgtttatttaccataatgaggcgatagtctgactgccagctcgggtttcctgtgcactcatgggcagatactgctcctaccacgcttactccccatcctcagtgtcatcctcatttcacaccctctttggcccggcaagctgcccatgtaccgagtgctcccttcccgagcacagggactgctggcatcctcagccacagttgatggcagtttgcccagtgctcagcctgaccagaccccaggcggagcgctccgtgcgtgttactgcgttggtccctccaccccatcctgcaccacacggggtggcttgccttccccacaccacagaggaggaagctggctgggtcagctctcggggccctgctttgtagagaagggacagaggctcagaagtgaacccacttgcccaggtcacttccaatccatggctaaggattggaatccagacagcctgattccagagctcaaggctccaacctctccccagtgacctctttgagcaatgccctggattcagattgatgaagaggcagacatagagacccagcccctcccagctagaggtgtggggcttaccagatacctgccccagagctagaggtgaagcccctgtgggcgcacgcagttcaggacctgcatgagtgttgacagggccctaagaagaaccacatggagcagtgttgccacagggctgctggcagcaaacattcacaggtctgggccagagcagcttccggaacctccaggccacctctcagaggactcggtccctgccctccctctgttctattggtcgcaggcctccccctgtcccagccccagctaccggggtcttccagggcctggggattgtgggcaggtggcatggagcggatgagcagaactgttgattgacaagcgaagctggtctagcaacagctgcagcacaagccaggtggaagtgtgctgcccttcagcttgagatggtccagggtgagcaggcagtgccaggagggctggcgggccgcccttggccatcctcagcgcccagca

SEQ ID NO: 21200 - DNA, 2300 bp, Homo sapien
cacgcagggcttacctgccccagtcctggtgtgtccctagctctactcttttgccctggtcttgggcagggctaggtggcatcctcagccctctcacccatccatcctccacaaagcccaccctccgcctccaccaccggcacatctgccgcttggcttcttcctgggctctcgttctttctgcttgcaccctacagctgcggatccttccagaatttagcctcaggttgcagtactgtgtgcagagcccaggccacagctcacagcctgcatgctctgccccgttcctgcacctggagcccccttcccagtgacacaggtcctcatcgccttcatagtggccacttctgaggcctttccaccctctctggattccattctcacctcctctctcatggcactcagcactccgatttctgtgactttcttgatcatgcgtctcccctggtgcagtgtgagctccctaaggccaggggtctgtgcccagtctgtggtatgtggtggagccccagtgagtaagagttcctggctaaactccaacattattgggagagtccctacttcattgacttggaagctgagccacaagggactctgtgatgtgcccatgtccgcaagcaggacatagagccacattcgggggacccagaccccccagtcactgccagatcccacccctcaagcgtgcctggtaccctcctggcatttctcccctcccaaccctcgcatgtgcccactacgggaacagggccttccattgtccccttggctcccagcgcatggtcagagctcaggaaatgcagagtgtgggcagagggagggacagatggtgagggtgcccctgtctgtccgcaggcccgggaggtcaagcgggaggccctggagtgcagcctcaagttcgtcggcttcattgtggtctcctgcccgctcaaggctgactccaaggccgtgatccgggagatccagaatgcgtcccaccgggtatgggacggtgctcggctccaccctctgcatgggaaatagaggcgaggagatgacaattacagcttcgtggtaggggtgggcacccaagtctcacaggctgcatgttttagctgagcaagatcatagctcaggtgctaacattgccactggcccaaggacactctgggacccgcctgtgctggctcctctctcctccacagaccactcccttcactccccgcatcatgggaagatgggggcacttctctccacttccccgttccaccgccgtcctggagagaaggaagctgaggctggggagttgggtggggggcactgtctgcctgtcctggtggcttctggtggcttgtgttttctattttgggacttagggtgtcttttagggtgtaaggggtgagtgagccgtctcagaggatgatggctctgggtcacatgggtgatgtgattagtccccaccaagcccagaggtcatggtcccatcctcctctttgctgaaatattacccccatgggcagctaccaagccaaaagggtccacctcaggggcaggttgttcatttgtattgcaaatccaagctaagggtgtcttcagaaggacgcacatacacgtgtcatttgtgtaaaatgacctgggtgggggtgggttgtggcccttggaagcccattcagcatctcggttagaggcccaggatctcccactgtggcctaccttagaaggagacttggcagccttgtctctggcctagagcttggccccagggtgccatgctgagcctctgcccctctttacccaaggtggtcatgatcacgggagacaacccgctcactgcatgccacgtggcccaggagctgcacttcattgaaaaggcccacacgctgatcctgcagcctccctccgagaaaggtgaggccctagcctggcccacagtggggaagggggaccctgagtccaagaacagctcccatcgcaacagcccacctgtgtaccaggcctcagcagcacagtgtcttcaaatgcctggcaccactaatcacagccctggcccactgggcacctcggacagcatgtgagcgttcactgggtcgcaggtcccaggatgtgcggcatgtaggtgtttatttaccataatgaggcgatagtctgactgccagctcgggtttcctgtgcactcatgggcagatactgctcctaccacgcttactccccatcctcagtgtcatcctcatttcacaccctctttggcccggcaagctgcccatgtaccgagtgctcccttcccgagcacagggactgctggcatcctcagccacagttga

SEQ ID NO: 21201 - DNA, 2300 bp, Homo sapien
cccaccctccgaggctccaggttggcaggccctgtctccacaggtaccaaggaccccagccggaaccgctacaagctgtttctggagtgcaccctgatcctcacctcggtcgtgcctcctgagctgcccatcgagctgtccctggccgtcaacacctccctcatcgccctggccaagctctgtgagtgtgtcaaatgggatggggtgccgagtgggctggggccaagcaggacccctgacctcactcccgcccctagacatgtactgcacagagcccttccggatcccctttgctggcaaggtcgaggtgtgctgctttgacaagacggggacgttgaccagtgacagcctggtggtgcgcggtgtggccgggctgaggtaagcatcaggggccctgcagcaaaggtcacccagatggggtttctgggaagtcgagagacaggtggcccatccaccccaagcccttgcagtgagggcccgtcagaggccctgcctcgggttcatttccaggggctccccacaaagtcctgggtgtcagccatggtagcggcacgggggctcagctcaggcctggaacatcccacaccagccatgcaccacatgacccccaggcacaatgcctggcttctgggggcatctgtgaagcaggtgcaggtctcataaagacccagttggcgcccaagccaccccagtgacaagcacggaatgaatggccttgggggtccttctgctggtggggatgcagcttcgccctacccgcctgcactctgtaaccagctgttccccgaccttgcagagacgggaaggaggtgaccccagtgtccagcatccctgtagaaacacaccgggccctggcctcgtgccactcgctcatgcagctggacgacggcaccctcgtgggtgaccctctagagaaggccatgctgacggccgtggactggacgctgaccaaaggtgaggggctggggcctcaggcccagcaagggggagccactggctctcacagccctaggcaggtgggctgcacccctcagagcatcttggggacaggcaggcctacagctctgatgctccccgaggtgggtggccagaggctcactttagacccaggataggccacgtccttgggtgtccctctgggttggaatctgccctgccctggccgaagccacagtgccagggtcctccaagcccaggtcttccagctctggaccaacacctgctctagcccagagccccgatcaggccctgggggaggcaggagggaggtgggggaggccggggtgagaggtaggggcttggctgcctctttggagcaaagcccctcaggactcgtacttatttgtttccagatgagaaagtattcccccgaagtattaaaactcaggggctgaaaattcaccagcgctttcattttgccagtgccctgaagcgaatgtccgtgcttgcctcgtatgagaagctgggctccaccgacctctgctacatcgcggccgtgaagggggcccccgaaactctgcactccatggtgagctggccccagcctggggcaaggggtgggggcgcggggcagcccgtgacatccccctgcattccctgcagttctcccagtgcccgcccgactaccaccacatccacaccgagatctcccgggaaggagcccgcgtcctggcgctggggtacaaggagctgggacacctcactcaccagcaggtacgggcccaggctccccctgccttcaccatgtgcctggcccgtcagctcctccctgagtcacctcctgtgtcccacagtgccaggttgaatggttgtgattttgtcctccttgccccgcctccagcttctacctttggagactccaaatggcactcagtctgtccactgctgtggggacccacccagtcctggctcacgcagagcacacgcagggcttacctgccccagtcctggtgtgtccctagctctactcttttgccctggtcttgggcagggctaggtggcatcctcagccctctcacccatccatcctccacaaagcccaccctccgcctccaccaccggcacatctgccgcttggcttcttcctgggctctcgttctttctgcttgcaccctacagctgcggatccttccagaatttagcctcaggttgcagtactgtgtgcagagcccaggccacagctcacagcctgcatgctctgccccgttcctgcacctggagcccccttcccagtgacacaggtcctcatcgccttcatagtggccacttctgaggcctttccaccctctctggattccatt

SEQ ID NO: 21202 - DNA, 2300 bp, Homo sapien
ctgccaggaagagcatattgcagattaaggagcttcatctgttttatgcagagccgagggctgtgggcgggcagcatgtctaccccaggctcagccaggatgagggagagccactgccaaatggatcctcctatctggaagctcgccagggctcccgacgcccacatatggctcttggtttcttgagagcggcctgccatgctcaggttggaggggtcagggtggagactccataccccagaggccttgccctgggaacaggatggggcctggtctcttgcagggccgagatggtggtgcctgacttctcggagcttttcaaggagagagccacagcccccttctttgtatttcaggtaaagcagcagctctggcccatctccccatttcctcccttggggctttcctaaccggatcaagcctgcccaccacttctaaacctggaagcctctccccaccctcacatatcagatccggtgggtggaaggggctcatgggaacagggcgggtagggcaaggacagacaggctggtatcccacaggtgttctgtgtggggctctggtgcctggatgagtactggtactacagcgtctttacgctatccatgctggtggcgttcgaggcctcgctggtgcagcagcagatgcggaacatgtcggagatccggaagatgggcaacaagccccacatgatccaggtgtggctgccagggagacccaggttgggggtgcagcacaggtgcggcttctgtgctgacacccatgccccgcccaggtctaccgaagccgcaagtggaggcccattgccagtgatgagatcgtaccaggggacatcgtctccatcggtgaggccgggttccgctcagtcccagtgggagccccagcctcagggcctctggccaaccctcctgcctctgccctgcaggccgctccccacaggagaacctggtgccatgtgacgtgcttctgctgcgaggccgctgcatcgtagacgaggccatgctcacgggggagtccgtgccacagatgaaggtacttggtggaggatggggatcctcaagctgttcaggaggaaacaggccaggaggtggaggcccagggggtggcggggatccccctcaggcacaggcggaggaggcagtgtgggcacagatgagctctgtggactggggagccgggtggtgggggcgaggaaggaggtgagagagccaagggcatccagggtacattggtgccctgggatgtcagaccaaggtgggctgggagcagtccagaggggtgagtcccagacgaggccaagtgcaggccccagagagcaggcactgtgagtgcaatggggagaagacaggacggggtgagggtgaggatctgggagctgggtgggatgtattggtcgggtggggatccccctggctcattccagcctcaaggtccagctgtccaggaactcagatggagaaggaagcaaggtaggcctggccatccagattcacgatcttcctccccaggagcccatcgaagacctcagcccagaccgggtgctggacctccaggctgattcccggctgcacgtcatcttcgggggcaccaaggtggtgcagcacatccccccacagaaagccaccacgggcctgaagcgtaggtgcctcatgggcgtctgggggtatctgggcttccaccccctttgcccgtctgcttgatcatgagggagtcaggacgaggagacaggcatgacggtgactctgcttctctccccagcggttgacagcgggtgcgtggcctacgtcctgcggaccggattcaacacatcccaggtgcggggccaggtctggggagggcgggccccagggcagttggacagccaaggtatcagccctttccgaccccagaacatctgccccacgggctgactctggcagcacggccctggacctgggccagggtgcagaggccaccccaagaccaggcccacgcttccaggcctgagctgctggagggagtccagacagcagaaaggctgttcctccattcctccagggcaagctgctgcgcaccatcctcttcggggtcaagagggtgactgcgaacaacctggagaccttcatcttcatcctcttcctcctggtgtttgccatcgctgcagctgcctatgtatggattgaaggtaagcgccacggcctctgtggtcccctgcgcccaccctccgaggctccaggttggcaggccctgtctccacaggtaccaaggaccccagccggaaccgctacaagctgtttctggagtgcaccctgatcctcacc

SEQ ID NO: 21203 - DNA, 2300 bp, Homo sapien
ctgcacccaacctaaacatttcagtcctcactgtttcgagtctacgcatctcagcgcttcagaatggtgatggaagaccgtgaccatgtctgcccttttgtactgagtacaatggccaatgtgcggtgcacaccctctcccttcatcttcaccaaaactgcaaatgctgacacgtggctgggagccggagaactgggctccaaaccccatcatggccttgttacgatggtcctcaacccagaaacccacagaacacctagggagctctttcctgacttaatcactgttcagagattacaaatatgttgactacaactatcaatctaatacaaggatttataagaaacatttagcaacttcccctaccccaaggttggccagtcacattaatggcctgtggcaactacgttccctttcatgctgttcttactcaacgcaaaggtacccagcaagatacaagggaagggcttattgtttgatagcagtggggttgctctttggtttcctcttctcacatcccatacataagacgtccatgcagttaaagggcagagcgagaatgaccctcgttgacatgactggtgccctgatcagattggactatggcacagagtactgcagaacacacccttaggcccaagtccttgcattctcgagccttttttttttttttttttttttttggagacagggtcttactctgttacccaggctggagtgcagtggtgtgatcatggctcactgtagccttgaactcctgggctcaagcattcatcctgcctcagcctcccaaatagctgggaccacaggcacacaccaccacccccagctaatttttaaattttttgtaaatagaaggtcttgctgtgttgcccaggctagtctctgactcctgggctcaagcactcctcctgcctcggcctcccaaagtgcttgggattacaggcgtgaaccaccctactcgacccattctggggctttaattcaggaatcatagaaaatctcagctttggtggggctgggtctcagtgtcttctgctgtctgtagcttcagggcctccatctttcaatcagaggttccttctctacttgctgtgtcactcgaccagatgacgggctctcgtctgacaccagccccaggctgccaggaagagcatattgcagattaaggagcttcatctgttttatgcagagccgagggctgtgggcgggcagcatgtctaccccaggctcagccaggatgagggagagccactgccaaatggatcctcctatctggaagctcgccagggctcccgacgcccacatatggctcttggtttcttgagagcggcctgccatgctcaggttggaggggtcagggtggagactccataccccagaggccttgccctgggaacaggatggggcctggtctcttgcagggccgagatggtggtgcctgacttctcggagcttttcaaggagagagccacagcccccttctttgtatttcaggtaaagcagcagctctggcccatctccccatttcctcccttggggctttcctaaccggatcaagcctgcccaccacttctaaacctggaagcctctccccaccctcacatatcagatccggtgggtggaaggggctcatgggaacagggcgggtagggcaaggacagacaggctggtatcccacaggtgttctgtgtggggctctggtgcctggatgagtactggtactacagcgtctttacgctatccatgctggtggcgttcgaggcctcgctggtgcagcagcagatgcggaacatgtcggagatccggaagatgggcaacaagccccacatgatccaggtgtggctgccagggagacccaggttgggggtgcagcacaggtgcggcttctgtgctgacacccatgccccgcccaggtctaccgaagccgcaagtggaggcccattgccagtgatgagatcgtaccaggggacatcgtctccatcggtgaggccgggttccgctcagtcccagtgggagccccagcctcagggcctctggccaaccctcctgcctctgccctgcaggccgctccccacaggagaacctggtgccatgtgacgtgcttctgctgcgaggccgctgcatcgtagacgaggccatgctcacgggggagtccgtgccacagatgaaggtacttggtggaggatggggatcctcaagctgttcaggaggaaacaggccaggaggtggaggcccagggggtggcggggatccccctcaggcacaggcggaggaggcagtgtgggcacagatgagct

SEQ ID NO: 21204 - DNA, 2300 bp, Homo sapien
gaggcccatgaaccacccgtgcggtggcgctttgtttctgcgggtcatcattgtgctccccccatctccatgcagctcgtctccatgcagctcggtctagcagagcagcagaggaatggatggcggttcacggggtccagggagcactgaacgagttccattcaacatttctgtgtcttaggtgctggggaaacagcagtgaacaaaacaggcaaatccccctgcctttgtggtgttactgggagggagaactcatagtcagcagttgatgccaaacagagatgacatctaacatcaggacaggatgggacattgccgggaactttagatggggcagccagggaggggctcctgagaaggtgatgtttcagcaaaagcctgaggcagcaagggagctgtgtgactgtgtattccgggcagagaaaacagcacatgccaaggccctttgctgaggcacgatcgagccccatgtgcgtgtggagctgtggagtgtagtgagcagggttggtggaagaggcagagctgagcaggaggccgggggcctgtgatggggcgggggcttggctcacgtgaattgaggacgtactgggtgggtgcctggcagcgttcttcctatttgagttcatgtcaccttcagcagagcagagccctgggcattaggtgctgtctgtgcacccagcttcccagctttttttgttgttgtttttgtttttgttttgttttttggggtttttttgtttgtttgtttgtttgtttttgagatggagtctggctctgttgcccaggctggagtgcagtggcacaatctcggctcactgcaacctccgcctcccaggttcaagtgattgttctgcctcagcctcccgagtagctgagactacaggtgcctgccactatgcccagctaatttttatatttttagtagagacggggtttcaccatattggccaggctggtctcaaactcctgacctcgtgatcccccctgcctcagcctcccaaagtgctgggattacaggtgtgagccactgcacccagcctttttattttgagacagagtcctgctctgtcgcccaggctggagtgcagtggtgcaatctcggctcactgcaagctctgcctcctgggtgcacgccattctcctgcctcagcctcccaagtagctgggactacagatgcctgccaccacgcccagctaattttttgtgtttttagtagagatggggtttcaccgtgttagccaggatggtctcaatctcctgacgtcgtgatctgcccacctcggcctcccaaagtgctgggattacaggtgcgagccactgtgcctggctggttttttgtttttttttttttaattgagataggatctcactctgccacccaggctggagtgcagtgttgcaatctcagttcactgcaacctccgcctcccagttcaagggattctcctgcctcagcctcctaagtagctggtattacaggtgtgcaccaccgtgtccggctcatttgtgtatttttagttgagacagggtttcgccacattggcgaggctgatctcaaactcctgatctcaagtgatccgcccaccttggcctcccaaagtgctgggattatgggtgtgagtcaccgtgcccagccttgtgctcccagctttaagtgtggcaccagaggcacagcaagatggtctcgtttgtcctgatgacagacgagggagtgacagaggcagcaccagagcccagtggcatttcagaatatacccatagagctgctgcacccaaaacctcccgggggggtcttggaactgtaggttgagaagagctaagccacaatgctttctttgtctctgtcaggagtacgaccccagcaaagcgacctttgtgaaggtggtgccaacccccaacaatggctccacggagctcgtggccctgcaccgcaatgaggtagggactgcctgctgggctcctggaggaggggcttgagtaggattcccaggcgctgacaccccaaggtcaggggcctctgtggcaaacacaccttctaccgcagggcgaagacgggcttgaggtgctgtccttcgaattccagaagatcaagtattcctacgatgccctggagaagaagcagtttctccccgtggcctttcctgtgggaaacgccttctcatactatcagagcaacagaggcttccaggaagactcagagatccgagcagctgagaagaaatttgggagcaacaagtgagtccttgatttgcctgtagcacctttgcctttctgtcctgctcccctcctgattcagggt

SEQ ID NO: 21205 - DNA, 2300 bp, Homo sapien
ggcgtgagccaccgcgcccggctagtatttgtaattcttatctatcacattaaggctcttgtccggtgtggttgtgttccggggcggtccccgaccccgcccctcacaagccccgccccccgcaccgggccccgcctcctgaactccgaagctcccgaccccgcctccgcagggtccaggcttcgcccctggtgacaggtggtgctggtgtagtcaaggaggagggctcgctttttttggttcaggttgtcatggtggcgcccaagcccgccttgccggccttgtcttttccggtctcagtccggcgtggcagcggaggcaggcaccgttaggtcttccagtccctctctgtcatggcgacgcccagcctcttcttccggccacagcctgtcatggcggcacccgaagtagtccctgccggggccagcctgttctgttgccctggctcttcctagtccaggctgccatggcggcgctcagggcttaccggaagtaaaacttcggaagtgaggcgttcctctgcccggaagtgagcgcggcgctaggaaagatggcggcagcggcggcggtgggcaacgcggtgccctgcggggcccggccttgcggggtccggcctgacgggcagcccaagcccgggccgcagccgcgcgcgctccttgccgccgggccggcgctcatagcgaacggtgacgagctggtggctgccgtgtggccgtaccggcggttggcgctgttgcggcgcctcacggtgctgccattcgccgggctgctttacccggcctggttgggtgccgcagccgctggctgctggggctggggcagcagttgggtgcagatccccgaagctgcgctgctcgtgcttgccaccatctgcctcgcgcacgcgctcactgtcctctcggggcattggtctgtgcacgcgcattgcgcgctcacctgcaccccggtaagtgtgtacacgcgagcccgacccccagcacggtcgagcctcgccgtgggtcccagctgcggccttcctgtcggtcaccatcgcgacctgggccactcatctgcctggcctggattcccaggggcaccctctacactttggcgcaggcttaatcatgaccccactgctgacttgctgtgcatgcctggtgcgggttatttcctttttctgaagtcctccctgttatggtcatttagattcagtgatgtaatacttgtaaaaggcttagcgcagggcccagcatacgtcgcccaggtcaggtaggagttgtttatactagttcccatattagcgactactcttgttctggaaacggccctaccttccatctcatctgtctcctaccttggttttcaaagtgtaaggcgagatcactgggataggtttcccccatctatgaagcttagttggttcttagactgaaccaagtcttgctgtccagtgcttagtggtcttccatactgtgatggaaaggagcatgaaatgcagttaattacagtgttgaagagaggcagaggtgtttatgagcgagtcatttacatgatgtctttccgcaaaatgagggtggtgatactgagttctgtcggggatacaacagcaagcaaggtcgcgctcctgacccacagtttagagttctgagtgaccaagtgtcgtcggaggagttggtgactgtgagcttccctgggcctgaagcagtgactgtgtcgtctctctctgggcctgcctcaggtgacaccagcaggtttggagccatggacactgaggtatatcaggaagcttcccctctgattccaggagtgtgtttgcctcaagaagaggaaaagggaacagcatcaagggctacagaaagacagaagccccccaccctggctggctctgaatgtgggtagaatcctcattctcctctcctgagagacaacctgttctgtccttcaaaaagacttatctatcccaggggaggagctcaacgtggtagctttgaggtagtacaatgaaagacaccaatgagggacaaaataaaggaggggttaaggggactgtggcaccgctcaaacttcagctgccttttgacctgcagctaagcagcttagctcttaacttcctctccagggatggagaagtgggaggagctgaacagccatcagccaggagaggtggatctgggtttgattcagatctcagaaagggccgcttctgctctctgagtttcagtttcccccttctgtaaactgagaaccgtaactaacaactactgggtgccatcttgagaagcggagatgatatctgcagagtgcccgccctggggccatca

SEQ ID NO: 21206 - DNA, 2300 bp, Homo sapien
tgtctctcctaaaaatacaaaaattagcaggcatggtggttcatgcctgtaattccagctactaaggaggctgaggcaggagaatcatttgaacccaagaggcagaggttgcagtgagcctagattgcaacactgcactccagcttgggcaagagtgagactccgtcccaagaaaacaaaacaagactaggactgggcaccgtggctcacacctgtaatcctagcactttgggagactgaggcggccagatcattagaggccatgagtttgagaccagactggccaacatggcgaaacccgtctctactaaaaacacaaaacattagactgggagcgctggctcacacctgtaatcctagcactttgggagaccaaagtgggcggatcacaaggtcaggagttcgagaccaacctggccaacatagtgaaaccccatctctactgaaaatacaaaaaattagccaggcatggtggcacgcgcctgtagtcccagctacccgggaggctgaggcaggagaaccgctggaacccaggaggcgtaggttgcagtgagctgagatcgcaccaccgcactccagcctgggcaacagagtgagactccgtctaaaaaaaaaagtacaaaaattagccggagcggtggcatgcgcctgtaatcccagttacttgggaggctgaaatgggagaatcgattgaactcggaaagtggagtttgcagtgagcggacatcgcgccactgcactccagcctgggcgacagagtgagacttcatctcgaaaaattaaaaaaagaatatgcaacaatataagctacaaaatttaaatatccaataaattttaagtttaaataaatttgctgtatcagaggacaaaaagaaacataaaatagttactgtttgtcacacatactgtttaatcctactaattggtactgttaagtagtcctattgtggttttgttcaaatagcatttatgcaacagtacagttaataatatagaactatataatttcttttttttttttttttcagacagagtctcgctctgtcgcccaggctggagtgcagtggcgcgatctcggctcactgcaagctccgcctcccaggttcaggccattctcctgcctcagcctcccgagtagctgggactacaggcgcctgcaaccacgcccggctaattttttgtatttttagtagagacggggtttcactgtgttagccaggacggtctcgatctcctgaactcgtgatccgcccgcctcggcctcccaaagtgctggaattacaggggtgagccaccgcgcccggcctagaagtatataatttcaagtaaacaccagtttttcattttttatgttaaagtggtaatttctttttttttttttttttttttttggagacagagtctcgctctgtcgcccaggctggagggcagtggcacaatctccgctcactgcaagctctgcctctccagttcgcgccattctgcctcaggctccggagtagctgggactacaggcgcccgccaccacgcccggagaattttttttttttttttgtatttttagtggagacggggtttcaccgcgttagccaggatggtctcgatctcctgacctcggcctcccaaagtgctgggattacaggcgtgagccaccgcgcccggcctaaagtggtttttgtaattcatttttcttttttttttttttgagacagtcttgctctgttggccaggctgaagtgcagtggagcaatcttggctcactgcaacctccgtctcccgggctcaagcaattctcctgcctcatcctcccgagtagctgggattacaggcatgtgccaccacgcccggctaatttttgtatttttagtagagacgtggtttcaccatgttgggtcttgaactcctgatctcaggtgatccacccgcctcgcctcccaaagtgttgggattacaggcgtgagccaccgcgcccggctagtatttgtaattcttatctatcacattaaggctcttgtccggtgtggttgtgttccggggcggtccccgaccccgcccctcacaagccccgccccccgcaccgggccccgcctcctgaactccgaagctcccgaccccgcctccgcagggtccaggcttcgcccctggtgacaggtggtgctggtgtagtcaaggaggagggctcgctttttttggttcaggttgtcatggtggcgcccaagcccgccttgccggccttgtcttttccggtctcagtccggcgtggcagcggaggcaggcaccgttaggtcttccagtccctc

SEQ ID NO: 21207 - DNA, 2300 bp, Homo sapien
ggctcactgcaacctcctcctcctgggttcaagcagttctcctgcctcagccttcttagtagctaggattacaggcatgcgccaccacacctggctaatttttgtaattttagtagagacggtgtttcaccatgttgggcaggctggtctcctactcctgacctcatgatccgcctgcctgggcctcccagagtgctgggattacaggctgagccaccgtgcccggctgcatattattaagatacatgacttcgtaaaaggagaaaggaaatgtaataggacttaataatcacatagtatcaaataagataatcttcagtaaaaataggaatgacatgtttctgtcccatgatacagttcgatatacttactttttcagttttttctccaatattaattctttcccatacaaggtccaagcttctgctcttggagtctgggactggacccctttctggtagcaatacctttatagaatgtttactccaggccgggcacggtggctcatgcctgtaatcccagcactttgggaggccaaggcgggcagatcacgagttcaggagatcgagaccatcctggctaacacggtgaaaccccgtctctactaaaaatacaaaaaaaaaaaaaaaaaaaaaaaattggccgggcatggtggcacatgcctgtagttccagctactcggactcgggaggctgaggcaagagaatctcttgaacctgggaggcagaggttgcaatgagctgagatcgtgccactgcactccagcctgggcgacagagccagactccgtctcaaaaaaaaagaaaaaaaaagtggtttactccagtttttccctgcatttaataattttgttccctttaaggcatgtttttattttcttggctgaaaaggagtagcctgagaagaagtaacgtgtaggaagccttggccatgggaccaatagcctcataaattcctgatctctggaggacatcagggcctcctacctgttccattgtgacctgggagtctctccagctccaaggtggagggatggcttcactgaacacggagtctggaattccgtgcacactcatgtgaccggtgttccggaaaaagaagcaggaggcggctgggcgcggtggctcacgcctgtaatcccagcactttgagaggccgaggccggcggatcacgagatcaggagttcgagaccagcctggccaacatggtgaaaccccatttctactaaaaatacaaaaattagccgggagtggtggtgggcgcctgtaatcgcagctacccgggaggctgaggcaggagaatcgcttgaaaccggaaagcggaggttgcagttagctgagatcgtgccattgcattccagcctgggcaacaagagcgaaactccgtctcaaaaaaaaaaaaaaaaagcagcaggaaggacccactgagtacaggaagccgacagggcctgctccggaaaaccaggagctgtaaggtcagccgaaaggacgaagagacctgaagtcagtcaagtaagttttattaacctgctgggctgctcccccacagttagaggaggcagccccgcttacagactacagcagggctttatagggcgaggaactgggctggggtgtgagaactgagtcgggggtgcaggtgtcctgaccgcatcctggagatgtttttgccagctttgttatgcaaggtgggcaggtgttgtgaccgcatcctggaactgtctgccggttcagctgaagtcttttgaacaaacagttactggaagggtcagtggggaggaggtctacttctagcccggggggagttgtgtggcggtcacaaaggactgtattgtaagactgatgggggaaggaggggaacagtctggttgggttgaccctaacgggagcaagttctgcttccatgcaagtccaggtccaaggtcccagcgaggggctgtgggtagcacctgtcagtcacaccccacacagcgagcggattatttgaggattccgatcacctctcctgtcgctcaagccccaggggcgggacctggggcaccagccagtcagaggcgctgtgcggcaaactgtccaatcaggtgcgccgggaggaggggcaacttccaaagcccgaagcggtctcatttcccgccggccccccattcgggtccgggttttagttcctcggggagcccctggtgccccggatacggctgattttgtcgtgtgggacctgttctggctgctccagccccaggaaggacccaggacacccggaagccggaaatggtgagcgtgcggagccgggcgtccggaga

SEQ ID NO: 21208 - DNA, 2300 bp, Homo sapien
agaacaccttttgggatccttgtgcactgttgttgggaatggaaaatgctatggctgctaggaaaaagagtatggccattccttaaataaataataaatacaaagtaatcatatgatccaggaagtctgcttctgagcataccctaaaaaactgaaagcagcaacccacatatttgttcacccatgttcatagacatattatttaccatagccaaaggcagaagcaacctaggtgtccaggaaaggataaataaggccgggcgaggtggctcatgcggtaatcccagcactttgggaggccaaggtgggcagatctcttgaccccaggagtttgagaccagcctgggcaacatggcgaaaccccatctctgctaaaattacaaaaattagctgggcatagtggcacatgcctgtaaccccagctactcaggaggctgaggcacaaggattgcttgagcccaggaggtggagtgcagtgagccgagatcacgccattgcactccagtctgagcaacagagcaagactgtctcaaaaaaaaaaaaagaaagaaagataaatagatccagaaaaatccagaaatttgatatctacatacaatagaatacaattctattctattgtatgtagatttaggaactgactaatttaggaactctttaaaaaatgtttaaataaagcattaaaaagaagtaaattggggacaggcgaggtggctcacacccccagcactttgggaggccaaagagggcagatcacctgaggtcaggcgttcgagaccagcctggccaacatggtgaaactctatctctactacaatacaaaaatcagccgggagtagtggtgggcgcctgtaatcctggctactcaggaagctgagtcaggagaatcacttgaacctgggaggcagaggttgcggtggctgagcgccactgcactccagcctgggcaacgagagcgagactccatctccaaaggaaaaaaaaagaagtaaattggccggtggcagtggctcacacctgtaatcccagcactttgagaggtcgaggcaggaggattgcttgaacctaggagttcgagaccagcctgggcaacagaaggagacacacatctctaccaaaaattaaaattaaaattaaaacaattagccaggcctggtagtgcgtgcgtgtagtcccagatacttaggaggctcaggttggaggcttgcttgaatccaggagttgaagcctgcagtgagcaatgatcacaccactgcacttcagcctgggctacagagcaaaaccctgtctcttaaaaaaaaaaaaaagaagaagaggccgggcgtggtggctcacgcctgtaatcccaacgctttgggaggccgaggccggcagatcacgaggtcaggagatcgagaccatcctgactaacacagtgaaaccccgtctctactaaaaaaatacaaaaaattagccgggcgtggtggcgggcgcctgtattcccagctactcgtgaggctgaggcaggagaatggcgtgaacccgggaggcggagcttgcagtgagccgagatgcgccactgcactccagcctgggcgacagagcgagactccgtctcaaaaaaaaaaaaaaaaagaagaaataaatcctaacacatactacaaggtgaagctcgaggacattatgctaagtgaaataagcacgtcaggaaaggacaaatactttatgacgccatttacatgagattcccacagtcaaattcacgaactcagacaatggaatggaggttgcaaaagaccctgagggaaggaggtgcacggggagttgtgcaacgagacagatttcagtgttgcaagatgaaaacaattctggaaattggcttcacaatgtgaatgtatttaacagtactgaagagaacacttaaaatggatgggaggcaaagaacacattcggtttaaacgcaaacgtcctggcggggacaagccggactgaagccaggccagctcaaccacgccccttcctgctccgctgtcactcagtgataaagaggcggggccattggatctgtccaatcaggacctcagctgaaaagatgtgagcggcgccacgctgggcctgcgcagtgcggacgtcgccattcctggcccatgggaagattgcgtttcacctgctcctgaaggccgaaggtggctctagcgcatcctttgtcgcgccgtgacctgcaggtactgacagatccgtagggaggacaccgtgacttcccggacgctgggaaatggtgagtgtgcggggccagtgtccgaggggaggtttctggttgg

SEQ ID NO: 21209 - DNA, 2300 bp, Homo sapien
cctatgaggaggagccagaacctccctctacccctgatccccaagcctctggggaagagccaaggggaccgtctcctcaccaagtcctcataagcttcggggatgatgtccataacacgtgtcccgggtgggcttagagtctctggagcctggcacaatttgaactgcagaatcctgagagcccacaacctatcacaaaatcaaagcctgctcccaagacgtggagccgtcagctggaagagctggcactggcaggggtcctcagacccccaggtctcccaccctcccatctggcccctccagcatgcagccttggcccaggggaggaggggcaggaatgtccccgggatcctggcgggaggagctgcccagtgggggccctgagctgaggtattaggaggagaggcctgccgtggaggccaagagggaggaacgtggcaggcaggggccagcagggtgagcggggtgggtgctgggggtgcattactgtcttctggacattcatagggtcaggctaggggacatgcgatgaggaagcattactgtctgggtttcatctgcctgtctgagggtgacgaggacggctaggagcacagtcagccaccaggaggcaggaggaccctcagggaggtgagcgttgcctgcgcaaagtcggggttggaggaccaagcctccgggatacagaaggtagccacagggaggctgtgatgccctctgctgatggggatgagaggcatctaactcagggtgtgggggtccctatccagtcccaggctcctgcatgacccacagcaggcaacatcctagaggctccaaacgagctggggacacaaggaaggctccttgcctggaagctgagatcacctagccagggtgaccatccccaggcctggctgtgtgagtccccatgggcagctgtccacctaccctgcaaggagtgcctctcaccagccagcagctgggccaccactcagaaggtatcttttctgggcagatagaggagagtggcagcaatgcagctcatggccctgcagtagcccagctcctgcaagagtcagagtcaccatggaaggatgtcacctgggagggctgaggtcacctgagaggactgatgtcattgaggaggcctgccacaggccctgtgggatttggggtgcagcctgttcacccctctcctgacactgggtgtcaggactgagcaagtcacgcacgtctcagttgacaaggagtccagagagattcctgtagcgagtgtccaagcccacatggcccgagaggacataggagaggaccgtggatgtccctccccctcagatgccaggccagggaggccaccgtgccaggcttgggacagcatctgtgagctaggctggccaacagggcgggctgggggcccaccgcatacagggtcctgggaagacccaggggctgcctgccaggtatgagagggaggctgggtccagaccctgtgtgtgcagcccatggagccagctcagtggctgtccctccaggagtgatctggaaactgggggcacagtgggagcaggcacttcaggaaccccctccctgtctgctgcgctccagtggggttcgggcggaggggacattggatccctgccagttttccaatgaaggaacagcttccgcgggatccacactcatttcgtgacaagagcgacgtccatcgggtactttggcaacttgtcaaaaatgcctcctgggaggaccactttgggacactgaccagctcctggaccttggggcaagcccaggaggagggtgtcatttcttgttctgagattgggggtcaggctcaggtcagaccaggagtctgtgcctgagccctctccatctcagcatgacccctctgagaccctccctccctgcctcgcttgaatgttcaagccaacagcgagcttgagtcctaccggctgcgtcttggtaggtgtcagatactgaattttaaagaagcaatgacaccccctacccaagacacccgtgcctatgaatatgggaatgtgacccgcgaatattgttgccttggaatactcatgggattaggtgcaatatgccaccaggacaagaaagacatgctgcagcctaggaaagagagaaaagagggtttgggttcacacggatgctgttttgttctctctatcgtgttccaacaaggaatccaattccaggtccagatgatgcgcagaataagcagtgagctcttcagggccactgagttttatgaaatgttttggtgaaagtggattttactattcccgggttgaagattgtcttggtggcct

SEQ ID NO: 21210 - DNA, 2300 bp, Homo sapien
tggggctaacattcccttatctatgtctctaatttatccaaatattgaccaaaaagattagtggtggtaggaaaatggaaggaggagctccagttcacagaaggagaaaatataatcagtgctgcctagcgtccagcttaagcttacccatgggggactgagtctcttcagaaaaaagcgatggttctccattgtattagtctgttctcatgctgctaataaagacatacccaagagtgggtaatttataaaggaaagaggtttaattgactcacaattccacatggctgtaggtcagggcagtggggttcacaatcatggaggaaggcaaggatgagcgaagtcatgtcttacacggtggcaggcaagagagcatgtgcaggggaactgccctctataaaatcatcagatcttgtgacatatattcactaccacgagaacagcttgggaaagatgcacacccgtgattcgattacctccctccaggtccctctcatatcacacgggaattatgggagctacaattcaagatgagatttgggtggggatacagccaaaccatatcattcatcatctgagggaactgtggtctcagacagctgggcactgagagtgcacgctgccccctagaattccacacctacatcacagagagacagaacagtctcaaaggattcttaaggttaatgtggggagccaaaggaggagatgaattcacagcttgtgccttaccttctggtctaactaaaactacttttgtcctggcccaacaagattcccagactcttttctgggttgcaccaggggtaattcagaaagacaaaaagttattaatgcccctccattccccacagctcctgaggtctaagttgttcattccctgggttttaggttgttgttctccctctgcttccacagaatcagtgtgccccattccagtacctatgatttcacctgtattcttgtcacctcctactttctcctagacattttatctaacagagccaggtgaaacagagacaaggatatttacataaaacttaaacagaactaagttggagttccataacccccattgggctgggatggcactcaggctggcctaagattgtggttatggaacagaaagacacattttgcccaggaatgatcagtgtggaatctcaaatttgggaaatagatccttagagcgcccaatcgtttcatccttctcttggaggcaatcaggaagagataatccccttttggagaaaaccatgtctaatcaacagattacctaaccaacatgtgtggaaaaggagttaaaatctgacagttgacccattttagtagatttggtaataaatgccacaaagtcagagttcaagtggtctcaaaagcctaaaaggtgacacagattagtttcaagggacacaaggtgtcactgggtgtgccaacctcccagagggtgagaaccatggcaactttgggcaggctgggaaacgatcccggactcttgcagttctgtgagaaatcaaacttaccgcaactttggaagtcaggaagccagcacgttgggggatgcggtatcacaatttcttggtgagacaagctgtcctggtagcttgtcctctcccatcaggtaggagaggttaaagaacaggcaggctccccgtctgcatggcggaacagctctgaaggcatggaggagcgaggctgaaggtgggggccttcgcccatcatgccggaagctgaaatttcttgttacctgcaagtgatcgcagggctgcaggactacaatcccagcgtgcacagggatcagggactgtgcgcatcactggaggaaggggcagagctgcgcgcgcctggctgagcatgctaggacatgtaatctcatggccagtcccagcccttcggccacaaggctgcaggactacaatcccagcctgtaccaggctcgggggcggttcgcaaccccagaggaaggggcagggcggtgcgcgccgcgcctggtatgctgggagttgtagtctctttactgctctcagcccatgggtaggtagcttcagaactacaatcccagtatgcatcggggtggtgcgtaaccctggagggaggggcagacacttaacctgtgtctaaagcactgctggccgccgattctacgccgcccggtcgccagggagagtgaatacagctagggacgtgaaaggcaggtctgggctgggcattgaggagggtattaagctaggaagtatgccttacctttatctaaatcgggcgggtcgtcctcccctcattggccttgtgcagctcggatt

SEQ ID NO: 21211 - DNA, 2300 bp, Homo sapien
gaaaagagacatatatatatttacactcaccagactatggaggatttaccaccagagtgggaagcaacagcctgggctccagagttggacactcgcccatgcacagaggaggagaggtctctcatggagctttggcacggtctgggaccctagctcttttgtaacgaattatttggcataaggcccattcatgagggccattcgtgactggacccaaggaacacaaaagtcaactggcttttgcgattgtctattgtttttcaacaactaatgtataggaatagattgaaatagagatttctccaatacagcgctggatgaatgcctcaagcagctcacacaacttgttccaggacttggtgaccattgtttgtagccatgttcaattgagttcaaatttaatatttaacttttcctccacaccagactatggaggattcaccaccagaccaggaagcaacaggctgggctccagagtcggataccgcactcatcagactaggaggattcaccaccagactggaaagcaacagcctgggctccagagtcagccacccatctctgcacagacaaggagaggtctcatgaaggttccgcgtgatctgggaccctagctctttttgtaatgagttctttggcatgaggcccagtcatgagggcccttcgcgattgggctcaaagaacacaaaaaggtcaactttttttgtgtgtgtgtgattgtctattgtttttcaataaccaatgtattggaatagattgaaatagagatttctccaaaacagcgcaggatgaacacctcaaggggttcacataacctgttccaagacttggtgaccattgtttgtgtccacgttcaataagttcaaatttaatatttaagttttcctccacaaattcccctgtcttgatgaattggctctgtctaggcaaagggcaaggtgaaccccttgggccgttacacaacctccacttcctgggttcaagtgattctcctgcctcagcctccagagtagcggggactatatgtgtgcaccagcacaccctgctaattttttgtatttttagtagagatggggtttcaccatgttggccaggctagtcttgaactcctgacctcaagtgatctgcccaccttggcctcccaaagtgctgggattacaggcttgacccaccgcgcctggccctaaatgatttctttctaccccctatagcagtttgaaattacttaaaggttgtttcaaatggaaaaataaaaagaatgtggataaaaataaaatataaaaagttaaaaaacttacaagagattacaaaatatatatgtaaatctggagtgttcaaaatgacaaatttatttctaaggttttattaaaattagctttaattgataatacactattaccaaagtaaaagttgattttctcttgaacaaaaattttacgtattattaatatgacagcagaatacttccgttcaccttttgaatatattcaaaaagagagagagtcaaaaagagagagaattttcccatgctctggggtgggcctggctcagctcagggaggaagtcctgtttgaaaaggctgcagctggccaggcttggtggctcaagcttgtaatcccagcacttcgggaggccgaggcaggcggataacttgaggacaggagtttgagaccaggctggccaatatggtgaaaccccgtctctattaaaactacaaaaaaaaattagccgggcatggtagcaggcgcctgtaatctcagatacccgggaggctgaggcaggagaatcgctcgaacccaggaggcagaggttgcactgagtcaagatgacgccattgcaatccagcctgggcaacaagagtgaaactccgtctcaaaaaaataaataaataaaatttttttaaaaaaagaaaaggctgcagcttagactgtctctctttcttcactcagtccagcatcggatcacgtcttctgtaactcaggacctgagggggcggggcctcaagcattatccaatcagggacgctgggctggaaaccgtccaatcagccacgcagctgtagcgaacaggacggtttccggcttccggctttggcgggcccattgtctctcgctgacgccagagatccagctatcgtcttcactgctctgtgccgtcagctcctagaggcccagcctctgtggccctgtgacctgcaggtattaggagggtcacagctaggacgccgggaccccctggaagcctagaaatggtgagagtgccagttcgacatcccgagagagggagaggggctggttgga

SEQ ID NO: 21212 - DNA, 2300 bp, Homo sapien
ccttccgcaactgggcacaaggaacacaaaaaggtcaacttgcttttgtgattgtctattgtttttcaataactaatgtatagaaatagattgaaatagagatatcactgaaacagctctgaatgaacaactcagaaggctcacacaacctgttccaggacttcgtgacaattgtttgtgtccacgtttaattgagttcaaatttaatatttaacttttcctccacaaattcccctgtcttgatgaatcatctctgtctaggcaaagggccaggtgaaccccttgggccttacacaacctccgcctcctgggttcaagcgattctcctgcctcagcctccgtggtagctgggactacagatgtgcaccagcacgccaggctaattttttttttttttttttttttttgagacggagcctcgctctatcgcccaggctggactgcagtggcgcaatctcggctcactgcaagctccacctcccgggttcacgccattctcctgcctcagcctcccgagtagctgggactacaggcgcccgccaccgcgcccgccaccgcgcccgcctaattttttgtatttttagtagagatggggtttcactgtgttggccaggctggtctttaactcctgacctcaagtattccactcaccttggcttcccaaagtgctgggattacaggcgtgagccaacgcacctgtccctaaatgatttctttctatctcctataacagtttgaaattacttaaaggttgtttcaaactgaaaaaataaaaagaatgtagatataaataaaatatagttaaaaaattacaggagattacaaattatatatgtaaatctcgagaggtcaaaaatgacaaattttgtttatttacaaggttttatttatgtatttattcatttttggagacgcagtctcactttgtcacccaggcttgagtgcagtggtgcgatcttggctcaccgcaacctctgcctcctgggttcaagccattctcctgcctcagcctcctgagtagctgggaccacaggtgcatgccaccacgcccgggtaattttttgtatttttagtagagacagagtttcaccgtgttagccaggatggtctcgatttcctgacccagtgatctgccctcctcagcctcccaaagtactgggattacaggcctgagccaccgcacctggctttacaaggtcttattaaaattagctttagtattgataatacactattaccaaagtaaaagttgactttctcttgaacaaacatttcatgtattattaatatgacagcaaagtacttctgttcaccttttgaatacattcaaaaagagagagaatatgagatagaattttcccatgctctgggatgggatgctcagctcagggaggaagccgtttgaaaaggctccagctaggctaggcgcggtggctcacgcttgtaatcccagcactttgggaggccgaggcgggcggatcacctgagatcgggagctcgagaccagcctgaccaacacggagaaaccctgtctctactaaaagtacaaaaaattagacgggcgtggtgaggcatgcctgtaatcccagctacatgggaggctgaggtaggagaatcgcttgaacccgggaggtgcaggttgcggtgagccaacatcgtgccattgcactctagcctgggcaacaagagggaaactccgtctcggtggggggaaaaaagaaagaaaagaaagaaagaaagaaagaaagaaaaagaaagaaagaaagaaaggaaagaaagaaagaaagaaagaaagaaagaaagaaagaaagaaagaaagaaagaaagaaagaaagaaagaaagaaagaaagaaagaaagaaagaaagaaagaaagaaagaaaaggctgcagcctaggctgtcactctttcttcactcagcccagtatctgatcacatctgtcactcagcggctggggaggcggggccttaggcattatccaatgagggacgctgggccggaaaccgtccaatcaggcacgcagctggagcgaaccacatggtttctgggggcctttgtttctcgctgcagcgggagctccaggtttatcctcagtgttctgtgtcctgtgcttatagaggcccgtcctctgtggccgtgtgacctgcaagtattgggagagccacagctaaaccccgggacccctggaagcctagaaatggtgagtgccgggtccaacgtcccgagagaggggagaggctgtttggaacggtgggaagtggctctggcgggactctgcttcctcacagtcagctccacaa

SEQ ID NO: 21213 - DNA, 2300 bp, Homo sapien
tgtttgggtttggtagggataggtcagtgtggcacatatttccattactgtagcaaaaattgctggtgtctgtggcaggggagggcacctgaggacaggaaaggagaaacttatatttttatcttcatgaagcagctcattgttcctgaatctcttctgttttaaaggacagaaaagggtggactttttctgtgttttttttctttctgccatttgatgtcatgctagcaggtaaacaggtggtgctgacacttttaagggcatattatcaagatacgggtgtaatttgtacagagaatctcgtctgagaaggaattccagagaagcaagagagggaaaagtggcttttctgtttcagatcaagagctgtattcactctgcctcctcgaatgctatgcatttagtactcacaaacttttacttctctacttttgctttttttttaatgagtttggtttaagtacttcttaaaattcttatgatagtcaagagtctctgtaaaatatttattttctataccttagagccttctctacatttgctgcatcatagcttcttatatgccatgcaggattctcagcaagactttataatctgcaatattaaaaatgttcccttcgtggctgttgaacatggaaagacgtggatactcaagatttctattggggaaaactgtggtccttagtaaagatggagaacatgtaatgttgaggctccatctgtgtgttccattagctctatgcagaataggattagggaaatgcttatttaaaagggatggcagttattacccagaaagttctgaaagaaaattaaggtacctgctctctagggagctaaatgaagcctacttaaaattcctactaaaagttacagaacataggagttatctatattttgaagttagcataaaacatgtttctttatggttaaattcagattttatttactttctttgggaggaatatttcaacagtgatgctgtgttcttcttcttcttctttttttttttttaagaagagtttcactctcattgcccaggctggagtgcaatggtgcaatcttggctcactgcaacatctgcctcccaggttcaagcaattctcttgcctcagcctcctgagtagctgggattacaggcatgtgccacaacgcccagctaattttgtattatcaatagagacggggtttctccatgttggtcaggctggtctcgaactcccgacctcaggtgacccacccatctcggcctcccaaagtgctgaaattacaggcgtgagccaccatgcctggccgatgctgtgttcttctgtgtgaattagcacatcataaaaatttgtcctagtgcagttaagggttaatgattcacttggtgacatagctctctgacagatttttttttacaatagagttaattatttctctcttcattaagtatttttatgcagctgatgtgcataaaccatcacacttaatctggcgtctatcctttcttctcttttttgctacatatttttctttggaaaatgaaggctcttatctttgtttacaggccagaaaaactgggaaaaacacaggctcttccatttactcaatgtttgacaaaataccgttcttgggccaaaaacattcgcattagagatgagcttgtcagaaattcaaaaagtcagactttatgccagatcttccggaataaaaaaaaaccctgcacaacaaggtcttcagcttattgtgtatattaaaatttgagaggtgccttctaactcaacacatcttttgcatctgaaaaatattcacaactcattccatatgatgcaaatatagcactaaaaaatgttcatgttcatgcccttaattttatgctctattatctaaaaaatatcatatataaactgatgttatggatcttgtgccgctcttttttctcagagttagaggatacattagagaatatttttgggttgaaaaatattttattggataattttaggcagtcctttgagtcagaaccagttctctttactctctaatttcaccttaagtcaaattaaaaattcctctcatgccatttagtaattatgtgtgtgtgtgtgttttccagggaccattgcaatttagagatgtggccatagaattctctctggaggagtggcattgcctggacactgcacagcggaatttatatagggatgtgatgttagagaactacagaaacttggtcttccttggtgaggacaacttgaatatataattcataatataccctgaagattttatttctcttttttgtagaatgtttg

SEQ ID NO: 21214 - DNA, 2300 bp, Homo sapien
cgacaaggggaaaacttggcatttcttggagacttaatgggatacagtgagcttaagcctttccaagatcttaccagtcagtcttcccttgttcatctttgagcaaatatatggtggtattgtggtggacccttactggacactctgccaagtaactggaacggcacttgcactgttgtccagttggctatccctttcactctggcatttcatcgactagaaaaagaaaaaccacaacactgtaaaataagagaagccccttatgtgtcttttgactttcaagtttatttagacacaactggagtcccacgggtggtacctgatgaattcaaagcccaagatcaaatagctgcaggatttaaatcaatatttccacgggtaactattaataaaaatgtagattagatagataaatcacatctattataatcaatattagtttattaattacaccagaaatgctgtcaaagaaatagccaaccaattaaggcctactagccagataacttagaaaaacaaaatggccctggacataatattagctgaaaaaggtggagtttgtgttatgattaaaactcaaatgttgtaccttcatcccaaacaatactgcccccaataggaacataagaagggccttacacgaacttaccactttatccaatgaattagctaaaaattctggggtcaataacacgttttcagaatggctagagaggtggttcagtaaacgaaaaaaagtcatagcctcaattcttacttctcttatagttgtaataggtgtactaattcttgttgggtgttgtgtcataccatgcatctgtgggctagtacaaagacttataaaaacgacacttacgaaaacctcccttagttctcctccaccttattcagataaacttttccttttaaaagatcaagtcaaacaacaaagtaaaggtatgtttaaaaagttttaaaaagcgtgtggtcgcagtggctcacgcctgtaatcccagcactttgagaggctgatgcgggcggatcacccgaggtcagaagttagagaccagcctgaccaatatgaagaagccccatctatactaaagacacaaaattagctggtcgtggtggcacatgcctgtactcccagctactcgggaggctgaggcaggagaattgcttgaacctgggaggcaaatgttgtagtgagccaaaatcgtgccattgcactccagcctaggcagcaagagcaaaaactccatctcaaaaaaaaaggtttttttttaattataaaaattaaaagggggaaattgtaaaatacaataaaattcctcttcaaaggtttagtcttaactttcttgttctttgttctcaaactcaacttgcttgttctccatgcctccttgcccctagttactgtaacaaccttccttcccaacagctctaatcaataattcacatctgttcccttgattactcactctgcagccttcccacccttcaaaaccacacgtcccaccactgtgacttatacatgccccttcccttccttatttggaaaaatatttacaaatagccaatcgggtcagtttagattgtggggtccgaccctagcccatgggggagtaacacagaggaagagactttacgttaaaaataaaaaccccttccctcctttgttcagggtgctcttgcgatcgtgattaatgcaaacaaaaaccttttgcagaagtaaattgccttactaaaaaaacttttgcctgagtactggtttcactttgcgacaccaaacactttacttccaacggtattattaatatgacaacgaaatacttctgttcaccttttcaatacattcaaaaagagagagtaaaaaagagaatgttcccatgctctggggtggacgtggctcagctcagagaggaagccctggctgaaaaggctgcagcttaggctgttactcttcttcactcagcccagcatgtgatcacatcttctgtcactcaggtcctgagggggcgggaccttaagaattatccaatcagggacgctgggctggaaacgtccaatcaggcaagcagccggaccgaacagggcggcttctggtttggcgggtcctttgtctctcggtgcagccggagctccaggtctcctcttcactactctgtgtcctgtgctcctacaggcccagcctctgtggccctgtgacctgcaggtattgggagatccacagctaagacaccaggacccctggaagcctagaaatggtgagagtgccggtccgacatcccaagcgacggggaggggctggttggaaccgg

SEQ ID NO: 21215 - DNA, 2300 bp, Homo sapien
ataaataaataaagttctctttgtgtcacatcaatgtggaaaggtgtagatacctaagatctctattagggatggtatagggtcctcagatattagtgaagaggggaatgtgtattgtttaggttccatctggatgttccatcagctctatgcagaaacaggatgttttttttttgagacggagcctcgctctgtcgcccaggctggagtgcagtggcgcgatctcggctcactgcaagctccacctcctgggttcacgccattctcctgcctcagcctcccgagtagctgggactacaggcgcccaccaccacacctggctaattttttgtatttttcagtagagatgggatttcaccatgttagccaggatggtctcgatctcctgaccttgtgatccacccgcctcagcctcccaaagtgctgggattacaggcgtgagccacagcacctggccagaaacaggattttaaaaatgcacatttaaagaggatgtcactaattgcccagaataactcagaatattctggaaaagagaatagttagataagacttgctctttcaaatgctgaggaaaggctacttaaatacattattagaggttataaaacctgggagatatctgtagcttgaactttgcataaagatgtttctttatgcttagattcaggttataatttactttttgttgccaataatatcatagctctgatgattgtctgcccatgtgtgttgacactgtacatcaatttgttctattgtagttcatgttaatttctttttttttttttctttttttttgagatggagtctcgcactgttgcacaggtttgagtgcaatgtcacaatcttggctcactgcaatctccgcctcccacattcaagcaattctgctacctctgcctcccgagtagctgggattacaggcacgtgccaccatgcccagctaattttttgtatttttagtaaagatggagtttcaccatgttagccaggatggcctcgatctcctgacctcgtgatctgcccaccttggcctcccaaagtgctgggattacaggcgtgagccaccgcgcctggcccaattcatgttaatttcaatcacttggttaaggctctctgtgacagattttttttaattataaagttaattatttttatctttattattcgtaagtaccttgggagatttactgactgatgtacataaaccatcacatttaatctgcaaacttccctttctttttagattctctttgcttaaagcttgctttggaaaatgaaggctcatctttgtttactagtcagataaactggggctcaaccactttgtgtttgacaaaatattcttgattcggatgccttggtatcaactggctagcttttagaaattcagaaactcaggcttcacctgagatcacctggatcagactgcattttaacaagatctgtagttcattgtcacgtacattaaaatttgacagataccttctaacccatcatgacttctctgtatgaataatatttacaacttattctataatctgtagacataaaactcaaactgtatatgcctgtgttgatgcccttaattttatagtgattatttagaaaagtatctacattggttttgtggattctgttttcctttttgtttgtcgcccaggcaaggagtgccatggcatgatctcagctcactgcaacctctgcctcctgagttcaagtgattctcctccctcagcctcccaagtaactgggattacaggcgtgcaccaccacacccagctaatttttgtatttctagtagagacagggtttcaccatgttggccaggctggtctcaaattcctgacttcaggtgatctgcctgcctcggcctcccaaaatgatgggattacaggcgtgagccaccgaacctggccacatggattctgttttctttcctcagtgttagagaatacatcagagaatatatttgttaaaaatagcagattgaataattccagtaactctcataagtcacagcaattctctcttttcacatggagtcaagaactctgcccattgacagttggtcactatgttttgttttgtttttcaggaactgttgacattcagggatgtgaccatagaattctctctggaggagtgggagtttctgaaccctgctcagcagagtttgtataggaaagtgatgctagagaactacagaaacctggtctctctgggtgagaataacttcaatacacaatttctatttcacacaaaagattttattttcttcctctgtagaatgtttg

SEQ ID NO: 21216 - DNA, 2300 bp, Homo sapien
aaaccatttataactaattcatcaaaactgttgatgaaggccaggtgcggtaggtcacacctgtaattccagcactttgggaggccgaggcgggtggatcacgaggtcgagagatcgtgaccatcctggccaacatggtgaaaccctgtctgtactaaaaatacaaaaagttagcgggcgtggtggcaagcgcctgtaatcccacctacttgggaggctgaggcaggagaatcgcttgaacccgggaggcggaggttgcagtgagccgagaccgcaccattgaactccaggatgggcaaaaagagcaaaactctatctcaaaaaaaaaaaagaaaaagctgttggtgaaaagcagtagtttgggtacttggctacacactgtaatcaccctgagagctttaaaccatattgttgcccagatccaactccaaggattctaatttaattggtctgttgcaacttgggcttcagggattttaagtttacatcctgccccgcccctccagtcattctccacaccccccgccgccaccaccaccctccccacgaagtctcactctgcaatggcgcgatctcgactcactgcaacctccgcctcccacgttcaagccattctcctgcctcagcctcccgagtagctgggattacaggcgtgtgccaccatgcccggctaatttttgtatttttagtagagatgggggtttcaccatgttggccaggctggtctcgaactcctgacctcaggtgatacgcccgtctcggcctcccaaaatgctgagattataggcgtgaaccaccgctcccaaccccgcaggtgatttttatttgccaggggtaagaagcactggatctgatgaagaatgcattagctgtgagtgattttcatgtatgctgccgggatttgccccatggcaactctggagactggggttttagaaaacatccttgccctgttaaaaattagaagatgacttcaagacatactcagctgcttggctaaattgcagaaagagaaaatgccttcttcagagatctttttttttttaaacttggtttcactctgtcaccccggctgtagtgcaatggtgtgatcgtggctcactgcagtcttggtctcccagggtcaagtgatcctcccgcctcagccttctgagtagctaggactgcaggcgtgcaccaccagacttggctaaatttttaattattttttgtagagatgggatcatcgctatgttgcccgggctggtcttaaaactcctggcctcaagtgatgctcccgcctcagcctccctagttgctagaactacaggcacaggctaccacgcctggtttcttttttaaaatgtggctactagaaaatgtaaaattcatatgtgcttcacagtttatttcttagagaattgcctcccttgcgacatcttaggctgcctgctcaaaagactggaggctaggaaaatgatgaaatctgagattttaaaataattgtcattatattgtttccatttgtgaataacatatgtatactattcacaaataaagataactttatatacaaagttaaatgcaaatgttccccaggaagggccagtttccaattcaggaaggaagcgcgccagaaaagggttcaggaaaaacctgtaactcttgccttattcaacacattctcagatcacgcctcctgtcactcatgacctgagggggcggggcatggaactgtatccaatcatgggcgctagagtgggaactgtccaatcaggtgcgcagccaaggtagagggggcggtgtcctggagctggcggggcctttgtctcgctccagccagagctcagggtccatcttcattgcttagtatcctctgctctagtagttcccggtgactgtcgcagcctctgttgccctctgacttgcagatgctgtgagatccagagctaagactccacgacatcccggaagccgaaaaatggtgagtgtgccaggccgcgcatcccgaggtgggggcagggctggttgaaaccggccggaaccggcagtgacgggactggggcctcccagctgtcagctccggagtctgcggactggagtccccggcaggcacagctcggccgtcgatcacctccgggcacaggatgcgaggtgggccagcagccgggaccctgggcgggcatcccgttccgttctcccgcttcccgcccggagcccaccctgggaagagccgcgcgcgttcttgcgtctgccccgactgcggggacaatggaagcgtcctcagggcagagtccagaccccgtgtgtggtttgtgcgt

SEQ ID NO: 21217 - DNA, 2300 bp, Homo sapien
gcccggccagtagcatgattttaactttttgggatgtgattttgttttcagcaaggttctcccctgagaatgatgctcaccgggaccagggcacacagcacagtgccctgtgcatagtatacactgagcacacatggaaccaggttcaatcaggaacaaagcgagtagcagaggttggttctgcaaagtatagtaagtgggaaatgagttaagattgtaaggtcacaactcagcagcaaacgtttttacatgcatttgaaaaaccatttataactaattcatcaaaactgttgatgaaggccaggtgcggtaggtcacacctgtaattccagcactttgggaggccgaggcgggtggatcacgaggtcgagagatcgtgaccatcctggccaacatggtgaaaccctgtctgtactaaaaatacaaaaagttagcgggcgtggtggcaagcgcctgtaatcccacctacttgggaggctgaggcaggagaatcgcttgaacccgggaggcggaggttgcagtgagccgagaccgcaccattgaactccaggatgggcaaaaagagcaaaactctatctcaaaaaaaaaaaagaaaaagctgttggtgaaaagcagtagtttgggtacttggctacacactgtaatcaccctgagagctttaaaccatattgttgcccagatccaactccaaggattctaatttaattggtctgttgcaacttgggcttcagggattttaagtttacatcctgccccgcccctccagtcattctccacaccccccgccgccaccaccaccctccccacgaagtctcactctgcaatggcgcgatctcgactcactgcaacctccgcctcccacgttcaagccattctcctgcctcagcctcccgagtagctgggattacaggcgtgtgccaccatgcccggctaatttttgtatttttagtagagatgggggtttcaccatgttggccaggctggtctcgaactcctgacctcaggtgatacgcccgtctcggcctcccaaaatgctgagattataggcgtgaaccaccgctcccaaccccgcaggtgatttttatttgccaggggtaagaagcactggatctgatgaagaatgcattagctgtgagtgattttcatgtatgctgccgggatttgccccatggcaactctggagactggggttttagaaaacatccttgccctgttaaaaattagaagatgacttcaagacatactcagctgcttggctaaattgcagaaagagaaaatgccttcttcagagatctttttttttttaaacttggtttcactctgtcaccccggctgtagtgcaatggtgtgatcgtggctcactgcagtcttggtctcccagggtcaagtgatcctcccgcctcagccttctgagtagctaggactgcaggcgtgcaccaccagacttggctaaatttttaattattttttgtagagatgggatcatcgctatgttgcccgggctggtcttaaaactcctggcctcaagtgatgctcccgcctcagcctccctagttgctagaactacaggcacaggctaccacgcctggtttcttttttaaaatgtggctactagaaaatgtaaaattcatatgtgcttcacagtttatttcttagagaattgcctcccttgcgacatcttaggctgcctgctcaaaagactggaggctaggaaaatgatgaaatctgagattttaaaataattgtcattatattgtttccatttgtgaataacatatgtatactattcacaaataaagataactttatatacaaagttaaatgcaaatgttccccaggaagggccagtttccaattcaggaaggaagcgcgccagaaaagggttcaggaaaaacctgtaactcttgccttattcaacacattctcagatcacgcctcctgtcactcatgacctgagggggcggggcatggaactgtatccaatcatgggcgctagagtgggaactgtccaatcaggtgcgcagccaaggtagagggggcggtgtcctggagctggcggggcctttgtctcgctccagccagagctcagggtccatcttcattgcttagtatcctctgctctagtagttcccggtgactgtcgcagcctctgttgccctctgacttgcagatgctgtgagatccagagctaagactccacgacatcccggaagccgaaaaatggtgagtgtgccaggccgcgcatcccgaggtgggggcagggctggttgaaaccggccggaaccggcagtgacgggact

SEQ ID NO: 21218 - DNA, 2300 bp, Homo sapien
catgttggccagcctggtctcaaacttctgacctcgtgatccacacatcttggcctcctgtggattttgagggaactcgtgacctaaatcataacaggaaatttaggcctcataaagacatcatggttaaagcagaggtgttttgtttccagtaaagtccaatagcaagctaacaattgtgcacaggtgaggagagctgtcacgaagctttggcgcagtctgggaccctagctcttttgtaatgagttgtttggcacgaggcttagtcatgaggacccttcgcgactgagctgaagaaacacaaaaaggtcacttgtttttgggattgtctgttgtttttcaagaacgaatgtataggaatagattgaaatacagatttctctgaaacagcgctggatgaacgcctctaggggctcacacaacctgttcccggacttggtgaccattgtttgtgtccacgttcaattagcacaaatttattatttaactttgactccacaccagactatggaggattcaccaccagaccggaaagcaacaggatgggctccagagttggccacccatcggtgcacagaccaggagaggtataatgacgcttctgcgcggtctgggaacctagctctttttgtaacgagttgttcagcatgaggcctagtcaccagggcccttcatgactggtctcaaggaacacagaaaggtcaacttgtttttgtgattgtctattgtttttctttttctttctttcttttttttttttttttttgagacggagtctcgctctgtcgcccaggctggagtgcagtggcgcgatctcggctcactccaagttccgcctcccaggttcacaccattctcctgcctcagcttcccgactagctgggactacaggcgcctgccaccaggcctggctaattttttgtatttctagtagagacggggtttcagcgtgttagccagcatggtcttgatctcctgacctcgtgacccgcccgcctcagcctcccaaagtgctgagattacaggcgtgagccaccgcgcccggccttgtctattgtttttcaataacgaatgtataggaatagattgaatagattgacatagagatttctctaaaatagcactggatgaacgcctcaaggggctcacacaacctcttccaggacttggtgaccattgtttgtgtccacgttcaattgagttcaaattaaatatttaacttttcctccacaaattcccctgtcttgatgaattggttttgtctgggcaaagggcaaggtaaactccttgggcggttacacaacctccacctcctaggttcaagagattctcctgcctcagccttcggtgtagctgggactacaggtgtgcaccagcacgcccaggtaaggttttgtatttttagtagaaatggggtttcaccgtgttggccagggtggtcttgaactcctgacctcaagtgattcgccctctttggcttcccaaagtgctggaattacaggcgtgagccaccgcgcctggccctaaatgatttcctttctgtctcctataacagtttgaaattacttaaaagttgtttcaaattgaaaaaataaaaagaatgtagataaaaataaaatataaaaagttaaaaaaattacattagattacaaaatatatatgatgtatatgtaagtctcgagaggtcaaaaatgacaaatttgatttacttacaaggttttattaaaattagctttcgtattgataatacactattaccaaagtaaaagttttctcttgaacaaaaattttttgtattattaatatgacagccaaatacttctgttcaccttttgaatacattcaaaaagagaaagagtaaaaaagaattttcccatgctctccggtgggcctggctcagctcaaggaggaagcccggcctgaaaaggctgcagctgaggctgtgactctttcttcactcagcccagcatgtgatcacatcttctgtcactcagggactgaggaggcggggccttaagcattatccaatcagggacgctgggttggaaaccgtccaatcatgcaggcagctggagcgaagaggaaggctttcgggtttggcgcggccatttgtctcttgctgcagctggtgctccaaatctggtcttagctgcttcgtgtcttcttctccagcctctgtggccctgtgacctgcaggtattgggagatccacagctgagggacccccggaagcctagaaatggtgagagtgcctttccagcattccgagagaggggagggactggttggaaccgatggga

SEQ ID NO: 21219 - DNA, 2300 bp, Homo sapien
ccacacatggtggctcacacctgtaacccaatactttgggaggccgaggcagtgggcagagcacttgaggtcacgagttcgagactagcctggccaacatggtgaaaccttgtctctactaaaaaatacaaaaaaaaatagccaggcgtggtggtgcatgcctgtagtcccagctactaggtagtctgagacatgagaatcacttgaacctgggaggcagaatttgcagtgagctgcgattgtgccactgcactccagcctgagtgacagagagagagactgttaaaaaaaaaaaatccaagtgtcagaagcctcaaagatcgaaactagacaaactcatgaagatgagaaagaatcaacaaaaaacagctgaaaggccagagtgcctcttctcttccaaatgatcaaaatgtctcttcagcaaggtgcagaactggacagaagatgagatgcatgaattgatagaagtaggcttcagaagatggttaataacaaactctgctgagctaaagaaacatgttcaaacccaatttgaagaagctaagaacctcgataaaaggttagaggaactgttaactagaataaccagtttggagaggaacataagaggatgagatgcatgaattcacagaagtaggcttcagaagacggttaataacaaactctgctgagctaaagaaacatgtttgaacccaatttgaagaagctaagaaccttgataaaaggttagaggaactgctaactagaataaccagtttggagaggaacataagaggatgagatgcatgaattcacagaagtaggcctcagaagatggttaataacaaactctgctgagctaaagaaacatgttcgaacccaatttgaagaagctaagaaccttgataaaaggttagaggaactgctaactagaataaacagtttggagaggaacataaatgacctgatggagctgaaatgtttggcatgaggcccagtcactagggccctttgcgactgggctcaaggaacacaaaaacgttatcttgtttttcaataactaacatataggaatagattgaaacagagatttctctgaaatgacactacatgaatgcctcaatgaatgcctcaagggggtcacacaaccggttctgagacttggtgaccattgtttgtgtctgtgttcaatttatttcaaaattaatatttaacttttcctccacaaattcccctgtcttgatgaatgggctctgtctaggcaaaaggcctgtctttatgaatcagctctgtctagacaaaaggcaaggtaaaacccttgggctgttacacaacctccgcctcctgggttcaagcgattctcttgcctcagcctccggagtagctgggactacaagtgcacaccagcacacccagataattttttgtatttttagtagaaatggggtttcaccatgttggccaggctggtcttgaactcctgactcaagttatccgcccaccttggcctcccaaagtgctggaattagaggcgtgagccactgcgcctggttctaaatgatttctatttcctgtaacaatttgaaattacttaaaggttgtttcaaattgaaaaaaagaatgtagataaaatataaaaagttaaaaaaattacaagtgattatgaaatatatgtgtaaatctcgagaggtcaaaagtgacaaatctgatttatatataaggttttattaaaattagctttagtattgataatacactattaccaaagtaaaagttgattttctaacaaaaattttatgtattattaatatgacagcaaaatacttctgttcaccttttgaatacatgcaaaaagagagagagtaaaaaagagatagaattttcccttgctctagggtgggcctggctcagctcagggaggaagccctgcctgaaaaggctgcagcttaggctgttactctttcatcactcagcccagcatctgatcacatcctctgtcactcagggactgagtgggcggggccttaagcattatccaatcagagacgctgggctggaaaccgtccaatcaggcaggcagctggagcaaagaggacggcttccgggtttggcgcggcctttgtctctcgctgcatctggagctctaggtcgcctcttcgctactctgtgtcctctgctcctagaggcccaccctctgtggccctgtgtcctgtaggtattgggagatccacagccaagatgccgggaccccttagaagcctagaaatggtgagagtgcccattggacatcctgagagaggggagggactggttgatgggaa

SEQ ID NO: 21220 - DNA, 2300 bp, Homo sapien
aagagctcaaacaagtttacaagaaaaaaaacaaataacctcattaaaagtagaaaagaaaaacatgaacatattcttttcaaaagaagacaaatgtgcagttaacaagcatgtgaaaaaaatgctcattgctaattattagagaaattaaaagaaaaaccacaatgagataccgcatcacacccatcagaatggctatttttaaaaagtcaaaaaataatagatgctggcaaggttgcagagaaaagggaatgcttatactctgctggtgagagtgtaaattagttcaacaactgtaaaaagcagtgtggcgattcctcacagaactagaaacagaattatcatttgacccagcaacctcataattgggtatatacccaaagaaatataaattattatattacaaagacacatctatatgcatgttcactgtagcactattcacaatagcaaagacacggacaggcactaaatgcctaccaatgatagactagataaagaaaatatggtatggtcagatgttgtggctcatgcctataatcccagcactttgggaggccatggcaggtgggttgcctgagcttagaagtttgagaccagcctgggcaacaagacaaaatcttgtctccccggaaaaaaaaaatatataaaattgcccagttatggtaatgcacgtatgtagtcccagctacaagggaagatgaggtaggagagaattgcttgagcctgggagattgtggctaaagtaagccaatatcatgccctggcactgtagcctaggcaataagcctgtctccaaaaataaaataaaataaaagatttagtaaaaacaaaatatggtatataaacattacaaaatactgggtagctatttaaaaaaaatcatgtcctttgcaataacatagatgaatctggagaccattattcttagaaaatgaatgcagaggctggacatggtggctcatgcctgtaatgctaacactttgggaggccgaggtgggcgaaccacctgaggttgggagtttgagactagcctgaccaacatggattaaccctgtctctactaaaaatacaaaattagctaggcatggtggtgcctgcctgtaaccccagctactggggaggctgaggcaggagaaccgcttgaacccaggatacgaatgttttgatgagccaagatgttaccatggctctccagcctggacaacaagagcaaaactccctttcaaaacaaacaaacaaaaaaacaacaaaaaaagaaaactaatgcggaaacacaaaaccaaatgcatgttataatttataaataagagctaagaagtaagaacacagaacacaaagagaagaacagacacaggcctagttgaggctggagggtagaaggactcagaagatcagaaaacataattgtttggtgctatgggtagtacctcagtgacaaaataatcggcacaccaaatccccatgacataattttagctgtataacaaacccacatgtgtacccggaaccaaaaataaaagctaaaagaaaaacaaatcccctctccctctccctccgcctccccctccctctccctctccgtctccgtctccctctccccagggtctccctctccctctctttccacggtctccctctgatgccgagccgaagctggactgtactgctgccatctcagctcactgcagcctccctgcctgattctcctgcctcagcctgccgagtgcctgtgattgcaggcgcgcgccgccacgcctgactggttttcgtgtttttttggtggagacggggtttcgctgtgttggccgggccggtctccagcccctaaccgcgagtgatccgccagcctcggcctcccgaggtgccgggattgcagacggagtctggttcactcagtgctcaatggtgcccaggctggagtgcagtggcgtgatcttggctcgctacaacctccacctcccagccgcctgccttggcttcccaaaatgccgagattgcagcctctgcccggtcgccaccccatctgggaagtgaggagcgtctctgcctggccgcccatcatctgggatgtgaggagcccttctgcctggctgcccagtctggaaagtgaggagcgtctctgcctggccaccatcccatctaggaagtgaggagcgcctcttcccggccgccatcacatctgggaagtgaggagcgtctctgcctggccacccatcgtctgagatgtggggagcgcctctgccccaccgccctgtctgggaagtgaggagcgtctccgcccggcagccaccccgtcc

SEQ ID NO: 21221 - DNA, 2300 bp, Homo sapien
gttggaagttctaatatactccacaatgtgaacacagtcagattctatttctgcatcaaaaagtgttgttggaagttgtcagatatatttcaatatagaacccccattcaatgactaggagatgagagagcagcagagatgggaaaaaaagctttataaaattcttctgaaattctgccccctttcttcataatgctcatgtttctcatgctgagagtaattgtgcactttgggtggttagagagaaattgcttttaggggactattttctggctgacttgatcaatcttatatctaaactgagctttttctcaagatcttttttctcaagatctttttaacttttttctctcaaaattatcttgctcagatggagatctgtttttctctccaatactttgggtgtctgtttcagaagccctattagtatcccatggtgtctgaatgaggtaggctgtcacagtgagaacttttgtagatatctctatctggactcatgctggaaattcatccgattttttttccatgtcaccatgataattaaaaacgggctgaaacactggtcacattcccattattgtgaaagtgcaattctactcacaaggcctgcaggctctcctgcagctcaggctttcctctctgatgtgacactagagtgctgctgtgggaaatgtggttcacataaactgagctgtgctcaaggctgtccctcagtggcagatgagagaggtcaagaggacactagcaaccaggaaaaagcaagaaagtgctgtagcccaatgccatggaacacagagccactgctgtaaaatgtaaatagccaaaaggatagaatgcttttcaaccatttttgtagcagagtgaaaacctaccttcagcaagtacctggcttcaagctgctaaactacctcctgttatgaaggtgtgaaaagtttttttgttattgaatataaacaattagcatatacagatggcctcttcaatctccatgtgaatttaggatgaactatgtatgacatggttctggaaattctacttgtggactaattttggtgaccatctttctgtctctgcagtctcttaagcagattgactatgatgcatgtcacataaaacagttttctttctgttctattgtggagtttttctggggctggagaacattcttttgttatttccaaacactgtctataattaccagacatgatataaacacataaggtgccaactggaatttactctagaggggactttccctctcagacttccagtcaactcacacttgtgcaacaaagtgcatgctgtcccctaaatatgcaagcagaactgtgtttctgcctatttggtatctatagtcctctacagtcacttctagagagactaaaccaaatttctaccaacttcacagggcaacaatcaatagttttatctcaatgactcttgtatcttcagaccttaaactgattcagagaccatggggcccacaaacctaatcagagtaacgttttcattgagtacacattcagacatgagaatcttcactttccccttttttctcttggtaaaatgttcacaaatgtgcaggtaacacctgctgctactccagccattcgggccctaaatctgcagctctacattttgtatctaggtcttgagatttgggaaatagaaaatttttatctaaaaatgcaagtccttttggttatcaaactcagacattgaaatgaaagtgcagttacgcctttctcctcctttgaaatatgtattcatctcttgaaactgttcactattgccacaagtagatgtatattaaactgataataccacattggacactgtatctcataccctaaaccataatgatatatgtccaatcaataaccaatgttacttctttaaataaaaatttctgacaactctatcagcccactctctgtccctttgtttttgtcttcacaactcctcttgcaactgctgttaatgaaagtgtagattctaggcaacttcagtctttgctcccaggttataatccttaaacttcacccaaataaactgtctacttacattcatgttgtgtcagcttttttttttttttcatgtaggcttaatacttagaaagtgctagagcagcctctattaggggatctcttctctgattgtactccacttgctgtaacaccaaaggatgcagaaccaggtgggtcctacctagaatctgcagataaggtatggcttctgcctggggtttacaaaaaagggtcagactgtaagagtgtccaggaggaaatagaatctgatgg

SEQ ID NO: 21222 - DNA, 2300 bp, Homo sapien
gccccatgagggactctgatgagaaatgctgtctatcaaaatagactagctcttgactacttgctagcagctgaaggagaagtttgtagaaaatttaaccttactaattgttgtctacacacagatgatcaggggcaagtagttgaagatatagttaaagatataacaaaactagcacatgtacccgtgcaagtgtggcacagactcaatccaagagccatgtttagaaattaattccagaaataggaagatttaaaactcttataataagagtaataatagtaacaggaacctgcttactgctcccttgtctgatacctgtatttctccaaatgataaaaaacttcgtcgctaccttagttcaccaaaatacttcagcacaagcatactgtataaatcactatcaatctattgcacaaaaagacataagtagcaaaaataagagtgagaactcccactaataaaaaagtgagagtctcaaagagaggaaatgagggaagagagagacccactcatattgttttattgttttatactcagtacctgttttaagaaaaaaacaaggaagtgaagttaaagacaggcagccctgggcctgcctggcctaaacctaataataaaaaatcaactcataacttaaaaactgattttattcgtagattccagacattgtatagaagaacattgtgaaactccctgccctgttctgtttctctctgaccaccggtgcatgcagcccctgtcatgtaacccttgattgctcaaatcaatcacgaccctttcatgtgaaatctttagtgttgtgagcctttaaaaaggacagaaattgtgcattcagagagcttggattttaaaacagcagcttgctgatgctcctagctgaataaagcccttccttctacaactcgatgtctgagaggttttgtctgtggcttgtcctgctacactgggaccctagctctttttgtagcaagttgtttggcataaggcccagttatgacagcctttcaagactaggcccaaggaacacaaaaaggccaatttgtttttgtgattgcctattgtttttcaataataaatgtatgggaatagattgaattacagatttctccaatacagcactggataaatgcctcaaggggctcacacaacctattctgggacttagtgaccattgtctgtgtccacattcaattgagttcaaatttaatatttaacttttcctccacaaattctcctgtcttaattaataggctctgtctaggcaaaaggcccgtcttgataaatcagctctgtctaaaccaaagggcaaggtgtaccccttgggccattacacaacctccgcctcctggattcaagtgattctcctgcctcagcctccggaatagctacaactacaggtgtgcaccagcatgcccagctaattttttgtatttttagtagaaattaggtttcaccatgttggccaggctggtcttgaactcctgacctaaagtgatctgcccaccttggcctcccaaagtgctgggattacaggcatgagccactgtgcctggccttaaatgatttctttctatctcctacaacaatttgaaattacttaaaggttgtttcaaattgaaaaaatagaatgtagataaaaataaaatataaaaagttaaaaaaattacaagagattacaaaatatatgtgtaaatctcgagaggttaaaagtggcaaatttgatttatttataaggttttattaaaattagctttagtattgataatacactattaccaaagtaaaagttgattttctcttgaacaaaaatattatgtattattcatatgacagaaaaatactcctgctcaccttttgaatacattcaaaaacagagagagtaaaaaagatacagaattgttcccttctctggggtgagcctggctcagctcagggaggaagccctgtctggaaaggctgcatcttaggctgttactccttcactcagcccagaatctgattacatcttctgtcactcaggtactgagggggcagagccttaagcataatccaatcagggaggctggtctggaaaccctccaatcaggcaggcagctggagcgaagaggacggctttctggtatggcgcggcctttgtctcttgctgccgctggagctccagatctcttgttcactgctctgtgttctctgctcatagaggcccagcctctgaggccctttgacctgcaggtattgggagatccacagccaagagccaggaccccctagaagtctagaaatggtaagagtaccggtcc

SEQ ID NO: 21223 - DNA, 2300 bp, Homo sapien
tgtcaacagcctcaaagatcaaaactagacaagttcatgaagatgagaaagaatcaacaaaagaactctgaaaggccagagtgcggcttttcctccaagttatcaaaatgtctcttcagcaagggtgcagaactggacagaggatgagatggatgaattgacaaaagtaggcttcagaagatgggtaataaactctgctgagctaaaggaacatgttctaaaccaattgaaagaagctaagaaccttgataaaaggttagaggaactgctaactagaataactggtttagacaggaacataaatgatctgatggagctaaaacacacagcatgagaacctcctgaagcatacaaaagtatttgtagctgcattgaccaagcagaagaaagaacatcagagtttgaagaccaccttgccaaaataaggcatgcagacaagattaaacaaaaatgaataaaaaggaacaaatgaagcctttgagaaatatgttctgtgcaggaaacacatgaggggagaagaaaagacacgcacacaatacctttaagggtaaacaagctttatcccaggtaaatggcaatgcatatataataagcaaattgatataataagagcattgcaatgggaaggggagaagagaaaaaatatatatctttacactcaccagactatggaggattcatcagcagaccaggaagcaacagcctgggctccagagtcggccacccatccctgtacagacaaggagaggtctttggagctttggtgcagtctgggatcctagctctttttgtaacaagttgtttggcatgaggcccagttgcaactgggctctttgcaactgggctcaaggaacacaaaaaagtcaacttgttttttttgcgattggctattgtttttcaataactaacgtataggaatagattaaaatagagatttctccaaaacaatctgtgcccagttctctttgcccagcttggcctcagtcccattcagccagaagatggcagctgcgctgacagccaggcccccagaagtcctgcctcttcactgcgctgtgactgtgccctggcctggagcccactttgggcagctctgcacctgcagcatggcgtctctcccagattgtgcagggaccaggggaaggtcggcaggtgaatgcctcaaggggctcacataacctgttccaggacttggtgaccattgtttgtgtccatgttcaactgagttcaaatttaatatttaacttttcctccacaaattcccctgtcttgatgaatcatctctgtctaggcaagatgaagcccttaggccgttacacaacctccgcctcctgggttcaagcgattcccctgcttcagccgccgtagcacctgggactacaggtgtgtaccaccacacctggctaattttttgtgtttttactagagatgagattcaacatgttggccaggctggtcttgaactcctgacctgaagtgatccacccactttggcctcccaaagtgcttggattacaagcgtgcaccagcggactggccctaaatgatttctttgtctcttgtaacagtttgaaattacttaaaggttgtttcaaattgaaaaaataaaaagaatgtagataaaaataaaatataaaaagttaaaaaattacattagattacaaaatatgtatgtaaatctcgagaggtcaaaaatgacaaatttgattttttataaggttttatcaaaattacctttagtattgataatacattattgccaaagtaaaagttgattttctcttgaacaaaaattttatgtattattaatatgagagcaaaatacttctgttcaccttttgaatacattcaaaaagagagagagtaaagaaaagatagaattctcccatgctctggggtgggcctggctcagctcaggaaggaagccctgcctgaaaaggctgcagcttaggctgtcactctttcttcactcagctcagcgtctgatcacatctactgtcactcagggcctcagggggcggggccttaagcattatccaatcagggatggtgggctggaaaccatccaatcaggaacgcagctggagcgaagaggacggtttccgggtttggtgcggcctttgtctctcgctgcagtcagagctccaggtctggttcttctcctaaaggcccaggctgtgtggccccgtgtcctgcaggtattgggagatccacagctaagacaccgggacctcctggaagccaaaaatggtgagagtgagggtccgacatcccgagagaggagagggactggttggaac

SEQ ID NO: 21224 - DNA, 2300 bp, Homo sapien
tggactgtttctttgcattccataggatgccaaagaattttacactttgtgcggatccttaattttactaggcttaatttcccatttttgagataggaactgggtttttacatgctctaagccccggctgactagttcttcagttttaccctgattgggccacctggacagctgcttttttcagcaataggctgatagctttgagcctgatcagtcaagacattgactggcattgggccagggccagtccggaagtcagattagcattttccttttccagcttatatttctcttgtagcaaccagcccctatcttgacacattaacttataagcagcaatcaaacactatccactttgtgagattccctcagcatctcctttggtgactggaatcccctgcagcacttcacgcacagtcaaaggtttaaattgcactaatttagattcccaattcccacaaaggccagttcccctgaaccattcaatcacaaagaaggagaactgggagtgatcccatctcaggatatgggaaatccttgagcctccagccctatccttctggtcaaaaaggggcccacttttgttttcaaatcctgtttgtgatgccaaaaatgttctgtatgggaaacgtgggagaggagaagaaaagacatacatacaataactttaatggtaaacaagctttaacccacatcaatatcaatgcagacagaataaactaatgatataataagcaaatgatataataagcaaataaatataatacacagattgatataataagcaaattgcagtaagaagaggagatgggaaaagatatatatatatatttaccctcactagactatggaggattaccaactgagtaggaagaaacagcccaggctccagagtcggccacccattcatgcacagacaaggagtctcatgaagcttcagggtggtctgggaccctagctcttttgtaacgagttgtttggcataaggcccagtgaggagggccatttgggacttgcctcacggaacacaaaagggtcaagttgtttttgtgattgtctattgtttttcaacaactaatgtatagtaatagaatgaaatagacatttctttgatacagctctggatgaacacctcaggggctcacaaccaggacctgttctgggacttggtgaccattgtgtccacgttcaattgagttcaaatttaacatttaacttttcctccataaattctcctgtcttcatgaattggctctgtctaggcaaagggcaaaatgaaccccttgggctgttacataacctccacctcctgggttcaagtgattctcctgcctcagcctccggagtagctgggaccacagatgtgcaccaccatacccagctaattttttacattgtgagtagagatggggtttcaccatgttggccaggctagtcttgaactcctgacctcaagtgatccacccaccttggcctcccaaagtgttgggattactggcatgagctacctgtgcctgaccctaaattatttctatctcttatagcagtttgaaattacttaaaggttgtttcaagttgaaaaaataagaagaatgtggataaaaataaaatataaatagataaaaaaattacagggattacaaaatatatatgtaaatctggagtggtcaaaaatgacaaatttgatttatttataaggttttattaaaattagctttaatcgttaatacactattaccaaagtaaaagctgattttctcttgaacaaaaattttatgtattattaatatgacagcaaaatacttctgttcacctttgaatacattcaacaagacagagagtaaaaaagagataaaatgttcccatgctctggcatggaccaggctcagctctgggaggaagccctgcctgaaaaggctgcagcttaggctgtcactcttttcttcactccgcccagcagctgatcacatcttctgtcactcagtgtctgagggggcgggaccttaagcattagccaatcagaggcgctgggctggaaaccgtccaatcaggcacgcagctggaatgaacaggacggcttccggatttggcggggtctttgtctctccctgcagctggagctccaggtcgtctgttcactgctctctgtcttcttctcctagaggcccagcctctgtggccctgtgtcctgcaggtattgggagatccacagctaagacgccaggaccccctggaagcctagaaatggtgagagtgccggtccagcatcccgagagaggtgaagtgtctgtggcgggact

SEQ ID NO: 21225 - DNA, 2300 bp, Homo sapien
aaaggaatatttcaatagtgatgctgtattcttctgtatgcattaacacatcataaaaatttgtcctagtgcagttaatggttaatgattcacttgcttaaataggtctctgacagacttttttttactatatagctaattatttttctcttcattattaagtttcattatgcagctgatgtgaacaaacaatcatttaatctggcagctgttcttttttctttttttctacatatttttctttggaaaattaaggctcttatctttgtttacaggccagaaaaactggaaaaaacacaggctcttccacttactggatgtttgacaaaatattcttcttgggccaaaaacattgacattattggttagcttgctagaaattcaaaaaatcagactttattccagatcttctggaaaaaaaccctgcataacaaggtcttcagcttattgtacatattaaaacatgcctttttcatctgaaaaatattcacaactcattccatatgatgtaaatatagcactcaaaaatgtacatgtttgtgttcatgcccttaattttatagtttattttctagaaaaatatatgaactgatgttgtggatcttatgttcctttattttctcagagttagagaatactttagagaatatttctgtgttgaaaattattttataggataactttagtcagtcctataagtcagaaccagttatctttactctctcatttcaccttaagtcaaattaaaaattccgcccataaccacttggtgaaaatgtgtgtgtgtatatttttcaggggccattgcaatttagagatgtggccatagaattctctctggaggagtggcattgcctggacatggcacagcggaatttatatagggatgtgatgttagagaactacagaaacctggtctttcttggtgagaaaaactttaatacataactcataatatacacaaattgttttatttctcttttttgtagaatgttagtaatttattctttttataaaagagtttcagatccagtttttcaagaaaatcttcagaatttgttcatttagaaaagaattactttggtgcctcatgcctgtaatcccagcactttgggaggctgaggcagggggattacctgaggccaggagtttgagaccagctggccaaaatgctgaaaccccaactctaataaaagtacaaaaaattagctgcgggctgtggcatgcacctataatcccaggactcaggagggtgaggcaggagaatcacttgaactcaggaggtgaaggttgcagtgagttgagatcatgacattgcactgcagcctgggcaacagagcaagattctgtctcaaggaagaaaaaaaaaaaagaaagaaaaaaatttcttcaagatatttcatcttaatacaaactttccacatttctgaggtgagttatattcttcactctaaattagtggtaattccagaaatttactgacttaaaatattgtagcttccacctgaaaatctacttgccaccaccaagttttgattcagtagtaccaggtagtaaaattaggaaacctacaaattgaaagtattttcttttcttttcttttcttttcttttcttttcttttttttttttttttgagacagagtctcactctgttccccaggctggagtgcagtggtgcaatctgggcttactgcaacatccacctcccaagtttctcctgcctcagcctcccgagtatgtgggactacaggcacacatcactatgctccgctaatttttgtattttcagtagagatggggtttcaccatgctggccaggctggtctcaaactcctgaccttaggatctgcctgcctcggcctcccaaggtgctgagattacaggcatgagccactgcaccaggcaaattggaagtattttctaaatatttagaaatctctgttacaaatttgtattttgttattaatttactagaatattttatcacatcatctttcctgagcacattactagcttgtaattggagaatgtgagcaagattcatgttatttatttttgataaaacaggtattgttgtctcaaagccagacctcatcacccatctggagcaaggaaaaaaaccttcgactatgcagagacatgagatggtagccaacccctcaggtaggtgtgagtgaaaatgaatacaacagacaacacagtaagaagtccaaggtcaaaaagaaagccagtccttaaggtgtgattctggaagctgtgttccaaaggaacttctgggcagctgttttttttgttttt

SEQ ID NO: 21226 - DNA, 2300 bp, Homo sapien
aaagaagacatttatgcagccaaaaaacacatgaaaaaattctcaccatcactggccatcagagaaatgcaaatcaaaaccacaatgagataccatctcacaccagttagaatggcaatcattaaaaagtcatgaaacaacaggtgctggagaggatgtggagaaataggaacacttttacactgttggtgggactgtaaactagttcaaccattgtggaagtcagtgtggcgattcctcagggagctagaactagaaataccatttgacccagccatcccattactgggtatatacccaaaggactataaatcatgctgctataaagacacatgcacacgtatgtttattgcagcactattcacaatagcaaagacttggaaccaagccaaatgtccaacaacgatagactggattaagaaaatgtggcacatatacaccatggaatactatgcagccataaaaatgatgagttcatgtcctttgtagggacatggatgaaactggatatcatcattctcagcaaactatcgcaaggacagaaaaccaaacactgcatgttctcactcataggtggaaattgcacattgagaacacatggacacaggaaggggaacatcacactctggggactgttgtgggttggggggagggggaagggatagcattaggagatatacctaatgctaaatgatgagttaatgggtgcagtacaccaacatggcacatgtatacatatgtaacaaacctgcacattgtgcacatgtaccctaaaacttaaagtacaataataataaaataaaaaaattaaaaaagattacaagtgcctaccaccatgcccagctaattttcatatttttagtagagatgcaattttatcatgtttttcagggtggtctcaaactcctgacctcaggcgatccacctgctttggcctcctaaagtgctggaattacaggcatgaaccatgatgcctggccaccatttcttaattcttaagagatttggtgataattcctgccgaagaagaactctacaaacctaaaaaacatgtgacagtgcttttaccaacacctccaaattctctatgtataacaataattattgtggtgtgaaaccctagaattatatataatgtgacatagcctttatgtggttgccacacttgattgtaggtaagactgcaaaactcctactgtcatactggcaaaactcctacaagtttgaagaatgtggcaaaacatttaatcagttcttaccccttatttcacaggaaagctattatccttgagaaaaattgtacaaatataaggaatatggaaaaaccattaattcctactcacatcttaacataaaaaggttccttttaataaaagcattaaaagtgcaattactgtcaaaaaaatctttcagaatctataagcctttaaaatgaagaaaagtatttattttgaagacaactattacaactataaagggggttatagcgcatttacttgttgcacacatttgtaccagaggaaaacagtgaagcaattgctcaagctttgttcaacatcagggaatttatgttggagattagtcctgcaaatgtaataagtttagaaacactttttttttttcagaaacaacagcttagaaaacaccagagagtttatactaaagtataattttgcagatgcagtaaatataaaaacaattcaaaatagaatgtatataaatgtcagaatttacagtagaataactaaggcactgacacttaagacattacactaaatcagagtgttgagtataaaaactaatccacaactacagtttttagataaatgatttgtatgtaactttaaaaagatttttggaagcattgtaattacattgaaagtacacttgtttccttgaataaaattttttgaaaactgaataatgatataatacagctttcaaattacttcatgctgttaatttattcctgttttattcacatgtgaaagcatgtgatcaattgctgctgcattagagatattagatatttttaaaaattatttggatattatgaccttttctataaaagaataaggacattaaaatgtaagatgcataatgaaaatataagtggagaggttctttgtagtaaacctctattaagtataaggtaaatgttcagagcaatacttttctacattatagtgtcacaaggaaataattatagttaaaagtatattaaaataaaatagtatattattttactaattgtacttttatgtaatgaaatacagtacatttaaaaattgctagggctg

SEQ ID NO: 21227 - DNA, 2300 bp, Homo sapien
gaggccaagatggacagatcaagaggtcaggagatcgagaacatcctggctaacacagtgaaaccccgtctctactcaaaatacaaaaaaattaaccgggtgtggtggtgggcacctgtagtcccagctactcagggggctgaggcatgagaatcacttgaacctaggaggtggagcttgcagtgagcagagatcgcaccactgcactccagcctgggcgacagaacgagactccgtctcaaaaaaagaaaagaaaaaagcccatattagccaactggagtataagatactatgaagaggagaagtaaggtatccctgttgacagtcccagaagcagaagctcacctctacaagcacagctgctgctttcctagtcaatgagcagctcatgatacatgtctgaaggagctcagctgagaacagaagaatggccccactgagcccagcctaaatggctgagcatttcaattatgagcaaatcagttttggatggttcattatgctgccatagttaactaatatgtgcacccagtgcagatagaatgccaagatttaataacaggttgattactagttaccttctaacattgggcaccataaaagtactgatatttttcccgatttaaagttagatgtcttgtaagataatgttgagaaatgcagaaatatggccaggggtggtggcttatgcctataatcccagcactttaggaggccaaggcggttggatcacctaaggtcaggagttcaagaccagcctgaccaacatggagaaatcccgtctctactaaaagtacaaaaaattagccgggcgtggtagtgcatgcctgtaatcccagctactcgggaggctgaggtaggagaattgcttgaacccaggaggcagaggttgcagtgagccaagaccacaccattgcgctttagcctgggcaacaagagtgaaactccatctcaaaaaaaagaaatgccgaaatacatgtggacatgtatgcatgtgattgtgcttatattcactcagtttcccacaccacagaagaaaacaggtaaccacagcctgaacattagagtcgaggtcaaatagcaaaataagtttgcctttaatctattttcttcctatgtaaacattaaaggtcaagactgtgaacagatctgaagacatagttttttttctcctgtggcccatcatcctttgctcactgtctgatctctgaaagaaagatgggcaacaggtggtaagcagtggtttacctgtgatttattcctgctgccatcagctttttctatagccactatttgtttcaccctcggaactgaaaagagacgttgataaatagaggctgtcccctcacctgtggcagaaaaggggtgttcaggccctccacccccactgacatcacagctgtacttcaatgtggcagctattggccatgtgtggctcctgggtgcctggaatgtggctggtctgaactgcgatgtgctagaaaggtaaaatacagaattagtttcaaagattttgtttcaaatgtatttatatttcattaataattacatattgctcacatattaaaatgaaaatattttgaatatattgggttaaataaattgctacaatcaattccacttgtttcttctttctttttaaagtttggctactagaaaatttaaaattcacctgtgactcacattttatttcagaggattgcctgttcaaaggaccagaatacaggaaggtcataaaatctaaaattttagaacaattgttgttatactttgttcatttgtgaatagccatataatatattatttttgaatgcatataaattgatacacaaggtaagggcaaatactctctggtgtgagcctggctcagctcaggaaggaagccctgtctgaaaaggctgcagcctaggctgtcactcgctcttctttcagcccagcatctgatcacatcttctgtcactcagggcctgaaaagaaggtgccttaaatatcatccaatcagagacgctgggctgggaaccgtccaatcaggaacgcagctggtgcggatagggcggcttccgggatgtggcggggcctttgtctctcgctgcagcctgagctctaggtcttgttttccctgctttgtgttttctgctcgtggacgcccagcctctgtggccctgtggcctgcaggtattgggagatccacagctaagacgccgggaccccctggaagcctagaaatggtgagagtgccaggtccgccatcccgagggggaaaggggttggttgaaaccggtgggaagcggctgtggcgg

SEQ ID NO: 21228 - DNA, 2300 bp, Homo sapien
atcgagaccatcctggctaacacggtgaaaccccgtctctactaaaaatacaaaaaattagctgggtgtggtggcaggcacctgtagtcctgtagtcccagctactaaggaggctgaggtaggagaatggcatgaactcaggaggcggagcttgcagtgagctgagatcacgccattgcactccagcctgggtgacagaatgagagtgagactccatctcaaaaaaaaaaaaaaaaagaacctacaaatcaaaaatattttttaaatatttgaaaatgtctgttataaattagtattttgggattaatttactagctaagcacattactagattggtcattagagaatatgagcaagatttatattatttatttttaataaaacaggtattactgtttctaagccagacctgatcacttgtctggagcaagggaaagaggcctggagtatgaagagacatgagatcatggtggccaaacccacaggtaggtgaaagtgaaaatgaatacagcagatgacacatgagaggtccaaaggccaaagagaaagccagtccttaaaatgtgatttaggaagctgtgttccaaagaaaatagtttctcagaagcctgaggtttctttctttcttttttgctctcacatgggggcatcttctgtcttatacttttaaattttctaaggattctacttttccttcggtgatcttcaagtttgcagttagagccaaagtcctcttcgtggcatataagagactgcgcagtctggctgctttttcattgttttgggggacacacaaatatctgcataattttgaaaaagtctatgttaagcaatatttttaattgtatttttgcatcatgtttgaaatatgtgagtagtggtttctgttccattgggggtttttttgtttgtttttctgcacattccatcctgtttgtattactacattcttgaaatatagtttgaaattataaagtatgatgcccctatgctttgttcttttacctcaagattgctttggctattcaaagtttattatagtttcatgtatgttttagaattgtatttttcattactgtaaaagatgccactagaattttttttttttttatttcgctcttgttacccaggctggagtgcaatggtgtgatctcggctcaccgcaacctctgcctcagggtttctcaatgttggtcaggctgttctcaaactcccaacctcaggtgatccatgtgccttggcctcccaaagtgctaggattacaggcgtgagccaccatgcctggccaccactagaattttgatagggagtttgttgaatctataggttactttgtataatatgacactttaacaatatttatcctttcaatgcatagacataaaatattttaaaatttatttgtgtcttctctagtttctttctatgatatcttatatcttccagtataaaaatgttttacctcttttgttaaatttgttctcagaaatttattattttgatgctattataaataagattgttttctttatcagatagtttgttttatgtatatggaaccctaatttatacttgtatgttaattttatactttgctaatttactgggtgtatttattagtttagacaggttttaatgtactattcatggttttctatatataagattatatgatctacaaccagcaacttttacttatttgtcttcaatttcaatggctttaaaacaatttttttactaattcttctgccacatacttccagtgctatattaaaatagaaacattgacaatggtattgggaatgggtgcttggtgtcacaaaaatcctttgagagacaaaggatctctcagcaaggctagtttactttctgcagaaagagtacactcgccagcagttttgccaagagaatacactaaacaaaggaggcagggtcatttataacctgatgggtccaccctactgctgtgtccggtttccattggctacaacaggacctcacattctgtatttgtcccagttggctagcaacttagaactttctaaaagaggcaaaggcagaggagaacaaaggaaggagggagcaacttgtggatgctgagaaaggtaaaaacacctccagataaggaataggaacaggctatgacctaatgcttgcttggaccagtataagcatgccagggcaaatatttaggctaaaatgtgggagctaagaacacaaagtacattgatttctttatcacggctagcagatatctaagaatgtcagcacaggtgtttgaatacattttgcttctaaga

SEQ ID NO: 21229 - DNA, 2300 bp, Homo sapien
agtcccacacaccacaggagaaaacaggtaactacagcctgactagtagggccaaggccaatagcaaaataagttttgcctttaatctgttttctccatatctaaacatttgaggtcaagagtgtggacagatctgaagacacagagttttattatcctgtggccccaacattctttcttcactgtctgatctctggaagaaaagtgggcaacaggtggccagcagtggtctacctgtggttattttactcctgctgccatctgctctttttatggccactatctgttccacccttagaactgaagaaagatattggtagggagagactctgccttcacttctggcagaaaagggatgttcagttcattcacccccctgacatcagagctgaacttcaatgtggcagctattggccacgtgtgcctcctgagtgactggaatgtggctggtctgaactgcgatgtgctagaaaggtaaaatacagagttagtttcaaagatttagtttcaaatgtttatatacattattaataattacacattcctcacacattaaaatgataatattatggacatattgggttaaattgttacaatcaattcaacctgttccttgtttctttttcaagtttgtctactagaaaatttaagattcacatgtggctcacattttatttcagaagattaccatctttttaaaatctgaggctgcctcctttagccgggaaggtcataaaatctgaaattttaaaataattattgttacattcttttcatttttgaatagccactatatatatataaatataaatatatataaaaatatataaaaataaaaatataaatatatataaaaacataaatatatataaatataaatatgtataatatataaatatataaaaatatataaaaatataaatataaaaaatatatataaatataaatatataaatataaatataaatatatataaatatatacatataaatatataaatataaatatataaatatataaatataaatatatataaatatataaatatatatatataaatatataaatatataaatatatatatataaatatataaatatttatatataaatatatataaatatataaatatatataaatatataaatatatataaatatatataaatatataaatatatataagtatataaatataaatatatataaatatataaatatatatataaatatatataaatatataaatatatataattatataaatataaatatatataaatatatataaatgtatataaatacataaataaatatataaatatatataaatatatatataaataaatatatacaaatatatataaataaatatatataaatatatataaataaatatatataaatatatataaataaatatataaatatataaatatataaataaatacatatataaatatataaaatatatataaataaatatataaaaatatatataaataaatatatataaataaatatatatatatatatatatatatatattttagacagagttgtgctcttgttgcccaggctggagtgcaatggcacaatctcggctcaccgcaacctccgcctcccaggttcaagcggttctcctgcctcagcctcccgagtacctgggataacacacatgggccaccacaacccgctaattttatattttttataaagactgggtttctccatgttggtcaggctggtctctaactcccgacctcaggtcatctgcccgcttcagccttccaaaatgttgggattacgggcgtgagccaccgtgaccggccccatatattatttataaatgcatatgaccttacacacaaggttaaatgcaaataacctctggggtgggcctggctcagctcagggaggaagccctgtcagagaaggatgcagcccaagctgtcactcttctttcagccccgcatctcatcacatcttccgtcaatcatggcctgagggggcggggatttaaatgttatccaatcagagacgctaggcagggaaccgtccaatcaggcacgcaggtgaagcggacagggcggcttccgggtttggcggggcctttgtccctcgctgtggcctgagctccaggtctcgtcttcagcgctctgtgtcctctgctcctagaggtccaggctctgtggccctgtgacccgcaggtattgggagatctacagctaagacgccaggaacccctggaagcctagaaatggtgagagtgccgggtccgacatccccagagaggggagg

SEQ ID NO: 21230 - DNA, 2300 bp, Homo sapien
catattattacagtaatgcacagacacgggatcataaaagaacttgcaagctttttaaaaaagtgttatattttacacatgtgtgtatgtatttgtagacagctctgtcatcttggccagagtgcagctcaatcaaacctcaaaattcttagctctcagcctccttggtaaatgggacttcacgtacacaccactacagtggctaattaattttttttttttttttttttttttgtagagatggggtcttattatgttgcccaggcagctctttttttttttttttttttttttgagacagagtctccctctgtcgccaggctggagtgcagtggcgcgatctcggctcactgtaacctccgcctcccgggttcaaacgattctcctgcctcggccccccgagtagctgggaatacaggcgtgcggcatcacacccaggtaagtttttgtatttttggtagagacagggtttcaccttgttagccaggatggtctcggactcctgacctcttgatccacccacctcggactcccaaagtgctgggattgcaggcgtgagccaccgtgcctgggcgattctattttattcgttgatcttttgtggtgcttttacaattttacatctacatattataaatccagtaacaaagagtcataattgttgcttttaatagtgataggttgctttaaaactgaagggtacaatttagtcagatactttggtgctatgcaaatacaatgcttattttttaagtgttatttacaatttttacactcctcagttaaccttggatacaataataactggtggttttgtgatggtttctttagcattttatctatgttgattagtatttggaattctgtaaaaaaaaatttccctatccttttttcttttttatttatttaaagttttttgtgtatcagtgtaaatgcatgggtatttatttatttgacttgatttattttataggtcagtgctctaattattcatttggatgctaacattgttccaggatggaccattgggagttctttcaggctggctccctttgacatgttcccatcattttttaaaattaaaaaaaaagaaagaaaaaacattttgaggctgggtgcggtggctcacgcctgtaatcccaacactttgggaggccaaagcgggcagatcacctgaggtcaggagttcaggaccagcctggccaacatggtgaaaccccgtgtctactaaaaatacaaaaaattagccgagcatggtggcgcgcgcctgtgatctcatccagcagtgctttacttgtaattattttattcctgctgccgtctcctctttctttggccactatctgttccacccccggaacggaagagagatgttggtagggagaggctcttccttcacctctggcagaaaaggtttgcttgggcccttcacaccgctgacatcagagctgcacttcaatgtggcagttattggccatgtgtggcgcctggtctgaagtgcgatgctagaaaggtaaaatacagagttagtttcaaagatttagttccaaatatttatatactttattaataattacatatttctcacacattaaaatgaaaatttttttgatatattgggttaattaaattgttacaatcaattcaacctgttcttgtttctttttcaagtttggctactagaaaacttaaaattcacatatggctcacattttatttcagaggattacctcctttctaaaatctcagcctgcctgctcaaagaccagaaagaagccaggaaggtcataaaatctgaaattttaaaataattgttattataaaattatattttttcctttgtgaagagccatatattatttataaatgcatatgactttacacacaagtttaaaggcaaattccctctggggtgggcctggctcagctctgggaggaagccctgcctgagaaggctgcagcctaggctgtcaccctttcttcactcagcccagcaactgatcacatcttctgtcactcagggcacgagaaggtggggttttaaaagttatccaatcagcgacgctgggttgggaaccgtccaatcaggcctgcagctggagcggacaggacggcttcggggatgtggcggggcctttgtctctcgctgcagctggagctgcaggtctcgccttcactgccctgtgtcctctgctcgcagaggcccagcctctgtggccctgtgacctgcaggtattgagagatccacagctaagacgccaggtaccccggaagcctagaaatggtgagagtgccgggtc

SEQ ID NO: 21231 - DNA, 2300 bp, Homo sapien
gcaaagcttttaaccgatcctcaaaccttactacacataagagaattcacactggagagaaaccctacaaatgtgaagaatgtggcaaagctttcaaccgatcctcaaaccttactaaacataacataattcatactggagagaaatcttacaaatgtgaagaatgtggtaaagcctttaaccaatcctcaactcttactaaacataggaaaattcagcagggcatggtggctcatgcctgtaatcccaacactttgagaggactaggtgagcagatcgcgaggtcaggagttcaagaccagcctggccaacatggtaaaaccccatctctactaaaaatacaaaaatttgctgggtgtggtggcaggcgcctgtaatcccagctacttgggaggcagaggcaggagaatcatttgaacctgggaggcagaggttgcagtgagccaagatcgcgccattctactccagcctgggccacaaggcaagactctgtctcaaaaaaaaaaaaaaaaagaaaagaaaattcatactggaacgaaaccctacaattgtgaagaatgtgccagtgctttcaaccagtcctcgaacctttttaagaaaataatttatactggagagaaattctacaaatgtgaagaatatggcaaagcctttaaccagtcttcaactcttactaggcattaaaaattcatactgtacagaaaccctacgagggtgaaaaacatggcaaagcctttaacaagccctcaattcttaacagacataacataattcatactggaaagaaactctgcaaaccagaaagatctggcaatgcttttgacaacacctcaaacttttctaaccataaaagaaattatactggtgagaaatcttagaaatctgaagaatgagacaaagcctttaaatggttgtcacacttgattgtaggtaagataattcatactggagaaaacacctacatgtgtgaacaatgtggcaaaacttaaccagtgctcacaccttattgcacaggaaagcatttgtacttgagataaattatacaaatataaagactgaaaaagccattaatatatgttcatatctcaacaccagatagttcatacttaataaaagcattataagtacaattactgtcaaaagacctttcagaaaatacaagcttttgaccaggcgtggtggctcaggcctataatcccagcactttggtaggccaaggcaggtggatcatgaggtcaggagtttgagaccagcctatccaagatggtgaaaccccatctctactaaaaatacaacaattagccggttgcggtggtggtgcctgtaatcccagctactcaagaggctgaggcaggagaatcacttgaacttggggagggagaggttgcagtgagctgagattgcactctagcctgggccacagagcaagactccatctaaaaagtaaaaaaaaaagaaaatatgaactttacagtgaagaatatttattttgaagatgaatgttacaaatataaagtgggtagtagtgcctttacttgtatcacagatcttattgtagacattttttgtagaggaaaaactctgaagcactttcacactttgttcaatatcagggaatttatattgaagaaaaatcatgcaaatgtagtaaatttggaaaaacactttttcaaaaactacagcttagaaaacagagttcatactagaatatatttttgcagatgcagtaaaagttaaaaaaaatttaatccataagtaagtctgtgtaaatatcagaatttatggtagaaatacataaggcactgacaacatcagatatactaaatcagagggctgagtatagaaaattaaagttggtagaaaaattatttgtatataactttaagaggatcagaaggttttttgcagttataattacattcaaagtatactttatttcttgaaaaatattacagattttttgaaaagtgaataatgatgtcattcaactctgaaattcctgccgtttcttcattcctattggattcacatgtgaaagcatgggatcaattattgctgtatcaaagatatgaaagattctttctttgttttgttctgtttttttgagatggagttttgctctttcgtccaggctggagcacagtggcatgatctcggctcactgcaaccttcaatttccagtttcaagcgattctcctccctcagcctcctgagtagctgggattacaggcgcatatcaccacgcccagctaatttttatgtttctagtacagacaggatttcatcatgttggccaggct

SEQ ID NO: 21232 - DNA, 2300 bp, Homo sapien
acgtaattctcccatctcaggctaccaaagtgctaacaatacaggtgtgagccagctagtgcttctgcaatttcttgagatgattattcccaatgataaacagtactgagcacaaatctgaaggaatctggtttcttctgtacaagtgtcactctccaggatttcaagggtctagggcagggcagctactttgtagtgtgatctatggaggtacatgggctttggagtcagacagagttaatcctgagtctcagcccagccacttagtatctgtgggtctttggacaattttcttgatgtgaaagagttctatgaaccacatatggaaaagaggtagattggtactaattgcaaaatggtggcaatttttaatctcttctgtatccatgcccattgccaggtgcttttacaactgtttccatcaagatccagaatctgttttccaaaccctagatctggctggccttattggctcagagtggtagaaacttgtgaacatgacagtgggctagtttggggcccaggctcaaatggtcttgaatgcttctgtttttctttcagaatgctgccatctccctgaataaagccatgttagccagctggaaaataagataccatgggaaggagaagcaaggtgccctgttgacagccccagaactagaagctcacccccagaagcacagctggctagtcaacaagcagctgatgatacgtgtctcaaagagctcagctgagactagaagaacggccccactcagtctagcctaaatggctgaccatctcaattatgaactaataagttttggacgatttgttatgctacaatagctaactaatacatgcaccccgtgcagataggacaccaggattctatgacaggttgattactagttaccttctaacagtgggcaccctataggtactgattttttcccctgatttaaagttgggtgacttgtaagagaatgttgagtaatgcagaaatacacgtagacatgtatgcatgtgattggtgcttatacccacacagtcccacacaccacaggagaaaacagataactacggcctgaccattagggccaaggccaatagcaaaataagttttgcctttaatctgttttctccatatctaaacatttgaggtcaagagtgtggacagatctgaagacacagagttttattatcctgtggccccaacattctttcttcactgtctgatctctggaagaaaatgggcaacaggtggctatcagtggtctccttgtggttattttgttcttgctgccctctgctctttctatggccactatctgttccaccctcagaactgaagggagatgttggtagggagaggcttttccttcacctctggcagaaaaggtttgctggggcccttcacctcccgacatcagagctgcacttcaatgtggaagctttggtcatgtgtggctcctgagtgcctggaatgttcctggtctgaactgcgatgtgctagaaaggtaaaatacagagttagtttcaaagatttagtttcaaatatttatatactttattaataatcacatatttctcacacattaaaatgaaaattttttgatatattgggttaattaaattgttacaatcaattcaacctgttactttttttttttaagtttggttactagaaaatttaaaatttacatatggctcacattttatttcagaaaattacctccgttctaaaatttcagacggcctgctgaaagaccagaagccgggaaggtcataaaatccgaaattttaaaataattgttattatattcttttcatttgtgaataggcatacagtatgttatttataaatgcatgtgactttacacacaaggttaaatacaaattccctctggggtgggcctggctaagctctgggaggaagccctgcctgaaaagacggcagcctaagctgtcactctttcttcactcagcccagcatctgttcgcatcttctgtcactcagggcctgagaaggtggggttttaaacgttatccaatcagcgacgctaggctgggaaccgtccaatcaggcacgcagctggagcggacaggacggcttccgggatgtggcggggcctttgtctctcgccgcagcctgagctccaggtctccccttcgctgctctgtgtcctctgctcctagaggcccaacatctgtggccctgtgacctgcaggtattgggagacccacagctaagacaccgggaccccctgaaagcctagaaatggtgagagtgccgggtcggacatcccgagagaggggaa

SEQ ID NO: 21233 - DNA, 2300 bp, Homo sapien
tttttttttttttttttttttttttgttgaggcggagtctcgctctgccacccaggctggagtgcagtgacccgatcttggctcactgcaacctctgccttccaggttcaagcgattcttctgcctcccgagtagctgggattacaggcatgcgccaccagcccagctaatttttttttttttttttttttttttttttttttttttgagacggagtctcgctctgtcgcccaggctggagtgcagtggcgggatctcggctcactgcaagctccgcctcccgggttcacgccattctcctgcctcagcctcccaagtagctgggactacaggcgcccgccactacgcccggctaattttttgtatttttagtagagacggggtttcaccgttttagccgggatggtctcgatctcctgacctcgtgatccgcccgcctcggcctcccaaagtgctgggattacaggcgtgagccactccgcccggcctgccctctgctctgtctatgaccactgtctgttctaccctcagaaccgaagagagatgttggtagggagaggctctctcctcacctccggcagaaaagggatgttcaggtcgttcaccctcctgatgtcagagctgcacttcaatgtagcagctattggccctgtgttgctactggctgcctggaatgcgcctggtctgaactgcgatgtgctagaaaggtaaaatacgagttagtttcaaaggtttagttccatatatatagacacacttcattaataattacatatttctcacatattaaaatgacaatattttcgatatattgggttaaattgttacaatcaatttcacctgttctttgtttctttttaaaaatagagctaaactctttttaaagtttggctacaaattagccgggcatggtggccagcgccttttatctcagctacttgggaggctgaggcaggagaatcgcttgaacccgggaggcagaggttgcagtgagcagaaatcgcgccattgcactccagcccaggcaacaatgtgagactccgtctaaaaaaataaaaatataaaataaagtttggctactagaaaatttaaaatttacatgtggctcacattttatgattttattttatttatttattttttttgagacagagtttcactcttgttgtccatactggagtgcagtggcgtgatctcgtctcactgcaacctccaccgcccaggatcaagcgattctcctgccccagcctcccaagtagctgggattacaggcgcctgccaccatgcccagctaatttttttgtattgttttagagacggggtttcaccatgttggccagactgatctcgaactctgaacctcagatgatccaccctcttcggcctcccgaagtactgggattacaggcgtgaggtacagcgcccaacttgtggctcacattttatttcagagaattgcctcctttttaaaatctcaggctgcctgctcaaaggaccagaagtcaggaaggtcacaaaatataaaattttagaacagttgggccgggcgcagtggctcatgcctgtaatcccagcattttgggaggccgaggcgggaggatcacctgaggtctggagtttgagaccagcctgaccaacatggagaaaccccgtctctactaaaaatacaaaaaaattagccgggcatggtggcgcatgcctgtaatctcagctacgcgggaggctgaggcaggagaatcgcttgaacccgcgaggtggaggttgcgatgagccaagatcgcgccattgcactccagcctgggcaacaagagtgaaactcaatctcaaaaaaaaaattttttttagaacaattgggttattatattcttttcatttgtgaatagccatatagcatattatttataagggcatatgaccttatacacaagattaaaggcaaacaccctctcgggtgggcctggctcagctcagggaggaagccttgcctgaaaaggctgcagcataggctgtcacacttcattcagcccagcatctgatcacatcttccgtccctcagggcctgaaggggcgggttttaacattatccaatcagggactctgagctggggacagttcactcagacacgcagctggaccggacagggcggcttccgggtttggcgcggcctttgtctcttgctgcagccggagctccggtctcgtcttcactgctgtttgtcctctgctcctagaggcccagactctgtggctctgtgacctgcaggtattgggagatccacagctaagactccaggaccctc

SEQ ID NO: 21234 - DNA, 2300 bp, Homo sapien
gaatacttctgttttttgttcagaatgctgcaatctccatgaataaagcccatgttagcaagcttaaaaataagataccatgaggaggagaagcaaggtgcccctgttgagccccagaagcagaagatcacccccagaagtacagctggctagtcaacaagcagctgatgataccagtctgaaagagctcagctgataccagaagaacggccccactcacccagcctaaatggctgatcatcttaattataaactagtaagttttggatgatttgttatgctgcaatagctaactaatacatgcaccagtgcagataggatgccaggattcagtgacaggttgattacttgttgccttctaacagtgggcaccctctaggtactgatttcttcccctaatttaaagttggatgtcttgaaagagaatgttgggtaatgcagaaatactgggagacatgtatgcatgtgattggtgtttatattcgcacagtccccacaccacaggagaaaacagataaccacagcctcgcaattagggtcaaggccaaatagcaaaataagtttgcctttaatctattttctctgtatctaaacactggagtccaagaatgtgggcagaactgaagacacagagtttttttctcctaagctccatcatcctatgttcacagcctaatctctaaaagaaaggtgggcaacaggtggtaagcagtggtttacctgtggttattttatttctgctgccctcagctctttctatggccactatctgttccaacctcagaactgaagatagatgttagtagggagaggcccttccttcccctctggcccttcacaccattgacatcagagctgccatgtgtggctcctgggtgcctggaatgtgcttggtctgaaccgcgatatgctagaaaggtaaaacacagagttattttcaaaaatttagttgcaaatatttatatacttcattaataattacatattcctcacacattaaaatgatattttgtatatattaggttaattacattgttacaatcaattcaacctgttccttgttattgttgttgttgttgttgctgttgttgcagtctgtcactaggctggagtgcagtggcgcaatctcggctcactgcaacctctgcctcccgggttcaagcgattctcctgcctcagcctccccagtagctgggattacaggcatgcgccaccacgcctggctaatttttatatttttttcagtagagacagggtttagccatattgccaggagggtctcaatcacttgatctcgtgatccaccagcctcggcctcccaaagtgctgggattacaggcgtgagccactgcgcgtggcctcttgtttctttatatttttcaccccccaaaacggagtctcgctctgtccgcccaggctggagtgcagtggcgcgatctctgctcactgcaacctcctccgcctcccgggttcaagcaattctcctgcctcagcctcctgcgtagctgggattacagatgtccaccaccacgcccggctaatttttgtatttttagtagagacgtggtttcaccatgttagccaggctggtctcaaactcctgacctcttgatctgcccgccttgtactcctaaagtcctaggattacaggcgtgagccaccatgcctggccccttgtttctttttaattttctagtttggctaccagaaaattcaaaattcacgtggctcacattttatttcagaggattacctcctttttaaaatctcaggctgcctgctcaaaggaccgtaagccaggaaagtaaaaaaaccctgaaattttaaaacatttgttattatatccttttcatttatgtatagccatatgatatagtatttacaaatgcatatgaccttatacgcaaggttgaatgcaaataccctttggggtgggcctatctcagctcaaggaggaagccctgcctgaaaaggctgcagcctaggcggtcactctttcttcattcagcccagcatctaattacatcttctgtcagtcagggcctgagagggtggggttttaaacgttatccaatcagcgacgctgggctgggaactgtccaatcaggcacgcagcttgagcggagaggacggcttccgggatgtggcgggatttgtccgcttctttgtctttggctgccgctggaactccgggtctcgtcttcactgctctgtgtcctctgctcctagaggcccagcctctggtcctgtgacctgcaggtattgggaatccacagctaagacgccgggacaccctggaa

SEQ ID NO: 21235 - DNA, 2300 bp, Homo sapien
ttttaataaagatggggtttcaccatattggccaggctggtctcgaactcctgatcttgtgatctgcccacctcagcctcccaaagtgctgggattacaggcgacagctaccgtgcccaggctttttttttttttttttttttgagacggagtcccgctctgttgcccaggctggaatacagtggcaagatctgggctcactgcaaattctgcctcccaggtttaagtgattctcctgcctcggcctcctgagtagctgggattacaggcatacgccaccacgcccagccagtgtatatatttttagtagagaccgggtttcaccatgttgtccatgctggtctcgaactcttgacctcaagtgatccgcccacctcggtctcccagagtgctgggattataggcgtgagccaccgcgcctggtggccctatcattctttgttcactgtatgatctttagaagaaaggtgggcaacaggtggccagcagtggtctacctgtggtgattttattcttgatatcttctgacctttctatggccactatctgttccaccctcggaacagcacagagactttggtagagagaggctgtcccctcaccactggcagaatatggacgttcagacccttcaccttcctgacgtcagagctgacacattcaatacaacagctattggccatgtatggccggctactgggtgcctggaatgtcgctgcaatttgctagaaaggtaaaatacagagttagtttcaaagatacagttccaaatatatatatacttcattaatctttacatattgctcacatattacaatgataatattttggatatattgggttaattaaattgttacaatgaatttcacctgtttcttctccttctttttaaaatttttttatttttgagatggagtcttgctctgtttcccagactggagtgcaatggcgtgatcttggctcacctcaacctctgcctcctgggtttaagtgattctcctgcctcagcctctctattagctgggattacaggcacctgccatcatacccagataatttttgtatttttgtagagacggggtttcaccatgttggctaggctggtcttgcactcctgacctcgggtgatccgcctgcctcggcctccccaagtgctgagataacaggcatgggacactacacccggctttcttttctttcacttttattttctttcttctcttctcttcacttttctttcttctttttccttccttccttttccttccttccctctttccttctctctctctctctttcactctttctttctctctctctctttctctcttctttttttttcttgagatggagtttcactcttgttgaccaggctggagtgtgcagtggggcgatctcggctcactgcaacctctgcctccctccacctcccgggttcaagcgattattttgcctcagcctcccgagtagctgggataacaggcgcccaccaccacgcctggttattttttcttatttttagtagggacggggtttcatcatgttggccaggctggtctcaaactcctgacctcaggcgatccacccgcctcggcctcccaaagtgctgggattacaggcgtgagccactgcgcccggcccttctttatttttaaagtctggctactagaaaatttaaaattcacatgtggctcacatcttatttcataagattggctccttttaaaaatctcaggctgctagttcaaaggactaggagccaggaaggtcataaaagctgaaattttaaaataattatttttttaaatttgtgaatagccatatattatttataagtgcttatgaccttatacacaaggttaagggaaaataccctctaaggtgtgcctggctcagctcagggaggaagccctgcctgaaaaggctgcagcctaggctatcactctttcttcactccgcccagcatttggtcatatcttctgtcactcagggcctgaaggggcgggcccttaaaccgtatccaatcagacacgcagaactgggaaccgtccaattaggcacacatttggagcggcgaggacggcttccgggatgtggctgggccattgtttctctctgctgccggagctccaggtctacccttcactgctctgtgtcctcagcgtgtgtggcttcgtgacctgaagatactgggaaatccatagctaagatgccaggaccccctgaaagcctagacatggtgagagtgctgggtccgacatcacgagagaggggaaggagttgctcggaaccggtgggaa

SEQ ID NO: 21236 - DNA, 2300 bp, Homo sapien
acttttatgttgcagctcccaagattcccttttctgtgacttttacaattttgcttacatatgtgtttgatataaatatctttgcttgtatcctagtttgtttgttgagcttttttatttttacatcatttttcaagatttttcagggtttttttatatttttttacctccctaatttgtttactaatgttttaaatatttttgttcttatttccagttttctgattttctgtagttctctgtgttcatatttcactcattgagtgttactgaatttatttcattttttattgtttcttcctcaaatttttattttattttatttttgagatagagttttgcacttgttgcccaggctggggtgcaatggcatgatctccacccaccacaacttccacctcccaggttcaagcaattctcctgcctcagactcccaagtagatgggattacaggtgcctgccaccatgccagactaattttgtatttttagtagagacagggtttctccatgttgatcaggctggtgtcaaactcgtgacctcaggtgatccacccacctcagcctcccaaagtgtgggattacaggtgtgagctactgcacctggccacattgtaatcttttataaaaatttgaacattaaaaagttacctgtcacaatctttgtaatatggctttctcctggcatactttgaacaattgtctgagttagagattctgagagtctctcaaacatgttctttgagtgtgtcttgtctgaaattttgtgtttattttttagttaaaggaaattattcatctttttttttggagatggagtctcagtctgtcatgaggcaggagtgcagtggcacgatctcagttcactgcaacctccgcctcccagattcaagcaattctcctgccacagcctcctgaatagctaggactacagataagtgccaccatgcccagctaagttttgtattttcagtagagatggggtttcaccattttggccagcatagtcttaatctcttgaactcgtgatccacccgcctaggcctcgcaaagtgctgggattatgtgcatgagccactgcacctggcccctagtcatcttttttcttaatactcagtaatcacttgctacacctgttttctttctgtggcactgcagtctctctactgctgtaacatttacctttggtctcagcagactcaaactgtcattccaaagtataccaccatttctttctgcactatatatcatagaagacagaagccagtgtgtggaaaggcctggacaagcaagtaataaagaaatttgagccagtattttactagtctttttttttttttaacaaaatcaaaagttggcaagttacttctttatttatttatttatttatttatttatttatttatttttataattttttttttttgagatgtattctcactctgttccccaggctgtagtgcaatggtgcaatcttggttcactggtaccttagcctcccaagtagctgaggttacagcttgagccactgcacttggctgggaatttacttctaaaggcattatgttatattgggaagcaggaatagccatgttgggtaaatgtaacaaacatttgcttttcccttctgtgtgactttgtgctcacctggggtacttcaaacacttaactcatttataattttttctcagatatattttggttagtatgttttcattacatataaagaattagagcctttggtattttgctatgctatctggtttatgcagtttgtataatattatagtttagatttgtaatctatatttatctgagtctagtaagtggagtaatttgatatttttatttctttcagttatatgttctcattttgctgaagacttttgcccagggccaggcattaaagattcttttcaaaaagtgatactgagagaatatgtaaaatgtggacataaggatttacagttaagaaaaggatgtaaaagtatgaatgagtgtaatgtgcacaaagaaggttataatgaactaaaccagtatttgacaactacccagagcaaaatatttcaatgtgataaatatgtgaaagtctttcataaacttttaaattcaaatagacataacacaaaacatactggaaagaaacctttcaaatgtaaaaaatgtggcaaatcattttgcatgcttttacacctatgtcagcataaaagaattcatattagagagaattcttaccgatgtgaagaatgtggcaaagcctttatctggttttcaacccttactagacacaggagagttcat

SEQ ID NO: 21237 - DNA, 2300 bp, Homo sapien
cagaataagtgcttgaccagcctgccaggaagcagaaggctagatggccttgcaggcaaccccaggcagcctttagggtgcctgatagggctgagctcattccagctttccttgctttcattccgtctacaagaaaacctgcctgctggctgggcatggtggctcatgcctgtaatcccagcactttgggaggccgtggcaggtggatcacaaggtcaggagttcaagaccagcctggccaagatggtgaaaccctttctctactaaaaatacaaaaattgccaggcgcagtggcaggtgcctgtaatcccagctactcgggaggctgaggcaggagaatcacttgaacccgggaagcggaggttgcagtgagctgagatcgcaccattgcactccagcctgggcaacagagcgagagtccatctaaaaaaaataaattaattaaaaatttaaaaaagtttttatatctttgatatttcgctcattatttctaaatctcatttagttgtctatttgtgttttatttttgttcattgagcattctaagatgatgatgattattatttatttatttattttgagatggaagtctcgctctgtcgcccaggctggagtgcggtggtgcgatctgggctcactgcaagctccacctcccaggttcacgccattctcctgcctcaccctccaagtagctgggactacaggcgcctgccaccacacccggctaattttttgtattttttttcagtagagacgaggtttcaccatattagtcaggatggtctcgatctcctgacctcgtgatctgcccaccttggcctcccaaagtgctggaattacaggcgtgagccaccacgcccggcctattattttgtatttttagtagagaccaggtttcaccacattggccaggctggtctcgaactcctgaccttgtgatccacctgcctcagcctcccaaagtgctgggattacaggcatgagccaccgtgcccggccaaatattttgaattctttatcagatatgcaaaaacttcatttcttaagattcaatttctggatattattttgctccttcaagtgggacatatttcctgtcttttctctatgccctgtgatttttttttttaagtgatatctgaggatttatacaacagccatctaatccagcatttaaagaccggcttagtaaaggggagatactgacagtaatcagccaggctatgaatgctgggtgtttcacattctcagatacgttttctctgaagttgtgtgtgtgtttaagttaaagagttttttttctttttctttttttttttttttttgagagaagtctcactcttgtcccccaggcttgagtgcaatggctcgatctcggctcactgcaacctccgcctcccgggttcaaacgattctcctgcttctgcctcccaagtagctgggattaaggcgcctgccaccacgcctggctaatttttgtatttttagtagagacggggtttcaccatgttggccaggctggtgtcgaactcccgacctcaggtgatctgcccgcctcggtctcccaaagtgccggaattacaggcgtgagccaccatgccccgcctttttcttatttctttttgagattctataaactttttttcttcttggtgccaccactcccggccctgtttttcttttaaaatcccaggttgcctactcaaaagactaaaggccagaaagcttatgaaatgttaaattttaaaataattgttattatagtgtttccatttgtgaacaacatatatgtgtgtatgaataaaatttataaatggacataaccttatacacaagatttaaaataacccctgggcacatgtgggcccaacccagagatagcccttcctgaaatgactggagccaagagcctgtcacgctcgcggtattcagtgcaaggtctgatcgcgtcttctgtcactcaaggcctgagggcgcggagcctggagctctatccattaagggcgctggggtgggaactgtccaatcaggttcacagtcagagaggaaggggtggctcccggtacctggcggggcctttgtctcttgctccagccagagctcgaggttagctcttcactgccctgtgtcttctttccaagggtctcggtgattcggccacagcctcagcctccatcacgcggtgaactgatggtgctggaagattcatagactccaggacattcctgaagccgagaaaaggtgagtgtgcggggcagggcgtttggagacgggggaggcctctttgggacgcgccagaa

SEQ ID NO: 21238 - DNA, 2300 bp, Homo sapien
ctttttagttattttttccaaaaaaatacttcctggatttgttggtcttttgaatgtgttttcatgtcactgtcttgttcagtgcagctctgattttgattatttcttgttttcttctagctttgggatttgtttgcttttggttttctagttcttttatttatttattttattgtatttatttattttttgagatggagtctcgctctgttgcccaggctggagtgcagtggtgcaatctcggctcactgcaacctccgcctcctaggttaaagcgattctcctgcctcagtttcccaagtagctgggatggactacagggatgtgccaccacacctggctaattttttgtatttttagtagagatggggtttcaccatgttagccaggatggtctcgatctcctgaccttgtgatccgcccgcctcggcctcccaaagtgctaggtttacaggcgtgagccaccgtgcctggccttgttctctagatcttttagttgtgatgttatgttgttaacttgagatcttcctaactttttgatgtgaggctttagtgtcagaatgtagtgagatcagatgtattaagtaaggccaggcgtggtggccgattcctgcaatccctacacttctggaggccaacacgggagaatcacttgagcccaggagtttgagaccagactgggaaacatgtggaaaacttgtctgtaccgaaaatacaaaaattagccaggtgtgccagcacacacctgtgatttcagctacttgggaggctgaggtgggaggatcatctaagtctggggaggttgaggctgcagtaagccatgatggtgccactgcactccagcctgggtgacagagtgagaccctgtcaaaaacaaacaagcaagcaacagatattttatgcccttctctgggtaggaagcaaaatgaacagaactcagcattttaaaatttaaattttatttttgaattttaatctatttatttatgtattttgagatcaggttatgaaactggctaatttttgtattttgggttgagatgatgttttaccatgttgcccaggatggtctcgaactcctgggatgaagcgatgcacctgccttggcctcctaaagtactgggattacaggcgtgattcattgccaggttgcaattttttttttaatctcttgtctttctgagagtttcgtggcagagagtttggttcatttaagttcattctaaatagacatttaggacgttaacttctggcctcatggactctgaggttacaagtcccctggtctatcacaggaccatacacataagaaataaaaaaaaatcggctgggcgtggtggctcacgcctgtaatcccaacactttgggagactgaggcggctggatcacctgaggtcaggagtttgagaccagcctggccaacatggcgaaaccccgtgtctactaacaataaaaaattagccgggcgaggtggtgcgtgcctgtaataccagttcctcaggaggttgaggtactagaatcgcttgaacccgggaggcggagatggcagtgagccaagattgccccactgcactctagcctgggtgacaaagcaagactccgtctcaaaaaaaaaaaaaaaagactccaatcaaaaagcaaataagtaaataaacaaacataacgtttataataagtaattgtgttacaaagaaatatagttatgtcccctaaaccaaggtctcacagaaaaggaagcctgtgcacagactgggtcaactgtgtcttctctactgtccctacctcaaagttggcttcttccttgttgcctagaaaatcgtcgccctgactgggtatgattgttctttgatcagtatatgcatatatatgtattttttcattctttcctggctgattattgcgtgggtggttgtttggcgcctcctagcggccggctagcagtacaggcctcctccagaggccgcttgggctgacggcacggcttgtggcccacaggggcggccacctttctagagttctcttgtcctctggagctccagtggcagctgccgagggagggacagcccccgctgtgagctgagcagagctcgggagtcctgcagacttcagcagaacagtcccgatggtgccagagctctggcgcgtcccttgtgagtcatagctctggcgtgtagggctgtggaggggaggctgttaccgtgctcccggcatgagcttagtgtggggctgcccgggctggtccccagctcaccgcagctgcggaggcccgaccctcggaacccaccaggcatgatgcaggg

SEQ ID NO: 21239 - DNA, 2300 bp, Homo sapien
tattaagtaaggccaggcgtggtggccgattcctgcaatccctacacttctggaggccaacacgggagaatcacttgagcccaggagtttgagaccagactgggaaacatgtggaaaacttgtctgtaccgaaaatacaaaaattagccaggtgtgccagcacacacctgtgatttcagctacttgggaggctgaggtgggaggatcatctaagtctggggaggttgaggctgcagtaagccatgatggtgccactgcactccagcctgggtgacagagtgagaccctgtcaaaaacaaacaagcaagcaacagatattttatgcccttctctgggtaggaagcaaaatgaacagaactcagcattttaaaatttaaattttatttttgaattttaatctatttatttatgtattttgagatcaggttatgaaactggctaatttttgtattttgggttgagatgatgttttaccatgttgcccaggatggtctcgaactcctgggatgaagcgatgcacctgccttggcctcctaaagtactgggattacaggcgtgattcattgccaggttgcaattttttttttaatctcttgtctttctgagagtttcgtggcagagagtttggttcatttaagttcattctaaatagacatttaggacgttaacttctggcctcatggactctgaggttacaagtcccctggtctatcacaggaccatacacataagaaataaaaaaaaatcggctgggcgtggtggctcacgcctgtaatcccaacactttgggagactgaggcggctggatcacctgaggtcaggagtttgagaccagcctggccaacatggcgaaaccccgtgtctactaacaataaaaaattagccgggcgaggtggtgcgtgcctgtaataccagttcctcaggaggttgaggtactagaatcgcttgaacccgggaggcggagatggcagtgagccaagattgccccactgcactctagcctgggtgacaaagcaagactccgtctcaaaaaaaaaaaaaaaagactccaatcaaaaagcaaataagtaaataaacaaacataacgtttataataagtaattgtgttacaaagaaatatagttatgtcccctaaaccaaggtctcacagaaaaggaagcctgtgcacagactgggtcaactgtgtcttctctactgtccctacctcaaagttggcttcttccttgttgcctagaaaatcgtcgccctgactgggtatgattgttctttgatcagtatatgcatatatatgtattttttcattctttcctggctgattattgcgtgggtggttgtttggcgcctcctagcggccggctagcagtacaggcctcctccagaggccgcttgggctgacggcacggcttgtggcccacaggggcggccacctttctagagttctcttgtcctctggagctccagtggcagctgccgagggagggacagcccccgctgtgagctgagcagagctcgggagtcctgcagacttcagcagaacagtcccgatggtgccagagctctggcgcgtcccttgtgagtcatagctctggcgtgtagggctgtggaggggaggctgttaccgtgctcccggcatgagcttagtgtggggctgcccgggctggtccccagctcaccgcagctgcggaggcccgaccctcggaacccaccaggcatgatgcagggggccggggacaccccccaggcccggttgcgggcccatgtgtgtcctggccgtttgaggctctggccgatttcttttcccaagtccccatggagaatcagggaccgtcctgtgccatcttccgagagcctggaagggtccgcccgtgggctttccgagcgccgaaggggccacatgctgctctgagggtgccgcaggttcgtggggctcccttgcttggtgtccaccccctctggtttcctcctcttcccaccctgcgggtggctcgtcgccctggctgggacgccgctgtgggagcgtggtgggatggctgaggcgcgggcgtcagagggtgtggcccggcagcccccgtttcaggggtggctgtgtggtctggaagtggcggtccaggtcctgggcctctcccactcagcagcggggaggaggggtcggcggggagtaggggccggtcgcccccccttgagctcttccccgtcttagtggaccagcagacagtgtgggagagcgctgggaaggaaggttggcggagttatactccagacggacgggctcaggccccgcgcgccacactcggccacac

SEQ ID NO: 21240 - DNA, 2300 bp, Homo sapien
ttgacagttgtatgtacacccacccaacagtatacatcatcatttccccacatgaacacagcccacttctggggttctgaatctcacacctataggcagtcaaaggctggaaacttgactctcatgtggattcagtccacaggtgggttggtgacattcagagcaagattcagcacacctatgtggctgtgactttactatttatacgtggcgtgcagaaggagttgaggctgttgtgcacaagttcaatccaccgttgagattgtaactcctgttcttagacacaacatataggaggttaacaccgggacatgtgtgggattgttaatgtcatccctggaccttcctgcagttttaactgtgacatttttcttttcttttttttttttttgagatggagtttcactcttatcacccaggctggagtgcaatggcacaatcttggctcactgcaacctccgccttccgggttcaagtgattctcctgcctcagcctccgagtagctgggattacaggcatgtgccaccacgcagggctaattttgtatttttagtagagacagggcttctccatgttggtcaggctggtctcaaactcctgacctcaggtgatccacccgcctcggcctcccaaagtgctgggattacaggcgtgagccaccgtgcccggcccaattgtgacatttttctatgccaggcacctgagtgatctgactgtcttgtctgggaccagcccacaggtgggatagttctgctgaacccagaactgaggggatgtgactcttcttctgtcttggtgctgctcgtagaggacattgtgacatctcactgaaccttgcacttagttgatgtgagtctcctctcctgccttggcactgcctactggggcattgtgacatatctctgggcctacatccaggttatatgactctcatgcctgtgccctcaccacattgtgacatattgctgggtccaacaccctggtaatgtaactctactgccaacaaggaacattgtggtatttttttcacccattacccaggtgatgtgactctcttcttttgcgttgttctgctcacagggggaattgtgacatatcacttggcccagtaccaagcaagtgtgactgttctattcatcataagtcctgctttcaagggagattgggacatattgtggggctcaacaccaatgtgacattactgttttgccttggcccagaccttaaaggcactgtgacgtattgctcggctcagcaacaaggtgacgagagatcctgtgtggacattgacaacagagagcattgtgacatatctttgggagcatcagctatttgatgtgactctccttttataccaaggctttgctcataggggagaccgtgatgtatcttctggcccagaaatcaggcgatgtgtttctcctgcctgagctttgctcacagggagcattgtgacatatcactgagcccagcacccaggtgatgggactctactgcctgtcccctgctttcaggaggaaattgtaacatatctctgaccaagcacccaggtgataagtcttctgcctggtgcctgttctcagggaagattgtgacatatccctggcccagcaaccagatgatgcagatgacgtatctctcctgctcactctctatccacaggtaagattatgacatataatcacgcccagctaatttttgccttttaatagagaaggggtttcgccatgttggccaggctagtctcgaattcctgacctcaggtgatctgcccaccttggcctcccaaagtgctcagattacaggcgtgagccatggtcgctggcctagggagtgtgactttctttttgctgcctgttctctactcaacggggtaattgtgacatattgctggtcccagctcctagctgatgtgactgttttctttttcctaggttctgcccacaaaggagattgtggcatactgctgggcctaacactaaggtgatgttacttctctgctttggctatgtccttagaaggcattgagacacactgctgggcccagcaccaagatgatgtgagtcctctgcctgaaccctgaccacagggagcattgtgacatatttcttgacccactgcaatctctcctatggacaaagcccaggtaaatgccctattttacctatgtgatgtgacactcctcttctgcctgggccaagcacaccagtgatgtaattattctgcctgttccctgcacacaggagtcactgtgctatatatttgggcccatcacctagatgatatgactctcctcttc

SEQ ID NO: 21241 - DNA, 2300 bp, Homo sapien
aggcagctgatgatacatgtctgaaggacctcagttgagcccagcctaaatggctgaccatctcaattacgagcaaataagttttggatggtttgttatgctgcaatagctaactaatacatgcaccctgtgcagatggaatgccaggatttaatgacaggttgattactagttaccttctgacagtggacaccctaaagatactgacttttcttttctttttttcccgatttgaagttggatgtctcctaagacaatgttgagtaatgcagaaatacaggtagacatgtatgtgtgtgattggtgcttatactcacacagtaccccacaccacaggaaaaaaacagataaccacagcctgaccattagagccaaggccaaacagcaaaataagtttgcctttaatttattttcttcatatctttttttttttttttttttttttttttccgagacggagtctcgctctgtcccccaggctggagtgcagtggcgcgatctcggctcgctgcaagctctgcctcccgggttcaagccattctcctgcctcagcctccagagtagctgggactacaggcgctcgccaccacgcccggctaattttttctattttttaagtagagacagggtttcaccgtgttagccaggatggtctcgatcttccgacctcgtgatccgcccacctcggcctcccaaagtgctgggattacaggcgtgagccaccgcgcccggccttcttcatatcttaaagttagaggttaagactgtggacagacccaaagacatagagttttcttctcctgtctcctgtggccccagaattttttgttcactgtctgatctctggatgaaaggtggacaacaggtggcaaagagtggtctacctgtggttattttatttgtgctgccctctgcccttgctatggccactatctatcgcaccctcagaaccgaagatagatgttagtagagagaggctgtctcctcacctctggcagaaaagggatgttcagggcctccacccacctgacatcagagctgcacttcaacgtggtggctgttggccatgtgtggctcctgggtgcctggaatgtgcctggtctgaactgcaatttgctagaaaagtaaaatacagagttggtttcgaagatttagttccaaaaatatatatagtgccttaataattacatattgctgtgaccccagaaaatctgagacatcagttaatttagaaagtttattttgccaaggttgagaacacgcctatgacatagtttcaggaagtcttgaggacacctgcccaaggtggtcagggaacatattggttttatacattttagggagacatgagacatcaatcaatatatgtaagaagtacattggttcagtctgaaaaggtgggacaacttgaagcaaaggcaggaagacacgaagctggagggagcttccaggtcacagataggtggactcaaattcttttgagtttctgattggcctttagttcccagcttgagttttccttagtaattttgggggcccaagatattttcctttcacattgctcacatattaaaattataatactttaaacatattgggttagttacattattacaatcaattccacgtgtttcatgtttctttttaaagtttggctactggaaaattaaaaattcacatgtggctcacattttatttcagaggactgcctcctttttaaaatctcaggctgcctgctcaaaggaccagaagctaggaaggtgataaaagctaaaatttaaaagtaattgttattatattcttttcatttgtgactagccatatagtatatttataaatgcatatgaccttacacacaaggttcaatgcaaacaccctctagggtgggcctggctcagctcggaggaaagcctgcctgaaaaggctgcagctaggctgtcacgcttcattctgcccagcaactgatcaccctctgtcactcagggcctgagagggcgggtcttaaacattatccaatcaggcacgcagctggagcgacaggacggtttccggaatatggcggggcgtttggctcttgctgcagccagagctccaggtctcgtcttcatttctgtgtcctttgttcttagaggcccagcctgtgtggccctgtgacccgcagatattgggagatacacagctaagactccaggaccccctggaagcctagaaatggtgagagtgccgagtctgacatccccagagagggggaggggctggtcggaaccgtgagaagtggccgtggcggacttaggtctccc

SEQ ID NO: 21242 - DNA, 2300 bp, Homo sapien
gagttttaccattttagggttagcactgaaaataagaaaaaggcaattttcttatattcaccctatgtaattaagtgatagtaatagttaccaaaacaaagcaaaatgtgaatggtgactattcagaccatctgctctatcttctctggattccctgaagtttctagatttctttttgaattcaatagtattatgatgttaattctgtgcttttgcaatctacaatatgagttccagccaggaggtagagttgaagttttttgtttgtttgtttgtttttaatttgtttgtttgtttgtttgagatggggtctcactctgtcaccaggctggagtgcagttgtgtgatcttggctcactgcaacttctacctcctaagttcaagtgattctcctgcctcagcctcccgagtagctgggactacaggctcccgccaccatgcccggctaattttttgcatttttgtagagacggggtttcatcatgttagccaggatggtctcaatctcctgacctcatgatccacccgcctaggcctcccaaagtgctgggattacaggcatgagctaccgcgccaggcctagagttgaagttttttgaactaatcactgttggtaaagcctttccctcctgcacaatttttaaaggtagatttggccaggcatggtggctcatgcatgtaatcccagcaatttgggaggctgaggcaggtggatcacttgagatcaggagttcaagaccagcctggtcaacatggtgaaaccccgtctctactaaaaatataaaaagtacttgggtgtggtggcagacgcttttaatcccagctacttgggaggctgatgcaagaggatcccttgaacccgggaggcagaggttgcagtgagctgagatcatgccactgcactccagcctgggtgacacagcgagactacacctcaaaaaaaaaaaaaaaaaaaggtagttttgatcagtgattagtgctgccctgccagaaatgtgcagtttaaagacaagtaaacgaattggctaaaagcataactactaagtagtgaggtcacagcaggatcactgctgattccattttctcccttcggatattttcaagccttcatactctgtttcaatgtaacattaagagcatataacccgaagaacaattcatttttcagctgtttctagaagttatacttcattattggagcaggggaaagcaatttgaaaagtgttattaattagccaatttaatctaaattttgccagaaactctttaaattccaaatatagggtccacttgctatgcaaatttagatcgttgttcttattataatttaggcaaagatgtacaaaaaaaagatagcagctatttggatgaaataaaaataaaagatgatttgggggacagggtcaagagggccaaataaacatttccagtctgcagctcccagcgagacccatgcagaagacaggtgatttctgcatttccaactgaggtacccagttcatccaactgggactggttaggcagtgggtacaacccatggagggcgagcagaagcagggtggggcatcgcttcacccacgaagtgcaaggagctgggggacctccctcccccagccaagggaagccgtgaggaactgtgctacccggccaggttactatcctttccccatgatttttgcaatctgcagatcaggggattccctggtgtgcctacaccagcacagccctgggtttcaagcacaaaactgggtggctatttgggcagacaccaagctagctgcaggagttttgctttgttgttgttgtttgtttgttttgtaccacagtggcatctggaaccccagcaagacagaaccctttactcccctagaaaggggctgaagccagggagccacgtggtctcgctcagcaggtcccaatcccatgaagctcagcaagctaagaaccactggcttgaaattctcactgacagcacagcagtctgaagttgagttgggatgatcgagcttggtggggggaggggcatcccccattactgaggctttagtaggcagttttctagtgctaaggaggctgggaggatttgtgggctgccaaaatatggccagactgcttctctagattcctcctcgctgggcagggcatctcggatggaaaggagacagccccagtcaggggcttacagacaaaatccccatctccctgggacagagcacctgggggaaggggttgctgtgggcacagcttccatagatttaatccttcctgactgctggctctgaagagagcaggtgaccctg

SEQ ID NO: 21243 - DNA, 2300 bp, Homo sapien
tatttcctcgtggaaatgtattcattttctacagccaaaatcgaaggagattttccctattattttccttggtagcattctaaaagctgagccttggaattctgtttgaaatcacctacagaaaacacacctgagaaaattcctaaactctctctgggaaagaaaaaggtaagtaagaatttttaacatacgaaatatatgattagatattaatattttttgaaacccaccacttttatgccctttgtaaatgtttttgaacctttcaagctctactaataaaatgcaatttacagtttaagaaattgaaatcaatataagtgaacaaatcttttcaaggtgacgaacccagggtgtagcagtgatgattaaaaaacagatgtgtctgacttatgtgtcaagtcaggtcatccaatcacgtgagagattctcccaccccagcctgctcacttaactgctcaatgactaacctctcaggagacactgcactatgttccagtgagtggcccaggttttactttcggaaatttttgcagcatctctctggggtcaggttttcttttgttttttttttaggggggatactattttttctttcacaaatcttagagaattcaggggacagaaattatttctgttttccccttaataccagcctctgattggctgaccagcaatgtgtcaccaagatatgaaagctgggttgggtgaaaacaatgttaatgtctcaaggggttacttttttaaaggaagagcacaccaggagatttctctcagccccagtgcatccatctgcttccttgagaggctacactccatacctcaggctgtcctatgaaagaaaatgacccaggacctgagattccctagacactctagcagacatagccatggctgatataatggtttattcacagacagtactgaaaccgatgaccaagaaaaaactaaagggtggttgaggacacatcacccaataaagcttccccccgccaaaaaaaaacctttaccccaaagcattctggtaagatctctgcctagggaaggtaaaaggaaaagaggcacagagattttacacaacacagtgtcaggggttattctttgctttcttctcatgggaaatatttacaaacagaaaatgaatcttttaaaatgtgccatccagtggtttgtaaaaaaaaatacagtattgaaaatatacactaaaggacaaatagatgacaatgtgaactagggaaacgaggctggcatttgggattgtcagaaggaactggaaatttagtattttacttcaagcctgagttaggctggaggaatgggggatgagggctagacttgagaccgcacttgggacacatttaaaaaattcaggggaaaaaaaaaatcagtctcttgtgaagtgtgtatcctcaaacatatattttttttttttgtaaatttttgtaaattgcattggggaaaacaaaatttaagcttaaccaactaactataaatggccaattaagctctgattacataaccagaaaatttacacactcaaagtggaaattaagaaagtacgtgactccctgtagtcccagctgctcgggaggttgaggcaggagaatcgcttgacaccgagaggttgcagtgagctgagatcgcgccactgcacttcagcctgggtgacagagcaaaactgtctcaaaaaaaaaaacaaaaaaaagtaggtaactgtacctaaccgattattgaatttgtttttttttttttaatcatggaccttataaaagtctttccttcaagttcctcccatgaaccacaaactaaaacccatagctgggtactctacaatttttgagccactctttgattaaattctttaatctttttgcggtgactccataaatttttaatagatgaaaagagggactaggaaccccaccgaccaaaactcttcccattcatgaaccctcacccgagtcgggattctcccctgactaccctcccatggtccctgcacaattggccagagacaaggcgctgcggctgcagagctgcccagagaggcctccaggccaggggaccatcactgggtcactgtgcagacaggacgcccagtgtggggaaaagcaagagagatcagattgttactgtgtctgtgtagaaagtagacagacataggagactccattttgttttgtactaagacaaattcttctgccttgagatgctgttaatctataatcttacccccaaccctgtgctctctggaacatgtgctgtgtcaaactcagggttaaatggattaagggttgtgc

SEQ ID NO: 21244 - DNA, 2300 bp, Homo sapien
tttaaaattcaggtcaccttctgtgggtgacttctcttcagtttcctaaagtggtatgaaccagtctctcttctaggctttcacaggactttccaggtccatacatcatatccctcgacatgctgacaaaaataaacctgcaagccttccttcttttttccagtggaaaaaagatagctaggccgggcacagtggctcaggcctgtaatcccagcactttaggaacccgaggcaggtggatcacgaggtcaggaaatcgagaccatcctggccaacatggtgaaacctcatctctactaaaaatacaaaaattagctgggcttggtggcatgcacctgtagtcccagctactcaggaggctgaggcaggagaattgcttcaacccgcgaggcagaggttgcagtaagctgagatggtcccactgcactccagcctgggcaacagagtgagactccatttcaaaaaaaaaaaacgctggaaactgcagaaaaattagaaaatatcagtcagttaaaagaaatcagaatatctcccttaacagataaagaacagtttcgaaccctacaaagaaggaaaaacattcccctaaatgcagccacacttggagaaacaagtactaagcactggaatcagataggtctggtagagatggcatgagggttaaatgagttattatataatatgcttggcgacagtgcttggcttatagtaagtgcttagtgatattagctatttttttttaaatctgtaagtaggagagaagcaatgggagaatccacgatcttcttggaagaacctcctttctccctcctccaggacaggggtccaatgttcttttccagtgacttaagactcattaccacgcagagaccacccatcactgtgacatttttgatataactttttcctaacgtgtattttacaaaactctgggcatgcattgcatatagttttttattgaacgtgatccatcgtgagcacctttccatagcccatgcatgctaattatttgcttatatatctggctcccctgtgtacagcatctggagggcaggtaagcacatgtcatgtcctgtccccacccccataccatctccaaacagcacacagtaggccaccatgtcatggccagcatgggcgatgtgatggtgggttgctctgttccctgcctaggaacatgatacatttccacagggatgtctcaaggcctgcattgagcagccaaggcccagcaagctctgtagcaggagtatctttatagaaagatacctgagcacatccttaacaccaatagaaacaagattctcagattcaagatcctaaaagagtcagcaaacattttctgtaaagatccaaattgtaaatattttaggcctacaaagcctaagatatttaactttatagaaaatgtttgggccgggtgcggtggctcacacctgtaatcccagcactttgggaggctgagacgggcggatcacctgaggtcaggagttcgagaccagcctggccaacatggtgaaacccagtctctactaaaaatacaaaaattagccaggcatggtggcggtcacctgtaatcccagctactcgggaggctcaggcaggagaatctattgaacctgggaggtggaggttgcagtgagccgagattgcaccattgcattgcagcctgggggacaagagcgagacttcatctcaaaaaaaaaaaaaaagaaaagaaaatatttgttgactcctgccctaggctgtagctcagccctgtcattcatgtgcagtgcaatcttgggcaagtgacttcacccctctgggtctcctcacttgtaaaataggaataaaactgctctccagagatgagggatatatttgtattctactgtagcacaacaaactatgacaaatgtagcagtttataataatccctattgacttcctcatagttctataagtcagaagtccaggtgggtttaaccgggctccctgcttagggtcccacaaggccaaagtcaaggtgttggctgggctgggcccttctctgaaggctcttggggagaatccacttccaagctcattcaggtcattggcagaattcaggtccttgcaattgtagtaaccaggtctttcttttttttgttttttttgcgatggagtcttgctctcttgcccaggttggagtgcagtggcccaatctcagctcactgcaacctccacctccaggttcaagcgatttttctacctcagtctcccgagtagctgggattacaggcacctgccaccatgcctggctaatttttgtattttta

SEQ ID NO: 21245 - DNA, 2300 bp, Homo sapien
tgaattttaaaggaagtgcatgagttcaccagatgaaagaacttttgtagccaaggtgtgacattagacccgggacacaataaacagtgaatttaggtgcaggaagtgagactaggaggtggccagggacctcatcacaaggttgtggatgcttaggaactgggattattccgagggcaatgaggagccactgaaaggcacagccagggctgggcgcggtggctcatgcctgtaatcccagcaatttgggaggctgaaatgggcggatctcctgagatcaggagtttgagaccagcctggccaacatggcgaaaacctgtctctactaaaaatacaaaaaaattagccaggcatggtggtggtggcctgtaataccagctactcgggaggctgaggcaagagaactgcttgaaccctggagtcggaggttgcagtgggcccagactgtgccattgcactccactctggtcaacagagtgggtctccatctcgaaaaaaaaaaaaaaggcacagccaggtgagggactggttgggtgctgttttggtagctcaagctggtgcttcatgaagggcaggcagcctggggacagagaggccagtgagaggcaggagcagcagcccaggctgtcactgaggagggaacaatgtggcaaaaatggagaagtgcataggagtctggaaggtccagacagatgtgggaaccccacctcctctccccactccccactcacttattagctgtgaaacccaagcaaggcactgccctctgagcctttatgacttagccacttttcactaaatgtgaaaagtgcctgactggtgaccagtaataagtaggtgaagtggtagctcctttccctgccctgttgaggcggaagctggtgaccaagggttccctctgagtgacccagctggtggcagggaaaatctgaggctgcttgttcagagagggttaccactatgcccgggcagcacggcagacttgctgctgggaccagttctggaggtcagagacctggagggcttggtgtctgacggctgaacaaacaagctggttgaggcgaggttgccgtgagccgagatcgcgccattcaccccagcctgggcaacaagagcgaaactccgtctcaaaaaaaaaaaaaaatgccggttttgtcaaagcagcaggtggcaaacactgagtcaaaagactttcccggccgggcacagtggctcacgcctgtaatcccagcactttgagaggccgaggcgggcggatcacaaggtcaagagattgagaccatcctggccaacatggtgaaaccccgtctctattaaaagtataaaaattagctgggcatggtggcgggcgcctgtagtcccagctacttgggaggctgaggcaggagaatcgcttgaacccgggaggcggaggttgtagtgagccgagatcacgccattacactccagcctgggcgacagagcgagactccgtctcaaaaaaaaaaaaaaaaaaaaaaaaaagactttcccctctttgggcctcagtttccctttctgtaaaatgcaggtgaagaggcatgagctcaggattcctaaagccctacggggctgagcaaggacggtgctttgcgtttgcctcccttcccccagcccgcccgagagggtttgctggggcagggtggcccctgggacgggttccagacagttctaggcgctcaggtccgcagctgtgctacccccgccgcccgggacgcccggtccccgccagggccctctcactgtagctttaaggagggctggggccgggtgcagcggcacctggagtctcggtggaacccggcagcggtgggcgcggaccccggagaggctgccccgagcccgagcaccccctgaccgggcgctcaccacgggtgttgggacaagcagcggagcctgcgggctggagccaggctcggaccctccgcgccggggcgggcggccgagcggacgcagctggcagtggcggcgggagagcgccccggatccgcccggagcccaaccccgtggcacttcggctggctgggcagcggcgctggggacaacgcggggccttctgcaacgagcgcctgcgtgggactccaggggccggcgccccgctccgctccccccaggcctcaaccccgctggctacccgcgctgaaacctcacctgccgccggctgcaaacggactgcgctccaggtgggtggaaacgtccttctcctactttctgggctcactcggctccctgtgacgcgatcccgcttgcacccttgcccttcacgttgaccgcagtggctg

SEQ ID NO: 21246 - DNA, 2300 bp, Homo sapien
gatcgacccacctcggcctcccaaagtgctgggatcacaggcataaaccaccgtgcccagcttatcactatttttttttaagatggagtctcgctctgtcgccaggctggagtgcagtggtgtgatctcagctcactgtaacctccgcctcccgtgttcaagcgattctcctgcctcagcctcccatgtggctgggactacaggcacgtgccaccacacccagctaattttttgtatttttagtagagacgaggtttcaccattgccgagaccagctcggtcgggagaccttaacgtagcggcgctagaggaattaaagacacacacagaaatacagaggtgtgaagtgggaaatcaggggtctcacagccttcagagcttagagctctgaacagagatttacccacatatttattaacagcaaatcagtcattagcattgtttctatagatgttaaattaactaaaagtatcccttatgtgaaacgaagggatgggccaaattaattgaataggttgggctagttaactgcagcaggaacatgcccttaagacacagatctctcaggcttttgtttgtggcttaagaatgcctttaagtggttttccaccctgggcgggccaggtgttccttgccctcattcctgtaaacctacaaccttccagcttgggcgttagggctattatggacatgttatagtgctgcagagattttgtttatggccagtttggggaccagtttatggccagactttggggggcttgctcccaacacaccatgttgtccagaatggtctcgatctcttgacctcatgatctgcccaacctggcctctgaaagtgctggaattataggcgtgagctaccacgcccagccactatcttttaatacataaagttgaggccatgctgtgaatgggtgcaggtgttaagtctttggcataggcagctctcactctggaatgcactgcctgccttactggcttaacctctcccacaccttggaccagcccctgcaattgtcctttgcatggtctcacgtggcatcatggtcatctccttctatgtgggtctccctccttccatgtggctcccccatggcaggcagggcacgtgctaacctgccatctgggggattaggggcacgtggagagggtcagtgtctactggatgaaggacagcctgttttgttttgccgtgactatttttgcagtaactgtcagcagggtgtcccaccccaagaatttccttgagccatatcagagaattggtgaagcaggttactggtcccttacactgtgtacctccagaacctgtaccctgctaggaaaagaagagttacctgccctggaatgcataagcccaccccagggcaagccaggaactcccctgtccctgagaagtcccacccccaaccctagcactcatgcagggcctcggagggtggccctgcctccctcaaatgccctccccccaaactcctatcacctggaagcctctactaggcctgtgccccattccagggaaccctctgctcccatccagggccctcatttcaccccttccctgaagcctgtctgcggctgtccccacctccctccagccaggggagggtgctccctgaccagatggctccacctgtcactccctgtcactatggtggtccttcctcctctgaactctgggaccttgcagaggctgctcaacacctctgagctcgaatctctgctccaggggatgcaggttatgaagatgagagcgtgagacagcgagctgtaagggaagcaggttacccagggatggacagaggatgggccctggccctcatgttatgaagcttctccacgtggtgccttcctctgtcaaatgggcagaagaatatccttttgatagaattaaaatatacgaaaaccatttattctcctgttacaatgatttttatttccacagcaacacttagtacctgcccccccctccagcttgccctgcccaccaaccaggagcggggccagcctggatctcttctctgccgctggcgtaggggcgggggcgggggacagtgtcttcagcaaaagtctgcggatagaaaggccccgctcctgtccggacagcaggaatgggagagccgcctccaaccccagccccatggagcagggcagaaacgctgcccactgccctgctcctgccaccaggaagggcgtgtggggggccactttctgtaaagaagaaaccgcctgaacaacaagtggctcaaggcacccttgtctaacgaccagggacactgagcgccagggcccaagtc

SEQ ID NO: 21247 - DNA, 2300 bp, Homo sapien
cacgtcacctaggtgaggaacaaaaagatatgtcataatacacccgtaggcggggcccatgctgaggagtcagaacaactaggtgttagtacccagtgaagtcacaatgtataatttatgcagggggccaggtgcagtggctcatgcctgtaatcccagcactttgggaggctggggtaagtggatcactcgaggtcaggagtttgagaccagcctggccaacatggtaaaaccccgtttctactaaaaatacaaaaattagttgggtgtggtggctcacgcctgtaatcctagctactcgggaggctgagtcaggagaatcacttgaacctgggcagtggaggctacagtgagctgagatggcaccacagcactccagcctgggcaacagaatgagactatctcaaaaaaaaaaaaaaaaaaaacacaattgatgcagggcccaggcagaagaggaaagtcacataacacataacccaggtgctgggttcagtgacccatcacaattcctccttgagtaaagcccaagcagtagaggagagtcacattacctaggtctggatccagccctatgtcacaatacctcctaaaaaaagagcccaggcaggtgagttccattacctagtagatgggccaagagatatttcccaatgacctctgtagatagggctcagaatcatcaaaagagtcatagaacctaggggctaggcccagctgtatgtcacaattaccctagttggcagagccttgatatgagaggagagtcacgtgacttgggtgctgtgcacaacgatttgtcacaattatctctgcaagaaaagcccaggtatgggagacacaccacctggttggtgaacccggagatatatcacagtcttctgtgcgggcatggagcagccagaagaggagagtcacacttccaaagtgatggatgcagagatctgtctcaaggtctcctgtgggcagggcctaggcaagagcctccccctcctttggtttgacccagtgatatgtcataatacccaaaatacaagaagccaaggtgaaaaaggagagccatatcacctagatgctgggtccagtgatatgtcacgatctcccctttttacagtgtttaggcagaaagggagagtcacatcacctaggtgaaaaaaaaatatgtcataatagccctattagcaggacgcatgcaaaagagttgcctaacctaggttttgaaaatatgtcacaataaacaataaatgcagggctttggaaggagaggagagtcacatcagttaggtgctaggaccagtgatgcatcacaattacatcttgggcacaatacccactgacaggaggaccctggaaagagtcacatcacctaggtaaggagcccagaggtatgtcacaatgccccctgtgagtagaactcaaaaaaagaggagtgtcatataacctcatggctgtgcccagcttatatgtcacaatcaccccagtgggcagggcccaggcatgagatcagagtcacaacatgtaggtgctgggccaagtgatatgtcacaatgcccactgtagacaggttccaggaagaaaaggagcatcacatcatctaggtgataaaccctgagatatctcacaatgacccctttgtgcagagatcacaaagaagaatcatataacctgtgtgctggatccagtggtaagtcactctcccttctctggccatggcccagtcaggagagaagagtcacatcatctacattctaaatccagagatgtgttacaatctctcctataggcaacggtcagataagagaggagggccatgccagatagttgatgggccctaaatgtcacaatgcccagtgtgggcagggtccaggcagaagtcccacatcaccttggtgattaacccaacagtatgtcgcaatgccttctgaggtcagggccaaggcacaaaagtgacataaccttggtgtttggtccaacaatatgtcagaatctcttcttgagcagaacctagcaaaaagagaagagtcacatcagctggatggtggccaagagatatgtcacaatcccatccgtgggctgagctaaggaaggagaataaaatcacccaagtgttgagcagaggcagatgttaaaatcactcctgcaggaaggcccagggatgagattaacaatactgaacatgtccttgttttaggtatgaaagtcaacacctgtattttgggtctaagtacatgagacacaatggtggacaatctatactgagagcctcaattcttcctgtagacagtgtctcctcagtggagtaa

SEQ ID NO: 21248 - DNA, 2300 bp, Homo sapien
tgtttttggctggtgagttctgtaaatatctatcaggtccacttgacctacagctgagttaagtcctgaatatccttgttatttttctttcccaatgatctgtctaatattggcagtggggtgttaaagtttcccactgtcattgtttgggagtctaagtctcttcgtaggtatctatgttttataaatctgggtgctggctgggtgtggtggctcatacctgtaatgtcagcactttgggaggccaaggcaggcagatgccctgaggtcaggagtttgagaccagcctagccaacatggtgaaatgctgtctctattaaaaatacaaaaattagctgggcatagtcatgggcacctgtaatcccagctattcaggaagctgaggcaggagaattgcttgaacctgcgaagtggagtttgcagtgagccaagattgtgccattgacctctagtgtgggtgacagagtgaaattccatctcaaaaaataaatcaataaatgaaaacaaatcttagtgctccttgaattgatccctttaccattatgtagtgtccttccttgtcttttttgatctttattggtttaaagtctgttttgtcagaaactactattgcaacccctgcttttttctgcttttatttgctttgtaaattgttctccctttctttattttgaggctatgggtgtctttgcatgtgagatgggtctcttgaatacagcacaccagtgggtcttgactctaaccagcttgccattctgtgtcttttaattggggcatttagcccatttaaatttaaggttaatattgttatgtgtgaatttgatcctgttctcatggtgctagctggttattttgcagacttgttgatgtagttgtttcatgatgtcattggtctttgtacttcagtgtgttttgcatttgctggtagtggtttcttcttttcatatttagtgcttctttcaggagctcttgcaaggcaggtctagtggtgatgaattccttcagcatttgtttgtctgaaaatgatttcatttctccttcacttatgaagcttacttttactgggtattctgggttagaaattcattcttttaagaatgctgaatattggcccccaattgacaccctggcttgtagggtgtcttcttagaggtccattttatagtaggtgacctggccttccctttggctgctcttaccattttttcctgaagtctaaccttgaagaatctgataattatgtgtcttgaggttgatcttctcatggagtatcttactggggttctctggattttctgaatttgaatgttggcctgtctttttaggttggaaaagttcttctggatgatatcctgaagtatgttttccaacttggttacattctttccatctctttagagtactgcaatcagttgtaagtggtctttttacataatccaacagttctcagagattttttcattcctttttatttttattttttcaatcttatctgccttatttcagcaagatagccttcaagctctgaaattcttctccctgcttgatctactcagttattgatacttgtgattacattgtgaagttctcatgttgtgttattcagttgcatcaggtcatttatgttcctctctaaactggttattcgggttaacagctcctgtaatgtttttcgtggttcttagcttctttgcattggcttagaacatgcttcattacctcaccgaagctgattattacccaccttctgaagcctacttctctcaatttatccatctcagcctgatcccagttctgtcctcttgctggagacatgttttgattatttggaggagtagagacactctggctttttgagttttgaacatttttttattgattattctcatcatcatgagtttatctagctttggtctttgaggctgctgacgtttggatggggtttttgtggggacatttttgttgatgctgctgtggttgctttctgtttttcttttaacagtcaggcccctcttctgtagggccgctgtgatttgcttgggatccacttcagatcctatttgcctgggtttctcccacacctggaggtgtcaccagtggagtgtgtagaacagcagagagaactgcctgctccttcatctgtaagctttttcccagatgggcactgagctgatgacagtgggaatacttctttataagttgtcttacaatgcctgttgggggggtggtcctcactcagtcaggatgcacaggattcaggaaccacttaacaaggcactctggctgcttcttggtgaagg

SEQ ID NO: 21249 - DNA, 2300 bp, Homo sapien
cccttcaggtgataacctcagaagacacaacaatataaaaagaagtgggcaaagtttttttgttttgttttgtttttgagatggagtttcattcttgtcacccaggctggagtgcaatggcacaatcttggctcaacgcaaactctacctcctgggttcaagtgattctcctgcctcagcctcccaagtagctggaattacaggcatgcaccacctcgcctagttaattttttgtatttttagcagagacagggtttctccatgttgttcaggctgatctcgaactcccaacctcaggtgatccgcctgcctcggcctcccaaagtgctgggattacaggcgtgagccactgctcccgactgaagaggccaaagttttgttttgctttgcacacatctattcaccgtaccaaccatatgatgtttaattcaaccgtgtatccagttgctagtctagagcaaaagtttctggatggtagggaccgtgactgcttcatctattttttgaatgaccttatgaaatggaagcaattagtttatcttttgagtcaccggacctcctctttgtgtttcaccaaagtaacagcaaactagagaaactctcatctgggtaccaaccaaagttatctcttgtatgagtatgaagggagaaaaaaaaaaaacagaatgactcatttctcttacaccgagacagaagcagaattaaccactcgtcagcctgaaacaattctgcactggacatcctcaaatgtctcaaagacatctaggtgattgtgagaaggttcttactgaccctgggctgatggcccagtgataagccaggctgagagagattcatgctgattctaaatagaaaatggaactgccttggtggagctccagaacctgcatcacctatcctgacttgctagcttttgggtaagaagaaggacaagaatactctactccagtatcatattttacaggtaggtatagttgtggtcatggctctggatactttgtggccttgatctctcactcttaagatgctcgtttacacttacagattctgtcatcaaattctatttatacctggagtctctcacataactgtagcaggtcactcactaaacaagatctgaaaagcttgaagagccacactctcaaatgggggcttcaagatttctacactgacatctcacaatacagaaaatgccttctgttggttttcagtacattctcaatccaaagtcttctggccctgtcttgtaaatcctaggcagaggccagaccttatgtgcagattctaggtgggatcaatctgactctgcatccttgggtgttacagcaaacagactacaatcaaaggagagctcccctcatagaggctgctctggcacattctaaataatatgtctaactaaaagaaaaaactgaggcaacatgaatataagtagagagttcatctgggccaagcttgaggactgtaaccttggagcaaaaatacatcttccaaagactgaacaaataagaaattgaatccctgaatagaccaataacaagtgccaaaactgaattggtcttaaatggccaccaatcacaaatagcaaagaaccagacaaatttacagattaattctaccagatgtacaaagaagagctggtaccacttctaatattatttcaaaatattgagaaaaagggacttctttttcagctcattatataaaaacagcatcattctgataccaaaactgggaagagacacaataaaaaaagaaaacttcagaccaatatccctgaggagcactgatgtgaaaaacctcaataaaacactggagaaccgaatccaggagcacatcaaaaaacttatccacctctatcaagtcggcttcatacctgggatgcaaggctggttcaacatatgtaaatcaataaatgtaatccatcacataaagagaacgaaagagaaaaacacataattatctccagatgagtcagcttggggaggcggaggcagcggcagcgcggcgagcgtgcagggaggccggagccctgcccggggcgggtcgcggggtgggcgggtgaactgccagcgaggaggcacctgcttgcgcgggtgcagcctgggctgcgccattgttgggggaggggcggctgctgagggcggcgagtagggggctagagaaggcgccagccccggcccagaggagcagagacgccccatggggaacacgctgacctattgcgtgtccccccagtaccagcctcaagctgggccggtgcgtggtgccagagctgtactgcgcaaccgacatctacg

SEQ ID NO: 21250 - DNA, 2300 bp, Homo sapien
atactccagcctggacaacacagcaagacccccatctcttaaagaaaaaaaacaaaactctcaaatgatgtttttcaaaggtttatagcatttatactcctgctgcagtaccttggagggcccaaactatattaaagcttaaaactgctttacttttttttcactgtcactgaaccaccatgttcattggcattatgaaaatatcttttaatacatttatttaataagataaaaattatcagaaaatgagaagtaccatttatagttcacaagaaatgcaacatggaccccaatagaagtagatatcataactgatacttcctttgtttatgaccgcagacatgctaaaatgctaaagtaatgcttgcaaagaatatgaatgacaaatgttatccatcagctttttggtttaaaatgattgccaatgactagcagctttaatggtaacagtagggaggaagaacccttcaatacctaacaatgctgcagtctgctcctaagtggctttagttagagtcccttgttttaagggcaatactgcattgattctaaaggcatatgcagcaaaatgagcagggggagaaaaactggaagaaacataaaagttatatggttaatgtctttaaagtctaaaaatttaaactattgtttaaaaaacctaacatagttcagttactggcccacattgtaagcaaatatctgtgtgtgggatgggagccttcactttggagtggttttggtgactctgtttacattaaaaaggacagaagagtgttttgttgcattgacaaggtcccattcttttctatggagtatgatccttgttgtccgtgcgtctcttgaatttgagatctttccttttgatgaaaacactaattttgctggtttttgagcaggaaaggtggtatttctccagtctttgtagatgaaggtcccgtgacattataacccctcatttctccctttaagagaggatggctttagagtgctgaataccaatgaagttgatcagcgctgaaagaccttcttacagctgctccacacaagtctttgtcttcacataatctagaaatagcctctaggttctgtgctctttctttgctaagaggagcaaatagaaaattcaggtggtcatctgctaaggagcgatggtcaaggtagtgtttggcataaacactagcaggaacattaatattaaactgaagaagctccgaaaaatgcctttccatttcattcatgtcctcaactgtaatgtccttgaggatctggcagtagtccacattccatacagcctgatcatcccaaaccttggaggcaagaagagtggctcccagaacaatccttttctagttagtggggcaaatgtcgatttcagcataagttaaaagcctttctaagtaaaccagagttactgttgcacattcagctgttagctgtgcagcactaaaaagagtatgaacaaatctgtaaataaatttgtgctcaggatcatgcttaaactattcctgtggaactttttctcgtgtgaggggatgtgatctctcatcaaaaatatccagggatctgtttgcatctctgttctttatgtggtaatatatttctaaggtcacattttactgtggttctaaggttaggctggctgactgttctgtcacctagaaatattgttgagcatgagctatactttttagtaagctgccctggagatagatgatttaagtggttgctcttcctcttgtctcgcacatcggtttgagatttgctcaggaaacttgtgcttgcccttggatggtcagaagggtttgactccaaagctaaatcttagggcatctcgtggtcgctgatgtgctgcaggtggtggccctcgcccgctgcgaaatccaactggtaggctccacagaagcgggcgctaccgccaccgcatccccgggtgccgcctcgtagatgtcggttgcgcagtacagctctggcaccacgcaccggcccagcttgaggctggtactggggggacacgcaataggtcagcgtgttccccatggggcgtctctgctcctctgggccggggctggcgccttctctagccccctactcgccgccctcagcagccgcccctcccccaacaatggcgcagcccaggctgcacccgcgcaagcaggtgcctcctcgctggcagttcacccgcccaccccgcgacccgccccgggcagggctccggcctccctgcacgctcgccgcgctgccgctgcctccgcctccccaagctgactcatctggagataattatgtgtttttctctttcg

SEQ ID NO: 21251 - DNA, 2300 bp, Homo sapien
tcacataaatctcccatatcagcctcccaaagtactaaaaatacaggtgagagccaccgtgtgcttctgcaatttttgtgaggattattcccaaatgagcacaaatctaaaaggaatctgacttctactatggaagtgtcactctccaggatttcaatagtctagggcagggcagctactttagtagtgtcatctatggaggtgcatgggctttggagtcagataaagttgatcctgagtctcagcccagccacttagtagccgtaggactttgcacaagtttcctgatgtggaagagttctatataccacatatgcaaaaaaggtagaatgatactgattgcaaaatgacattttttcatccctcttgtatctttgcccataaccaggtgcttttacagctgtttccatcaagatctggaatctgttttcaaagccctatatctggctgaccttatttgctcaggtcaacagaaacctgtgaacatgacagtgggccagtttggggcccaggctcaaatggtattgactgcttctctttttcttttagaatgctgccatctccatgaataatgcccatgttagccagctggaaaataagataccatgaagaggagaagcaaggtgcccctgttgacagacccaggagcagaagctcacccccagatgcacagctgtctagtcaaaaagcaggtgatgatacatgtctgaaggagctcagctgagaccagaagaatggccccactcagctcggcctaaatggccaaccatttcaattataaactaataagttttggatgatttgttatgcctcaatagctaactaatacatgcacccagtacagataagttgccaggattcagtgacaggttgactaagagttggcttctaacagtggacaccctctaggtactgatttcttcccctgatttaaagttcgatgttttgtaagagaattttgggtaatgcagaaatacctgtagacatgtatgcgtgtgattggtgcttagactcacatagtcccccacaccacaggagaaaacagataaacacagcctgattgttagggccaagaccatatagcaaactatgtttgtttttaatctattttctccatctctaaatactggagttcaagtgtgtggacagaactgaagacatagttgttttttctcctgtggccccatcatcctttgttcactatctggtctctaaaagaaaggtgggcaacaggtggccagcagttgtttattacctgtggctattttattcctactgccctcagctctttctatgggaactatctggtccaccctaggaaccaaagagagatgtttgtagggagagtctcttctttcactctcgcaggaaagagatgttcaggcccttcacaccgctgacatcagagctgcacttcaatgtgacagctattgtccatgtgtggctactgggttcccacaatgtgcctggtctgaaatgcgatatgctagaaaggtaaaatacaaagtcagcttcaaagatttagttccaaatatttatatattttatcaataattacatatttctcacacattaaaatgataatattttgaatataatgggtgaattacattgttaacaatcagttcaacttgtttctttttaaagtttggctactagaaaatttcaaatccacatgtggctgacattcattttagatgattttctcttttctaaaatctcaggctgcctgctcaaagggccagaagccaggaaggtcataaaagctgaaattttaaaataattgttatattcttttcacttgtgtatagctatataatgtattatttatttatacatatgaccttatacacaaatttaaaggcaaatactctctgggatgggcctagctcagctgagggaggaagccctgtcagaagagggggcagtctaggctgtcactctttcttcattgaacccgcatctgatcacatcttctgtcactcaaagcctgacagggcggggatttaagcattatccaaccagggacgctgggctggaaaccgtccaatcaggcatgcagctggagcggactggacggcttccgggtttggcggggtctttgtctctcgctgtagccggagctccaggttttgctctcacttctctgtgtcttctgctcctaggggcctagcctgtgtggccctctgacctgcagatattgggagatccacagctaagacgccaggaccccctagaagcctagaaatggtgagagtgcccggtccgacatcccgagagacggcgaaagggctggttgg

SEQ ID NO: 21252 - DNA, 2300 bp, Homo sapien
tgccaaaattactaagccactagaaaagtcaagttgagaactatgtcaggcaaatctgcctcccattttatttctaaataagatagctacaaagataaaaaagctacatactttctttacaattagccaacaaggaaattccttgagaaccaaagacagacagaactcagagtcatttctctgagcctcgcctgagacaaatgcacatctgattgcttcctctgcactgctgttaatttagatatgcaggttcactgagccagactaaattgtattcagttgaatgcttatcaaggactcaagaatccagacttttatctcttatttacttatgacctggaagccctcacctcaagttgtcctgcattactggatcaaaccaagaaagagagagaggaaggaggaggtggagaaggaaaaaggtagggaaggaagatcttatacatattgattgatgtctcatgctttcctaaaatgtttaaaagctgctgggcatggtggctcacacctgtaatcccagcactttgggaggctaaggcgagcagttcaccaggtcaggagacatcctggctaacagggtgaaaccctgtctctactaaaaatacaaaaaattagctggtattcatagaaaatataatttttaattatcgagtaatctgaataaatgaatatatcataaaaaaattagctgggcatggggtcatgcacctgtatccccagctacttggtaggctgagtcaggagaatcgcttgaacctgggaggcggaggttgcagtgagccgagattgtgccactgcactccagcctggtcgacagagcaagactccgtctcaaaaaaaaaaaaaaaaaaaaaaaaaaagtaagtgtaggcaaatgtagatgcaaatacacatctgtttacacaaattcctactttcaaaatcacagagaatggtcactttttagcctttttatgaataaaatcctggattccatttattattccattagaacttctgtacctattttgaaatttgagattaaattgtcttttgctgagtttgcccagtttatatttcaagtaatactatatcatgggaacacattagagattttctatatttttatgttttacatcagtttctaaaacctggaaattatcttgttttgaatttcttatgaaaatggaatactatccactaagaatattccattagcatactgcaacttaaagtcaggagatctaaactttttctggtaacattacctatatttagttttttaaaaaatgttctctttttgtatatgctttttaatttgcttttaaaacatgtgcataacatttccttgaattctattaatggacctcaatgctttaaaaaaattttttgataaaataattcagtctgaatgtgatggttcatgcctataatcccagtactttgggaggctgactttgtaggattcattgagcccaagagtttgagaccattctgggctatctagtgaggcttcatctctacaaataaaaatatgataacaaattagctgagcatggggccacatgccagtggtcccagctactcagaaggctgagacaggtaaattgctcaagcctagattgctgaggctgcagtgagctgcagtcatgaccctgcactccagcctgggtaacagagactccctctcaagaataagaaaaaccccacagaggataaataataaaatattcaatgtttgtaatacttcctactcaaagggccagaagccaggaaggtcataaaagctgaaattcaaaaacaattgttttcattttttagtatccatatagtatattacttataagtgaagatgaccttatacacaaggttaaaggcaaataccctctgggttgggcctgctctgctcagggaggaagccctgcctgaaaaggcggcagcctaggctgtcattctttcttctttcagcccagcgtctgatcacatctttcattcagggtttgcgggggcaggaccttagaagttatccaatcagggacgctgggctggaaaccgtccaatcaggcacggggcaggagaggacagggcggcttccgggatgtggcggggcctttgtctctggctgcagttggagctctgcgtctcgtcttcgttcttctgtgtcctctgctgctagaggtccagcctctgtggctctgtgacctgcgggtattgggggatccacagctaagacgccaggaccccccggaagcctagaaatggtgagagtgccggtccgacatcccgagagggggaaggggctgtggcgtgactcaggcctt

SEQ ID NO: 21253 - DNA, 2300 bp, Homo sapien
tacaaaaattagccaggcatggtggcaggcacctgtaatctcagctactcaggagaattgcctgaacccgggaggcaaaggttgcagtgagccgagattgtgccactgcactccagcctgggcgacagagcgagactctgccacaaaaaaaaagaggaaattttaaggtgcttacatttcatacctcagtaagaaaagcaaaagtatctattcctttcagacaataagtgtgttattatattatttccattaaaaatcatgtagtaattagtcatatgggaacacttttagtaggttccaagtttcatcttacaaaatttgacattaaacccagaaatcaagataacaggatgtagaacaggtatagtcaatgtcacaaatttaccctgcacaaagaggaactgatgtttttgcgaatcttgtaacttgcccattatctaccactttttttttaatgtatgcattttttacagccaaaacggaaaatatattttacctattcttttctttggtagcattttaaaagataagccttggaattctgtttgaaattcactcagccataaaaaacacaccttacaggaaaaaaaaaaaaagggtaaatgagaattttaaacaaatggaatgcgtgattagatttattttctgaaacccacctcttttatgacctctcaggagacactgcactatgtcccagggagtttccaagtgcattttactttgcaagttcttgcaccatctcaccggggtcaggtttttgtgtcttgctttgttttttagggataccatttttcccacgaatctcagagaatccagaggcagaaatcgtttctgttttcacctcaataccagcatctgattggctgaccagcaatgtgtgtccaagaaatggaaactggcttggatgaagacaatcttttttttttttttgagacggagtctcgctctgtcgctaggctagagtgctgtggcgcgatctcggctcactgcaacctccaactccctgattcaagggattctcctggctctgcctcccgagtagctgggattacaggcatgctccaccacgcccggctaatttttttgtacttttagtagagacggggtttcaccatgttggctaggatggtctccatctcctgacctcgtgatccgcccgcctcggcctcccaaagtgctgggattacaggcgtgagccaccacgccggcaacaaaagtgaacttctaaggttgtgtcatctgtttcacctctcagccctccaagctatcactgttaaatataatgggtattgagaaaactgttagatattattaaggaatttctatatatcctccagttgagttaggtgttctgatgtagctcaagtattttcttatccctacctccagggtctaaactagcaaattacatcaggacacctacagaggacaattggcgattttccaatagaaagtgaaataaccccgttaatgagagtaatgcagttattttaaaaaaagagaagtcagattgagatgtagcacagtcagggcacaattaccctgataatagccacttcacagagattggtttagatgtttttctaaaatgagcaaatttaggcaacataattcatgtttatctatccctagccccagctgcttccccgttcctaatggtcatcccaagatgtgtacagcagtgtggtacagcacggtgagagagaccctcagggatgggacgagggtctttgctgcattgtcaacataattaaaaagttgttaaaagggtatccaaatgttctgtttcttccccttcagtagctactaagatgcactatacaagctgacccagggaaggaaaaaagcaagtgcatttcaaggctcagctcacttgattagctgtaattccctgggcatgtgccccgcctacttgagcctgtttccctgtccataaaatgcgcaaacgctagggagggtgggtcctggagctttatccaatcagtggcgctggcgtgggaaccacccaatcagacgcgcagttggagagggggccgtggcttccggcttttggcggggcctttgtctccagctcccgctagaccttgggacccgcctctgcttttccgcgttctccaactcgggaatccccggtgactttgtcgcagcctccgttaccctgtgatctgcaagtcctgggagacgcacagctaagatgcccggacatcctggaagctgggaaatggtgagtgtgcggggttaggcatcccgagaggggagagcaggctgtgaaagtggcgggaccggcctcctcacagtcc

SEQ ID NO: 21254 - DNA, 2300 bp, Homo sapien
ctttaagacatttgccctgcatttcactccatcattgactaccttcccctttttcttccgactctcctcccagccccctttcttgtttgcttatacccaaccctatgaatagcaatgaaaggtttcttgtaaacagtatgcactttctcatacaccataaaaattgaacctcccccactacccagttgccttatcagtccccattacaacctttaatggctgctgccctcactagatccctaaaagtctgggtgcaagatacctcttttggtgctccaattttgcctcacaacggtctcttcttcctctgtggctcctccgcctacatgtgtctacctattaattggacaggcacatgtacgttagttttccttatcccaaaaaaatcaatttgcaaacaggaccgaacaactttctgttcctctcatgacatcaacacttcaccacaattttcttttatttttctgattaatatgagaagacaggagtaggcctcggcttacttactgctgaaaaaggaggactctgcatatttccaaatgaagaatgttgtttttacctaaatcaatctggcctggtatatgacaacatacaaaaactcaaggatagagcccaaaacttgccaacgaggcaaataattatgctgaacccccttgggcactctctaattggatgtcctggctcctcctaattcttagtcacttaatacctgtttttctccttctcttattctgaccttgtgtcttccatttagtttctcaattcatacaaaaccacatccaggccattaccaatcattctatatgataaatgctccttctgacaaccccacaatatcaccccttaccacaaaatctttcttcagtttaatctctcccactctaggtttccacactgcccctaatcctgcttgaagcagccctgagaaacattgcccatcatctctccatacgacctccaaacatttttgccaccccaacacttcaccactattttgttttgttttttcttattaatataagaagacaggaacgtcagacctctgagcccaagcttgcttgtatacatctagatggcctgaggcaactgaagtatagccagattttagggaatcagagagactgatgaggttcaggaggatatttattaattactttggttcatcagcccagacggattaacatccaaaggactgagccctcaacaaagagttaagttagcttttaggcattttgtgggtggggggagatctgtgcaggaggaatcatactacagaagtgagaaacaaagacagttattttgttgagacatgcattacatcatttcttacttttcaaggaaaaccatgttttgcgacttgagtttatctgtctagtgaccttgcagcttcacagctatggaatcagggtcttcacaatgcctgggaagtgaggaaagataaagctcactagcgatggaaaaacaggcagttagtttttttttttttttttttttatgttctgatcttatttatttatttatttatttattgttgtgggtacatagtagtatatatatttatggggtccatgagatgttttgatacaggcatgcaatgagtaataatcacattatggagaatggggtatccaccccctcaagcatttatcctttgtgttataaacaatccagttacacacttttagttattttaaaaatgtacaattaagttattattgactatagtcaccctgttgtgctataaaatagtatgttttatacattctttctagctatttttttctgtacccattaaccattcccacctccctcccacccccactacccttccctgcctctgataaccatttttctactctctatgtccatcatacattctgattttaaaacggttttcctacatttcatacataagtcactcaagtacacagaattattattttttttttaaatttatttttttattgataattcttgggtgtttctcacagaggggtatttggcagggtcatgggacaatagtggagggaaggtcagcagataaacaagtgaacaaaggtctctggttttcctaggcagaggaccctgcggccttccgcagtgtttgtgtccctgattacttgagattagggattggtgatgactcttaacgagcatgctgccttcaagcatctgtttaacaaagcacatcttgcaccgcccttaatccatttaaccctgagtggacacagcacatgtttcagagagcacagggttgggggtaaggtcacagatcaacaggatcccaaggcagaggaatt

SEQ ID NO: 21255 - DNA, 2300 bp, Homo sapien
ctcagcccaaaatctccttaagctgataagcaacttcgacaaagtctcaggatacaaaatcaatgtacaaaaatcacaagcattcttatacaccaataacagacaaacagagagccaaatcatagtgaactcccattcacaattgcttcaaagagaataaaatacttaggaatccaacttagaagggacgtgaaggacctcttcaaggagaactacaaaccactgctcaatgaaataaaagaggatacaaacaaatggaagaacattccatgctcatgggtaggaagaatcaatatcgtgaaaatggccatactaggtattttatagattcaaggtaatttatagattcaatgccatctccatcaagctaccaatgactttcttcacagaattggaaaaaactactttaaaattcatatggaaccaaaaaagagcctgcatcaccaagtcaatcctaagccaaaagaacaaagctggaggcatcacgctacctgacttcaaactatactacaaggctacagtaaccaaaacatcatggtactggtaccaaaacagagatatcagagatatagatcaatggaatagaacagagccctcagaaataatgctggatatctacaactatctgatctttgacaaacctgagaaaaagaagtaatggggaaaggattccttatttaataaatggtgctgggaaaactggctagccatatgtagaaagctgaaactggatcccttcctcacatcttatacaaaaattaattcaagatggattaaagacttaaactttagacctaaaaccataaaaaccctagaagaaaacctgggcattaccattcaggacataggcatgggcaaggacttcatgtctaaaacaccaatagcaatggcaacaaaagccaaaattgacaaatgggatctaattgaactaaagagcttctgcacagcaaaagaaactaccatcagagtgaacaggcaacctacaaaacaggagaaaattttcgcaaactactcatctgacaaagggctaatatccagaatctacagtgaactcaaactaatttacaagaaaaaaacaaacaaccccatcaaaaagtgggcaaaggatatgaacagacacttctccaaagaagatatttatgcagccaaaaaacacatgaaaaaatgctcatcatcactggccatcagagtaatgcaaatcaaaaccacaatgagataccatctcacaccagttagaatgacaatcattaaaaaggcaggaaacaacaggtgctggagaggatgtggagaaataggaacacttttacactgttggtgggactgtaaactagttcagccattgtggaagtccatgtggcaattcctcagggatctagaactagaaataacatttgacccagccatctcattactgggtatatatccaaaggactataaatcatgctgctataaagacacatgcacacgtatgtttattgcggcactattcacaatagcaaagacttggaaccaacccaaatgaccaacaatgacagactggattaagaaaatgtggcacatatataccatggaatactatgcagccataaaaaatgatgagttcatgtcctttgttgggacatggatgaaattggaacattctcagtaaactatcacaaggacaaaaaaccaaacaccgcatgttcttgctcatagatgggaattgaacaatgagaacacatggacaccggaaggggaacatcacagtctggggactgttgtggggtggggggtggggggagggatagcattaggagatatacctaatgctaaatgacgagttaatgggtgcagtacaccaggatggcacatgtatacatatgtaattaacctgcgcattctgcacatgtaccataaaacttgaagtataataataattaaaaaaagaaaaaagagagagaatatgttagagaatatttgtgttaaaaattattttattgaataatttcagtcatgcttataagtcagaaccagctctctttactctctgcattttaccttgagtcaaattaaaaattctgcccatgtccagttgataaatatgtgtgtttgtgttttccagggatcattgacatttagggatgtggccatagaattctctctggaggagtggcaatgcctggacactgcacagcagaatttatatagaaatgtgatgttagagaactacagaaacctggtcttcctgggtgagaataactttaatacgcaattcctagtatacactacaggtttcattttgctgcagaccttattggact

SEQ ID NO: 21256 - DNA, 2300 bp, Homo sapien
attagcagggcgcgatggcgtgtgtctgtaatgcctgctactcgggaggctgaggctggagaatcgcttgaacccgggaggcggaagttgcggtgagccgagatcgcaccactgcactccagtctgggcgacagagcgagactccatctcaaaaacaaacaaacagaaaagaccataattaaaacatcaaaaaataggccaggcacagtggctcatgcctgtaatcacagcaaactccatcacaaaaaaaaactccatctcaaaaaaaaaaaaaaaaaagaaataggggataaaaacccaaatattgtatgtcctcacttataagtgggagctaagctatgaagatgcaaaggcataaaaattatataatgggtctgagtgcggtgactcacgcctgtaatcccaacacattgggaggcagaggcgggcgattacttgaggtcgggagttcaagaccagcctgaccaacatagagaaaccctgtctctactaaaaatacaaaattagccgggcatgttggggcatgcctataatcctagctacttgggagcgctgaggcaggagaatcgctagaacctgggaagtggaggttgtggtgagccgagatcacaccactgaactccagcccaggcaacaagaatgaaaccctgtctcagaaaataaataaataaataaataaaagaattatataatggactctgggcactcagtgggaagggtgggagagggggtgagggatgaaagactacacattgggtacagtgcacactgcttgggagattggtgcacgtaaatctcagaaatcaccacaaaagaacttatccatgtaaccaaatactacgtataccccaaaactattgaaatataataatttaagacaaaaataaaaagccccaaactcccataagtttaaggttatatgctttgtcttttttttaagaaagggtctcactctgttacccagaatggagtgcagtggcttgatcagggctcactgcagccacaacctcctgggctcaggcaatactcctacttcagcccctgaatagctggtaactacaagttcaggtcaccatgctaaattagctgggtgtggtggacggcgcctgtaatcccagctactcgggaggctgaggcagaagaattgcttgaacccaggaggcggaggttgcagtgagctgagatcatgccattgcactctaacctggtggacagagcaagactctgtctcaaaaaacaacaacaaccataataataataataataataatttaaggttgtttcaagttaaaaaaatctattaaaataaaatagaaaaagttaaaaaaatgtgagattataaaatatatatgaaaatgtagagtgttggaaaagtgacaaatttgatggatttatttataaggttttactaaaataagtttaatttttttgttttgttttttgagatggcgtttcactcttgttgcgcaagctggagtgcaatggcccaacctcggctcactgcaacctccacctcctggattcaaatgattctcctgcctcagcctcctgagtagctgggattacaggcgcccaccaccacgcccgactaatttttgtatttttagtagagaaggggtttcaccctatcgaccaggctggtcttgaacttctgacctccagtgatccgccctcctcggcctcccaaactgttgagattaaaggcgtaagccatcgcgcccggcctttagtattgataacacactatgactaaagtaaaaattaatttactctggaacaaaagttttatgtattattaacatggcagtaaaatatattcgttcacatttcgaatacatttaaaaagagagagagtaaagaagagatagaatattcgcatgctctggggtgggcctggctcagctcagggaggaagccctgcctgaaaggttgcagcctacgctggctctctttcttcattcagcccagcatctgatcacatcttctgtcactcagggcctgaaagggcggggccttaaacattatccaatcagggatgctgggctgggaacgtccaatcaggcaggcagctggaggggacaggtcggcttccgggatgtggtcggtcctttgtctctcgctgcagccggaggtcaaggtctcgtccttactgctgtgtgtcctctgctcctagagtcccagcctctgtggccctatgacctgcaggtattgggagatccacaactaagtcgccaggaccccctggaagcctagaaatggtgagtgtgccgggtccgacacactgagagagtggcccgggc

SEQ ID NO: 21257 - DNA, 2300 bp, Homo sapien
tcttcttggggtcccaagataacttcaggctcctgattctgtcagaaagagacattcctggccaggcatggtggctcacacttgtaatcccagcactgtgggaggccaaggtgagttgatcacctgaggtcaggagttcgagaccagcctgctcaacgtggtgaaaacccatctttacatgaaatactaatattagctggttgtggtagcatgcacctgtagtctcagttactcaggcagctgaggcaggaggatcacttgaacctgggaagcagaggttgcagtgagttgaaatcacaccattgtaccccaggctgggtgatagaaggaaactctgtctaaaaaaaaaaaaaagaaatgacattccttacttaccatgggtcaggaaccctgcacagggactgtgtagacatagcaggaggccaggtttcccataaggcttatattgactctacaaattcagtatgatttcttcaaggaaagcaccccattccagccaaagtctggtgaaattaccagtgtctccaattgtgccctgttgcaaaagaaaacatgcttatggcacatatgcaaatagctatatttccataaattaaaaataccaataggtttctacattctggagaaatcaggtagcgaaaaacaagtatgctccaaattttttttacagaagtataccttccccagttgttaaaaactgtaaatagctataaatattttgactctgaaaaacaaaaaaaaaggatttgcagcattttaagaaaaaagccaaaaactattatttttgtcttctattatttcagtttatgccataaactccttttctgcttgatattcattaacatttcagctctccatgagagtcctgaaaatttttcctctgttctaatgttgcagtctccaaagttatcagaaacctgcatttaaaaatacctggcaaagttccatagcggaccataaatcacctcttgaagaggatcgaatcaagacaacaattgtctgtgggtgacaaaaagtcctaggacagctgtactttatttatttacttatttatttatttatttagagacagagcctcatcttgctctgtcgcccaggctggagtgcaatggcacaatcttggctcactgtaacctccgtctcctgggttcaagcaattctcctgcctcagccttgggagtagctgggattacaggtgtctcttccacgccaggctttttttaaattatttttagtagagacaggattgcactatatattgaccaggctggtctggaacttctgacctcaggttatccacctgcctcagtctcccaaagtgctgggattatagacgtgagccaccgtgcccggccaaccccctaaatcttagaaaggacttgaaccttcctaacttgggcctcaagctttttattaagagaggtctttaacccagtatttcttaggagagactgtaactcttctatgttgggcctctaacccaatcccattttttaccctggtaaaatgtactccactagttaccccaagttggctaattggtgctgcagtttacttcctttggttcagttttctcctcagtatagtccctttatagtttgccagaaagctgttactgaaaagggcttttaatccagaccccaagaagtcagggtgagcccatgcagtaaaatgaaagcaagtttattagagaagtaaagaaacaaagaaacaaaaaaaatggctgctccataggcagagcagctaatgtaattcttgtttcttaaattggctttgaccataggagggattgagacaattctggaagcccagcacctaggtgatgtgactttcatcttttgtttggaccgtgtgcacaaaaggaagagtggcttatcactggacctcacacacaggtgatgtaacgcttctgtctagggtaattgtgatacgttcctgtgctcatcacccagataatgtgactcttctcttttcctgagaccttcctacagtggagattgtgacatattacttggcccagtacctatgtaatgtgactcttctctcataccagagacttgcacctagggtagttgtgacatatagctgggctcagcccctgggttatgtggctcttttgattatccccagctctacctgcaaggagcactgggaaatatatctttgggcccctcaattaggtgatgtgactcccctttctggactctttcctcaggaggtattgtgacatattcctggagcaagtacccaggtaatgtaactcttttctactgcttggactctacccaaggagagattct

SEQ ID NO: 21258 - DNA, 2300 bp, Homo sapien
gtcatcatcccacattttggcagggacatgacagagaagaaggacatatcacctaaaccataaatgtaaaaatatatcatagccaggcacagtggcttatgcctgtaattccagcactttgggaggctgaggtgggcggatcacttgaggccaggagctcaagaccagcctggcttacatggcaaaaccccatctctactaaaaatacaaaaaaattagctgagcatggtggtacacgcctgtaatcccagctattccggaggctgaggcacgagaatcacttcaatccaggaggcccgatgattaggttcaaggccaaatagcaaaatatgtttgcatttaatctattttctctctatataaacactgcaggtcaagagtatgcacagatatgaagacttagagttttcttctcctccggacctatcatcctttgctccctttctgatctctggaaggaaggtgggccaaaggtggccagcagttgtctacttgtggttaatttattcctgctgccctctgctctttctatggccgccatcttttccatcctccaaactgaagagagatgttgttaggaagaggcccttccttcacactggcagaataaatttattcaggccctttacccacccaacatcagagctgcacttcacgtgtggctcctgagtgcctggaatgtggctgggtctacactgtgatgtgctggaaaggcaaaaaacagacttagtagcctgtgtgcggtggctcacgcctgtaatcccagcactttgggaggccgaggcaggtggatcacttgaggtcgggagttccagaccagcctgaccaacatggagaaaccccgtctctactaaaaatacaaaaattagccgggcatggtggcagatgcctgtaatcccagctactcaggaggccgaggcaggagactcacttgaacccaggaggcagagaacacactttgtgccattgcactccagcctgggcaacaaaagcgaaactccatctcaaaaaaaaataaaaaaaaaaaaacaaaaaaaacaaaaaaaaacagacttagttccaatgatatagttctaactatatacatgctacattaataattacacattgctcatatagtaatattttggatatattgggttactgaaattgttacaatcagtttgacctatttcttctttctttttaaagtttggctactagaaaatttaaaattcacatttggctcacattctatttcagaagattgcctcctttttttttttttttttttgacggagcttagtttcgcttttggtgcccaggctggagttcaaagcgatctcggctcactgcaactcctgcctcccgggttcacctgtctcggcctccccagtagctgggattacaggcacccgccaccatgccccgctaatttttgtatttttagtagagacggagtttcatcgtattggtcaggctggtctccaactcctgacctcaggtgatccgccggcctcggcctcccaaagtgctgggattacaggcgtgagccaccgcacccggccatgattgcctccttcttaaaatctcaggctgcctgatcaaaaaaccagaagccaggaaggtcaggaaagctgaaattttaaaatagttgttattagattatttttgtttgtgaataacaatatagtgtatttttttcttttctttttttttttgagacagagtctcactctgtggcccaggctggagtgcagtggcgcgatctcggcttactgcaatctccgcctcctgggttcaagcgattctcctgcctcagcctccggagtagctgggactacaggcgtgagccaccgcgcccggccatattatgtattatgtataaacgcatatgaccttacacacaaggttaaatgcaaatacctttgggttgggcctggctcagctcagggaggaaaacctgcctgaaaaggctggagcttaggctttcactctttcttcattcagccgagcatctgatcacgtctcctgtcactcagggcctaaaggggcgaggccttaaacgttatccagtcagggacgctgggctggaaaccgtccaatcagacacgaagctggagcggacagggtggcttccgggtttggcgggtactttgtctctcgctctagcccgagctgcaggtctcgtcttccctggtctgtgtcctcttctcctaggggcccagcctctgtggccctgtgacctgcaggtattgggagatccccagctaagacgccaggtcctcctggaagcctagaaatggtgagagtgctgggtc

SEQ ID NO: 21259 - DNA, 2300 bp, Homo sapien
tataggtatatctggctttaagatagtaagatttataggactgtaagtgtttgtcttacaatttggttttgctggtattttgatgagcaagattcgctttggcctcggtgatgatccgtcagtgaactgcgttgtgcagttccagcaaactattgctagggccttggagggacaaacagggggtgtatatataattttgtactggcagtttgtatagtaccctgtaggaccagagactgtgaaataggttgggttcatggatgtgaactgacaaatattaaagtatatggatatagcccccccgccacttataagacttccttcctttgacttggtatgaattttaaaccaagtcccaggtaaagacttagggttatagcatatataaggctggccatttccagggttattaattgaataggtggtctgattgtaagtacaagtttctaagcgagtctctgtacatttataatacatatagtgtaacagggttttagttgtactgttccctgaccaagtagtatgtgtacagtggggacacccttctataggtgttttttttagtatggttaaggggggggtaacaacagcaaaacaatgtacagcatacttatatttagtaaggacaaaggaggtctttacttgggggaggaggttgagcacagtgacagaacaaataggaaaatagtattacagaaaaactattagttttaagatttttaattacatttacttgcttgacgagtcctcaagctttggccgtgcgtagactagtcagcttccaatgtgtgattagaacagggcttgtttcctcaagcttcagccgtgtgtagactggtcagcctccggagtgaccagggcagggttgttgtcctcagcagcagcttggtctcgtctcaagattagccgggttgaatgttctgggtcctgctggttggtttacttgtcctgagctgccggttttagctgcctgtgatggattcaaggcatgattcctgtaactttaacagcagtggcagtggacaagattactgtatggggcccatcccacatgggtcttagagaagttgggttttactttttaactgaaacagagttactaggtttaaaggggtgtgctgggtctgttagacttataggcattttttcccatacccagtcatggacttcttgcatggctatttttaaagcctgcattttttttttgaaggttaattcccctagttcttggagattacctttaatttgatttgtgatttgggggtggccgaccgaacaaaattttatagggcaaatacccagtttgttcggtgggggtgtacctgactcagaggaggttcataggtaaaacctgattttattatagattaatttcctggcaataattttttagtagctgcttgagtgtctggttcatgcgttccacttttcctgaactttgtggccgataggctgtgtgtaacttctattttatttttaacagttttgttaaattttgcactattttagctataaatgctggccattgtctgactttaaagttagagggagttcaaacttggggataaagtcttttagcagtacttcagtcacttcttgtgctttttttgtcctggtggggaaagcctcaacccaccctgaaaaggtgtaaataagcactagcatgtaccgatagcctctggcatggggcaattttatgaagtttataagcaagttttcataaagcatggctctttctcctgtttagtttcccagaggaggggttccccccactttgtaacttcatatagtgacttagccattagtgagaaattggaatccagatatggcagaatcctgctgcctttaacttgtaatgtgactgtgggcttctggaagcctaatgagaaggtgctcagtctgtctctagtctttatattttttagcccctgccagcccggattagatcagtattttttttttttttttttagggtgtgacagcttttagctggtgacttttttataccacagcctttactactctctttattaccttctggacatttattttttttagtgtccttttttttgcatctcacgcattgatcttttttttaaccttgtctggctctcgaatccttgcttaacttgacctctttcatgtctatgcccgcgtccacgtcctctcacattgttaatttctctttttataagagctgttgccaacagattggcctttttcttaagcctttaatttacatttttctttttctttttgagttctcctgctcctgcggctggctggtggggccggacaac

SEQ ID NO: 21260 - DNA, 2300 bp, Homo sapien
tcagctgccgtgacttaaacatgacaaactgtattccagtagaaactgattttggttgaggaaattattttaccctagagtaaaataatcaggaaaaaaaaacacttccttatatgaacttgtatcttcctgacaaacagcattcattgtctatagttctttttgctgagatacatttattttattttaatctttgggttagataggacacaatggactgtcctattttgtggtaagggtgcctcaccaataatctgttataaaaaataaagtattgcactttgtgaatgtttaatataatttaaaagtaaactcagattcaaaatgttccttatatataaccattatattagaattcttcttttttgagtggaagaggaagaagagttatttttagtatacatactattgtatatggaggtgtttcatgaatgacaatgacatttctcaagtatatcaaggcaaatgatcaattgacaaaaagtgtggtgctctgggagggtggggggactcattaaagaaggaatgagctagtggctacaggaggctacattcttttttttttttttttgacagagtctcctctttcacccaggctggagtgcagtggcgctatctcagtgcagaggctacattcttaatcctggccaatcatcttatactcaaagagccaggaaaaaagagtgtgtgtattagggttctccaaagaaacagtaccaataggagacagatagatagatagacaacataatttactaagggaactgactcacgggattatggaggttcttctgaaataaaatggaagttttgtctttgtgtctgcttgagtacctgctcaggaaccctgaacttagttctaggaatgcaacaaattctaatttttggattgctaactcagggttaaaaagaatcctgtacattcccactttattatcaaccaccttaaatgtggttaattatgtgaaattatggttaaggtgaggggtaaatatggagaaaaagaagggggcttccctgtattcactagacttttatttcgttccagggcttatgacagagcccaagagagtcagagaagctttctacaaattcagctgtcgcattcattttcttacacactagagttgccacttaaaaatactaaaataaaataaaaaattaatgttgaccatctaacaggaatacttgactcagctactaagttacaaatttgcttcatttttggaagacatctagcatctgagaattggacttttcccagaagttcacttggtaacctcaggtaagtcctggttcatcctggagaggatccgaggggaaagcctgatgggacccacggccgccctgagaagaaaggggtgctgtggggtgcgggaggaggaggagctgggaagcaggagcgcccgggactggatctagctggaaagggggcagatgctctcccggaatcagggtaggtaccctctaggaatgggacgttccgagaggggggtgtgtctggaacattggctaggggtccttagaggtgatttctgggaagggaaggtctggggcagggctgtgaggagtcaggaaagaaactgtggagtccgttcctcacccacttcctgagccctaggttccgaggcccccaggtcagggggttcagtggcgcaggagggtccagggcaggagttggtgagtcacctctcaggtccacctgtaaaggaactctgactcagagcatgagggtagcccaagaagcttcgacttcacccagagaaagtctgcccgccgttctgcccctggagcaggaggcaccgcccctctctcacccttagagccggcggccccgcccctttcctcccactggagcctgcggccccgcccccgcccgctcccggagtcagcggccccgcccctctccccagagtgggcggggccgcaattgcctgctcagctttccttgtgacgcctcatatccccctgggtgcgctgttgcctggctgcgcttcctttttctgtcatctttcgcatcgaccaatgggcttggagcatggaggccacgccccccctctgccctagttggccctggttacaccttctctggtcagtctcacagctgcgcggtggcagacaggacttgttccacagtggtaactgggatagagctgatgtggccccaaccccacctcccttcccgccctgccatgtcggaagaaacccgacgagcaaattggcagcagcaaagaaaaaggtacaagcgcctggtggcagcccaacgacccagccccaggtgccgtctgatggcaggacca

SEQ ID NO: 21261 - DNA, 2300 bp, Homo sapien
gcctttcacttattaaattcttctctaacctcacctttggagtgtctgcacccttgatttcattggctgtgagaccaagaacttcgtgtaacaccccagataatgaggccgatttaattgccttctgaatggtggcccaccagtgaccctcccagccaaagcacacatggggcagaaacaccaatcacctgcctgggaaggccaggtgggcaggaacaagcagggacttggtaagaaaaccagaatgtgtgttcaagggcaggggccgagggttcagctgagttggaaaattcagattctctttcaggatgtgctcctctcctcggatctgcttatctcctgcaatctgagacacaatgcagagcaattcccaggccagccatgattggagcctccaccactatatggtgaggtgcagagaaaggccctgtgctaggccaagagcctatccttgaccagttcaccctccctgtccactaggtgcaggcagaggccagggaccctaacttcagacagaggtaggcagcagggtcaccgcctccggcaatcccatcccggggattacagggtccctggggagacctagcagtggctgggttgagagattcaggcagggggatcccaggcgaaaaagtaagggactgggcatgtgtggggactaagagagaagtgtgtggctgtccctggagaagtgacagcaaggcacagacaagctgagtacccagatgccacacccaactgtcaggtacacaagccccagaatcccctaagcagccccaggaagggttttatttaatcaagaaaaaaggagtcccacctccactcacacaggcactggtccttacatacattagagaacagaactcttgctctgcccaaggccagggaaagagggcaatgtctctctatcccgtgggtcacagaccttgtcctgccagaacacccaccccaccctcagccccagaaaggtacagacgacaaccagggtgcacatgccaaccactggcacaacccaaaaggggctgagtcctgtagggaccttggtcctggggagtgtttcccagtcacagagtctttctgattttttcactcactagctttgtgcctcagtttccccctctatggcaaaaagttaaattccatcctgcaggctaggggaccctgataggtcaccacagcccattaaatgactgcagcatgtgaaagtgggggtgggggggagatctccctgccctgggtcttttgccccaggactgatgtttatcaggccaaggccaggccagcctgttgaggaggccaatatgccccgcctggggaaacttgctcccaattccaggtcactacggttaaggacccccaatgcattagggcaggaaaaggggtggaatggggatgaagcaacgcttatcataagggccttgggttaaccctagagaaaaacaatcaaattcagactcctgtctgaagctgaccactcaaagagatttcgattttggggtaagaaacggtccttgggtcagaaaacaagatcttctgattctggactctacagctgtcttgggtaagggaattttgccagctctgtgctttcattgagcctaaagggagggggcacctggaagggactctgaagccaagggtgagagtcctgacttcctgcctccccaactcactttccaagagtagacattgggcagcaaagtttcttaacaaagtcagaaaaaataatatccagaccaggcaggctaataaattttaccaggattatccggcctaatcaccgaaacagccctgccatatttctcctctgggacaggtaaggaaactgaggttggaggaggacaccgggagcctggtcaggccgctggcagcctggagacccagaggtccaggcattcaccgccctccacaccaccgcccctccctcccaggcccaggagtcttcattcccagcatattcacctgtcaataactcaggccccccgcaatcgtcaggtgatggcctccctgtgtgtggctgccaggctagggatgggggtgtctgtgcttccctcgcccaagctgagagtggcctgttcccagggggcgggcttcctctttggttggcagcctggagtctggagtgcaggtgccgggcaggcagcactgggagcgctcggcgacttggctggaggccgaaggtgccgcccctcggggaccagagcgtctttgcaaggtgggctcagcgcacactcccctctcgttctgtggccccggggcccctcctagaagatcctcctcatctcgggtgacattgaccg

SEQ ID NO: 21262 - DNA, 2300 bp, Homo sapien
atacagcttctaatattccaaaaagagtattcaagccctttttgtttgtttgtttgagacagaatctcgctctgctctgtcgcccaggctggagtgcagtggcacgatcttggctcactgcaacctccacctcccgggttcaagcgattctcctgcctcagcttcccgagcagctgggactacaggcacgtgccaccatgcccggctaactttttttgtatttttagtagagacgggggttcatcgtgttaggcaggatggtctcaatctcctgatctcatgatccgcctgccttggcctcccaaagtgctgggattacaggcgttaggcaccgtgcccagccaagccttaactcctgaatgagaccatacgtctttttattttagccccaattcggtacatggcatgtttttaattttaggggaatgcaacctttattctagaaaatttttccctcacagtaacgatcaccaatgtcagggcacctacattggccaatgtcagggccttgtgtgcactcagtatatatacaactgggttggttcaggaacaaaaccaatagcgacgttggttgtgcatagaacaataatttggtaatattggtaagacaaagccatgacttagcggcaaacattttttcattcatttgagaaaaaatttgcaactagtcacctaaaagtactggtttacagcactggcatttgaccttggctgcgctctgtcatcacctagagatatttacactattgcccaggttccattgcaggaattctgatttaattggtatgtggcaacttgtgtttgggggattttaaaagacctccgaagtgatttttacatgcagactcgggtgaaaacaattggttcagggtgagggatgtattcactgtgtgtgatttccaggtgtgcttctggagctttgccccatggctgcttctgactttgaaatcttcaacagcagctctgccattgtaaaaatcaaaatgcaggccaggcagggtggctcacacctataatctcagcactttgggaggccgaggcgagtggatcacctgaggttaggagtttgagaccagcctggcaaacatggcaaaaccccatctctactaaaaattgaaaaatcagctgggcatggtggtgcacgcctgtattctcagctactggagaggctgagacaccagaatctcttgaagccaggaggctgaggttgcagtgagccgagatcacaccactgcatttcagcgtgggaaacaaagtgagaccatgtcttaaaaaaaaaaaaaaatcaaaagacaacttcaagatgtactcaaatattttgctaaattgcagcagaatgaaatgtcttccggctggggtcggtggctcacgcctgtaatcccagcactttaggaagctaaggaggatggatcacctgaggtcaggagttcaagaccagcctgggcaagatggcgaaaccccgcttctactaaaaatacaaaaaaattagccgggcgcggtggcaggcgcctgtaatcccagctactcgggaggctggggcaggagaatcgcttgaacccgggggcggaggtcgcagcgagctgagatcgcgccactgcgctccagcctgggcgacagagtgagactctgtctcacacacaaaaaagcctaaatttaaaaataattattctattcttttcatgtgtgagcagccatatagtatattatttacaaatatatgagaccttacacacaacgttaaaggcaaacaccttctgcggtgtgcttggctcagctcaggcaggaagccctgcctgaaaaggctgcaccttcggctgtcactctgtcctcattcggcccagcgtttggttacatcttctgtcactcagggcctgagggcggggggggggggggtcttaaacgttatccattcagcgacgctggcctgggaactgtccaatcaggcacgcagctggagcggaaagggcggcttccgggatgtggcggggtctttgtctctcgctgcagtcggagtatggtctagtgttcgctgttctgcgtcctctggtcctagaggcccatcctctgtggccctgtgacctgcaggtattgggagatccacagctaagacgctaggaccccctggaagcctagaaacggtgagagtgccgggtccgacatcccgagagaggggaaggggctggttggaaccggtggcaagaggctgtggcgggactcaggcctccccgcagtcggctccacaatctgcgccccaagttcgccttgcccagcccagcctcagtccccttcagccatcagat

SEQ ID NO: 21263 - DNA, 2300 bp, Homo sapien
cctatttcactcagagtattattcaatctttaaaattagtatatacatttttaatggtttctttctgaaaattttataatatttttgatgggattatattgccctattttgtatagattgtaatctttgagatttggacatttaaaaatttataatatagctttgtcctggtgtagtcagaaaacaatggtcttggctagagattatgtgggtctctcaaacatcttcagatttgtcttgtctgaaattttgtgcttacctttagttaaaagagattatttatgtttcttctgaaaagtagttacttgttacaccttttctctctttgcagcactgcagtgctctgctgcattgtatttatctttggtctcaacagactcaaactgtcatttctaagtataccaccatatctttcagcactttatgtcatgggagacagaaaccagtgtgtggaaaggcccatagaagacagaaattaaattgtatgtgccaatattttacttgcctttagaaaaaaaaacagaagttgacaatttacttctgaagggactaggtaatattgaggagcagaaagagttgattgggtaaatttaacaaacttttctttttttctatgtggctctttgcattgggcttaattcagacactgtacacacttaactcatgtataaattatctacatatgtattttggtctgtatgcttttattacatttatatgtctgtgaagaattagggcctgtgtcatactgcagtgtcatcttgcttatgtagtttgaataattttataggttaaatttggaaactatatttatctaataagtggactaatttgttatttttatttcttttcagttatatgttctcattttgctcaagacctttggccagagcagggcagagaagattctttccaaaaagtgatattgagaagatatgaaaaatgtggacatgagaatttacagttaaaaattggttgtaccaatgtggatgagtgtaaggtgcacaaaaaaggttataataagcttaaccagagtttgacaactacacaaagcaaagtatttcaatgtggcaaatatgcaaacatctttcataaatgttcaaattcaaaaagacataagataaggcatactggaaagaaacttttgaaatgtaaagaatatgtcagatcattttgcatgctttcacacctatctcaacataaaagaatttatactagagagaattcctacaaaagtgaagaacatggcaaagcctttaactggtcctcagcccttacttataagagaattcatactggagagaaaccctgcaaatgtgaagaatgtggcaaagcctttagtaagttctcaatccttactaagcataaggtaattcatactggagagaaacattacaaatgtgaagaatgtggcaaagccttcacccggtcctcaagccttattgaacataagagaagtcatgctggagagaaaccctacaaatgtgaagaatgtggcaaagcctttagtaaggcctcaacccttactgcacataagacaattcatgctggagagaaaccctacaaatgtgaagaatgtggcaaagctttcaaccggtcctcaaaccttatggaacataagagaattcatactggagagaagccctgcaaatgtgaagaatgtggcaaagcctttggtaacttctcaacccttactaaacataaggtaattcatactggagagaaaccctacaaatgtgaagaatgtggcaaagccttcagctggccctcaagccttactgaacacaagagaattcatgctggagacaaaccttacaaatgtgaagaatgtggcaaaacctttaagtggtcctcaacacttactaaacataagataattcatactggagagaaaccctacaaatgtgaagaatgtggcaaagcctttactacattttcgagccttactaaacataaagtaattcatactggagagaaacactacaaatgtgaagaatgtggcaaagtcttcagctggtcctcaagccttactacacataaggcaattcatgctggagagaaactctacaaatgtgaagaatgtggcaaagcctttaagtggtcctcaaaccttatggaacataagagaattcatactggagagaaaccctacaaatgtgaagaatgtggcaaagccttcagtaaggttgcaaaccttactaaacataaggtaattcatactggagagaaacaatacaaatgtgaagaatgtggcaaagccttcatctggtcctcaagacttagtgaacataagagaattc

SEQ ID NO: 21264 - DNA, 2300 bp, Homo sapien
agaacctccctcactgagcaccttgtgacccccacccctgcctgcaagagaaaaaccccctttgactgtaattttccactacccgcccaaatcctttaaaacggccccacccctatctcccttcgctgactcttttttcggactcagcccgcttgcacccaggtgattaaaaagctttattgcttacacaaagcctgtttggtggtctcttcacgcggttgcgcatgacagtaacacatatgcttagggtaattatgatatgttcctgtgcccgtcacccagataatgtgactcttctcttttcctgggaccttcctacagtggagattgtgacatattgcttggcccagtatctatgtgatgtgattctcctttcataccagagacttgccacctggggtagttgtgacatatagctgggcccagcccctaggttatgtgactcttttgcttatcctcagctctacctacaagaagcactgggaaatatctttggaccccacgattaggtgatgtgactccccttcctgggctctttcctcaggaggtattgtgacatattcctggaccaagtacctaggtaatgtaactcttttctagtgcttggactttacccaaggagagattgtaatgtatcactggacccagcacctaggttacatgactttcctcttttgactgagtcttgcataaattgtgtattgtgacaaataactgagtctaaaagctaggtgatgagactcttctgaatggaccctgtctacaggggtattatgacatatctttttttatactgcctaggtgatgtgactttgtgtgtgtgtgtgtcccggccctgccaaaagtggggatcgtaacatatcactaaacttagcaccaaggtgttatgactctccttgtttgcctgggccctgcatatatttggtaatatgacgtatggctgagacaaacacctagggcatgagaacctcccgcctgggtcctggccacaaggagtcttttggcttatctctgcatccatcaaccaggagatgtgactcttcttttctgtctgggttctacaaaaacaagtgattgtgacatattatcaaacccagcaactagatgatgtgatttttcttccctgcttgaactctggatatgctgtgtattgtgatatatggctgggtccaacattaaggtaatgtgactctcctgaatggtctctgcccacaggaatattatgacatatctttacatttaacaccttggttacgtgaatctttttatctcccctcttgaattagggattgtgatatatcgctgaacctagcacctaggtgatgtgactttgttttattgcctgtgtcctgcattttttaagtattgtgacatgtccctggccacaacatctaaagaattgggaggtacctgcttgtactctgcctacgggcggggggggggggggcattgtgacatatctctgggcccatcaactgcttcatttgactctcctctcctacccatgctttgtcaataggagagattgtgacatatctctggaaccagaaccttagtgatgtgacgcttctctcctgctgaagccatgcccacacaagggaaagtgacttatcactgggcccagcacacaggtgatgtaattcttctgcctggtttttgtacccaggagccattgtaatctatctctgggcccatcatttaaatgatgtgactgtcattttcttcctgagccctattcacagggaaaataatgacacatctgtggggttctcaccgaaatgatgtgactctcctgcctgggctcacctctcaagggaattgtgacatattactgggccagccacctaggtgatgtggctctgacaaaggagaaattgtgatgtaccactgttccacacctaagagatttgactctcatcttttcatgagccctgcatttattgtgtattgtgacatatggcttgatccaacaccttggtgatgtgactctctacttcttcctgagctatgccaaaaaagaagattgtgacatatcactggatccagtacctagatgatgtaaatcttttcttttgctgagccatgcatatttttggtattgtgacatgtcgctggacccaacacctacaggattggatcagaggctactgaataagccctgcccataggcggccttgtgacatatgtctgcatctatcgcctaagtgatgtgactctttttctgcctgcagcctgcacatagagaagattgtgacatatagctctgcccagtaaccaggtgatgtgtcttttctggcagg

SEQ ID NO: 21265 - DNA, 2300 bp, Homo sapien
catatcttttggcccagaaatcaggtgatgtgtttctcctgcctgagctttgctcacagggagcattgtgacatatcactgggcctagaacccaaatgatgtgactctactgagtgtgccctgctttcaggaggaaattgtaacgtatctctgaccaaccacccaggtgataacacttctgcctgattcctgttctcagggaagattgtgacatatccctggcccagcacccagatgacgtaactctcctgtgcatgccctatccacacgtgagactgtgacatatatctttgtttagatcataggtgcgatgttgactctcatgcctcaaactagccaatagaagagatgctgtttctcatagctaggcttaggaaaatggataaaatcctggctctcctctttaggatggtcagagaaaattacactctctcacatattgtataaaccctcgggtaatatagtgtcataacagggcccagcaaacaggtgcaattgtgttttttgtatgcacgctttgccaattgttaagaccgtcggccggggtggtggctcatgcctgtaatcccatcactttgggaggccgaggtgggtggatcacttgaggtcacgagttcaagaccagcctggccaacatggtgaaaccgtgtctctactaaaatacaaaaattacctgggcgtggtggtgagcacctgtaatcccagctactccggaggctgaagcaggagaattggctgaacctgggaggtggagtttgcagtgagccaaggtcttgccactgcactccagcctgggtgacgcagcaagactctgtctcaaaaataaaaataaaaataaaaataaaaataaaaaagattgtcactctcatccatggacagagcccactggtgaggtcttaaatcttacaggtggatgcagtgcagagttgaaattgtgactgtcgtatgtgaacatcaggcaacagcagaggtggtgactccttagtaagccaagcttataggcaggggacaactcttatatctggactgagccattgcagagaagttaactcttataactgggcatagagccacaggcacaatcatgagtccaaaccagcacgaatgtctcccagtcacaaaggactgtgactcttatgcataccttataaaacacttggctggtacagagcatgttctaactgggcccaaagtacagttgagattttgacactcatatgtacacccagccgacagtaaatgttgtcatcttctcacatgaacacagcctactgttgaggttctgaatctcacacagatgcagttgcaaggtggaaaatttactctcatatgtggatccagttcaaaggtaagttggtgactttcagactaaaatttgacccacctgtgaggctgtgattccactaaggaggcacagtggtaagagggactgagtttctcatgcactgattcagttcatttcagagactgtgactagtgtacttagaaccaacatacaggaggtgttgactctcatacctagaatcgggatatgtacagtattgttcatctcatcccctgtccttcctgcaggtgtgattttgacatacacctctgccttgcacctgagtaatgtgactctttagcaccagcacagcctacagataggattgtgccacactgctggacccagcacctaggtgacgtaactctattctcctgctttggtgctacccaaaaaggacattgtaacatatctcagagccttgctcccaggtaatgtgagtctcctctcctgtcttcctggtgcccacagaagcaggatatgtacagaattgttgatctcatctgtggaccttcctgcaagcacgattgtgccatatgcctctgtatacgcaagggtgattgtgccatatgcctctgtatagtttactctcctgcctggatttagcccacagatgaaattgtgacatatcgctggaccagaaactaggtgatgtgactgtattctcttgcttctgtgctttcacatgggacattgtgacatatcactgggcctagcacccagatgatggaagttctgttttctgccttggtactgtccacagtgagcattgtgacatatcgctgctgtcccctacaagttatgtgactctcttgcctgtgctctgccaacatgggccattgtgacatgttgctgggtccaaaacctaggtgatgtaactaatttgtttgggttctgcctataggagtcattgtcacatatctctttgctcatcacccaggtgatgtgactttcttctcctgcctagttccttctc

SEQ ID NO: 21266 - DNA, 2300 bp, Homo sapien
gcctcccaggttcaagcaattctcctgtctcagccttccaagtagcagggattacaggtgtgtgccaccatgcacggctaatttttgtatttttagtagagacggggttttgctatgttggccaggctggtctcgaactcctaacttcaggtgatctacctgcctcggcctctcattaagtgatgggattacaggcatgagccacagcacccagccaaaaaattgtgtcttttttgacctctaacttttggatgctatagagtgccaatgcagcatataaaagaataagaaacagaattttttttttgttgaattacatggaaagcattgtcaaaaatgtttgatcttcaacttaatattttaataaatgttattaatgtttatttcaaaatgtatgaaatttccttttttttgagacggagtcttgctctgtcaccaggctggagtgcagtggtgcaatcttggctcactgcaaccccgcctcccaggttcaagtgattctcctgcctcagtctctcaagtagctgggactacaggcacacaccaccacgcccagctaattttttttttccttttttttcttttttttttgaggcggagtctccatctgtcacccaggctggagtgcagttgtgagatgtcgactcactgcagcctctgcctccagggttcaagtgattctcctgcctcagcctcccgagtagctgggattacaggcgccacacccagctaatttttgtatttttagtagagatggggtttcaccaggttggtcaggctggttttgaactcctgacctgacctggttttgaattcctgagcccgcctcaggctccccaagtgctgggattacaggtgtgagccactgcgcctagcctaatttttgtatttttagtaaagacaaggtttcaccatgttggccagtatggtcttgatattttgaccttgtgatccacccgccttggcctcccaaagtgctgagattacaggcgtgagccaccgtgcccagccaatgtatgaaatttctaaaaatctaatttatctgagtatatctaattgtcataattatggttattatgacaaattattgtaggctgaagacataatcgatttcttttatttgtttctttataaccatttttttttttaagacggagtttcacttttgttgcccaggctagggtgcagtggtgtgatcttggctcacagcaacctgcacctcccaggttcaagcgattctcctgcctcagcctcccaagtagctgagattacaggcatgcaccaccatgcctggctaatttttgtatttttagtagagaaggggtttcaccatgttgatcaggctggatggtctcgaacttctgaccttgggtgatccacccgccttggcctcccaaagtgctgggattacaggcatgagccaccgtgtctggcctctttataaccatttttttttttaagacggagtttcacttttgttgcccaggctagggtgcagtggtgtgatcttggctcacagcaacctccacctcccaggttcaagcgattctcctgcctcagcctcccaagtagctgagattacaggcatgcaccaccatgcctggctaatttttgtatttttagtagagaaggggtttcaccatgttgatcaggctggatggtctcgaacttctgaccttgggtgatccacccgccttggcctcccaaagtgctgggattacaggcatgagccaccgtgtctggcctctttataaccattttaagtcatttccacagttaatggtctaattctaatgcagtttctcaaaactccaaaagcttgcaaaattgtaaaatatagtgtctttaaggaggtttatgaaagtatgggtaaagtcgagtataggtttctgatcagtttgggattaattgtttggactgggtaaggactctgagaatcctaatgaagagattgattcttataaaactgctaacccaagcaaaacaaagattaattaaatattagaaaaatattctgccacatattgtgttaaatcagccagtactgaagttttttagacatgccatttgaatgaactctgtggcctaagtcaaattacctatgataacccctcagttttcagtgctgtgcacctaaattgtagaaacctggtatttaagaggacaaatttaatgttaagtgtggactcttggagaacctagacagccaacagctacttgttcattcctgagttcttaaagcttccattattaacagctctgcattccattactcatcacagaagagataaaataatcta

SEQ ID NO: 21267 - DNA, 2300 bp, Homo sapien
ttccatactcaagccatcctcctgccctagtcacagagtacctcggactacaggcatgcaacatcatgcttggctaattttttttcatgaagacaggattttactatgtcgcccacgctgtgtttgaactgctgagctcaagttattctcccatctcagcctcacaaagtgctaagattacaggtgtgaaccaccatgtgcttctgcaatttcttgacaggattatttccaataataaacagtactatgtgggcacaaatctaaaaaaaaaaaaaactgtcttcttttgcagaagtgtcactctccagaatttcaagggtctgtggcagttactctagtaatatagtttgatctatggaggtgcctgagctttggagtcagaatttatcctgaggttcagcccagccaattagtagctttgggtctttggacaagtttcttcatgtgaaagagttgtataaaccacatatgcaaaaaaggcagaatgatactaattgcagaaattgcagcaatttttcatccctcctatatcctttgccacgtgcttttttacagccgttcccattgagatatggaatctgttttccagaccctagatacggctgaccttatttcctcaggtcagtagaaacctgtgaacatgaccgtgtgccagtttggggcctaggctcaaatggtcttgaatgcttctgcttttctttcagaatgctgccctctccatgaacaaagcacatgttagccagctggaggataacataacatggtgggtggggaagagaagcaaagtgcctctgttgacagaagcagaagctcacccccagaagcagaagcttacccccagaagcacagcttcctagtcaagaagcagttgttgatacatgtctgaaggagctcagctgggaccagaagaatggccccagtgagcccagcctaaatggctgaccatctcaattattacctaataagttttggatggttggttatgctgcaatagctaactaatacatgcacccagtgcagataggtgccatgatttaatgacaggttgattactagttaccttctaacagtgggctccataaaggtactaatattttcccctgatttaaagttagatgtgttgtaagataatgttgagtaacgctgcaatacatgtagatatgtatgcatgtgattggtccttagtccccgcacgcacaggagaaaacgtaaaactacatcctgacacttagggccaaggccaaatagcaaaataattttgcctttaatctgttttcttcatatctaacattggaggtccagactgtggacagatctgaagacatagagttttcttcccctgtggccccatcatcctttgttcagtgtctgatctctggaagaaaggtggtcaccagatagtgatctacctgtggttattctgctttttcttttcttttcttttcttttctttctttctttcctttctttccttatttcttttctttctctcttttctttctttctttttctctctctctttctctcctcctcccttcctcctttccttccttcctttcatctcactctgtcaccaggctggagttcagtggtacgatctcggctcattgcaacctccacctcctgggttcaagcgattcccctgccttagcctcccgagtagctgggattacaggcgcgcgccactactcccagctacttttttttttttttttttttgtatttttagtagagacggggtttcacttgttggccaggctggtctcaaactcctgacctcagatgatccacccgcctcggccccccaaagtgctgggattacaggcgtgagccaccgcgcccggtctatgttcttttgatttgtgaatattcatatagcgtattatttataaatacatatgatcttacacaaaaggttaaagtcagtaccctctggggtgggcctgtctcagttcagggaggaagtcctgcccgaaaaggctgcagcctacgctgtcactcttcattcagtccagcatctgatcacatctgtcactcagggcctgagggggcggggccttaaacgttatccaatcggggacactgggcggggggccgtccaatcaggcccgcagctggagcagacagggcggcttccgggatttggcgcggcctttgtttctcgctgccgccgaagctccaattttcgtctgtctgctttgtgtcctctgcacgtagaagcccagcctgtgtggccctgcgacctgcgggtattgggagatccacagctaagacgccagggccccctggaagcctagaaa

SEQ ID NO: 21268 - DNA, 2300 bp, Homo sapien
ccatgttggtcaggctggtctcaaacttctgacctcaggtgatctgcctgcctcggcctcccaaagtgctgggattacaggcatcagccactgtgcccggcgactcttttcttacgtgggctttgctaatagtagagattgtgacctatctctgggcccagcacctagatattatgactgtcctaccctgcctggtccatgcccacagaaaagagtgacttatcactaggcttaacacacaagtgattcgattcttctgcatgatcccagcccacatggcttattgtgacatatctagacccatcacctagatgatgtaactctccttttctttctgggaactgtccataatgaggattgtgacacatcacttggcccagcacttatgtgatatgactctcttcttttgcctgggcttatcaaattgggtgattatgtcatatagctgtactcagctcctaggttatgtgtctctcctgtttctcctgagtccaacccacagaggtcattgcaacatatctctgagcccctaatttacgtagtttgactcctgcctgggccctcccttcagtgatttttgtgacatattttttgactcagcacctaggtaatgtgactcttctccactgcttggactctgtcacagaaggtattgtgatgtatcactgggcctgacacctaggtgaaggtactgtcttctcctgcctgggccctgcataaattgtatattttgacatgtcactgggttcaacacatgggtgattcaactctctcacatggaccttgagcatggggttattaggacatttatttttgttcatctcagtgatatgactcctttcctccctgaaccctgtcaaaaagaaagattgtgacatatcacttaaaccagaacttaggtgatgagactcttctgtctagcaaccacttattttgggtattgtgacatttcactgggccaaacacctaaaaaatgggaggctcctgcctcagccctgtccacatatatctggacatatatctgcatccattacataaaacatgtgataccttttctgcctgtaccctgcccacaggaaagattgtgacactgcagggcctggccgccagctgttgtgtctcacctgaatgtacataactttcaggagaaagttgtaacatgtcactggttgaaaacccagatgatgtgactctcctggcttttcacagccctcagggaaaaaatttacatatcagtggcccagcatccaggtgatgcgactctcctgggtgctttctgccaacaagttgattggtaacatatatctcatcccagctcacaggtttgatgatgactctaatacttcataccagtcaatagaagagatagtgtctctcacagctaggcttagaaaaaggagtaaaatctcaggtctcctctctgcatgaaggttatagcgaatcaccactctcatatattgtataaagcactcagatgatacagagcatgtcatcataggacccagcaaacaggttagatcatgtttcatgtaagcgctccctgacaatttttagaattgtcatcgtcacacatggtgaaagtccactgatgaggtcataattctcatgcacagatgcagtccacagttaaaattgtaactatcatatgtaaacgtggccacagttgagatggtgactcatttctaaacccagctcataggtgagtgaggactctcctctctggacccagccaattgaagagatgttgacccatacctagacttaggaccacataagatcatgggtccaaagcagcgcaaagttctcagagtaggttgcaactcatacagtcctcaagagagtgcccttacagggccaagcacacaggtgagattgtcaaacttacattcacacccagtcaatagcaaagattgtcatttacttaaacacaccctacttttgaggttctgaatctcacttttggaggcagttgaatgttggaaaattgactctcatttgtgtggattttgtccacatttgggtgactctttaatcaaaattcagcacacctttgtgactgtaacttcactaaggagctttatttatttagagatgaagtttcattcttgtaacccaggctggagtgcggtggcgtgatctccgctcactgcaacctctgcctactgggttcaagcgattctcctgcctgattctcccaagtagctgggattacaggtgctcactaccatgttggctaattttttgtatttttagtagagatggggctttaccatgttggtcaggctggtcttgaactcctg

SEQ ID NO: 21269 - DNA, 2300 bp, Homo sapien
gcctatcttcactccctcactgtgtgttaggcaggtctggttagaatggggagaataatacattcagagtctggcctccaaggtattcccatctggggtgcagggagtaggcaggcaagtcagagtctgtggtggtactttttgctgggtctgagggcaggaaggccagggctggacacatgaatatctggggaacaaccaatgctgattccttccccccgcccagagttacaaccaggccaggccaatcatcacgattaataaaaccactgcagctctcattctgcacaaaactaaagtgtaccccaacccccagccctaccacagatctccaacttcccatcccagaacacaggaagccctccattgttttgacctaaagcctggactttaagccaggttgggcctggggatggtggcagcaaaagcagcagccacaatgtcaaacatacaaatgatctgagaaatctcatctgcacgtcattgagtcagaactgacctagagttgtatacaagttaagaatgacagatctataccctcatgggcatggacaccttccacacttgctggggagaatgagaggcacctgtttcccagctgcaatctgatgtccacatacacccattcacgtgtcttcatttaggtctctgcattgtatattcattgaaccaatgcaaatacatcttctgtgggagggcatcatttagtgcagcaccaccccccacttgttctgcggggcagtcaggagggatctggtcagctcttaattccctccccctttccagcactcatatccagcagcaccatctcaggatttttgttttgttttcttttcttttcttttcttttttttgagacgcagtctcgccctatagccaggctggagtgcaatggcacgatctcagctcactgcaacctctgactccctggttcaagtgattctcctgcctcagcctccccagtagctgggattacaggcgcacaccaccacacccagctaatttttgtgtttttaatagagatggggtttcaccatgttggccagaatggtctggatctcctgacctcgtgatccgcccgcctcagcctcccaaagtgctgggttttttctgcattatcaaaatgattaaaaagttgttttaaaatgtccaaatggggctgggcgcggtggctcacgcctgtaatcccagcactttgagaggccgaggcgggcggatcacgaggtcaagagatcgagatcatcctggctaacacagtgaaaccctgtctctactaaaaatacaaaaaaaaaaaaaaaaaaaaaaaaaaaaaaaaaaaaaaaaaaaaaaaaaaaattagccaagcgtggtggcgggcgcctgtagtcccaggtacttggaaggctgaggcaggggaatggcctgaacccgggaggcggagcttgcagtgagccgagatcgtgccactgcactccagcctgggagacagagcgatactccgtctcaaaaaaaaagtccaaatgggccgggaacggtggctcacgcctgtaatctcagcactttgggaggctgaggggggcaaatcacctgaggtcaggagttcgagatcagcctggccaacacggcaaaaccctgtctctactaaaaatgcaaaaagtagccgggcgtggtggcatgcgcctgtaatcccagttactcggaaggctgaggcaggagaatcgcttgaacccgggaggcggaggttgcagtgagccaagattgcaccattgcactccagcctgggcaataagagcgaaactaggtacaaaaaaaaaaaaaagtccaaatgtttttttcttacccttaagtagtaaataagatgcattatacaagcaaacccaggtaagggaaagagcaagtgcatttcaagtctcagctcacttctttattagctgtaattccctgtgcaccttaccctacctactttagcctgttttcctgtcagtaaaatgcactaatgctgagaggagggggttggtatggagagagagtgctggtgctttatccaatcagtggcgctagcgcaggaaccgcccagttggagaggagggcgtggcttccggcatttggtggggcctttgtatctcactcccgccacagcttgggatcggtctctgctgttttacgtcctccacctcgggagcccccggtgactgtcacagcctcttgccctgtgatctgcaggttctgggagacgcacagctaagatgccaggacatcctggaagctgggaaaaggtgagtgtgcggggctgggcatcccgagaggggagagcgagctgt

SEQ ID NO: 21270 - DNA, 2300 bp, Homo sapien
gtctggggtttgatggtccctgcaatgaatgacggtagctttctgcaggagtctggcagcttgaaggagcttgctgatagagtcatttatgacaggagtgtttttttgcagttaggaaactccattctttccagatggacgagtgtgaatgcactatgtggaacgcataatgagaatttaaatatatgttgatctgttgactggctgctagagtgagagctcgaatgagggtgatgagttcagctttttgggaggtggtgcctaggaagagcatattggcttgaacagtgtgtagggggggtgacactatagcatagccagcatgccggcatccttgatgtaggaaggagctgccatctacaaaccaagtaaagaggcatctggaaggggttggtctgttaggtttggaaaaggtataagaaaggtttgaacagtgttgatacagaagtatgtaggatctttggcgtggccaagtttagatgggagctggttaccatggtgatgtgcggagcttctatgaatagagcatacagttggaggagccgtgggggagagaggaaactgcggtgagctagcatgtctttctttgacgttatggattgaataaactgttaagttggcatggagagatagtttaggctttcaagggcaaggacagcagctgccgtcaatgttcagaggcagacaggccatctgagaactgtggcttcaagcagtttagagaggtaggcaaaaacctggagggtgggtcccttatactaggttagaacacctactgcaactccacaccattcatcggtatagagggagaaaggtttagtggttccttctgggatagctgggtctacgttggtatactttctcatggcgtcagttaaacaagagagaaaaagggctgggtttttgttatgaccttgggtgatttctgaaagtttttcatagtttaccgctttatgggcaccctttttgagtcctgcaaggagacacacaatcatgttgtctcgatggtggcatccagggaccacatcttgataatctcagtggggtcctggttgggaactgcctgtgcaccagtaggctgggcaggagcctggtgatgaattgtattggcatgcacctgagctggggtctagatacggtcctcgtcttctggggagagggtggcagagaggataatgtagaggtcatgccaagttagttcataacactgggtgaggtactgaaactctaatataagaggtagggtcttctggaaatgaactgagtctttttgttaatttgagagatatcagtgagggagaagggaatgtgaactctaacaacatgttcagtttctgccacttcctgaagggggcactgtagcacagccgctgaagtaagagtggggcatgggctaaaggtggcgcctgagcaagtgtggatgggagagaaggaggaacctggaagtggttcctgctgagggtttgaacaggggaggggggttgagttaacaggcagtggaggatagataggagtgtaaagtggcgggatgggtttacaagcctcaggagagggcggtgggggaggtcagtgggtacaggcaatactagaattgtcctgaggaggggacgatataggaaaagaagtggatactgctgactgggaagatggtggctgggaatattgctgctgagaagatggtgactgagaagattgtggctgagaagataaagaaaaggcttgggggtgaaagaagatggttgagagggagaggtaggggctgggagggtggacagcagtctgctggatccaaagaggaaaaagaggtagggtcgggaagaggaaggcaatctgggtggtgagaacagaggaggaggatttgaacacatgagcaagaattgcagaggttgggttgtgatctgagtgcaaaaaaggcctggatataagtaatttctcctcatttttccagtcatcagcaataattgattaagtcagttaaaattgtaaagtccaatgttccgtttgtgggccatttggacccattatccaattcgtattgtggccagattgaattgtaaaacaagacaaggcacggatatcttgactgaggcctgaggtttgtaggtttttttatgaggcagcctagaaggatgtcctttggaatggaaaacttgagatttcccataaccgaggttaggctagagagaacagggaaaaggggaccatcctgggaagctggagggagatgataaaaggagcgattgtcaccactgccttttttgttcctagaacgggatcaaatggcttagaggcatccccct

SEQ ID NO: 21271 - DNA, 2300 bp, Homo sapien
agaatgtggcaaagcttttagccattcttcagcccttgctaaacataagagaattcatactggagagaaaccctacaaatgtaaagaatgtggcaaagcttttagcaattcctcaacccttgctaatcataagataactcatactgaagagaaaccctacaaatgtaaagaatgtgacaaaacttttaagcgactctcaacccttactaaacataaaataatacatgctggagagaaactctacaaatgtgaagaatgtggcaaagcttttaatcgatcttcaaatcttactatacataagtttattcatactggagagaaaccttacaagtgtgaagaatgtggcaaagcatttaactggtcctcaagccttactaaacataaaagaattcatactagagagaaacccttcaaatgtaaagaatgtggcaaagcatttatatggtcttcaaccctaactagacataagaggatacacactggagagaagccctacaaatgtgaagaatgtggcaaagcttttagccgttcctcaacccttactaagcataagacaattcatactggagagaaaccctacaaatgtaaagaatgtggcaaagcttttaagcactcctcagcccttgctaaacataaaataatacatgctggagagaaactctacaaatgtgaggaatgtggcaaagcttttaatcaatcttcaaatcttacgacacataagataattcatactaaagagaaaccttccaagagtgaagaatgtgacaaagcatttatctggtcctcaacccttactgaacataagagaattcataccagagagaaaacctacaaatgtgaagaatgtggcaaagcatttagccagccttcacaccttactacacataagaggatgcacactggagagaaaccctacaaatgtgaagaatgtggcaaagcttttagccaatcctcaacccttactacacataagataattcatactggagagaaaccctacaaatgtgaagaatgtggcaaagcttttaggaaatcttcaactcttactgaacataagataattcatactggagagaaaccctacaaatgtgaagaatgtggcaaagcatttagccaatcctcaaccctaactagacatacgaggatgcacactggagagaaaccatacaaatgtgaagaatgtggcaaagcttttaatcgatcctcaaagcttactacacataagataattcatactggagagaaaccttacaagtgtgaagaatgtggcaaagcatttatatcatcctcaaccctaaatggacataagagaattcatactagagagaaaccctacaaatgtgaagaatgtggcaaagcatttagccaatcttcaaccctaactagacataagaggttgcacaccggagagaaaccctacaaatgtggagaatgtggcaaagcctttaaagagtcctcagctcttactaaacataagataattcacactggagagaaaccctacaaatgtgaaaaatgtggcaaagcctttaaccagtcttcaatccttactaaccataagaaaattcatactatcacacctgtaatcccactactttgggaggccgaggcgggcggatcacgaggtcaggagatggagaccatcctggctaacacagtgaaaccccttctctactaaaaaatacaaaaaattagccgggcgtggtggcgggcgcctgtagtcccagctatgcgagaggctgaggcaggagaatggcgtgaacccgggaggcggagcttgcagtgagccgagatcacgccactgcactcaagcctgggcgacagagcgagactccgtctcaaaaaaaaaaaaaagaaaattcatactagagagaaaccctacaaatataaagaatgtggcaaatcttttaaccggtcttcaacctttactaaacataaggtaattcatactggagtaaaactctacaaatgtgaagaatgtggcaaatcctttttctggtcctcagccctaaccagacataagaaaattcatactggacagcaaccctacaaacaggaaaaatttggcaaagcctttaaccagttttcacaccttactacagataagataactcatattggagagaaatcttacaagtgtgaataatgtggtaaagtctataaaaagtcctgaattcttaacagacataatattattcatactggagagaaactctacaaacctgaaagatgtgccaacgcttttgacaagtcaaacttttctaaacatcaagaaaatcatgctgctgagaaatcctaga

SEQ ID NO: 21272 - DNA, 2300 bp, Homo sapien
ttgggtgggaactactgttatggaacaggtgaccaaggtgactcaggtcagagcaggtgaccaggggtgactcaggatggagcaggtgaccaggggtacagatgtaaactactgattagaactggcgggaaggttgtttactaaaactggagacaaaaacaacaaagaagttaaactttaaaatggagaatgaagaacagggagctgaatatactgacatactgattctttgaagagcaatttagaactcactgtatttaacattaaaatatataaatgttttttatctacaaatattaatataaaacagttcaaaattacttcctagggatttcactaaaaattagtttgttaagggttaatgtaattaataaaagaccactagatgtaaaaaaactaattcttcaaagagaatgtttaaggccaggtgttgtggctcacgccttgtaatcccaacactttaggaggccgagataggcagatcattttgagcttaggagatcgagaccagcctgagcaacatggcaaattccagtcactacttcaaataaggaaataaaccgggcatgatcgcgcacgcctgtaatcccagctactccagaagctgaggctggagaatcgcttgaatctgggaggtggaggttgcagtgagctgaaatcatgccactgcacttcagcctgggtgacagaacaagcttctctcttggaaattaaaagaaaatagagagagtataaacaaaagcaaaatatgcttttgatgaagaaagttagaaacatttgtctgctttgaaattacttaaaggttccttcaaattgaaaaagtaaaaataatgtagattaaaatgaaatataaaaagttaaacaatggaccggcatcatggcttacccatgtaatcccactactttgggaggctaaggcaggtggatcacctgaggccaggagttcgagaccagcctggccaacatggtgaaaccgcatctctactaaaaatacaaaaaattagtcaggtgtggtggtgcacctgtcatcccagctactccagaggctgagggaggagaatcccttggacctgaaaggcagaggttgcagtgagccgagatcgtgccgctggacttcagcctgggccacagagcaagactcagtctcaaaaaaaaaaaattaaaaaattataagagatcataaaatatgtataaaaatctagagaggtcaaaaaaattttaatgtatttttatttttattttttgctggggtgcagtggcatgatctcaactcactacaacctccgcctcccgggttcaggcgattctcctgcctcagcctccggagtagctgggattacagacgtgtgccaccatgctcagctaatttttatattttatttttcatttttttgaaatggaatttcactcttattgttcagtctggaatgtattggcgcgatctaggcttactgcaaccttggcctcccgggttctagcaattctcctgcctcagcctcccgagtagttgggattacaggcacgcaccaccatgctcaataattttgtatttttagtagagatggggtttcaccatgttagccagactggtctcggactcctgacctcaggagatccacctgcctcggcctcccaaagtgttgggattacaggtgtgagccacggcgcccggctgagagacttacaatgttttatcaaattagctttattattgataatacacaataaagtaaaagttgattttctctggaacaaaaattttatgtattattaatatacatcaaatatttttgttcacattttgaatacattgaaagagagcaaagaagagagaggattttcccatgctctgaggtgggcctggctgagctgaggaagccctgcctgaaaaggctgcagcctacgctgtcactctttcttcattcagcccagtgtctgatcacatcttctgtcactcagggcctgagaaggcggggccttaaacgttatctaatcagggacgctgggctgggaactgtccaatcaggcacaaagctggagcggacagggcggcttccgggatgtggctgggcctttgtctctcgctgccgccggagtttccaggtctcgacttcactgctctgtgtcctctgctccaggaggcccagcctgtgtggccctgtgacctgcaggtattggagagccacagctaagatgccaggaacccctggaagcctagaaatggtgagactgccaggtgcgacgtcccgagagagggaacggggctcgttgaaaccggtgggatgcggctgtggcgagcc

SEQ ID NO: 21273 - DNA, 2300 bp, Homo sapien
gtgttcccagggctggtgtcaaaattctgtgctcaagcaattctcccatttcagcttcccaaagtgttgagattacaggtttgagccaccatgctctgtcctcttttattttcttcttgtttttccttttcattcttccttttcctctcttcctccctccctccctccctcccttcttccccatcatcttttttttttttttttttttttttccgagatggagtctcactctgtcacccagggagtgatgggaagctcacagacttagacgccagagggacgttttcaggggcgagcgccacacatggcctgcagggtggacacgttggcttctcggtctggccaccgggtgaccagatgtgggtggcgagctgtggccagtagttgtggctgctggcctctcgtttgggtggaccagggattcaaagcttaggaaggaaggtcggcagacttagaggctggctgcggaggtgggccgccttgggggaaataaggttccaacagggacagcttcaggccgcgagtgccacatgtggcctgtacggtagacacagtgggcttctgcttctgcctccaccaccagctggcttctctttctggctgccaggtgtacaggatgtgggccacgagcgtaggacttggttgccagctggaaatgtttacggtggaccagatggctctcaccgggacagtacagcttcggtccagcagaggagttcaatgatggctcactgcactctttaccttcctaggctcatccagttgatcctcttattttggcctcccaaatagctggggctctcaggatctttctgtttctttttcttttccttttttttttttagcaccactttgagtttgttttcacagtacattgagttctgttgtttttttctttttttctctttgtctctcttgctccttcccgtacactgaagttgctgttgttttagatttctttcacccaggctaaagtgcaggtgcatgatcacagctcactgcagcctcgacctccctgggctcaggtgatcctcccgtctcagacaccccacttcccagtagctgggactaaaggcatgcgccaccacactggcgctttattttgtatattttactttttatttttgtagagatagggtcccatcatgttttccaggctgatctcaaactcctgcagccagacgatgtgctggcctagacctctcaaattactgagcttacaggcgtgagccaccatgactggttctatctatatctatctatctgtctatctgtgtgtctctctgtctaccaatcaatcatctatgtttttttttttttttcagtagagatgtgttcttgctatgtttttcaggcgctggtcatatatatatatatatttttttaactgtaattattattttttaatataggtgttgtctcaccatgtggcccccaggatagtctcaaaatcctaggctccagatattctcccgccttggcctcccaaactgctgggattacaggcatgagccactgtgcctggtttggtcatttttttttttttttttttttttttttgagatggagtttcactctcattgcccaggctagagcgcaatggcgcaatctcggctcaccacaatctccgcttcctggattcaagcaaatctcctgcctcagcctcccgagtagctgggattataggcatgtgccagcacactggctaattttgtatttttagcagagacggggtttttccatgttggtcaggctggtctaaactcccgacctccggtgatccgcccgcctcggcctcccaaagtgctgggattacaggcgggagccactgtgcccggcctggtcatatttttgatgtgttgattcttcccagtccagatgtataatctcatccctgaacatttttgatagtgtaattatgacatatgactttacccgacaccagagtgagttgatgctcctgcccagcttacagaagggattgtgacatatcactggacccagcaccaaagtgatgtaactgttctactgctttggcacttcccacagtgggcattgtgacatatcactgggtcttgtacccagatggtgtgaatcttctctccagcctggctctttcacagggggcattgtgtcatattgctgggccccacacataggttatgtgagtctcctgcctgtgccctacccatgtaggccattgtgacatattgctgggtccaacacccaggtgatgtaactctactgcctcggtcctgcctacagcggacattgtgatataaccctgcacccatcacaca

SEQ ID NO: 21274 - DNA, 2300 bp, Homo sapien
gcctttcaagtagctgggactacaggcatgcaacaccacatgaggccaatttttaacgtttttgttgagactgaatctcactacattgcccagactggtcttgaactcctaggtttaagcaatcattccaccatggtcttccaaagtgtttggattacaggtgttagccatcaaactctgccaaaaatattttttaaggaactgttacaaccaagttattagctatggttgtgccactgtactccagcctaggtaccagagtgagaccttgtctccaaaaacaaaacaaaacaaaaaaacttacgaccaaattaaaattctaaggttgtgtcatatgtgtcccctccctgccctgtaagctatcactgttaaatataatggtattggccgggcacggtggcaaatggctgtaatcccaacactttgggaggccgaggtgggcggatcacctgaggtcaggagttcaagaccagcctgaccaacacggagaaaccctatctctactaaaaatacaaaattagccgggcgtggtggcgcattcttataatcccagctactcgggaggctgggaggattgaggcaggacaatcgcttgaacccaggaggtgggggttgaggtgagctgagatcatgccattgcactccagcctgggtaacaaaagtgaaacactgtctcaaaaaaaaaaaaaaaaatatatatatatatatatatatatatatatatatatatatatatacacatacatatacatataaaatgggtattgagaaaactgttatatattattaagaaattcctggctgggcgcggtggctcatgcctgtattcccagtactttgggaggccgaggcaggtggatcacctgaggtcaggagtttaagaccagcctggccaatatgatgaaaccctgacagacccagggcatggtggtgggagcctgtaatcccagctactcgggaggttgaggcaggagaatcgcttgaacccaggagaagaaggttgcagtgagccaagatcacacgattgcactcccttctgggcaacaaaagcaaacctccatctcaaaaaagaaaaaattcctatatattctctaaatgagaataagttattctgatgtgacccaatatttcctcactcttacctccatggtctaacccagcaaatcaaatcaggacacccacaaaggacagttggccattttcaaatagaaataaaatagaaaataaaataccccattagtgacagtaatccagtgattttaaaaaagagaagtcagattgagatgcagtgcagtcagggcacaattaccctggaatacacacttcacacagaatgattgagaagtctttctaaaataaacaaatttgggtaacataatttttgcttaaccattctcagccaccgctttcccccacccctgccccattcctaatggccatcccacgatgtggtcaacagcgtggtatagcatgatgagagaggtactcagggatgggatgagggtctttcctgcattatcaaaatcattaaaaagttgttaaaatatgttcaaatgggccaggcatggtggctcacgcctgtaatcccagcactttgggaggctggggtgggaggatcacctgaggtcaggagttcgagaccagcctgcccaacttggcgaaaccccgtctgtactaaaaatacaaaaagtagctgggtgtggtggcatgcgcctgtaatcccagctactcgggaggctgacgcaggagaatcacttgaacctgggaggcagaggttgcagtgaaacaagatcacaccattgcactcaagcctgggcaataagagcaaaactcagtctcaaacaaacaaaaataatccaaatgttcttttcttacccttaagtagcaaataagatgcattatacaagcagacccaggtaagggaaagagcaagttcatttcaagtctcagcttacttcttaattggctgtaattccctatggttgacactccctgctttagcctgttttcctgggggtggagggagtggtactgggcgagtgctggtgctttatcgaatcagtggcacagttggagaggagggcgtggcatccggcatttggcggggcttttgtctctcgctgcagccagagcttgggatcgctttctgctattcaacgtcctccacctctgcccccctctcgccccagccggtgacaggctgttgccctgtgatctgcaggtcctgggacgtgcacagacagctaagatgccaggacattccagaaggtgggaaagggtgagtgtgaggggttgagcat

SEQ ID NO: 21275 - DNA, 2300 bp, Homo sapien
gccctccttggcttcccaatgtgctgggattataggcatcagccactgcgcctggcctctgacacatttttgtgttaaataaaccagtactaaaattttttagatatgccatttgaataaactttgtgattcaagtcagattacctatgattacccctcagttatcagtgttatacacctaaattgaagaaacaaacctgatatttaagcagacataaattcagtaataaatgtgaactcatggagaacctagacagccaacagccacttgctcattcctgagtttggaagggcccttctgaattgtgagatgatgtacccaaggttaaaggtcctgaagtgttcccgaaggacatgttgactctcatacttgggccaggaatatgtcacaatattttctgagggcagggaccagacaggagtgtcacatcacctaaataggaatatgttacaaccttctcctgacagcaggacacaggcagcagagtcacatcacctgggtgctgagcccagcaataggtaacaatgctttctgtggctcaaggcccaggcaggagagacacatcacctgctacctaggcttaatgataagtcacaatttttcctgtgggcagagtgcagggaaaaatggacagttgcatctcttaggtgattgatgcagagatatgtcacaaggccctctgtaaaaaaggctcaggcaagggcctcccattttatatatgttgggcctagtaatatgttctattgtgcaaaatattctgggcctgggtaaaagaagagagccacataacctgaatgcagaacttagcaatatgtcatgatgcaccctgtgggtagcgccaatgcaagaaaaaagactcacattacctttattcttgacttaaagtcttatgtcttgtaagagaatattgaataatgcaaaaatacatgtagacatgtctgcgtgtgattggtgcttatactcacacagttcaccacaccacaggagaaaacagataaccacaggctgaccgttagggccaaggccaaatagcaaaataagtttgcctttaatctattttctccatatctaaacattggaggttaagactgtggacagatctgaagatacagagttttcttgttttgtggcttcatcattctttgttcactgtctgatgtttggaattaaggtgagcaacaggtgggcagcagtagttaataaaataaccagaggtaaccacaggtcgacctgtggttattttattctatctgtcctctgttctttctatggtcactaactgttttttccttggaattgaagagagatgttggtagagagaggctgtcccctcacctctggcaaaaaagggatgttcaggctcttcttcacccccctgacatcagagctgcattttaatgtggcagctattggccacgtgtggctactgggtgcctggaatgtggctggtctgaattgcaatgtgttaggtaaaatagagttattttcaaagatttagttccatatatgtgtgtgtgtgtgtgtgtgtgtgtgtgtgtgtgtatacacatatatacatatatatgtgtatttcatcaataatttcatattgctctcatactaaaatgatagtactttggatatattgggttagattgttacaatcaattccacttgtttttttctttttaaagtttgactactagaaaatttaaaattcacatgtggctcacattttatttgaggattgcctctttttaaaattctcaggctgcctactcaaaggaccagaagccaggaaggtcataaagtctgaaattctaaaataattattattatattatttttctttgtgagtagccatatatcatttataaatgtatatgaccttatacacaaggttaaatacaaataccctatgggatgggcctggctcagctaaaagaggaagccccggctgaaaaggctgcagcgcaggctatcagtcttcactcagcccagtgtctgatcacatcttctgtcactcagggcctgaagggtcaggaccttaaacgttgtccaatcaggcacgctgggctgggaaccgtccaatcaggcacgcagctggagcagacaagatggcttccgggatttggcggcgcctttgtctctcgctgcagccggagctccaggtctcgctttcattgctctgtgtcctctgctcctagaggtccagcctctgtgggcctgtgacctgcagaaattgagagatccacagctaagactccaggaccccctggaagcctagaaatggtgagagttacgggtgcgacatcccgag

SEQ ID NO: 21276 - DNA, 2300 bp, Homo sapien
gctactctggaggctgaggtcggagaattgcgtgaacccacgagacagaggttgcagtgacccgagatcacgccatggcactccagcttgggtgacagagcgagactccaactcaaaaaaaaaataaatttttgtataatttttattatcatttatttctaagtatagtcttttataatatattttttttctattttactttaagtttcgggatacaagtgcagaacgtgtaggtttgtgacatatgtgtacatgtgtcatggtggtttgctgcacctatcaacccatcacctaggttttaaacctggcatgcattagctatttatcctaatgctctttctctccttgtccctccaccccccgactggccctggtgtgtatggtttgtctccttgtgtttatgtgtgctcattgttcaactcttactaatgagtgacaacatgcagtgtttggttttctcttcctgtgttagttttctgaggataatagctttcagctgcatccatggtccctgcaaaatacatgatctcattcttttttatggctgcatagtattccatggttgtgtatgtaccacattttctttatccattctatcattgatgggtatttaggttggttccatatctttgctattgtaaatagtgattcaataacatatgtgtctttttttggggggggacagagtgtcgctctgtcgcccaggctggagtgcagtggcatcatctcagctcactgcaagctccgcctcctgggttcacgccattctcctgcctcagcctcccgagtagttgggactacaggtgcccaccactatgcccggctaattttttgtatttttagtagagacggggtttcaccaggttagccaggatggtctcgatctcctgacctcatgatccacccgcctcagcctcccaaagtgctgggattacaggttgagccactgcgcccagccacatatgtgtctttatagtagaattatttatattcttgtgagtatatactcagaaatggtatcactgggtcaaatggtatttctgttcctagatccttgaggaatcaccacactgtcttccacaatggttgaactaatttacattcccaccaacagtgtaaaagcattcatatttctcctcagcctcaccagcatgtattgtttcttgaatttttgataatcgccattctgactggcgatttatttaggtctggtgttatagatctaatgccgctttcttttctcatggttggagaacaaattagagaatgttcctgtgtaaaaaaaaattattttattggataatttcagtcatttctgtaagtcagaaccagttctcttcactttcttattttaccttgaatcaaattataaattctttccatggccactttctaaatgtgtatgtgtgtgtgtgtgtgtgtgtgtgtgtgtgtgtgtgtgtgtttttcaggaaccattgaaatttagggatgtggccatagaattctctctggaggagtggcaatgcctggacactatacagcagaatttatataggaatgtgatgttagagaactacagaaacctggtcttcttgggtgaggataacttcaatatacaattcctattataccctaaaggtttcatttttcttttttgtataatgtttttaggtaatttatgctttgcataagtgagtttcagatccctgtttttataaaaatcttagggattcatctctgtagaaaagaatttcttcaagatatttcatcttgacctgaactttctgcattcctgagctaatctgtattcttcactctagattagagtggtaattccagaagtttagtggcataaaatattattgctcacactttaaaatctaattgccaacaccagtttttgatttgttgtactggacagtgaaattaagaactaacaaatttaaaatattttctaaatatttagaaatttcttttataaatcagtattttgggattgatttacaagaatattctatttcaccctctttactgactacattgccatgttggtgattagacaatataagcaagatttatgttatttactttcaataaaacaggtattgttgtctctaagccagacctgatcacctgtctggaacaagaaaaagagccttggactagaaagagacataggatggtggccgaacccccaggtaggtgagagtgaaagtgaatacaacagataacatagatgagcggttcaaaggtcaaagaaaaagctagtgcttataatgtgatttgggaagctgtattccaaaggaaatagtttctgg

SEQ ID NO: 21277 - DNA, 2300 bp, Homo sapien
atatataatcaaaataatatgtatgtttgccaggcatggtagcttacacctgtaatccctgcattttgggaggccgaggtgggcagatcacctgaggtcaggagttcgagaccagcctgcccaaaatggtaaaaccccaactctgctaaacatacaaaaattagcccagtgtggtggcacgcatctgtaatcccaattattcaggaggctgaggcaggaggattgcttgaacctgggaggcagaggttgcagtgagccgagactgcaccattgcactccagcctgggcaacacagcaagactctgtcttaaaaaaaaaaaaatatatatatatatatatatatgttgaaagaaatttaagcacagaagaaaagtgaaagactatggtggggaatgtgataaaaggtgagtgtggctgctacagctcggtgagatttggtttccatcttaaggaactgccctcccacactgaaaccacaacccagcacatgccaattctcacactatttatactttgcacaaagacagcagaaggaggtcaacatcatcgttcatgacatggaagtctattccccactgagacattttaaaaatgttattgtcttaagccctcttccttctaataaagcctatacaaatacacccatacaagcctgaaactactcaaaattaaaaatcaggcttttgaaatcccataaataagaaaacacaaaaacagccactttgaggagagagtggaatggagggggttagggggctcgcttcacctcctggccccatgtggagatagggatggagtcaagggagaccctgggaagtcatttgttctgactgggttttcccccagctccacactttgttaaccatttcctgggaagagcttaggaacctcctgtgctctagtgagttagggcctcccctcacagggtattggcaaggagaaattctgagactctgtgactgagaagctagcacagtgcttgacaagtacctatgggaactgtcgtcctctgtaactatcatgtagccttggagtgttgagatggcctggcctggcctgaggcttggcaaagctgtttgagggtcagctgctttaggctcccactttctcctcaatcaaagtggctgcttttgtgtctgtttatttatggttttaaaaacctgatatataggccgggcgcggtggctcacacctgtaaccccagcactttgggaggctgaggcgggccaatcacgaggtcaggagttcaagaccagcctggccaacatagtgaaaccccgtctctactaaaaatgcaaaaattagccgggcatggtggcacgcacctgtagtcccagctcctcgggaggctgaggcaagagaatcacttgaacccaggaggcagaggttgttgtgatctgagattgtgccactgcactccatcctgggcaacagagcgagactccgtctcaaaaaaaaaaaaaaaaaaacctgatatataaatagaaagtgcagctggaggtgccgaggctcagtgtctagggctgtgcttcatgggcttccttgctggcatgtggccaggtgaactctgggtgtaaggtggctcctaccctggatctacaatccccaccacctctcccaggcctgagtaaccaacacaacgcagtgctaaagagcgcgtgagtgacgggcatcaagcccatccaggaagatttgaatgccatctgggctgggggctgtcggggtagggactatggctgccagaaaccaggacggtcataaaagatgaaatattaaaataattgttattatatatatttttatttttgaatagctatctagtatattatttgaaatgcatgtgaccttacacagaaggttaaaggcaaataccctgttgggtgggcctggcttagctcagggagggagccctgtctgaaaacgctgcaacttacgttgttagtcttcattcagcagagcatctgatcacatcttctgtcactcaggacctgaggggtggggttttaatcattatccagtcagggacgctgggctgggaactgtccaatcaggcatgcagctggagcagacagggcggcttccgggattggcggggcctttgtctctcccttcagcccgagctccgggtctcgtcttcactgctctgtgtcctcttcttctagaggcccagcctctatggccctctgacctgcaggtattggcgatccatagctaagacgccaggtcccccggaaacctagaaatggtgagaatgtcgggtccgacatcccgagagaggggaaggggctgtggcgggactc

SEQ ID NO: 21278 - DNA, 2300 bp, Homo sapien
ctcggcctcccaaaatgcagggattacaggtgtaagctaccatgcctggcaaacatacatattattttgattatatatatagggtgtataaatatatgtgtgtatatatatatacacatatatatagggtatatatgtgtatatatatatatgtttgtgtgtgtgtatatatatatgtgtgtgtgtgtgtacacatagaggtctcactctgtcatccaggctgaagtgtagtggctgaatgatgggtcactgcagcctcaacctccagtgatccttctacctcagcctcttgagtaggtgagactataggcaggcaactccacacaaggccaattttctaaatttttgtagagactgagtctcactacattgcccagactggtcttgaacccctgggcttaagcaatcattccaccatggctttccaaagtgtttggattacaggtgttagccatcaaacccagccaacaatattttttaaagaactgttacaaccaaattatgagctatggttgtgccactgcattccagccagagcaccagagtgagaccttgtctccaaaaacaaaacaaaacagaaacacttatgaccaaattaaaattctaaggttgtgtcctctgtgtccccttcttgccctgtaaactatcactgttaaatataatgcgtattgagaaaactgttagatattattaagaaattcctatatatcttctaagtgagataaggtattctaatgtgacccaatatttcctcacccctacctccagggtctaaactagcaaatcaaatcaggacatccacaaaggacagttggccatgttcaattagaaaattaaatatccccgttagtgagagtaatccagtgattttaaaaaagagaagtcaaactgaaatgcagcgtagtcacggcacaattaccctggaatagccacttcacatggaatgactgaggagcctttctaagatgaacaaatttgggtaacgtaattctttctttctttctttctttttttttttttttgagatggagtcttgctctatcgcccaggctggagtgcagtggcataatttgggctcactgcaacctctgcctcccgggtgcaagcagttctcctgcctcagcctcctgagtagctgggattataggcgtgcgccaccacgcccggttaatttttgtatttttagtagagacggggtttcaccatgttggtcaggctggtctcgaactcctgacctcgtgatcagcccacctcagcctcccaaagtgccgggattacaggcgtgagccaccgtgcccggcccggtaacataattctttctaaaccattctcagcctgggctgcctcccacccccgccttatttctaatggccatcccacgatgtggtcagcagtgtggtacggcatggtgagagaggcgctcagggatgggatgaaggtctttcccgcattatgaaaatgattaaaaaatgtccaaatgggcagggcgcggtggctcatgcccgtaatcccagcactttgggaggctgaggcgggcggaacacctgggatctggagttcgagagcagcctggccaacatggtgaaacctcatctctactaaaaatacaaaaagtaccagggcgtggtggcatgcgcctgtaatcccagctactcgggaggctgaggcaagaaaatcatttgaacctgggaggaggaggttgcagtgagccaagatcgcaccactgcacttgagccagggcaatgaggcggaaactcggtctcaaaaaaaaaaaaaaaagtccaaatgttctttcttacccttaagtagcaaataagatgcattatacaagacccaggtaaggaaaagagcaagtgcatttcatgtctcagcttacttcttaattagctgtaattccctgtgcatgttaccttacctttactgtccgtaaaatgccctactgccgagcggggcgggtggtggtatggagagaatgctgttgctttatccaatcagtggcgctggcgcgggaaccgcccaatcaggggcgcagccggagaggagggcgtggcttccgacattccgcggggtctttacctcttgctcccgccagagtttgggatcggtctcttctgttccgcgtcctccacctcggtagcccctggtgactctgtcacagcctctgttgacctatgatctgcagggagacgcacagccaggacatcctggaacctgggaaagggtgagtgtgcggggttgggcaacccgagaagggagaccaggctgtgaaaccagcagaaccggcctctccacagcccgct

SEQ ID NO: 21279 - DNA, 2300 bp, Homo sapien
acatcttttcattcattatcttggtgatgtgacttttctattctgcttgagcactgccaaaaaaaaaaaaaaaaagattgtgacagatttctggaccaagcacctaggtgatatgactttactcacttgcctgaaacctgcatattttggttattgtgacatatcactgaagcaaacacctaggggttggaaagtttctgcctgagcccttcccacagagagccttgggatgtatttttttaatccatcacctgggagatgaaaccctatacttctgcctgcattctgcccatagagaagattgtgacatattgctgggtcaagcaaccagctgttctgtctgtccttctggactttgcccacagtgagtcttgtgacatatatctgagcccagcatgcaggtgatcttactctttttcctgtgtcctgctttcaggagaggattgtaacatctctggttgagaaccctgtgatgtgactcttctgcctggtgcatgctctcggggaagattgtgacataaccctggcccagcacacagttgatgtgactcttgtgtttgttctctacccacaggtggaattgtgacatataacttgacaaagcacacagatgtaatgatgactctcatacctcaaagaagccagtaggagagataatgttgctcacagctacgcttaggaaaacaaagaatatcctggctcttctttctgtacaaatgtcatagagaattaccactctctcacatctgtaaagccctagtgtgttatagagaatgtcataacagggtccaccatgcagatgagattgcatttgtcctatgcacagcccaccaacctttagaattgtcaccctcacacatgggcagagcccactgggtgaggtcctgaatctcacatgaatgcactccacagttggaactttgactgtcatatgtgaacatctggccgcagttgagatggtgactcatttctaaacctagctcataggaaggtgaggactctattatctggactcagccaattagagagatgttgactctgggcttagaaccacagaaaaggttctggatttccttcttgtatgaaggtcacagaggatcaccactgttgcctattgtatgaagccctcaggtgacacagataatgtcgtaggagtacacagcacacaggtggatactgtctcttgcatgcacactcagacaacagtaaagactgtcattctcccacacaaacatatcccactgttgaggttctgaatctcaaatatggagtctgttgatagttgcagaattgagtctcatatatgggcctggtcaacaggtggactggtgactctgagaccaaatttcagcacacatatgaggctgtgactgcactgacggtctgcagaagaaattttggctctcttgcaaaaattctgtcagctattgagattgttactcatgtacttagacccaatatacaggaggtattgactcccatatctagaacgtggacacgtatggaatttctaatctcattcctggactttctttcagatgtgattgaatgtgtctgctaagcgttttagtgatttgacttttctgccttagcccagcccacagatgagattgtgacatatctcttgactctgcacctcaaaagaagtgactctttttccagccttggtgttgccctcaggtggcattgtgacatatggctgggctttccacttaggtgatgggaatctttttttcttgccttggtgctgtgcacaagttgcattgtgacatattgctaagatctgcactcaggttatgtgaatttgctttttttccctaagccctgaatattttgcaagttaggacatattactagccccaacacctataaaaagggaggcttctgcttgggccctttctacagggccttgtgacatatctctgcatcagtcacctaggagatgtgactctccatttttgcctacactctgcccacagaaaaattatcactaggcccaggtaccagacaatgtgtctttcttgcatggccttttaccatagaaagcattgttacctattgctgggctcagcacctaggtgatgtcattgctgcctgtcttgctttcaggagaaggttgtaacatattcctggctgagtattaaagtgatgtgacactcctgtctggtccctgccctcaggaaagattgtgatgtattcttggccaaaaacccaggtgatgttactctcctcctttctgcctgttcacaggtaggattgtaaaatatattttggtctagctcacaggtgcaatggtgact

SEQ ID NO: 21280 - DNA, 2300 bp, Homo sapien
acacaccacctccctttcaccatttcacccctgaacatctgcttcttagatctaagtgattgtactcaataaatagtgtggaggccagagatcagcgcctttgcagcctctgaattgcactggccccctggcccccatccttttgcactcttgtctcttctcattacttcgtcaccaccggacttcaggtaccccacaggtggtgttgaggctggtctccaatactcccccatttcccactcgtgtctcttaggaaactgcgaccctaatgtttgctaaggagcaggggaggtccttcccatagccgacgctttccctgggaagcagcgcattttctgggcagaggcgcatcgagcatgtgattcacgagcccagatccaggccagcggttcacactcaattacaaaactctacacaacttctgagctagcagcagcacacgtttggggaacattggagggattgtcttcttcttttgtgggtggtgatgttagtggttgtgaagagagagagaagggtgaataaaaactataatgatttggtaggttgaaaaacctgtctgggaatttcattaacagaaaattgaaccctggttcttgtttaagagtttagatttaagcttacccctttcaaagtcaataaaaacaaaatttgcctgttagatgagaatgctgaaaatagtgagacgcttctgtctggtggaaacaaaatgatttctgcaaaggcaaagttgccagtgcatccccatatatttgagggttttttccttttttagatatgtaatggtccctgcacctatgcacaatgatgctgaagtatatttaatagaagtggaaggtgggggaaagggaattgcaaagagaagaatgtgattttgttttcattttttcacacccgtgaaaagcattctccagatttgatgctttttcaagtaggcaggtagagtttctaagccatattttaatcagagagtctgttagaggccaaaggctaggctaaaaccttttggaaacacacaaaaaatgcttagttctgtgctaccttcaagagtccacagaacttttgcaggaatggatatgaattccttcaaaagggtcttgtgctccatttcaggtgtttgaagttgcactgtttatcatttttagaaattccgctaaactggatgcatgttagcatatcttgtttttaaaggatttgttggatgtgggacaatttttggaaatgctactgatgcttatggatatatggagtatcatttctggggttttctaggtaccactttatttctcattagaaattcagactctaagccctgagcatggcagacatgtgtttgttatgtgatggtaaacatgcatgtcactaagctgttacaggtgacacattcatatgtaacttgttacaccatccaagtgactgcttgatgaaagagttttattttaagtctcttcaggcagactcctgaggtcttatttgcatctgacacaggcacagcatgtagaaggagaaaaaatacaccttaccttattagtcctgcattagatcaatagctgtttattaagtacctggtgtatgccaggcactgcacaacataggtgtcctggtaataaatggctggtaataaatgtagttgtcagaagaacacagtggctcatgcctgtaatcccagcactttaggaggctgaggtgggtgaataacctgagatcctgagtttgagaccagcctgaccaacatggtgaaactccacctctgctaaaaatacaaaattaacaggacgtggtgtcatgtgtctgtaattccagctattttggaaggttgaggctggacaattgcttgaaaccaggaggtgaagtttgcagtgagctgagattgcaccattgcactaaataaataaataaataaataaatgtagttgccctgcgtcaggggtcctcaacaccagagcacagactgataccagtctgtcctgttacaaaccaggctgtacagcaggaggtgaatggtgggttagcaaagcttcatcagtattcatggccactccccatcacttgcattaccgatcagcagcagcattagattatcataggagtgcaactgctattgtgaactgtgcatgtgagggatgtaggctgtacactatttatgagaatctaatgccttaggatctgtcactgcctctcatcacccccagatgggaacatttagttgcaggaaatcaatcccagtgctctcactgattctacaatatggtgagttatataattatttcattatctattacaatgtaatcataagagaa

SEQ ID NO: 21281 - DNA, 2300 bp, Homo sapien
acgtaaaaagagctaatcaaactgaaaagaggactcttgctatgctatgccaagaaatatcaaagacctggctgtctttactatctgtagccttattacagattccagtggcctctaagggaaatctgcagctcagctcttttgaaataatgtatgcaaggccttttttagctacacgccttctttactgtgcctaatagacacggatactttcaagttacagaattatgtgacaagtgcaaaacacactctgaatatggaaatcaaagactcctttccccaactaaggaagctaatcttgttataacccagccaggaaatttggtcctattaaaaacttggaaaaaaggatccccagcaggtcaactttccccaaagtggaagggaccctatcaagttctctttagtaccccaactgcagttaaaattctgggaataaatagctgggtccacttaactcgaattaaacctgtctcttatgaagtcctacaggacggcagaacagaagaaactgatcctgtttattcccatgagccagtgacctttgactcctgttcagaagaaatgaaagggatgggtaacataaagatatagattggctttctacttttgggaattagttgaaatcatgcagagagtaacttatttactgagtgggcacagacttcatcctgtctacataatcgaacaaactgttgtgtatgtagacatttaaacagagactcaaaaggaaacctatgctttgatcaaaaccaaatgttttgtgtgtgctccagactatttacataacataacccagggcataaaagttttatgcactcacatctctgccatttatgtgctatcagtgaaccatatatcagtttggttctaacaactgcccacttcttgaaaggctttcctgtttagtttacgtggaataattttactaattttgctttgctgttgtggaatatattgtggttgtactctttgtgtaggaatgcaagacaagctcactaaatgctttcttaaattggacgcttattaatcttctagacatcaccttcttttggaactagaagttatgaacgaccttcaccataccaacactgtctgactgaatttctctctaccctgaatgcaagagaccaatggttaggcaggaatattatcgcccctaatcagcctgaaaaagttacagaagacgaatctttgtctctctgcaactcttaggattaagggtcctcttgtaaaggaaggcgaaaaatatgtcagaatcatttgaaccagagcgactccgttttgagagagagctaggaaaatgacgctgagactcgctgggctgcattctcagtaagttaggcattcctagcctctagatatttatggttaaggaaatgaattaataatgtttactaagcagaaccagacggaggagtgtccagatattccaacatctggggaataaaggtattcctaattttgctttaaagataatatcgagtcggccaggcatggtggctcacgactgtaatcctagcattttgggaggtcgaggcgggtggatctcctgaggtcagaagttcgaaaccagcctggctaacgtggcgaaaccccatctctactaaaaaaaaccaaaaaacaaaaattagcccggtgtggctgtgtgcacctgtagtcccagctactatggaggctgaggcaggagaatcgcttgatcccggaaggcgaaggttgcagtgagccgagatcgcgccattgcactccagcctggacaacaagagcgaaactttgtctaaaaaaaaaattattcacatatttaatacgttgaaaaaaagacagcaaagaagagagaaaatttttccgtgttctgagatgggcctcgttcagctccgggaggaagccccgcctgaaaaggctgaggcttaggctgtcaatctttcttcattcagcccaacgtctgatgacatcttctgtcactcagggccttagaaagcggggttcttaaacgttatccaatcagagacgctgtcctgggaactgtccaatcaggcacgcagctggagcgaacagggcggcttccgggatttggcggggcctttgtctctatctgcggccggagctccaggtctcgtcctcactactctgtgtcttctgcttttaggggcgcagcctctgtggccctgtgacctgccccctggaagcctagaaatggtgagagtgccgggtgcgacatcccaagagagggaacggggctggctggaaccggtgggaagcggcagtggcgggactcaggcctcctcgctgtcagttttaca

SEQ ID NO: 21282 - DNA, 2300 bp, Homo sapien
cttccacagcacttaacccttaatacatgatattgagtcctaggaaagattagttggatatgatcctatttaggcattcctacaaattactttaatctttttgacaccctgaaaggtgactctgctttaaattcactgcaagacctctcttggctggaacaggctgagcttaatgctgtggagcaagccttgacccaaaggtgtatattgggtctagatcctgacagacctatacatcttttgatctttaatacccctcaaagtcctacaggaatgcttgggcaagttggaacaaatgtttctcctttggggcagctttacctgtcttgtaaccccctccctaaacacatacaaaagaccacagatttaatagcttctcacaacgggatgccgacattgcatccaattgtcatgatatgaccctactactcttttcttacctttaagcaaggaacaatttcatactctcttagcctgtgatcttgattggcaagttgcaatgatcaactttattggtaatattagtttccatttaccagcctctaagctcctgaactttttacaaactgtgcctgttaaatttgcatgtattgttgtctctgagcccttgcttcacaccactactgtctttacagatggttcaaggaaaatgggaaagtcagctatagtgtggcaagatgccatgcaaaattggcagcacaaaatccaggaacatttcaaaactactcaataggctgagttaggtgccctaatattggtgttacaaacttttcctcaccaagacatgaatataattagtgattccacttatgcggtgtatagtattactcatttagatctcacacatctaaaaggcattactaatgaacccctactaaccctgtttctcacaacacaggagctcctttgtccccatcatcaccctttttatatcacacatattcgctctcattctgggctacctggtcccttgtcagcagggaacactccagctgatgctctggtacaaacacagatgaggtttgcagactgtcctgcatatttgtgagctcaagctgatcattccttttttcatcagaatgctcacagtcttttgtttttgtttttgttttgagatggagtttcactcttgttgcccaggctggagtgcaatgatgtgatctcggctcactgcaacctccacctcccaggttcaagcgattcccctgtctcagcctcctgagtagctgcgattacaggctcatgccatcatgcccagctaatttttgtatttttaatagagacagggtttcattatattggtcaggctggtctcaaactcctgacctcaggtgatccacccacttcggcttcccaaagtgttgggattacaggtgtgagccactgtgcccagtctgcctacagtcttaaacaagtttcatttaacacttgatcaagcttgcatgattattaaaacttgtcctgattgccaacagcattctctctcccttttttcattgggacttggtgccaacccataaggtctggtacctaatgctacctggcaaactggtattactcagcatccaccttttggatgctttaaatttctctatgttactgtggacacttatatgggcctcatatatgtgactccatggactggagaagaaactaaagatgcaattgcttatctttttgaatctattatgaccttaggccctccacagactattaaaactgataatggtccttgctatcttagcactagctttttatatgcattgcaactttggcacatacaacacaaaactgatagttcttataactcaacctgtcaggccattgttgaacaagctcatcaaacccttaaagcatatcttaataaatgaaaaggggggaatatgggagctctctcctcgagaatgagcaaaaattttatttactcttcattttttgaatattggataagatggccagatggctattggtcataggatgaagctgtttgaggtcacaaaatgaaaggtgttaattcgagacatttgtacagggaattgggagggactttatgaggcattgcaatggggtcaaggtgcggtttgtatttcatgaactacaggactagagtggatccccataaaatgagtgaagccataatatgagttagagactactgaaaaagcccctcctgatgatgaaggacctgtcattggagaatcgaccaaaactgacagtgataacttggaaggcacctgacattacctggggacagctaaagaaactggaccaacagggaactatctggcttgcatctatgg

SEQ ID NO: 21283 - DNA, 2300 bp, Homo sapien
ctccatctctactaaaaatacaaaaaaattagctgggcatggtggtgcatgccggtaatcccagctactcgggaggttgaggcaggagaattgcttgaacccaggaggcagaggctgtagtgatttgagattgtgccattgtacttcagccttggctacaagagcaaaactccatctcaaaaataaataaataaataaataaataaaactgatacagtttggtgaagagatgctgggaagaatacttctaaaactaagcttaaggacatgttttgaaaatgtaaatcttaaggtactctacaaataactcaagagtttttctctcactgtgacccaaggcatatgcgtgcattcataagtctaattacaagttagctataaatatatcttaccagataattactgtgttgttaatatcaaaaattggaatctaaattatgttcagaaccaatttgtggtgacaattatatataagccaacttttagataagccattaacagctacttattttggagaatgctggatagtggtgaccacagatgctgtctgttgggtgacgtatttttccttaaatatttgtgtatttgcactgttatagtgttgattcctcaagtccctggtgtgttaagctttccatgcttcggagtatgggcatgtcttacatatggctgtcttctggatatgttacaccatctattgtggtaagattaagtgaatgaaaattgaatatattttctgttaagtccccgaggaaattaatgaaataagttaataaagaaatacatgtttaaaatttgagtttacttcagagaaattaaaaattgtatcaggtaagccaggccaggcgatgtgtcttaagggtgtctgtaatatgcccaaagccagtgtcatcttgcaaagagtgagagatcaggatatatgctgtaaagttacttttttttttttttccaaaaaagtgaatgctctgacttaaaatgagagtgtttggtcttcttgtgacaataggtgctgaaaacagggtagtcactaatgtcagcttctcattgattttgcttctcttcttaatcagctctaaatgtagatgtggtgaacatggtggtctgtgtgttctgaagcttgctttgtgcctttgttactctgatctgcactggagagtggatagtgtgtggtcatgtgtttgttttgtgttatgctaagaaaaaaggagaagtatcagtgcattgggaaagtaaagtggttaacgctggtcaaattcttatgtttagagattattatttattatatttaaagtaaatggaattttgtagggctcatttgcccaatttgtctctaggaagtctgatagtagctagggctgtctcttgtgtctcttcagaaaactaaataaacagaaatcagtcctaaacaccagaaactacaacatgcttatattacaagtgaatctgtccagagtacttttaaataagtttaacctacagcgttcaaattgcagacaaactttggtgaaaagcatttcttagccaggtttgcctgtatttgcattaaatcagataaaccagaagtatttgtctctcttctacctgtgctagacctattaatccatacaaatccagtttgacaagtcaacaatcaaaagttttactttaatttcaccctttcttggttgttactgtacatgtggtttacaaagaaaagggaagatggagccaccattttgaacaggcatagtccccaggcaaccccttttcctactggcatagcgtgggggttgtaagacaatacattcaagcttatgtacaaggcatttgaggttgaggcatggaaaaatactgaggcactgtgtgtatgttgtttgtgcatgagactgtaattccttgaccctgaaaacaggacaaggaacagaatgtgtgataaagagtgctgaacacagcctcctaagaatgtggtttgagtgcttttagatgttataaacaaggccatatgtgcctcatgacccgaatccaaatagccacctggtggatgtttcttgtttgtctaaattgtagttcaacaagccttctcaataaatacttggcggatgaatcttaaagcaacactccattggaggagctgctcccttccccgttcagctgtaattgtctgaatatttatttctcggcattcactgcagaacaagctgcaagtggtgactcggacgtgatcaagtggtgactcggacatgatcaagtggtgactccgacgtgattgccttgaagttatgcatggagtaggatgactcaccaatcttcggggaataccg

SEQ ID NO: 21284 - DNA, 2300 bp, Homo sapien
ctcccaaagtgctgagattgcaggcatgagccaccgcttctggccaaaaaaaaacccctgatattttatttatagtactttcaggcttgtatgtatgtatttgtataggctttattggaaggaagagggcttaagacagtaacatttttaaaaggtctcagtggggaatagacttccatggcacaaatgatgatgttgacctccttctgttgcctttgggcaaagtataaatagtgtgagaattggcatgtgctgggttgtggtttcagtgtgggagggcagttccttaagatggaaactgagctgtaggagccacactcaccttttatcacattccccaccatggtctttcacttttcttctgtgcttgaatttctttcaacatacatattattttgagtatatatatatatatatatatatatatatatatatatagacacacacacatatatatgtgtgtctgtgggtgtatgtatatatatgtttgtgtgtgtgtgtacacatacaggtctcactctgtcacccaggctggagtgcagtggccgaatgatgggtcacttcagcctcaatctccagtgatccttccacctcagcctctcaagtagctgggactgtaggcatgcaacatcacacaaggccaatttttaaaattattctagaaactgagcctcactatgctgcccagactggtcttgagctcctgggcttaagcaatcattccaccatggctttccaaagtgtttggattacaggtgtttgccatcaaacccagccaaaaacatttttaaaagaaccattacaaccgaattatgagctatggttgtaccactgcactccagcctgggcaccagagtgagaccttgtctccaaaaacaaagcaaaacaaaaaaaacttatgaccaaattaaatttctgaggttgtgtcatctgtgtcccctttctgccctgtaagctatcattgttaaatataatggctattgagaaaactgttagatattaagaaattcctatatatcctctaagtgagaataaggtattctgatgtggcccaatatttcctaacctctacctccagggtctaaactagcaaatcaaatcaggacaaccgacaaaggactgttggccattttcaaatggaagatgaaataccctgttagtgagagtaatccagtaattttaaaaaagagaagtcagactgagatgcagtgcagtcagggcatgattaccctggaatagccacttcacacggaacgatagaggagcctgtctaagatgaacaaatttgggtaacataattcttgcttaaccattctcagcctctgctgcccccgaccccagccccattccaaatggacatcccacgatatggtcagcagtgtggtacagcatggttagaaaggggctcagggatgggatgaagatctttcctgcattatcaaaatgattgaaaagttgttaaaaaaaaatgtccaaatgggcgggtcgcggtggctcacgcctgtaatctcagcactttgggaggctctggcgggcggtcaggagttcagaccagtgtggcgtcaggagttcgagaccagcctgggcaacatggtgaaaccctgtctctactaaaaatacaaaagtagtcgggcgtggtggcatacgcctgtaatcccagctacttgggaagttgaggcaggagaatcatttgaacccgggaggcggaggttgcagtaagccaagatcgcaccattgcactccagcctgggcaataagagtgaaactcggtctcaaaaaaaaaaaaaatccaaatgatcttttcttacccttaagtagcaaataagatgcattatacaagcagacccaggtaagggaaagagcaagtgcatttcaagtctcagctcacttcttaattagctgtaattccctgtgcattttaccctacctactttagcctgtttttctgttcataaaacgcactaatgctgaacggggcgggggcagggggtgggggtgggagtggtatggggagagtgccggtccttatccaatccttggcgctggagcggcaaccgcccaatcaagcgcgcagttgaagaggagtgcatggtttccggcatttggctgggcctttgtctctcgctcccaccagagcttggaatccgtctctgctcttctgcattctccacctcgggagcccctggggactctgtgacggcctctgttgccctgtgatctgcaggtccggagagacgcacagctaagatgtcaggacatcctggaagctgggaaagggtgagtgtgcggggttgggcatc

SEQ ID NO: 21285 - DNA, 2300 bp, Homo sapien
tgcaacatatctctgcatccatgacctaaatatgtgactcctctattctggctgcacccagcttacaggaagattatgacattttgctaagtaaagtgtatcttgtgctgatctcctatgttattctgtgactaagaatgcctaacctggggttgcagcccagtaggtctcagcctcgtttcacctcaacactattcaagatggagtcgctctggtttgaatgcctctgacatagagatccattgtaaaattatgaaaaaaatttatttgaattgcagtgaataagaaatggaagacctaggatgggctattctgaaagatttagcaatatttgtatttgtcaaaatttaagttttccgttaatacttctgaatagatacattgttttattctgtcaagtttaaatagatacgcttgataatacaaggagttcccactgtgaaagaaaaataaatctcctgatgccaaaattactaatccaatagaaaagtcaagctggagactacatcaggcaaacctgtttcctattttattcttaaataagatagctacacagataaaaagctacatacctacctcacaatttgctcagaaggaaattcctagtgaatagatgacagacagaactcaaagttatctctctgaggctcacctgagacaaatgcagatctgtttgtttcctctgccctattgttaattttaaaatgcagattcactgagccaggctaaattgtgtattcagtgggagacttatcaaggactcaaataaatttattattttttctcttatctacttatgacttggaagccccaacctcaagttttcctgtcttacctgaccacaccaatgtacatcttaaacatgttattgatgtctcttgactttctaaaatgtattagaagactgtaccccaaccaccttgggcacctgtcatcaggacctcctgaggctgtgtcacaggctcctacttaaccttggcagaataaactttccaaatttattgacacttgtctcaggtaccttttgttttacacagccaaggcactgctagctggtcactactgcaccccagacttatccaccaccattgcagggactctggtttcttgatagcaattgtttcacttcaatggaagatggacaggtgtgtacctgagaatgcagcactgagctcctgggtgatgtgggatgttccaagcatcagctttcagccagtctatcttataactgttgaaagttacttagtgtagtgtgaagatgggaataaacagctcctgaatgctaacaatggctgttcattatagggtgacccaaggtggccatgccatggttctgggttcttctgtggcttctcagtggctgatggagtggtttttttggtcttgtgatacagggtgtgtgtgtctaaaggagtggagggcagggtggggaaaggaggtgacaggcaggttcctggaggtcacctcctggcattattcttgtggattgccaagtttcttgtttgaatttgtttcttgttaatagtacatgtgtcctcagcaaggaggtgaaaataaaaaaaaagagcttggaacagtctcagctctgtgaggtctgcacaatttatcaagcccagagagatgagactgtggaacttcacccaggggcattttttgttgttgttgttgtttgttttgagacgaagtctcactctgtcacccaggctggagtgcagtggcatgatcttggcatgctgcaaccctgcctcttgagttcaagtgattctcctgcttcagcctcccacatagttggaattacaggcacatgccaccacacacggctgatttttgtatttttagtagagatcgggtttcaccatgttggccaggctggtctccaactgctgatctcacctgatttgcccacttcggcctcccaaagtgctgggattaggggcaattctttaaagacatttactttctgactagcagtctcacccattatttctttattaggaatttggaaaataaaagaatatatgcagccaatcaatagcttatgcatttaaatatgaattcttggtaaataacttaggaactgccttctcactttttcaaaaagactcactttcaatggctgctaattaaaatatatattcagggcaacttaaatctgtcctcctcttggctatcctcaatatctgacattgagtaaatgtatttcaggttacattttaaccttttttattattttaagttgactgagggctggcctggaacattctccttggtataaatactccaactataagctacctgct

SEQ ID NO: 21286 - DNA, 2300 bp, Homo sapien
ggcacgcgccaccacgcccagctaatttttgtatttaatagtggagatgggggtttcaccatattggccaggctggtcttgaactcctgacctcgtgatccacccacctcggcctcccaaagtgctgggactacaggcgtgagccactgcacccagcccagaattttttttaacatgatatagaaaagctaactatatttagatctgttacttaacagaaaatttgaataaacgtcttttattaaaaaacataaaattttttatctacaaatattgatacaaaacagttcaaaattacttcctaggggtttcactaaaaattagtttgttaagggtatatatatatatatataaaaactaagatttctaggtgtaaaacaatttttttatagagagtgtataaacaaaggccaggcgcagtgggtcacgtctgtaatcccaacacccaacactttgggaggccaaggcaggtggatcatttcgagcttaggagtttgagaccagcctgaacagcaaggcaaattccagtccctacttaaaatacagaaataaaccgggcatgatggcttacacctgtagtcccagctactccagaggctgaggctggagaatcgcttgaacttgggaggcggaggttgcagtgagccaagattgcgccactgcacttcagcctgggcgaaagagcaagcctctcctggaaataaaaaaacagtgtataaacaaaagcaaaatatgcttttgatgaagaaagttagaaacattttgtctactttgaaattatttaaaggttgtttcaaattgaaaatataaaaataatgtagattaaaatacaacataaaaatttaaaaaatggccaggcacgatggctcacgcctgtaatcccagtaatttgggaggctgaggcgggtggattacctgaggccaagagttcgtgaccagcctggcaacatagtgaaaccccgtctctactaaaaatgcaaaaaattagccaggtttggtgatgcacgcctgtaatcccagctactcgggaggctgaggcaggagaatcgcttgaacccaggaggcagaggttgcagttagccaagatggcgccactgtactccagcttgggcgacagagctagacttcgtctagacaaaaaataaaaaataaaaaaaagtataagagatcataaaatatgtataaaaatctagaatggtcaaaaagacaaatttgatggactttatttttgttattttattttattttttgagacaaagtctcgctctgtcgcccaggctagggtgcagtggcaggatcttgactcactgcaacctcagccccccgggttcaaggaattctgctgcctcagccacccgagaagctggggttataggcgtgcgccaccatgcccagctaatttttttttcttttatttttttgagacggaattttactcttgttgtccaggctggagtgtaatgacgcgatccacgctcactgcagcctccacctcccaggttcaagcagttctcctgcctcagcctcccgagaagctggtattacaggcacgtgccactacgcccagctaattttgtatttttagtagagatgaggtttcaccatgatagtcaggctggtctccaacacatgacctaatgtgatccgcccgccttggccatcgaaagtgctgggattacaggcgtgagccaccgcgcccagctgatggatttacttataacggtttatcaaattagctttagtgctgataatacattattactaaagtaaaagttgattttctcttgaacaaaaattatatgtattattaatatacataaaatatgtttgttcacattttgaatacattgaaaaagagagagagcaaaaaagatatagaattttcccatgctctggggtgggcctggctcagctcagggaggaagccctgcccgataaggctgcagcttaggctgtcactctttcttcagcctagggtgtgatcacatcttctatcactcagggtctgagtaggcggggccttaaacgttatccaactagggacgttgggctgggaactgtccaatcaggcacacagctggactggacaaagcggcttccgggatatggcggggcctttgtctctcgctgtcgccggagtcccaggtctgtcttcactgctctgtgtcctctgctcctagaggcccagcctctgtggcgctgttaccagcaggtattggagatccacagctaagatgccaggaccccctagaagcctagaaatggtgagaatgccagtccgacatcccgagagaggggag

SEQ ID NO: 21287 - DNA, 2300 bp, Homo sapien
ctacattaattggtcagacaagattacgaataataaaattatgtggaaatgacccagacaaaatagttgtccctttaaccaaggaacaagttagacaagcctttatcaattctggtgcatggcagattggtcttgctaattttgtgggaattattgataatcattacccaaaaacaaagatcttccagttcttaaaaatgactacttggattctacctaaaattaccagacgtgaacctttagaaaatgctctaacagtatttactgatggttccagcaatggaaaagcagcttacacagggccgaaagaacgagtaatcaaaactcaatatcaatcggctcaaagagcagaattggttgcagtcattacagtgttgcaagattttgaccaacctatcaatattatatcagattctgcatatgtagtacaagctacaagggatgttgagacagctctaattaaatatagcatggatgatcagttaaaccagctattcaatttattacaacaaactgtaagaaaaagaaattttccggccgggcgcggtggctcacgcctgtaatcccagcactttgggaggccgaggcgggcggatcacgaggtcaggagatcgagaccatcccggctaaaacggtgaaaccccgtctctactaaaaatacaaaaaattagccgggcgtagtggcgggcgcctgtagtcccagctactcgggaggctgaggcaggagaatggcgtgaacccgggaggcggagcttgcagtgagccgagatcccgccactgcactccagcctgggcgacagagcgagactccgtctcaaaaaaaaaaaaaaaaaaaaaaaaaagaaaaagaaattttccattttatattactcatattcgagcacacactaatttaccagggcctttgactaaagcaaatgaacaagctgacttactggtatcatctgcactcataaaagcacaagaacttcatgctttgactcatgtaaatgtagcaggattaaaaaacaaatttgatgtcacatggaaacaggcaaaagatattgtacaacattgcacccagtgtcaagtcttacacctgcccactcaagaggcaggagttaatcccagaggtctgtgtcctaatgcattatggcaaatggatgtcacgcatgtatcttcatttggaagattatcatatattcatgtaacagttgatacttattcacatttcatatgggcaacttgccaaacaggagaaagtacttcccatgttaaaaaacatttattgtcttgttttgctgtaatgggagttccagaaaaaatcaaaactgacaatggaccaggatattgtagtaaagctttccaaaaattcttaagtcagtggaaaatttcacatacaacaggaattccttataattcccaaggacaggccatagttgaaagaacaaatagaacactcaaaactcaattagttaaacaaaaagaagggggagacagtaaggagtgtaccactcctcagatgcaacttaatctagcactctatactttaaattttttaaacatttatagaaatcagactactacttctgcagaacaacatcttactggtaaaaagaacagcccacatgaaggaaaactaatttggtggaaagataataaaaataagacatgggaaatagggaaggtgataacgtgggggagaggttttgcttgtgtttcaccaggagaaaatcagcttcctgtttggatacccactagacatttgaagttctacaatgaacccatcggagatgcaaagaaaagcacctccgcggagacggagacaccgcaatcgagcaccgttgactcacaagatgaacaaaatggtgacgtcagaagaacagatgaagttgccatccaccaagaaagcagagccgccgacttgggcacaactaaagaagctgacgcagttagctacaaaatatctagagaacacaaaggtgacacaaaccccagagagtatgctgcttgcagccttgatgattgtatcaatggtggtaagtctccctatgcctgcaggagcagctgcagctaactatacctactgggcctatgtgcctttcccgcccttaattcgggcagtcacatggatggataatcctatagaagtatatgttaatgatagtgtatgggtacctggccccacagatgatcactgccctgccaaacctgaggaagaagggatgatgataaatatttccattgggtatcgttatcctcctatttgcctagggagagcaccaggatgtttaatgcctgcagtccaaaattggttggta

SEQ ID NO: 21288 - DNA, 2300 bp, Homo sapien
aatgattttcaaaaattgctgggagatattaattggattcggccaactctaggcattcctacttatgccatgtcaaatttgttctctatcttaagaggagactcagacttaaatagtaaaagaatgttaaccccagaggcaacaaaagaaattaaattagtggaagaaaaaattcagtcagcgcaaataaatagaatagatcccttagccacactccaacttttgatttttgccactgcacattctccaacaggcatcattattcaaaatactgatcttgtggagtggtcattccttcctcacagtacagttaagacttttacattgtacttggatcaaatggctacattaattggtcagacaagattacgaataataaaattatgtggaaatgacccagacaaaatagttgtccctttaaccaaggaacaagttagacaagcctttatcaattctggtgcatggcagattggtcttgctaattttgtgggaattattgataatcattacccaaaaacaaagatcttccagttcttaaaaatgactacttggattctacctaaaattaccagacgtgaacctttagaaaatgctctaacagtatttactgatggttccagcaatggaaaagcagcttacacagggccgaaagaacgagtaatcaaaactcaatatcaatcggctcaaagagcagaattggttgcagtcattacagtgttgcaagattttgaccaacctatcaatattatatcagattctgcatatgtagtacaagctacaagggatgttgagacagctctaattaaatatagcatggatgatcagttaaaccagctattcaatttattacaacaaactgtaagaaaaagaaattttccggccgggcgcggtggctcacgcctgtaatcccagcactttgggaggccgaggcgggcggatcacgaggtcaggagatcgagaccatcccggctaaaacggtgaaaccccgtctctactaaaaatacaaaaaattagccgggcgtagtggcgggcgcctgtagtcccagctactcgggaggctgaggcaggagaatggcgtgaacccgggaggcggagcttgcagtgagccgagatcccgccactgcactccagcctgggcgacagagcgagactccgtctcaaaaaaaaaaaaaaaaaaaaaaaaaagaaaaagaaattttccattttatattactcatattcgagcacacactaatttaccagggcctttgactaaagcaaatgaacaagctgacttactggtatcatctgcactcataaaagcacaagaacttcatgctttgactcatgtaaatgtagcaggattaaaaaacaaatttgatgtcacatggaaacaggcaaaagatattgtacaacattgcacccagtgtcaagtcttacacctgcccactcaagaggcaggagttaatcccagaggtctgtgtcctaatgcattatggcaaatggatgtcacgcatgtatcttcatttggaagattatcatatattcatgtaacagttgatacttattcacatttcatatgggcaacttgccaaacaggagaaagtacttcccatgttaaaaaacatttattgtcttgttttgctgtaatgggagttccagaaaaaatcaaaactgacaatggaccaggatattgtagtaaagctttccaaaaattcttaagtcagtggaaaatttcacatacaacaggaattccttataattcccaaggacaggccatagttgaaagaacaaatagaacactcaaaactcaattagttaaacaaaaagaagggggagacagtaaggagtgtaccactcctcagatgcaacttaatctagcactctatactttaaattttttaaacatttatagaaatcagactactacttctgcagaacaacatcttactggtaaaaagaacagcccacatgaaggaaaactaatttggtggaaagataataaaaataagacatgggaaatagggaaggtgataacgtgggggagaggttttgcttgtgtttcaccaggagaaaatcagcttcctgtttggatacccactagacatttgaagttctacaatgaacccatcggagatgcaaagaaaagcacctccgcggagacggagacaccgcaatcgagcaccgttgactcacaagatgaacaaaatggtgacgtcagaagaacagatgaagttgccatccaccaagaaagcagagccgccgacttgggcacaactaaagaagctgacgcagttagctacaaaatatctagagaacac

SEQ ID NO: 21289 - DNA, 2300 bp, Homo sapien
ggcgccataccctcagccgcccactaggagacttaatcctacggcaccacctagtagacggggtagtgaattacatgaaattattgataaatcaagaaaggaaggagatactgaggcatggcaattcccagtaacgttagaaccgatgccacctggagaaggagcccaagagggagagcctcccacagttgaggccagatacaagtctttttcgataaaaatgctaaaagatatgaaagagggagtaaaacagtatggacccaactccccttatatgaggacattattagattccattgctcatggacatagactcattccttatgattgggagattctggcaaaatcgtctctctcaccctctcaatttttacaatttaagacttggtggattgatggggtacaagaacaggtccgaagaaatagggctgccaatcctccagttaacatagatgcagatcaactattaggaataggtcaaaattggagtactattagtcaacaagcattaatgcaaaatgaggccattgagcaagttagagctatctgccttagagcctgggaaaaaatccaagacccaggaagtacctgcccctcatttaatacagtaagacaaggttcaaaagagccctatcctgattttgtggcaaggctccaagatgttgctcaaaagtcaattgccattgaaaaagcccgtaaggtcatagtggagttgatggcatatgaaaaccccaatcctgagtgtcaatcagccattaagccattaaaaggaaaggttcctgcaggatcagatgtaatctcagaatatgtaaaagcctgtgatggaatgggaggagctatgcataaagctatgcttatggctcaagcaataacaggagttgttttaggaggacaagtcagaacatttggaggaaaatgttacaattgtggtcaaattggtcacttaaaaaagaattgcccagtcttaaacaaacagaatataactattcaagcaactacaacaggtagagagccacctgacttatgtccaagatgtaaaaaaggaaaacattgggctagtcaatgtcgttctaaatttgataaaaatgggcaaccattgtcgggaaacgagcaaaggggccagcctcaggccccacaacaaactggggcattcccaattcagccatttgttcctcatggttttcagggacaacaacccccactgtcccaagtgtttcagggaataagccagttaccacaatacaacaattgtcccccgccacaagcggcagtgcagcagtagatttatgtactatacaagcagtctctctgcttccaggggagcccccacaaaaaatccccacaggggtatatggccccctgcctgaggggactgtaggactaatcttgggaagatcaagtctaaatctaaaaggagttcaaattcatactggtgtggttgattcaggctataaaggcgaaattcagttggttattagctcttcaattccttggagtgccagtccaggagacaggattgctcaattattactcctgccatatattaaagggtggaaatagtgaaataaaaagaataggagggcttggaagcactgatccaacaggaaaggctgcatattgggcaagtcaggtctcagagaacagacctgtgtgtaaggccattattcaaggaaaacagtttgaagggttggtagacactggagcagatgtctctatcattgctttaaatcagtggccaaaaaattggcctaaacaaaaggctgttacaggacttgtcggcataggcacagcctcagaagtgtatcaaagtactgagattttacattgcttagggccagataatcaagaaagtactgttcagccaatgattacttcaattcctcttaatctgtggggtcgagatttattacaacaatggggtgcggaaatcaccatgcctgctccattatatagccccacgagtcaaaaaatcatgaccaagatgggatatataccaggaaagggactagggaaaaatgaagatggcattaaaattccagttgaggctaaaataaatcaaaaaagagaaggaatagggtatcctttttaggggtggccactgtagagcctcctaaacccataccattaacttggaaaacagaaaaaccagtgtgggtaaatcagtggccgctaccaaaacaaaaactggaggctttacatttattagcaaatgaacagttagaaaagggtcatattgagccttcattctcaccttggaattctcctgtgtttgtaattcagaagaaatcaggcaaatggcg

SEQ ID NO: 21290 - DNA, 2300 bp, Homo sapien
ctctatttcctcgatttccctttctgctgcaggggttaaatatctgggagaatccagggctggattgccctttaagatagaaaacaggttgtatagcttatcagtaggaattcccgaagtgggttgaagccatttaatatctctcagtaatttttgataatcatttaaggtatgtaagttgctggtatttaatttaaacttctgaggttttactcaccaggcagttagtatgtacccaacatatttccaaggagaagaaatctgtactttcccaggtgcaatgattagacctcttagctgtgtattctttatgacagaggaatataaatttaaaatattggctcctttggagcttctagtagaatatcatccacaaaatgaatatttgtgcaatcaggaaattcttttctacttgggagcaaagcttgatttacatgatactgacacgtggtgggactgtttagcattccttgaggaaggattttccaatgaaatcaacaagctgacttttcgttattgatagctggtattgtaaacgcaattttttctctgtcctgctaggggaatcatataaaagaatgtcttatgtcaataacaattataggcaatcttgaggaattgccctgggcgaaaggagcccctgctgaaggggtcccacaggttgcaaattggcattaatagcacgtaggtcatgaaaaagttaccatttcccagacttttggggaatgatgaaaatgggtgaattctaagggctgctagataattcaacatgcccagctttcaattgctctccaactaattcatgggccctctgtaatttctctcattcagaggttacagttttattttaattagatgtggagagagtcacgctaggggcaagcaagagataacagtggctattatcagaaagaggtcttttaaattcttaaattttacttaaatcttagcagagaattataatttgggacgtctctgtatacaataaacacatgaaattttgtcgtgggccgcctgcggagctgtagagctgagcgggcaggtccgggggcagcggctgcgatgtgcttgctcaggccctgccgcttcttgtctgcaccgcttctttctgcgtgtgccgctccctcctcccgccaccgggtggctgctgcaggttgggtgagccttcccgcgcacaccttctgcccctcagtagcaggccgctctggtgcactggacctggcttttcgtcaacacagctgctacgcaggccaagttttggggagcatttgctggcagtgtttgctttctatttactgcatgcttgaccgcagcactctggcctctaatgctttttcttaaccctttaggtacctgattgccttgctgaccttgcattaccaggcaggctaaaagctccccttctaatgccgcttgattagacagggtctcataggtgtagcgtgtctcctgtcctttttcctatctcttggaggaggtggctcaggaaaaaccccgtttcctttttgttattctggcccggtgatatatccgggctgaaggaaaaggaggtggtaacgcaggttacggttcctccttcccctttttaggctcttctgtgtataatggagcctggtccagcctaattacagcccatagcgctagaggtgttactgggactcattgcccttgtgcataatgctgtttaagatttctccccacttgttccgagagctttatgtctagcgtgcctttttctgggaaccataggctttggcttataacagtttgcattaggtcatttaattgagcctgcaaaactgaggctccactagccttaagcagctgtttcaacacttttatgtactgtttctgttgagctgataactgttgtctcatgatgaaacctcagcctgaacaatctcccctgaacttggagatcctgagtgggcaccaatgacttactgattgctcgctgatgacaaggttcctttttcaccttcgttttcagggtgtccatcgcgcttccttcactgccttgatcatgtcggggtcaccacctgcgggggtttgtcctgcagaccctgactcaacgacggatgaataatgtacactgacacagatcttatgcttgtcagtcctgctgagcatccaggccacttacagactccaagaagagtcctgtcagccacggctctgacttgttggccctcccggcatttatttagcacacatttaatgacagaagtctcaggtaaacaccactagaaggtaattattgttgctgaacccccgagtagagagcaatcatgcaccagtgg

SEQ ID NO: 21291 - DNA, 2300 bp, Homo sapien
caatgggcaaaggactgtctttataacaattggtgctgggaaaaaatggatatccacaagcaaaaggatgaagttgaacatttaccctacaccataaacaaataaaaatgcatcaaagacctaaaggtaagaacttaaagtataaaatttttgaataaaatataagtagaaaacatcatgacaatatcacaaatataatgacacatttaaaaaagtagatgtggccaggcatggtggctcacgcctgtaatcccagcactttgggaggaggaggcagccggataacgaggtcaagagattgagaccatcctggtcaacatggtgaaaccccgtctctactaaaaatacaaaaatcagctgggcgtggtggcgcatgcctgtagtcccagatacttgggaggctgaggcataagaatcgcttgaacccaggaggtggaggttgcagtgagccgagacaggccacggcactgtacagcctggtgacagagcgagactctgtctcaaataactaaaaaagaaaaaaagaaaaagtaggtgtaaaactatccatagtagatactctcatttacataaaatccagtaagaaaacaaaactgaagttctggcttccggtaatactggagtagcttgctaaactaacactctcacagataacaatgatacaatctggataaaatattatatatagttacatagaaacattcatctatatacaatacatacatacgtgtgtgtgactgaatgagaatttcaacctttcccaccgtagggaagataattattctgtttgaattcagccacatttaccccctcttcaaataataacaatgctcttccaaagaatacaacagaatttagtctctataactaatatttataatttctattacacaatattaaaattcataaaatgtgtgaagaaatgtaacatgcaaactatacacaagataaaaagcaggcagcagaagctatttctaagatgtccgagatgatgtaatcagcagacaagtatttcagggcagctattataagtacgttcatgggggtaaaggaaaatattctcataatgaattaactcatgtagagtctcagcagagacatggaaattataaaaagagtaaaatagaagacaataaaataataaaataaaaagaacttttagtttacagagtagaaacagaagacagcaatataaaccatccaatctgaagactgaaacaagtttaaagaaaatgaaaagaggcctaagagacctgtgaaatgattgagtctgagacagagagggagagacagaaaaattaaatataatacaaaaacaaataaacaatagctgaaaatttaaaaacttggtcaaaaccgcaaattcttatattcaaaaggtgaacacactccaaaacaaaaacaaaaacaaataaaaccatatcgaggccctactgtgatttagaaaactggcagagcaagattttccagggagttgctatgatttctcattttcactatttataataatggaaaatatgcactccttagttttcttcttggagaaagtctgacttgtcaaacacagatgacttttcagtttagttttcaaggtttaatttcttaccttggaaatcaattaaatttgtttctttaaaatgtcgcagtaaaattgctcctccagacagatgtccacggagattctgtcctgctgcgtccgcctttcacagaactgaggttgttcctacaccagtttcagaagcgtgtaggcacgctttattacagtggcagcagcgtccctgtgcgaggtctaacccaggtgtgggccctgcagccagcccgggggtccaatgggtcctcctatggagcacaggaagaatcgtggcaggccagagatagacaaaaggtggcttttaaaagggaagtgtcaggttaccagggactgggtacttttacacgcggaccttcggccctgcccatagaaaggggcagcactgcgcatctctgaaggagtgtggcaaagggtggggcaataagaagggtggggcagaaaggagtggcccctcaggaggaaggggcggggagatcccagctactagaggacgcccgttccaatggcaactctgccaaggcgcctatgagagcctcttggcttttacctggtctgcgagaaatcaaactttgggcacaagtcatgaagccgacaagcccgggagacacagtgtcagaattacaaggtgagatcagccgcccggccaagctatcttctcgctagcaggtgaggcccgtgaacagccaagctccccttggcacggcggaac

SEQ ID NO: 21292 - DNA, 2300 bp, Homo sapien
aaagggcacaggagggaccccagtccagagccagacagagttcagctgaatgtgggaactcatgccatggagtggatagccctggatgactgaagagcccagtgcccaggggcgtctcacccactgtggagacaggcccttatattaggtggcaatggggccacctgagttctggaccatggctcaagcccaggccaagcagccctggagtaagggcatgaggcagggggccccaagccaagttgaacactggggtaccgtccctggagcagcctggggtaccctgacagcacccatgccccagtctgcacacaccccttgttctgaaattaacagcctgcaggggtgtcctcagtatcagaactagtgggccacacaaagccctggaggactctacaaacccaggtccatggggagcagccctgtaagggccagatggctgggtggaaaagctgaccaagtcttccttcctttcagccaaatctggaagaaaggcaccttgcctagagcagtgttcctggtacccaggcctctgtgggcatccttcagcacaaagaccctctccaaggggggatgggctggccctcccaggaccaccaacccacttccagaagcccatgggtcatccccaccttcacctgactgggctgtccctgacgctaaggcccagcagcacgaaggggattccacacaaatcagggcagtaggctgctctctggcggcactgggggcttagggtctggccagcctgtccctggctcaggacacatgcctggaaattagggttttctcctctgctcttagcatctcctgggtaaaccaataattactctccctcatgtctcaaaattcacatctatctaaaaggcgctagtgagggtgacatttccaggaagccatagcccatgtcaccccctgcaaagctgtgaccttttccgcgggcaggccaggcggcggagttctcccaaaagcggatgaactggcactctggctggagaaagcagagagcagcagcacaatggacagcgtctgggacctcaggccgattccacagcagcttaggaaagcaggaggccccctgggcgggaggaggcttgatgctctggagggaaacggaactgagcagcgggaggtggggtgagcctgagacccgaccgattttggcaaaggcgaggcgcactttgcagtatcatactctcctcactgcccagcccagacctgcccttcaagtccctctatggactcactccccttagccaggggtggcacagattcagtagccagcatgggtttggaaacagaggtcaacaccgccctgcccctccctgcggggctgcgcaacacccttgaaccctgcgcatgctgagactgtagtcccatagccctgcgaccaacggccggaagcagctaagacactattaccagcatgcccggcaggagggcaccgcgctgcccccccccctcaagggaccagcatcatccccactcccgtagcatactgggattgtagtcccgcagctctgccaccaacagccagaagcagttaaaaaactgttcctctcagcatgccctgcaaggcgcgcaccgctgctgtacctcccttaacgtatccgtaacctccctcaacgtatccgtacctccctcaacgtatccatacctccctcaaggtatccgtaccttcctcaagctatccgcaccaccctctcttccatttcatgcgaagattgtagtcccgcagccctgcgaccagcggccggaagcagctaagatgctactgctcccagcatgccccgcgaggcgcgcacagcacaggccctctctcaaggtcaccacctccactcccgttgtatgctgggattgtagtccggccgccctgtgactaacggctggaaccgcctaagacaccaccccagccagcatggccggcaggagcgcaccgcgctgtctccctccagggatccgcaccgccctacaatcctgctttgtgctgagattgtagtcctgcaggcgtacaactaacaagctgggtgcagataagagactacagctccccgcatcccaagcaaaggtccctcctctacggagcccctccacgcgtccactgcggttccgccgtgccaaggggagcttggctgttcacgggcctcacctgctagcgagaagatagcttggccgggcggctgatctcaccttgtaattctgacactgtgtctcccgggcttgtcggcttcatgacttgtgcccaaagtttgatttctcgcagaccaggtaaaagccaagaggctctcataggcgccttg

SEQ ID NO: 21293 - DNA, 2300 bp, Homo sapien
gccttaacgaagctgcccacaaggccgtaaactttaaaaaactcaaaaaaaaaaatctcccaaagggccaatgaaaatcttgccaaatttctttcccgctttacagaggccctccaaaaatacaccagtgttgaccccacctcccaggaaggaactattgttcttaatacccatttcatctctcagtctgctcctgacatacagcgcaagctcaaaaaggtagaagatggccatcaaaaccctctacaagaccttcttatcctggccttcaaggttttcaacaacagagatgggcaaaataaattaaataaagcccaacaagatcaggctaaataccagctcctagcagcagctatctacccaggctgcccagaggctcaaaagacccaatagcagtgaccctcctgggccctgttttaagtgtggcaaagaaggccattaggcctgaacatgccctaacccacgaataccaaaaactccttgcccagcctgccaacaaaccagtcaatggaagtctgattgtcctcttaacaagtagactaacaggccggttcctcaaagccctggcaaatcaaagagtgaagagtcactcacactcccacacctccttggcctggctgctggagactgacagagcccagggcccccggccccatctgccgtcactgcattggagcccagggtaactctgctaatagcaggtaaaccgatctcttttttaatcaacagtggagccacctaatcggctttacttgtatttttaggacccatttacccttcccaggtctctgttgtgggggttgatgtactcttctcatgtccatgcactactgaatcccttacttgttccctatttaatactgttttttcacactccttccttatcatgcctcattgccccacccccatcctaggccgagacattttagccaaattcaaggcttctatcaactttttctgtccccctcaaccagagtctctcctgctcctctctgctagtccagcctctgatccctcctccccagcacccgctagccgcctccctcattaatccagtagtgtggacaccaccaccccttccatagctgctcactaggaccccatcaaaatccagttaaaacaaccctctaaatttcccaatgttccccaattccccatttccctaacataccaaaagggcttacaacccatcataaacaagctctgctcatgcagtcttcttagaccaacacactctccgtataacacccccatcctccctattaaaacatctgatggctcataccactcatccaggaccaccgagctatcaatcaggctgtcctccctattcatcctgtagtccctaacttctatacacttttctctcttgtcccctccaacaccacccactatacaacaattgacctgaaagatgccttcttcaccattcccctacaccctgattcccaaaacctctttgctttcacccagactgaccccaacactctccagtcacaacaactcacatggactgtcctccctcaagtcttcagggatagccctcatttctttgggcaagccctagcccaagacttcacctccttaaatctttcctccagctgccttcttcaatatgtagatgacctcctcctctgtagcccctccttaaaaatctcccaaactcatgctgccacccttctcaatttccttactaataaaggccatagggtctccccctccaaagcactgctttccacccctatggtgacctgcttaggacttcaactctcccccaggtcccaagccatgaccctggcatcagcagccttaatagtcagcctatctctaccttcctaaaaaagcaaaatcctttctttcctagggataacaggctttctaaaaatatggattcccaactttgccctcctagcttgccccctttgtaaagcagccaaagacccctcaacaaacacctaaactcctcacataacatactccccaacttccacaaactctaaaccaatcttatcactgcaccagctctgtccttacctagtatatcccaacctttcactctctatactgccaaaaaccaaggaatagcccttggtgtctcaggacaacaaaaacaaaatccctcttcctttgctcctgtagcctacctctctaaacaactcagcaactcagtcaaagggtggccaacctgtcttagagcactggcagcagccacagttttagctctagaaagcaagaaactaacatcagccaaaataccacggtctacagtcctcatagtctacaagatctcctctcctccc

SEQ ID NO: 21294 - DNA, 2300 bp, Homo sapien
tcatgtctgggagggtaacgcatgtttctgaggctggctcagctgcgcagtggtgctgttaagagccagggctgggaggcaccattgtggtttcccattggccaggaatcacatgactcttggacccggaatttatgttccacgtgtccctgactctcaaagtaaaagtcaggctaaaagtctttaaaaataaaggagaaacttggtttgcaaatccactctctgattcaggcatttcaaaggaattcctgcccagacatttcaatactcaaagcacggcagggaaagtgagagatgccatgttcctccttggcctcttttctggctttcatggatttccaaggggccaccctgagcaatgccatctaggtcaagtttaaagatgggctagttctgaggagacgtgctgtgtttcctttctttgtaggaaggcttggcttcttactctgtgacaaaacacggggcaccaggagccctgagcctgcattttttcctgtggcctttgcttttctctggagatgcacctctcactgcactcactgtgggcactgaactgtgagttcagctcagtccctgagactgttttccttgctagcaagaaacatcttcacatttccttagaacccttctgtgtcctggggtctcattttccatttttccagcctcagttctcctacttgtgatggctggcaaacgctgatgcctatggggccagcaggttcgtaactgaggatagtgaagggtagcagggagtggtgggaactgggccacctggtgagtgcacacactgcctaaatgggatcagtctgtttcaatgctgccattcaggactgtaggccagtcttgcaagaaatctacagttttatgcaaaatcattcaattacccatgaaatgaattcaagaccacctataatgaattccagtggctcacacctgtaatcccaggagttcaagaccagcctgggcaacataggaagacccagggtggtcttgagctcctgacgggaagcaatcctccctcctcagctttccaaagggcttttgttggtaataaaaccatatatatatagatatattagctgggtgtggtgcagtgcccctgtggtcccggctacttggcaggctgaggtgggattatggcttgagccagggaggttgaggttgcagtgagctgtaattgcaccattgcactacagactgggcaactgagtgagaccccatctttagggaaaatatttaacatcatgacaaaggcacagttagccaaagtacacatttgtcagatgctcagtttttaatttctgctttgcaaattggagcaattggagggtgttttaaaaaggcaggacatgatccaaatggccatggacaagatgagctatcagtagggggactggctatgaagcagcctctgcatcattccagggacgagatggtgagggccagaaaataatgacaaagaagacctggattttagaaatatttctgaaatagatttcttagtcctgtcaaagatgaacaaagatgaacgctaaagtggtaaggacagattttaatcagtaacaactattgcagctgggaaaagagcccagcagaaattgaacttaactttgatttgtggaggtcactgggcattttaaagtgagaatgggccaggctcagtgcctcacacctgtaatcacagcactttgggagtgaagtgggaggattgcttgaagccaggaggtaaagaccagcctgggcaacagaacaagaccttgtttcaacaaaaaattttaaaaaatagctgtgtgtggtggcacccacctgcagtcccagttacttgggaggctgaggtgggtgtattgcctgatcccaggaattcaaggctatagtgagttatgactgcaccattgcactccaacctgagcaacagagcaagactctgtctgagaaaaggataacatgagagaatgatgggttagggagggaaggagcaggggcttggcagagttagggaagtgaaacactacaaaagcaggaagtggggtggtccatgtgaaacccacctgggtttactaatgtgttcctgttgaagttagactcccacccccacagaggctgggaggcagagaccctgtcttcaggtgttggctgaaagaaatggtaacttattttagcagccttgagctttctcatgcgggcacatgaagaggactagtgtcatcttagggaatgcggcctcgcaccattggaaacaatgtgagtgtttgttcaagtctctataggtcaaggctgaagcccacctggaaaggtctcag

SEQ ID NO: 21295 - DNA, 2300 bp, Homo sapien
attcacacagaaaaatataggctgagtgtggtggctcacgtctataatcccagcactctgggaggccaaggtgggaggatcgcttgaagccaagagtttaagaaatattacattgatatttgggaatattaaggacaaagagaaacctttaaaacttcagagtgaagaggtagataccaagacaggaaaaagaactaaatgacagatgtctcaacagccacacccaaatgtcattttggtcttttcatatatttaaagtagtgaagagaaaaaaaaattaactcagcatttcttatccagttaaactatcatttaaaaatgagggtggaatatccacagtggtacaaggcctcagagggtttgccataaaagaccacctctgaaccacctgtgtcagtccgggtccatgggtgaaacagagctggaagctcaagtgctgcagtggggaaatggaggagaaagatcaggcaggggcggcaggggagcagctcacagactgttccttcggcccaggctccaatatggctcagcacagtgctgttgctgatgccggctttatttaaatatgtgagatttgattcattatggattttgcattaattttgatttttcaatattatttgtctttgattgctcagttttttgatacccccttaaattttgctcctgaggcaaatgccccacccacctgaccctctaggcctctacgatagggatatttgcaaaaaaaccacctcagttaatcaatgctccaacccaggcaccatccaggttcatggttcttctctggttgtgaaaattaaaaaccgggccaccacccacttctcagccttatccccagccagccagcagagcattgtagaatgtgagcttgcattgtgaacactctgaaaatgtaggccagagaaccttctggctggagatggctcctgctgcgagaagggaatatgacagatagcataagatattacagtaattttactgacaaagcactaagcatatcacaaaagaagttcaaaatcaattcatctgcttccaagcagaagcgagtctaacaggcagtgaagcatcatcttgataatgtagttgttccaaaagaagaaggaattaaccaggctaccctaaatgtgtctgtatgacatgcttttttgtttctgttaccctgataaggacttaaaattccatttgtatggaaataaactaagcttccgaagttatcttcctgttccggggagttatctcaggaggtttgctgcagaatttttctctgactaaatgggatcttaggctcagaggctgcaaggtttcagcttttgttgttaaatagtaaagcacactctacttccagccactacaactgtgcttctttaagggcggtatccattaaggttgtttgattacaaacaaagaaaactggctctaagcaacttgctatccttccaacaagttctttttctacttaatattaactaaagaatcagctgagcaggttaaaattagaatgggaaccgtgcagcgcattgggtggtagaaaatagttgacaactctctcagagtttattcattccaacaatagaacccgctgcaaccattcttttctgcattctctacaattttttcattttttttttagtatgatgttttgctatctagcattctcccctcaagactgaaagtcccaagaaaatgagtccaattgtccatgcttgagtcatatgcccatgctagggtgacaatctcaccaagatgttccttagtgagtgaggaaagtttgccaaagagacatggcagtgctgttccaagaaaagaaagagctgggtgctgggtgggcaaggaccacagaggaactaagaagagaggctatttctcctactgtcccatctccaaagaaaaggaggaagtaaaaaccgaaaaataacagactgattggcgccagtggccaggcctgtaggttaaagattaaaccccacccaaaccgcttgtgctatctatagatcacagacaacggtatgaagaaatacttgcattgctcaccacccccacctagtcacgtaccccatgcttgctggatctatcatgaccctttcacgtggaccccttagagtcgtaagcccttaaaagggccaggaactctttcttcggggagcttggttcttgagatgcaagtctgtcgacgctcccagcagaataaagcctcttccttctttaacctggtgtctgaagggttttgtctgtggcttgtcctgctacatttcttggtttcctgaccgggaagtgaggtgattaagggacagtggagg

SEQ ID NO: 21296 - DNA, 2300 bp, Homo sapien
ctgcctttaatattttttatttcttcagcattcacttagcatagtctgaagaccatatgccttggtgatgttcatcttgtatagaatcccacagatgttctctgaattttttgtatctggatgttcaactctccagcaaaattaagaaaattttcttgagttattttcaaatatgttttccagtggcttactttttctctttcaggaatgctaataagtcataggttttattgctttagataattcatatttctcaccagagaaatatggtttctctggctttggttttcaaaattatttttacttttgacaaattagtttcaatgatcagtcttcaagctctgaaattctttcttctgctggtgtaatccattgttaaagctttcaactatattttcaaatgtcttaagtaggctttttatttcaagaagtccttttgcattttttaaaatatatttatctttcccatcatttcctggattgtttttatagtttcttgtgttggttttcaaccttgtcttcaatctcatttaatttccttgcaatttatactttgaactctttgtcagttctcagtttccattttggttagggtatatttctagagagctaatatgatcctttagtcatgtcacaacattcagattttttcatgatgccagaattcttatgctgattctttctcatctggagcagctgctcacagaaaaccactcttatttttgaatttatttttgttcagatgggattttttttttcttatttgttttttctttctccatccctccctttccctagggagtgactgtggagtacgttgtgttgctaaagctttgcttctatagcccacgcacttccattggccaggctttatatttggctgtgcagttcaacctgcaggccagtagatggcgctgacgggtaagagccagcttgtggcacagcagatgggtaggtacttggtctttgtttactgggaggtgctctctgttgcttctggtgatgggctggacagtgaagtgcctggtgccctgagttttctgttcagcagggagtgggtagagctgggcagagctggaccccctggcttgcccacaaatactccaatgccaagtataggcaccaagccttgtggagatggctttgggagctcccagtgacatgtgctgaggtctctacatcgggtgaaggggctgcactagctccatgcgctagataggcaggaaagtgatctattcccaatcacaccagtcctggaactcgtgactctcagttcagatcctcactgttgtctacatccaagccacagtgggttgagagctgtggaacacacctgtcttgagactctccacaggagtggttttggggcagaaccttttcagcgtatggctctctttcctttgatgtggtaatgatgttgcattgtcagggccaggggatacactctgcctttcagcccctgtggatgggtatcagttgtggtggtgtcaactggttgggctggcctgacctcaggccctgggaaaagtggttaggtgccagcactgttggattggtctacatagcgccccagttctcaggcccttagacggcctaccggacagagagtatgggtccttaaaacccatttatgcctagtgttccattactggaatactaagcatgtgggacttatttatatcccactgctcaagatcatcgccaaggtctgattggaaaaatttaaaaaattgcaacctcaggcataaatgggttaaggggctggactggggttggggcaccctagacttcaggagctggctgtgatggggaaggggctggctggtccctgagaggctgatagaaccctcaggcaggggacagacagaaggcccaggtggtgggagcctgagggcagcacaggcctgtggggactgggctctcagaagagctgtggttgcagcggaaatgctcaggcaggagccaggtggcctttcactgggggaagggagggcccctcagggcactggagattggcacctggggggcacatgacctactcacactttgctcctgcagaagcagttctggattttgttcttggggtcatgcagaggtcccaggcctcctcactctctccctggcctgggagtcggggtctcagagaaacacctagccaaggccagtgtttctgcaggggtgggtcaactgtacagggggcctgcaacaggtaagccccatttcgcaggaagcagccgaggccgggagtagtgtggtgtgtggtctggcagctcctctgcacagcagctgtgctgtctctc

SEQ ID NO: 21297 - DNA, 2300 bp, Homo sapien
tcaacaaaccttcaagggtaaaggagaagttttccttcggccttgacagtgactaccagatgggtagcgtatacagtgtgggcacttgtggacaaaggaatgagtcttgctactcagaacagctcacaatttgaaacttatcatttatttctggaatttttcattcaatcctttcagaccacagttcacccaggtactgtagtcagagaactagactggagatcaagggagaggacgcagagggcaagggaggaaagagcacaggtgggtggtcagccaggtcagtgctgtggggtggaagttgggggcctcaggaggggctgctggccttcaagaaagcaggagagggaggcactgtactgaaaagtctggggctaccaagaagggaagcaaaagggcagtttctcagggttgaagttgggctttgggaaggttttagggggagcgcaggtatttgtgagcccatgtttaaacacagtaaggacccagtagtgataaaaagagcaaagatataaaaaagatggaatagcagtaggtgatgtccaccttagggcgagtagaaggttatgataggctacaagggaagagattgaaaaggaggaagaagaaaaatcctttctttaggatatggaggggcagggaaagaaaactcacaagacatatgtgcttctaacaggtctccacttagggagagactctaaaaacctctgatagaatctgaacaagtagggaatatgtggtgacaccggtgtggaaatgagaagggctgtgtctagcaaatgtatcccatgtaatcaatagtttctcctttatggagtttgcaatagcattggtattctgtctgaccctgttgcctcctgtttctttcaaataattttctagaagcactggtttgagtaatatcttgatgtttgaagaaatatttggtaattgaataagaagagagctgtgttgtctaaagtgatgatgaaaatgggtaaggagaaatgctgccacttgtgaggtttatgggcgggagggttaaacgggaaaattatgaaaaagctaccttagtcctcaaggcccgttgttagtcctaattttattgttttgtgttttcaccttatggtgctcaataaatatttgttcagtgaacaaataaatgtaaggtcagactctgcacacaagtcaaagaaatcttgtttcctggcaaagctagctgaattaagtgcaggtttccacaatcacctctcctggctccgttttatttcagctgtaggggatctgagagactgtagcccaggttttccgtcaaagcattaagtggaaatatttccctacgagaaggctgccctgggtgtcatgtccaggctcctggcctcctgtggactcaccccgcctggtgtcctggtgacctgggccatctcaggttgctctcatcagcctggcaagtgagggcctgacagaggcactaaagggtttcttctggagtctggctgatttcacctcctggctttgcctagttagatcggagaagtcacttcacttctcgttgtctctattagttctctgtaaaatgggtataataatagttcctctctcacgggatggtttttgaagattaaataaggtaattcaggtaaagcatgcagaagggtgtctcgcacacagtactcggtagatgttagccattattattggaagctacagctgcctttgatcaataataaaaacaaatactacatttgacattctttgaaaatacactgtgtgtgtgccagcatcctggcacaggtgaggtgcgcctgaaaggggaaatgatttgcccaaggcagtgcccctaggaatggccgaagtccgtctaaacaccatgtcttctgactctcaatccagtgtctttcccactctccctcatttccaggcatggcttgctcgtttttcaaaaatcatctccaaggatgtcccagttcaacttcgccccagttgctccagcgcagccccacgccagaacttgagcgagagcagcggtccgcctgccgggagggggcgcttggcggggcggcggggcggggctctcaccggtacgagctcggccgcccgtccaatcagaggcgccgcgccgtccgcgggaatttgaagtgcctgactgggtggccgggagacggagtctcggggtcgcgtgcacctgggcggccagggaggctccagtgcccgggagaaaggtgagcgcccgccgggccgggccaggagccgctccctagtgaggcctgggcgtccggcccctcggggggcgcccgggccggggccttgggactcggcgg

SEQ ID NO: 21298 - DNA, 2300 bp, Homo sapien
ctctttttgaagattagaatctccaaaatgatgtcttttgtatgctaatgagttgactggtagctgggggaccctaggtagcttcagaatgggggcagttatcagaaagaccaaggcagggttccagggtcaggacttttagccacaccccacaaccactgggaagagaagagatgctgagagttaagttcatcaccaatagccaatgatttaattaatcatgtctatgtaatgaggcttccattaaaacccaaaagaacaaggtttggagagctttgatagcggaacatgtggaggttcctggagggcggtgcgctcagggagaaagtggaagctccacgcctcttccccactacctcgccctatgcatctctttctctttattctttgcaatatcttttataataaactgataaacataagtgtttccctgagttctgtgagccactctagcaaattaattgaacccaaaaagggggttgtgggagccctgatttatatagctagtcattcagaagttctgaaggcccgaacttgcaactggtgactgaagggtgcagtggtccccctcacaggctcagtgactgagctcttaacccatgagatctaaactgtctctaggtaaacagtgttgaatgggaggaggcccagctcctgtccactgcaggcttgattacttgctcactggtggggagaaattcccacacgtttggtcacagaaatcttctgtgttgattattgtgtggaatgacagcagaggagaaacagcttgagtttttccaccttcaacaccatgaagaaaattaaaaggaaagacccagttcaggagaaaatattctttaaacgttcatttgataaggaacttgccttaagaatatatgaagaactcttaaaactcaatttaaaaaaaaaaactttgatttaactttgatttttttttttttttttttttgagatgaggtcttgctccatctcctaggctggagtgcagtggtgcgatctcatgatctcagctcactgaaacctctgcctcctgggttcaagcaattatcctccttcagcctcctaaggagctgggactacagacacatgccaccacgcctggctaatttttgtgcttttagtagagacagggttttgccatgttgcctgggctggtctcaaactcctgtgctcaggtgatccacctgccgcggcctctcatagtgctgggattacaggtgtgagccaccgtgcccagccaaactctaatttttttttaatgagcaatggatttgaatagatactttactaagtaatataataaacagcaagtaagcacattaaaaaacctacaatcagatgatcttcaatgggtgaacagattattagcacatgatggtacatccataccatgaaatcctactcaccaataacaagaaatgaattattgacaaatgcagtaacttggatgaatctccaggtaattctgctaagtgagaaaagccaatccctaaaggtcatagactatataattccttttgttccatattcataaaatgacaaaattatagaaatggagaacagattggtggttgccagggattggggacttgtgggcaggagtcagggaagtgtggctatgaaagggcagcaggggggagccttgtgttaatggacgtgtttggaatcttggctgtgctaatgtcagcttcctggctgtgtattgtactatggctttgtaatgtggtaccatggggcgtaagcagggtaaagggtgcacaggacctttctgtatttattttctaaaacttcatgtgaatctacaattatcttgaaattaaaaatttaattaaaaaaagccttgcacataaaggggaaaaccaaagcatgtgtaataccttccctataggcacactttctcagtggaaccacaaaactgataggggaaagtttcgttttatgagcatattccagctgacaaatgaagaaggtgcgatgagactagactatccccatttggaaccttctgtgaggtgacagattatgatgtaatcattgatggctgttaacatcacacaataaggccttatgaaactcacacagcaccacctctaaagcagtcttgtcacaaaatattaaacctggacctgatcaagcatctggactggcttatggatatagagaaaatgtaggggatagatgagcacgggaaatgtctccgtggggcaaaattcacgaaattcagattgttggacactctccaggacaaaaggtctagattcttcaaaaacaacaacatcgaaaaaaaaaaactgcca

SEQ ID NO: 21299 - DNA, 2300 bp, Homo sapien
cagtaggtgctcagactaggggagccatcagcatcctcatcatcacatcctcgccctcttcaggggctggagctctgaaagagcagaaggtgggcatggaggaggtgacctccccccataagctgccttctatgtctctgtcctgggacaccccaaggggcaggggaaccccgagctgagagggtgacacacagaaggctaagttgtctcctgcaaaatgcttccccgggcccagctcttcccctggttttctgcaccctgcaatgagtccacaattaggttaatgagtaaattggattcggaagcctggaaaaatgatatcctggaccaccctgctctaagcaagagctgtttatcaatgccagtggggtacacacatcctccattcaattctctgttcataagttttcattttattttttactttcaattacggaaattttcaaacactccccaaagtagagaaaataatataatgaatcctcatttttaacaattacgtgtttctgtcattcttctctcagctgccccatacacatacatttttaaggcaaattcccaacatcgtgtcatttcactcctaaatacatccttgtggtgccccagccatctttggtgcatggtcggggaggcggggagaggggtgggggaggtggggagaggggtgagggaggcggggagaggggtgggggaattccacttcaaagacatgggtgaccggtcctggaatggaaccagagtccagggcctccagaactgctctttacaaacatcccataatgcacctggagtgcagggagttaggagtagatgtgggaggaatctaccttggaatcttatcttggaatctaacgccagcatggaggacatcacccagccctggaaatatccgggtgtctggagatgcatccacgccaggacccatgagcaagggagagaatgcgaccaactcctgggactctagggcagcagtcttggggaagtgtggcatcctcactgtgagagagagagagctggaggcagccaccagctccccctccctgccctcctctgccaaaggaaggccctgctatttcaacacaagcggcttgcaggaggagcctgttaagaggacggctggtccactgaaaaagcggcagcagcttcagaaaggttaaaatgtgactcccctgcccctgacaaaaaaactgttttcaattcagaaaacaaggtgtctatggccatattaccatggacgtgcctggtgtcatctgatctcagaagctaaacaggctctggattgatcaatacttggatggaagaaaacaaagtgtgcccattttacagataagaaagacaagcctcagagaaataaaaaatttatcagccaccgggtgacagaggcggctctaatccagtgattccttccctccttcctcatcttgtcttcctggttcaaggttagctcccagagctcattcccgggaggaaacagttctgggtgactgattcactgatcagcttggtttgggtttcataaaacgctgtgctggaacactgagtcggtacttctcccaagtttccagttcggagacacgaggagaatgctaaaagctcgaatatgcaaatgaacatttggacagatttcctctagagtttcggcctccaggcaaatgatttattccctgcagaaatgcatttttgtttctgcttaacgggtgaaaaaggagaaaagatttttcgggacaaccaagcttaggaataaaagtctccatgggaaatgtacttttctgaaagcaaatgttggctaaacaaggacagtgttgactaaacacgtgttcccctcacccaaaggaatggagtcagagaatcccccaagctccaaattgtgggggcagatggatcttttagaagttcacggttcgcctttctcctgcccagccccatgccttaagcaaagtgtgggatggtctcgggaggacacccacaaatgtaagtaggaaggtgggaagcagcctctcctctaatatagaaaaacaactgtgacagacagaacaaagcatgtggttcagacacgagaccctgagctagccctggggagggagacagcagctttgcagccgttatcctcaggaagccctgagcgctgagaggcactgttacagaaccgaactggggtccactcgctaggtgagtaaaacccgacagccacaccgagttttcacagcaataaaaaggaaagtgtttatttgcagggcaccaagcaaggaggatctggaagctactgctcagctcctgacctcccacatggcttgagggtg

SEQ ID NO: 21300 - DNA, 2300 bp, Homo sapien
gtcttctctgagtcttagtttcttcatctagaaaatagaaagttattattattgcagatatttacatactgtgtgccaggcacagttctaggcattttacatgtattaatccatctcatccttaaaataactctctagggtagatcctgttattatctctgttttacaagagaaagacggaggcacacacagagattaaataacttgccctagggcacagctagtgagtggtgaaactaaaattgaacccaggaggtctggagataattcctattctgttcacccaactgggacattgtgaaggttttgtgaaggatcattcattcattcattcatttttcatttccttaccaactcagagggaattgtgatattatttcttgtgaagcactcaaaccatgcatgctgtgtgacaacttctctggaaatgtcttttatcctaaggttgttgccaagggagagcactgagccagctgtgtgatgagcctggctagggtggcccctgaggaggcagcctccaatcttgagagtacaatatagtcccttgggctataaggctggtcaaagcctaggccctaaggggagtcataggaaggtcaaaggggaaacctgtcagtacactttggacctggcatgaggaataacaacgagtcagcaaggatcaagggaaggcttcttagaggaggtggcatctcagataaaaacaccactagcaaatcctcacttggtgctgcctgtgtgctgggcctgcttgtagatgctttacacgttttagttcatttactcctcccagtaactttacaacacacatggcatcattactgcccccatttggcaggtgaggaaactgaggcacagagaggtgagggaacttgcccagatcacagagcccatgcacagcacagagccaattctgtgcactgcttatattaacatttacttaatatttaaattatttttgacctaaatgaaaaactttatctcagtatagtacagaatagaaaaccagtatggatagaaaatcaatactatgaaccatataatgaaatcactctagactcagttctctgctaagagcttctaactcaagatcttttctgttaaaagtgggagataagtgtagagaggaattaaagatatattaggatcaaactgaggccaagtgaatttgctcatgcctataatcccagtactttgggagggggagacaggactccttgaggccagaagttcgagactggagtgggcaatatagtgagacctcatctctacttttttttttttttaattaaagatgtattagcaccaaactgagactttctcattggtgcaatcaggattgaaaaacaaaacaaaagaaaacaaaactttctcactatgtgatggaacatgaatgagcgagctctgtgcatcctctaaaattctaaaatcctactttgggaaacagtggtggcactgaagagcatagactcaggagacagattaccctgcttcacatcttgctggctatccagttcctggaaaagaatctctctaaacctcggtttcttcatgggtaaaatgctgatagtaatagctctgacttcatagagaccttgataacaaatgaaagaacgtaggtataataaaacgcaaaaccaaatacacagtgaatacttaataaacataatccattagcattatcgagctttgcacagatgcctctggcctttttgttgttgttgttgttagatgaagataataaaaatcatcatagtaaacacatagcgattactatgtgctggacttcgtcgtagttgagatatattaccatcctaagttaaactataatcgtttattgttatctctaggtcttcctagatgaaatttttaccctaaaggatcgtaaagtcggcccaccggacgtcagtggggtcccctgttcagccctctcgttcttctggggatctctcgggacactgacgaggtggcaccgggacctacaggtgggccgcaagccccgcccccagcgacggcttgtagccccgtcccccgacgcagcgcctctccaagtttgccccgccctgcaggactgcagaatttcctttccggcggcgcgctgtcgtcacgcgtcccgcgcctcctcgcgcctgcgccgtggttggaaggtcgtccctgtgaccggcttggcggttggagcggctgtcgccatgttgtcggtagcatcccgctcaggcccgttcgcgcccgtcctgtcggccacgtcccgcggggtggcgggcgcgctgcggcccttggtgcaggccacggtgcccgccacc

SEQ ID NO: 21301 - DNA, 2300 bp, Homo sapien
tgcccctgagggctggaggtcctgccggctttccggtactcggttttctggtggcctctggaacgcagccgtgggagccctggggtcctcaaagtggcagagggcggggagagcctgatgggaccaagggggcttccttcactacccagcacccatcagagggccgcagccagcgagcacgagcaagcgaccaggctgaggtgtggctctttaggggctgggcgtgaatggagttctgggaggtggtgggaacagcgatgctgtcaaaataattgacaggtttgggggtaaccactgctgactttgaagatgctttgggatgcgaaggtggaagatgggctgcgccacagggcggcgccctgcgcgagtgaagcccgctgcttccctccctgggttagccttcgccgccccgggcgcgagccgggcgcgcgccggtaccgcgtgggcggcgggttaccttgctccgggcgcccggcacgctgagcgccagctcgtgcagcagctcccggggtggctccttgaggtaccaccactgaatctccagcgaatacgaggtggctccgctggcccggaacgcgcagggcatttcgatgtcgtctccctcccgtactgtcacatctttggggacttctgtgaatgcagctgggggtggggagagagagagaggcgtgaccagctgtaggtcgggggcctggggcaacctaaagcgaggcagtcggtctctggctggctggccttgtgccccccaccccgcagctgctccctggcgcacggccggaggggctagcaaagttcggggaagcggctgcagggccgaggcagggaccggccatcggctgcctactgcttccctccggatggggcggggcggcaggggcgactcgtgcttctcccccgcccctggccgcaccgccagagcctggctggggcgcgcctactcccgctccccgcaggcatcctttccgcagccggggccccggcgggactgggaacgactcgggcgcggcgctgctgctgcggcgacccttcgccgctcgcctctccctacccctccgggcccaggctgcacagcgggattgctggagaccgcgaagcttcccggttcgttctctttcttcttcttctcggtggcggccccagcaaagacccccccgagtccacagcggcagcaaagttcccgcgctcaccgtcggccacgaagagcagcagggcatgcagcagcagaggcggcaggtatccgagggcaccgagccggttccgctgttccatctcccgcggggggcgcggtggcggcgggggcccgggagcggagaggcggcggccgcgtgggctcggatcggctccggctcgggctaggacgcctccgagcctgccatggccccgcgcggcgccccctcccctggccgccggcggccgccaatcagccccgctccctcgccggcttgcccggtgcggctccggcggggggcgctgcgcggggtgtgcaggagacgcggtcccaccgggaggctgctggcgatcggtcagtgcctctctctgtccggtcgtccacaggacggtggggatccgcggttcagtctctgcccggcgggccgggcaggggctgggccgcgccgggacccatccctggccgagggagtgcgtgccacggagccgcgagcttctgcctccctgtctccttctggttctgctcccgattgccacctccttcggctcccgcagccgcccccgccggttcctccgcggctctttccgcagggcgagtgggcgctcagccgcggcgcgcagacctggcgtccgacccagcgcagcgcggggagagcgggtccggcgtggcggacccggagccggagagaggcggggagagggggaggggaggggaagggagggggcggtcagtggctgggcgccaagccgcctccaccgctgcatcgcccccgccctcccctctcctgccacagcccgccccgcccccgccccagagcgctccccctctctcctcgggggtcgctcggagggaccaccgtctttctggttggagtacagccccgccccgcacccgcttgggttgggagtcctcccacccaaactctccctggcttcttcccagtctgcacggctcgagacggccgctcatccctgctccccgtgtgtccctcggtcctctctgcagctcccagccctcaactccttaccccagtttgggcaaccagctgccccgctgtttggcccaggcctgggccatgacggatgggtgggcgcccggggccgcgagaagggcggaacgctgtgcccagccg

SEQ ID NO: 21302 - DNA, 2300 bp, Homo sapien
gcctgtaatctcagctactcaggaggctgaggcaggagaatcacttcaacctaggaggcagaggttgcagtgagccgagatcacaccattgcactccagcctggacaacacagcaagactccgtctcaaaaaaaaaaatattttaatgatgaaggaactatgttgtaattgcaactcaaggacgacccaccccaccaccatcagggaattcgaggggagactggcagttatccagggatcccagaaggagtcaactgggagttaagagtcctaacaaccctagaaaaaaactttcaaagacacaggtcttctcattaatctccataatcacagaggtcttgcctaaaagggccccccttgagtacacagctctgaaactggctaacatcttctgctgtctcatttgattttaaagttcacatttgtgaagggctctattgtacaacatggtgactatagttaataacagtgaatttcagttaataacctgaatttcactgagagtaggtctgaagtgttctcatcacaaaatgagtgtattagcatcgctcatagctcatttagccattacacaatgtatacacatttcaaaccatattgtataccataaatacatacaattcttattggttaattttaaaaataataaaagttctctatcagtcccataaattacaattttcaggcatctgcaaaggcagcatgttttggtttaaatgtggtctttccaaattttatacgtataaaataaatgcataagtgtactacatatgcaaaaactaatacataaattttataaagtcaatgcacgcggggtcactgggatgaaccaatttcagtgcctgcagtctaatgtttaaaatcaaaatggtacaaggtcaccaccaaagaaattgtttaagccaatgtttctcaaactaaaacctttggacatactcccagaatcccctgtaaagaaatgtatactgtactcaaagttgagaaccactgacttagcataaagggaccgtatttcttttctctcccacccagcacaggcccagtgctcagcagaaattggggctccacagttctgcccaacactgggtcactgctgagaagtctgcaccaggccttcctgcacctttccactgagcaatggagtttgtttattcatttatttatttatatggaatttatttatttattttggagacagggtctcactctgtcacccaggctggagtgcagtagcgcaatccaggttcactgcagccctaaactccttgggctcaactgatcctcccacctcagatacccgagtagttgggactacaagcacgcaccaccacgcctggataattttttttaaatgttttgtagagatggggtctcccgatgttgcccaggctggtctcgaactcctgggctcaagagatcctcccgcctgcgcctcccacggtgtgagccacctttgatcttattgctatgatttttttattgataaaaactaataaatattctgagtctcaagaaagctttctgaaactatcaaagggacccaggcggcgcatcactacctgtgaggccgaccccactcacagcacagactgcaagtgaggcttacagatgggaagtgccctaagcgaggttaaacagctagttagcagcagacacggaactagaacctaagcctgctgtcccagcttcggtgcccgtgctcacagcggaagctgcctcggctcatccgtaagggcgctgattagggacgacaaagacctcaccccaccgtccccgtcccatttccgccctcccagatccccaacctccttcgagtcctctccaagtcgcctcgcctcgctccactccaggccttagcaagcattccacatgcctttaccccaaccctactgcctgtcccccaaaagatgcaggcggaaaagaccccaggaagcgagcccactcctccccactgctcagcaacaccgcctacgacgttctcagtagccgaatccctttccaggcgcatgcgcccccgaggtgggcgagcgccggtgatgtcacgcatagcgccatctccgagctccgagagtctgcgacagcagctgccagtgcgtcatcagagagcgccggaagcggtccgagaatgaagagtaagcggggccgcgaagttggagagggttggggacgttaagggtcggggtcttggtactggtgggtgaaatgggtccgggctacctgttgctgcggagtcctaacagaaccgctacaggaatgggcccaccctacctaagaaaaactgagggctggagcacgggtta

SEQ ID NO: 21303 - DNA, 2300 bp, Homo sapien
aggtccaagtgggccctggaccaccagcaggacaaggctaggaggaacatcctccctctagtttcccagtcatgaaaaggcttccttctcccgaggcctcctctgtacggacaaggtgttagatgccaggacactgttataaagagacagccctgccttcccaggggactggctcccttccaagtctcacagccacctccaccccagccagggcctaccctccatgagaagcagctccttgccagggaggtggcggagctggcactgagcagtcatggatcgcagccttgaaggctcagcttgaagtccccctccacccgctggtgacaagcagtgtgtacacaggagatggtgtttcccagcatcccaatggccccactgaccctcctggttattactctgcctgtgggatctcagaccttgtgttttctgctctctgtggtatagaggcctggctgccccttcaggacttgtaaacccaaacgtatattcatctggaggtgcaaaagggggtaaagtgccccaagggggaaaccagagggagtgtggggaccatagtggaggggagaacacaaggcccctctaaagaggacccgcattctcaaatcttctgatttaagagaagctgaagatcctgatttttatgtgaactctccccatatgaaatgttcacagcaatgcattttaaaaatgtttaaacactttgaaagcaaacagacattattcgggtcttgtggggttcagggttacttaccaggcggtgacttctgttgaatgctcataaaagctgtccttgctgatgagggcaacggtagtgggtgggcgccatgaagtggtagtggggagggggctccccaaggccacagctggtggccctctcacttgcctgtcccctctccctccccctccgtcaccccctttcccttcccttctcagctgggagaggaccgtctccagcactgggcccacctcacagcctcgcccatagccccctgccaagagagcaggcacctcttctagctccagccccacagccctacagcccatcagccctccccccgctgctcccctctcacctggtcctggcccagcaggcctgccccggcctgagccacccctctcagggtgcccaggtggagttctatttggcaagacaacctgcatctatgtgacaggtagggactgcgttcctcctatgcgctgcccgttctcagcactcggtatgcaggggtgaaccagaagaaagtcctgtctgaacacgagaagaaattactgtctagcccgtggggctcacagcctgggtgggaggcaagccaccagcatgacttgtttatgagcattccacagaagccacagcctggtaggcagccctgaatcccacgagcggcctcaggagaggactctgggttgggagatgctttgcaaaattacaaacacgggtgactgtggagggagatggggtggagacagggaaccgctttgggtggccagggcagcctccctgaggaggtgacagtttgaggtctgatggaggtagaagcaaaggcctgaggctttaaggaacaggaagaagcccatttgagaggacctgtggggaggaggccagggagggccaggaaggcctccgggcactgaggcctgggaatttccttctgagccgcacaggaggctcaggtgcggttgagtcaggggtgacataacttgctgctagtgttggacctgggtgacgggcaccagggtcccctggactattctctttccttcagtttgaaattttccactataaaaagcttaaaataggccaggtgcggtggctcactactgaaatcccagcactttaggaggtcaaggcgagaggatggcttgagctaaggggttcgagaccagcctgggcaacatagtgagacctccgtctgtacaaaaatacaaaaactagccggtcctggtgggctaattctcctggggtcaggatgatttctgtgcaggctgcagtgagccgtgaccgcgccattgcactccagcctgggcgacagagggagacaccgtctcaaaaaaaaaaaaaggttataaagtgctgctgcattttcatattacgattattgaccgctgagggtgactgtgctgtgaggcccgccggaggcaccagaaggcacaagcctcccactgcccctttccccgccaagtcccgcaggtctcgcagtcgcgggcgcccccaccccacccctgcccaaggccagggtcgcagtcccaccgggtgacggcagtcgcgctccgcgtggggcagcggcgagcggaaaggg

SEQ ID NO: 21304 - DNA, 2300 bp, Homo sapien
gaactttccctaggtcactgtaagcagcataaagcatcgctgtgtgctgggccagtgccatttccgcgccaccaccgagaccccacggcacgccttgctcactgtgcaggaggccgcagttgcctttaggagcatgaggcactgtgtgctccatctctggggttcagagtgtgcggtcatgttatgcctgcattcgtatcagaatgaggcccaggaggctgatgggttgcagatttgcatgcaatggcgcgatctcggctcactgcaacctccatctgccgggtccaagcggttctcctgcctcaacctcccgagtagctgggactacaggcttgcaccaaccatgtctggctcatttttccatgtttagtggagatggggtttcaccatgttgcccaggctggtctcaaagtcctggcctcaggtgatctgcccgcctcggcctcccaaagtgctgggattacaggtgtgagccaccgcgctgggctgcatgaacctcttacatgcttgccttctctggagggcctggactttgaagcttctttcactcccagcatctttccctacacaggccctcttccccactatctctgggggaggagtctgcaggccagttctgcaatgtgccgccagagggagctgcccgcagagaaacgggagcgccacactcaggccccaggaaggcagcaagctgagttcccctggcctcagttcactttccctcttgaaagtcacccaaactcaagcaaaagctccgattcaggaataaatggggttgttttatcccagccaaggcctggggaagcttggtattaagagcgtttgttccattcttttaaaaatggaaaagggtccgtcctctgggtgcccatggcaccctggaaagcaggcagagtgctggtcacaggcggagactttgagataccgagaccgaggctggagtttgggccctgaaactttctaaccaggatggccttgggcagagcagcctgtgtttagagcttcccatctgtaatatagcagtgacaaccatgcctgctttgcagggttcctgttaggattaattctctatagagccccccagaagccacttttggatttgagatggttcaaggccagaccttgcatgacaagagtagggacagctttccacaggcctcaataaagtagtattcccaggcagttctgcaaccccagcctcatgccctttgcaccttcctaagaggctgccttgcctcagctttggtccccatccaagactcctaagagcaaagccagttcttttccttttttttctttctttaagagacggtctcactctgtcacccaggttgaagtgcagtggtgggatcatagttcactgcagcctcgaactcctgggctcaagcaatcctcccgcttcagcctcccaaaatgctgtaggtcacaggtatgactcacccacccggcctaatttttattattatttgtagagatgggatgtcactgtgttgcccacgctcgaactgctgggctcaagcaatcctccctcctcagcctcactggcagctgggattacgagtcccacccaacctgcttctccttttgcaacccccagacccagaggctccagagcaggctctggaacagaggaaatctggctccggcccacacattcaccaaatactgacgcagcacccttgacctccagatgcccctgtgctctcttctgtgcccaggctgcggggagagaggggtcctccaggccaaagggagggaggtctccgggaggtccccgcggtcctggaggcaggtgcgcggggcccggatgtgatcatgcgtgcgcgtgggagaaaggcagggctgggcctgcgggagcgcggccttgcggttcccaggactcttctccgggcgcctcgtctccttacgccacccgcaacccaagccagggccccggtgacagcggcggggtgggccaggaccggggagggggtgcccagcagcgacccccggctccccctaaggccgggcgcagctcggagccaggagctggcccggcgcgtggcttcccggaaggcccggcgcagccggaaggtgggacggagggcggggccagcgccggggccgccaccaaggcctgcgcgaccctccgcggggctggggagctgggcggggagcccggggcctgccaggcccgggctgcagccgcgtctgatcgccgagcgcgccgcgtagacctccgctcccccaggtaaaggagcgcccggagccggggcggggcgcctcccaggccgcgccccgcgagaggagggggcacccca

SEQ ID NO: 21305 - DNA, 2300 bp, Homo sapien
tccattctattcttgatgaacatgtcagctaggatgtggaggatttgggctctatctttgctggtgggtgtatacattgctgtaatgactaaggaaaactgtcttgtctaccatcattataataactcatttagtgagcatttactgtgtgccaggtactgtacaggagtcagctacattatctcaatcttcacaatgatccttgggagtagatagttgccatctgtgaaacaggataattgtggcatcaacatgaataggattattgtgaagtttaattgagatgatactttgaaggacttagcccagtgctgccattttggaaacactgtttatgatacctgttactggtgattcctaacgggcacaggatggggggttcaggtgcctgggtccctgctgagcaagtagcccagcagccttggcctcagagcacctgggggaatcatgaatttgtgagcctctttgataagaccctggctctaacttcaagaaaacggtcactaggggagggtgagggacaggactgagactttagcttaagaagggccctgggagcattccagagccttcttttacgcacatcttcctgaagctgagtacagagggtactctgaggtgatgactgttccttacctgtctctctcattagccggtaagccctgcaagggcttggccagtgcctgtctttcaaatgttcattcagaaacaatttaagtgtctcccttggtccaggcactatgccaagaactgacagatacagcagtgagcaagatgggcaaggtggggagagagacaagaaacagagaggcaccaagactgtgtaggggctgggctcccagcactttgggaggccaaggcgggaggatcgcttgagctcatgggtttgagaccagcctgagcaacatagcaagaccctatccctacctgccaccccccaccccccgccacaataaaaaatacaagtcttgagggagaaaggacagaggagctgtggagaggaggcctgaggtctgagggtgggggatcagggtcaggtcctgtggagcctgtagcctaggacacggagtgtggatttgacccttatgcgaaacaactggaaggctttttgtttctttttctgtagaaatgggggtctcactgttacccaggctggtctcgaacaccccaagggatcagccgtctcggcctcccacaatgctgggattaaaggcgtgagccaccgcgcccggcctcaactggaaggctttaagtgagagatggggtgcaagggaatcccagagtcagaaaggtcttcagagagccaggaagggcttgcgggggaggggcgcatatggaaggggcgcatggaaggaactcacagattccttgaatgaatgaatgaacgacccaatgcactgacggatgaatggacaggcggccaggaatagcagccggcccccagggagccccagaccccgcggcctgaagccttggttctaggccaaggcacaggcgcggtgaccttggggatgtccccgcccaggactcagggcccggaactcggcgtctcgggggcggggagggcgtgcctggcgggacagcgcgcgcggaggaacggcgggcggtgctcctcgggtaggccccccacacatccccttggctcagccctgccggggcccgaacccgcgccgcccgccgtgtttacattccacccgcgccagccacgcggctttttgccgctccagcgccgctcggccccgcccccggcgcccgcggcccgcccctcgccgccgcgcgccagacttctcccgcgtcccgcccgccgccccgccccgcgtcccgcgccccgcgccccgcgcccggccctcggcgcgcaggccctgtcacttggccccgccctgtccgccggccccgcccctgattccccgtccctgcgcctcgcgggccggcgccgtggaggggcgggtccgggggcggggcgagggacggggcgggacgggctctgggtcccgcgcggccgctgaggggctgggagccgcggcggggcggtgcgagggcgggccggggccggttccgcgcgcagggattttaaatgtcccgctctgagccgggcgcaggagcagccggcgcggccgccagcgcggtgtagggggcaggcgcggatcccgccaccgccgcgcgctcggcccgccgactcccggcgccgccgccgccactgccgtcgccgccgccgcctgccgggactggagcgcgccgtccgccgcggacaagaccctggtgagtctactgccgcgggctgcggacagggactcctgggg

SEQ ID NO: 21306 - DNA, 2300 bp, Homo sapien
ccctgcaagggcttggccagtgcctgtctttcaaatgttcattcagaaacaatttaagtgtctcccttggtccaggcactatgccaagaactgacagatacagcagtgagcaagatgggcaaggtggggagagagacaagaaacagagaggcaccaagactgtgtaggggctgggctcccagcactttgggaggccaaggcgggaggatcgcttgagctcatgggtttgagaccagcctgagcaacatagcaagaccctatccctacctgccaccccccaccccccgccacaataaaaaatacaagtcttgagggagaaaggacagaggagctgtggagaggaggcctgaggtctgagggtgggggatcagggtcaggtcctgtggagcctgtagcctaggacacggagtgtggatttgacccttatgcgaaacaactggaaggctttttgtttctttttctgtagaaatgggggtctcactgttacccaggctggtctcgaacaccccaagggatcagccgtctcggcctcccacaatgctgggattaaaggcgtgagccaccgcgcccggcctcaactggaaggctttaagtgagagatggggtgcaagggaatcccagagtcagaaaggtcttcagagagccaggaagggcttgcgggggaggggcgcatatggaaggggcgcatggaaggaactcacagattccttgaatgaatgaatgaacgacccaatgcactgacggatgaatggacaggcggccaggaatagcagccggcccccagggagccccagaccccgcggcctgaagccttggttctaggccaaggcacaggcgcggtgaccttggggatgtccccgcccaggactcagggcccggaactcggcgtctcgggggcggggagggcgtgcctggcgggacagcgcgcgcggaggaacggcgggcggtgctcctcgggtaggccccccacacatccccttggctcagccctgccggggcccgaacccgcgccgcccgccgtgtttacattccacccgcgccagccacgcggctttttgccgctccagcgccgctcggccccgcccccggcgcccgcggcccgcccctcgccgccgcgcgccagacttctcccgcgtcccgcccgccgccccgccccgcgtcccgcgccccgcgccccgcgcccggccctcggcgcgcaggccctgtcacttggccccgccctgtccgccggccccgcccctgattccccgtccctgcgcctcgcgggccggcgccgtggaggggcgggtccgggggcggggcgagggacggggcgggacgggctctgggtcccgcgcggccgctgaggggctgggagccgcggcggggcggtgcgagggcgggccggggccggttccgcgcgcagggattttaaatgtcccgctctgagccgggcgcaggagcagccggcgcggccgccagcgcggtgtagggggcaggcgcggatcccgccaccgccgcgcgctcggcccgccgactcccggcgccgccgccgccactgccgtcgccgccgccgcctgccgggactggagcgcgccgtccgccgcggacaagaccctggtgagtctactgccgcgggctgcggacagggactcctggggcccagaccgcgccggggagctgggtgggggcggggtgcggccgggtcgcgggtccccgggcggcgtcgcggggcgcccgggagggtgctgagagcgcggcggggtggggtggaggggacactgaggcagcccgggccccgggaggcgacgggccggtgagggcggcgggggcggcgggaccccgggtcgggggtcggcgggtgcccgggtcgcgggtgacaggccaccccgccatcggccatcttcctggctcgcccggccgcccgcgcgcaaagggggaaggggtactgggcccgcggcctgaccccgccgccgcctcaccccgcgccgccccgcaggcctcaggccggagcagccccatcatgccgagggagcgcagggagcggtgagtgcccgcgccgcggggccggacgggacgggacgggacgggacgggtggcgtgggggaggggcggccgcgggtgctcacccggcccggtgccacccgggtccacagggatgcgaaggagcgggacaccatgaaggaggacggcggcgcggagttctcggctcgctccaggaagaggaaggcaaacgtgaccgttgtgagtacaaaagagacaggttggggagcatcccccccatctcacctgggtacccgacttggctctgcctacggggg

SEQ ID NO: 21307 - DNA, 2300 bp, Homo sapien
tgtgttctttggcaaggtgaaagaaggcatgaatattgtggaggccatggagggttttgggtccaggaatggcaagaccagcaagaagatcaccattgctgactgttgacaactctaataagcttgacttgtgttcgttttgttttgtttttgagacagtttcactcttgccatccagggtggagtgcaatgtcacaatctcagctcactgcaacctctgcctcccaggttcaagtgattctcctgcctcagcctcctgagtagctgggattacaggtgagcaccaccatgcctggctaatttttgtatttttagtagagacggggtttcaccgtgttggccaggctggtcttgaactcctgacctcaggttatccgcccaccttggcttcccaaagtgctgggattacaggcatgtgccactgtgcccagtcgacttgtgttttatcttaacctcaagaccattccttctctagctccggagagcactcctccaccccatttgctcacagtatcctataatctttgtgctctcactgcagttccctttgagctccaagttttccttattcccttccatgcctagctggattgtaaagtttatgattatgaaataaaaactaaataacgacaacaaaaaatatgagttgatttaaataaaaatattaagtaaatattagtataggtggcaagcggatatggcaaaaaaaatcaataaaatttgaatgtgaatggctacaattcaggaaatatggttttaataaaaacagatacaagctgtggcacgtgcttgtagtcccagctgacgcgcaggagggaggagtgcttgagcccggaagttcagggccagcctgggcaacatagtgagacctcgtctcaacaacaaaaatgaaaaaaatcaacaacaacagaaacacagatacatctaaaattgctctggatctttggaacaggtctgccctgaagtggtgttttatgggcctgggcactctggcacaagccctttctgggcacaaggcgaagttgatgagactcatgcttactgccagcttgctccaggccactttcagccaccagcaccatggccttctgcctccttagtctctgtaccttccctgggatttcccccaggcttgactcttctcccaactcctctgtgcatggcctgaacttgcccttgcaacctggcatggatcaagctggcttcctagtttctgccccccagctccattcacccttgggtactggcctcgcttcatcacctctttctgttatctacaccctttgccacatcactttgcagtgccctgtcaatgtgactctgggctggccatgagacctgtgttgaccaacagaaccaggctgaagtgacagtgcaccagttccagaggccctgagtgtctctataccatcttgtgcatttctgccatctctaagataaggacgaaatcagcaggtcctaggatgagggtaaaatatgtggagcagagttgcctcagccaagcctccaacctccagcagcactccagccctcccacaaactcatgaaaaataagacattattgttttttttcagccattgagctttggagtgtccatgtatcggttagctattgctgcgtatttgttgcacagcaatagctaactgatacatggacacaaagcagcagcccctggcccccacccctgttcagtgactgctgtactcacacacagagtagaaaatgcttgcacaagtgggatcaagcattttcccactttcataaccatgccccatggcgttgccactgatattgccctgcctagcactggaaagaggaggtagtgagggcaaatggaacctcttttgctcagtccagggagcaataggcagctgtcacccacaaacgacatggctcccacaatctacttcccagatcatagtcctgcctagctgggactggaggtaggatacaagttagaggtgtattccagccccagggtgctgggtgaggcctggggatgtgtccctgcccacaagatagaactggaatcttcacgtccaccagattctgggcctctctcctatgtcacagatgggaattctttccacattattcccagtgggtcttctcactcttttccaggctccttggaggtcactgccctgatgacaacatggtcttcccttcaaggaagccacgtttctaagagggctctggcatatgcattggtgagttgaagcttgacagtgttatagcttctctgctgttagtgtgaggtttgaggattttactttaaccacatggattagtcagagaa

SEQ ID NO: 21308 - DNA, 2300 bp, Homo sapien
atcaagttctgtgatgctgtcaaggattgggttctgttctcagctctgctgaccacagatcgcacttcattctgagtactggagtgtctaggtggtctggggggctgtctgatacacatggggctacctgctttgcacttcctggccaaggggatagactgattccttatgggagcacttttgaagaatgaggaagaaccttctcaggagaggcgtggtggctcttgcctgtaatcccagcactttaggaggccaaggcgggtggatcacttgaggccaggagtttgagaccagcctggccaacatggtgaaaccctgtttctactaaaaatacaaaaattagccaggtgtggtggcacgcgcctgtagtcccagctactcaggaggctgaggcaggagaatcgcttgaacccaagaggcagagggtgcagtgagccaagatggcaccattgcactccagcctgggcaacagaggaaaaaaaaaagaaccttcccagaagcctccaggaagtctctgtttggacgacatcgcacacccattcttgaaccaactatttagaagggagatgcatcaccccctttgcctggagctagggggtgggtcagcttcctacaggcacaggactatgtggtcgcgggttaagcccctaaacgaggggaagtggggtgggcagcagccgatctccattacaagggacaagagtaggggcagcaaggccagatcaatggttgctgaggtggctggggatggagagaggatggtggtggtagaagagatggtaacaatggtcaggtcctggctgttccagaggtgatgatggttggatatgcagtgaggaaaagacaggaatgaacatttatcttttcccaagttgtccttgctttcttcctttgaagccataaaaaggaaaaaaagggtggatctggacttgggagctgggcaggagtgagggaagagaagcagagcaagcaggcacaccaggctgtgactctgcaggcatctctctgcctagacttgtctgtatgatgtggaacgaacacgacccatctttactgctagcgactgcagcagataaggcaaggccactttcacgcagttaggttaataggaggctgtacaaagggctgtaggaggaagtgggcacaggagttctaaaataattggaacggccaggtgtggtagctcacacctgtaatcctagcacttcagggaatccaagacaggaggttagctaagacaggaggctcgcttaatgtcaagaccagcctgggcaacatagggagaccccgcctctacaaaaaatagaaaaattaacaggatgtgttggtgcgggccagtggtcccagctactcctgaggctgaggtgggaagatcgcttgagtctaggagtttgaggctgcagtgagaaatgatggcactactgcactccagcccgggcgacagaccaagactcagtctcttaaaaaaaaaaaaaaaaaaaagaaaagtgggggcaaagttatccttggaaaatttcttagtccattcatagcagcatattaaaattagtacagtagcttaatttatataagagaaaatacaatgtgtacagtaattaatgaacatgcaaaatataattgtatatttcaactcactaaaaaggcacagaaagagttgaatttgctaaaattaaatgtgcttatgaaacagctctagtacatgaattaagctcctagatacagatgcagcgccaaacgacggggagggagatggggcactcaaggcgacacgcggctcttgttgccgagcgtttcctgggcgtggagcttctatagaatgtaagctttttttttttaaggttccaaagcctatatttagtgctttcatatacgtaatctcaaaaaaaaaaaaagaaagaaatatcggcataaaatgtaagcttccagagggatacaaacgcagcccagcgcggacaccgccagccccagccacgcggttcgcatcaagcgcactcccctgggggcggggcctgcgcgagctgggcgtgtcgggggcggggcctgcgcgcttgcttccggcgtgccgcgagaggcggggcgtgtggggaggcgcggccgccacgcgacgcctggctgggcccgcaccggagaggcgtctcggtacctggcaggcggcctgctactcggagcccgctgcggggcggcggcggcggggacatgcacgtgtgagatgcggcagcgggcggcgcggacgcgaacagcagcggcggcggcgggcgcggcctcctgggcgcggggcgcgcggtgcctgagggcgggcg

SEQ ID NO: 21309 - DNA, 2300 bp, Homo sapien
tcttaaatggaatattcacacaactttttcttacatgcgtgagttatgatgaattttttttaaagtcaacaatagttgattgaaagtaactcctataacatcagtgaacaatcaattctttacacattgacaacccaaggctttcactgatacctttagcttagttgcacagtatttatatgtggatagacttttaaaaatgtacttagcttacctacctgccatttttaatattttccagtcttcttgaaaaaagttattgatttgacctcctacctaaaataatgttctttagatctaaagctggttagacacattatctgactgagtttactgaagcaaaaacattccataaccttaaccttttccctgaccccctgcttttaacaactgccgacatagttttatgctgttatgtgaccatgctcggatgaaatctgtcaaacagctccttgagttattaggctgtctgagtctgacctttctgcaatcaaagatatatgacttaagggctcagatttgccatggcaaccggtccaatttgctgccgtgagaaaaggtctaattgttgcagaaatttaatgatctagagcgacatcagggctgtgagattttatgaactgtttacaccgtaattttcattttgttaatgcagtcttttttttgtaacccattcatggctagagcataagtgattgtgttttatttaaaatagcattgcatagcatgagagccgtatcggagaacatgtgccactctcgagaagcccttcatatgtggtgatatttcacttttaactcccttccttattttcattcttttaaaagatattttaactgcttagacctttgccagacctgcattcatcattggtagagaaagaactatgtacttttctcctccatcctcttctgatctgcttactgattgagtgcctgttgtaaaacagtaggaaatcacagagcatctgggggaggaggtatcatatcactgtctattattctttatcagcgcttggccataaaaattctgtatttggagaaaagtaggatattgttcagcatataattatagttagaaaccccatgtattttttagatggtgccatttactgcttagcagagatttctactctgattacagaaacatgaattacttgttgcatttgtccagtattgggtagagaaatgtttgtgtctattctcaaattaaaatttttcctcaaataggttaatagagggtggtatttaggagatgttgaaaggctgtgtgttgtgttgttatgcagtttaacttggaaatggttgattatataccgtaaaaaatgtgttgtattttcagtcatctaatttaggaatattttctgttcaggaacagaataacttgtcttaatctatgttatctatgcattatccagctggacaaaaattacctgtgcaacaaaactgttatgaaatactgcattttatgtgatgatccaactagatatttatcctatagaaacctggtagcaccaggcagcatctacaatctagttctgtactctgtaatagagagaaaatatgttagacattttattacgaacaaagtaatgtgctatatatatagcacaaaaatacacagtataacttattaaaagtccatttaaaaggaaaatagtgtaagatttttgaaaagcattactgttaaatcatacttgtagtgtgataggactacagttaaaatattcctacaggtcgtatatatgccatgctttacataatggttgtgttcattgtttcagatgtaagaaaaacaatagatgacttaaaaaaagtgatgaaaaattttgaatccagagttgaattcacagaagatttgcagaaaatgagcgatgtgagtatttgtttttagtcttctatatttttagaaaatattttcaaagaaatatgaagctatcttacagccaaggaacaaattaattgaagtttaaaatgctttcagacatcttaggttgaatagttgctctttggataattttagtatgctggagatttgtgttgttaatacgctttttttttgtttaaaaaccaggctgcaggtgatattgttgacatacgagaagaaattaaatgtgacttcgaatttaaaggtaagcagtaagattgttttatgtgtagctgtttagatattttgatttttgttgattttcagtgggctttctgtgagatatttgggatttagaatacacttttaaattcataggatgccaacatttttctactcattgatttttttttatgtgaaacattaatggataa

SEQ ID NO: 21310 - DNA, 2300 bp, Homo sapien
ttccccaactattgtacctgatgtcaataaaggtgcatttagggaaatttgaactaaaaccccagggtgtttttgttctttggggaaccaatgcgccataaacattttgaacttgagccaacaacctcccctgaccatgattgcaaattactgtagaatgtatggattgctggcggaacactatttgaggaaacctgtattttatagaatgtcacttttatgcacaatccaggcaaaacagaggggaaaaaaactaatttaaacagcagacagtgttctcttgaatgaagattatgacaaagaatgttataaaaatcaagctctaaatatggctttttatttaatcattattacatcaatcatcaatatcaatacttaacagcaagctgataatgtagccagtaggtgaaacagctattaaaaagtgtaaaaaaatgattaatcaggtacgggggatattaatgccctccaattattaaatgataagtacgtatttttggaagtgtttgtttttaataatcaactgtaatattagtttgcaaaaacgtaattgcttcttaattttgcattttagcttctttgtgctgggtacaaaggtagtatgtttctgtagttattgtttgcagcactccgtgtaaaaaatcacgttcatttcaagaagctgttatggtattgattgtggtaaagacttccattaactgaccaatctaaatctcataagtgatgtcaggatagttatgcatttgcttggttcaagtattcagccattatgttagaatgcaggcagtgtctgaatatggctgttaaattatttctaaataccgaaccagaacagcttaacagttctgcagtttgagactgacacaaaaatgacaatctgccacctctttgttttttaaatattaacgctgtattgggatagtatttttggagtaaaaacctgtggcacgagaggataagtgacataaacaaaggcagctgggcttcatgaaataatggaacaataaggcctttgcagccgctctcatcactccagtatgttaattagcattctgttgtggccgcaacactgaaaacatgtaatctgtattggtgtacagtacagctgtgaacacacattcttttttgtgagtccctggagttagccttgccattggcatatgcgtttgggccaaaagtcaagccatcaccactaaaatagcacaccatagcagcaaaatgtcatttgtcttttcttgtttttttttttttgttttttttttctctcccctcaatgccacatgctatccagtgatgtaatctagtatcactgcatctgcctccctgctgtatttttgcaggagggtatctggatatctgtaggggaaaggagggggcattgccagccagcaggagatggaaaaggcagcggccccaaaagagtcaaattagaaaataaattatttctttttgcattatatgtttaaatgcatatatagagaatatatatatatatatgcatatatatgtgtgtgtgtatatatataaagagagaatatatatacattgaagaatctatgcatttaatatctgccacctttttgcatagattcttccttaagtgtcatgaaactagaatccgctgcttgttttcgtaaggtaaaagaagggcagttaatttcagcaccaaggcttggaggaaatgagacctaagaaaaaagaatcagagtaaaatttacccttatttatcatttctatttagaactgggttgacagtctttcatgcatgtacttaggatgggattggctcttcccatttcagagctgacaaaactgaggctgaggcatggtccaaagatgggccctaattgcagggcctttctggcctctgtacagagagagtgaaaacaattggtcattttgagggaaaggggttagcaccagtgagcagaggcagttagtagctgggagcagtgactccagccttcagaggcaggactcagaaaggcctctcttgtgtgattttgctgctcacacgtggcctgctgggagccgcccctggtactgccgggacacggccctgggattttgctgaggccagctttggaacaggggaggtgagtctggagaagagagtttccacgttgtcatcataggatctggactcaagtgaccaaaaccttgcttggatttttacctgatgaagtttgtcttgaaaagtgaaaatggttccatttccattttccctgttctcaaggtaattcagctttctttgtgtgtgagtgtgtgagtgtgtgcaagtgtgtgtgcgtgcagtctcc

SEQ ID NO: 21311 - DNA, 2300 bp, Homo sapien
tcacccaggggaggttttccttctagagacatctggcaatctctggaaccattttaggtgatgagagggtgctaccggcatttagtgggtagaggctagaaatacagctaagcacccagcaatggccaggacaacccacacaccaaagagttctctggccccaaatatcaggagtgtccaagttgaggttgagaaccactgtcttgctcaaaagggtcctgtgggggtgggagtcattctgaacaaggccagtgaaattggcctgagtttcttggaggagagctgagatttgacctggagagacagttaagggtcttaaaatgaccactgccccttcctcttgacttggtgatttaccatccagaaatctgcctacgaaaaattggtcagaatggctgataccgaattatgcacagagatgctccaagctacaagagaaacaggaacaaaaataataaagttaaaaacaacctaaatggccaacactataggttggctcaataaattaggatatatttttaagattttaaagatgtctgcaagtaactttaatgacatatacaatgcatgtaattttaaattcagtgaaaaggaatgtcccttccccaatctctctttttgtctcacacacacagaaaaaaggatggagagaaataaacctatgagttaatacctgttagtagatgttgggattagagatactatttgtttttaattttactttaatttttcggtattctctagattctcaaaaatcaacagaaacaattttcttagttgttttcattttttaaagattattttagactgggcacggtggctcacgcctgtaatcccagcactttgggaggccgaggtggttagatcacttgaggtcaggagtttgagactagcctggccatcatggcaaaaccgcgtgtctactaaaaatataaaaattagctgggcatggtggcaggcacctgtaatcccaactactcgggaggctgaggcaggagaaccacttgaacccaggaggcagaggttgcagtgagccaagatagtgccactgcactctagcctaggtgacagagtgaaactgtgggtctcaaaaataaataaataaataaataaaataaaaagataaaatgttggttattttcgaaagatggcacatcagtttagaagccaagagaccaggatactgggcttggctcatcccccagtagatgccatgatgtcagcgacccatagcccttcctcaccttcctcagtagatctgcttttgcacttggtaccaggggatgccaataacctccaccttcctgtctttcagagtggctctgagaagcccaggaaacaccacatgggaaaatgcaaagctgaataaatgaaatggttgaagatcgtacttctggtaggaagaagttgataaattcttcctatggggaggggagggtaaggaaggggaggggagggcagggcaggggacgggaggggaggggaggggagggatctggatctagcctggttttccctttgctcttggcaggtcttggggcacccaggagccaccatggggcattgcactttacagatgaatttccctacctttgcaggaggaaaagcagtggccctctggttacttggttgcctaggatttaaagctgggagtggactccacagtgcgtttttgtttgtggttggaatttttgagttatacactccctgggctgttagctgaaatattagtgcatcctcacaaataaaatcactccaggaaaagcgttgctagaatttccaacaaaggctgtctttgcccttccgcgtacttcctagatgggggttcttaagccactcctcggaatctgaatcctaccaagtgatgcctgccttctgcctgctaccctgggcccctggatctgctgtcctctggcacaggcatcatttgctccctggaagctggggaaccttgcttggcagtcactaggaaactagcttagaaaaacagcctccccggcacctgtgccagcaggcaggaatccacctgctttttccaaaagtgtttgcctgtagggagactgcctgaggcccacgtaaattcagaaatttctggggtttggcttagcaggcccagagggccccggaagacactgagtgatttccctctgtggcgtccgtgagagtcagtgtcactgctggtgagtccatttttcccactcagagagttggggcaccccctaaataattgaagtattagtatcagtttctttccccttctgcaggcactcccagaggtctgccgttttctttgcaagaac

SEQ ID NO: 21312 - DNA, 2300 bp, Homo sapien
cgtctcttggttctgatctctgctttggtttcatggccagctctggccttaccctgttctcacagttagcactcatactggacagagggtggctatggtttgaatgtgttccctctaaaattctgatgtttccaatgtgatagtgttgagaagtggggtcttcatgaggtgattaggccatgagggctcctccctcacaaattgattagggcctttatccaaagggcttgcagagtgggttcactcttccgctcttctgccatgtgaggatgcagtaagatgaccctcagcagatgctggtgccttgatcttggacttcccagtctccagaactgtgagaaataaatttctgttctttataaattacccagtccctcatatactgttatagcagcacaaaacagatgaaggcatgggtttcttattttcaacagtgccaacaaaatccctggttgcactgtcgttgacctgtcccaatgacatatgtatctctgaacccgatcactgtgccttaggggatgaaatgctgtgatgggttgcacgcccacatcaccactctgctgtcgggagaagaggaaggcacgttcctcccaaacacagggactgaaagcaggtaaggagtggggccccccaaaaattgcagcattctctccaaaagaaagtagagtgaatacaggagaggtgaaaaagaaacagcagacacccactggaaatgccttcttgagagggcatgtgatgcacttgccactagattctgaaattggatgtgacccacagtttatctgagaaggcagcggggcatcacgtgtgtggacttcatctggttgctcttgagacagagaaccgactgagaagctgtggtggtccttggatttttaaatctgacatcctggcacaccatcaaaggaaaccaggggaccaccctcaggtggccagtggcccctggtgctaagtaaaatacagggaaaaataacacaaacacgcatctgattgtgccaccatttcatagcagaaagaccattttcacaccctaaaggtagctaggatgtactctcagaataaaggactcctgcacaaagaaggacagttggctaccgtcacatgggttgggatccccatgaagcaggctctgagatggagattattgtgcagaatgtttagacgggaatgttcttgtgatcaacactgtagggaaaggaaggaggcgggctgagctgagggaggagttgggctgcagtgtagtctcaagaaggtctaagccaaagctgtagggagctctagagatggagtggccttcagagttgtcctgagacaagccagggtgtgggttgtcttagttcattgggggtgcaataacgcagtaccataaacttatttcttacagttctgaaggctgaagtccaagaccagggtggcagcatggtcaggtcctggcgagggccattttccggtttgtatactgtccatttctcgttacatcctcatttggtgggaagacagcaaaaaagctctgagggtctcttctaaggacactaatcccattaatgagggctccatgctcatgacctaatcatctcccaaaggccccattttctaataccatctgatatggttttgctgtgtccccacccaaatctcatcttgaattgtagctcccataattcccatgtgttgtgggaggggcccagtgggagataattgaatcatgggggtggtttcccccatactgttttcatggtagtgaagaagtcccaggagatctgacggttttataaggggaaacccctttcatttggctctcattctgtcttgcctgccaccatgtgagacatgcttttccccttccaccatgattgtgaggcctccccagccacatggaactgtgagttcattatatctcgttttctttataaattacccagtctcgggtatgtccttattagtggcatgaaaacagactagtacaccaccacagtgagttagggtttcagcatatgaatttggggagtacagtaacatcgagtctacataacaatgactttctagtggggttggaaagagctaccccatgggtgggacatgtcggggaggttatcttacctctgagaatctgagattcagggtgtgtgactgctgtatgtatcttatcttgaactggattgaaagtatcagaaaacttgcacggccaagttgaagattctcaccaagactcatgtgagacttccctctggatgaccagagagctgaaagatgcaggcttgaccaggtacaaggcccatggggaaggaagggcaaagcag

SEQ ID NO: 21313 - DNA, 2300 bp, Homo sapien
ccagcccaagcccgcaggctgggcgagcggagacttttgatcttaccgtgtgggtgagatcactgtctcccggtctaaaagaaaagaaagcatgctgtgaacttttgaaacaaacttgcaaaaacagtcgtagagaaaaaataaaaaggacacagggcagaaaaagagggagaaagagactaaaaaaagaaaaagataaggggagggggaaggaaggaaggagagaaggaggaagaagtctggggtttgctgctccaggagcgctcaggcagccggtgctggagcgcggggcgcccgccctcgccgggactgtcggcctcggggcctgcgagagcgccagagccccagccggcgcgcccgggcgcagggccgcctcggggatagtgggcccggaggccgcccccgcgctccagcagccgccgcccggcagcgcccggagccggccccggcgcggccgccccattcccggcctgagagctggcccagggagacgcaatcgagcccgcagcgcatcgatgcgccgccgcccgcgccgctcgggctccggctcccgctcagccgccgccgcccgggggtcgcccgcatgagctccggcccacccgcgccctcaccgccgcccgtaagtgagcccgcgtcgccccgccgcccacgccgcccagccagctccttcttgccgcggccagtcggccgggccggcccggagcctcagcgaccccgatcaccaatcaataatcaatccctctagtccagcagccccggcaggccgggcgcgggacacggcgcggcggccccctaggctctcggggggagcccctggcgggggatgggcaggggagcccggtttccttctcccgcccccgtcccgccctaggatcggcccgcgccgtggatggggggcgcggcccggctcccgggggcgaggggcggggtggagggaccctgatcatcccaaagtcaggagaggaaacttgaaggaaccccctcccacaccgacccccgggacgggcccaggaaagtttgtccggggaaaaaaaattgggggaagtggctacggcgggtcctgggggaggagctgggtggcgcggggtctgagggctgcccccacccgccccggcccgcgcccgcctcctccctggagggggcctgcccgtgggctctggcttccccgggggacgccagccccggcccggggaccacgctgggggctccggagtcggcgggtggagaggagtgcgagccgggtggggcagctggggggtggctggggacgaacgctgggtgggaataggggtggggggtaacgagcgccccgggacgggctcggcggggctggcgccgcgcccccgcgtgtgcgcacggggcggaggcggaggggcggcacccctttcgctggcggggcgggggtcccacgcgggcctggggccgggggcgggggcgcggcgcccccgcgggcgggcgattgacacgatcatctccttttcctttaagcttgcctgttgccgacgccgccgctccagccgcgccacgggcagaagactggaccgccgagccccgggccgcggcggcggctgcgcgtccccccggatgccgtgacccccggcctaggggcgggggccggggcagtaccggtccgggccgctcccgcgctcctcctcccaccgctctgcccgccctctccccgccccccagccccgaaccccgcgcacctcgtctggggacggggcgggggggggcagggccgccgctcctccccgccccctcctcctctggcctctggagcgatttgtcaaacttcccattccgccggcagcgcggtcctcctcctcctcctccacctcctcctcctctgcctcctcctcccccccgtgctcctccctccccgagcctccctcgcccgccctccttcttccctccgcacgttcggggttcgcggcggagcgcggcgcgggggggacgcggagagcctgggcgcagcagcatcctgcgggcggccgctctccgggggggaggctgagagcaggcccgcctcgcccccccgcgggcccgccgccccctccctccctgtcctcagcccggcagcggcggcggcggcggcagtggcagtcgccggagaagcatcatgccgaggaggaagcagcaggcgccccggcgcgcagcaggtacgagccgcttccccttccttctgctctcctcctcctcttcctccgctcgccccgcgcctccagcgggcgcgaccccgctcctcgccccgctcttctgcccgcactgagtaactccgggcgccgctctcctgtttgggt

SEQ ID NO: 21314 - DNA, 2300 bp, Homo sapien
tgaatggccaagaatgtacctgaaagcatttgtaaattaggctttagggcacatgtttcttcatatcagattatatcattttttaacaataaaaatattttgtgtgcttgccttgattttgatttttgctaatgaaactgatattctttttgcaattcaggttttagatcagtttctaatcttatttcagagtattccacaaacatgtgtttacagcctggcaacagctatgactgagactaaccgaggaggttatggttactcttctgcctgctccttccctggtttctgtaaatgtttatcttaaccttagactctgcacattagtggttcctgttcatgcttttgagttgacatcagtggattcctcaaaactactaggttggtgcaaaagtaattgcggtttttgcctttgaaagtaattaaaagaaatgtctatatttatcgttaaccttgaatttgcatccaagatttatacttttttcattttcccaatttcttgactgaaatataaaaatctcccaaaatgcagagcaggaattttcacaggaaaacattaagcatgtatttggtcttgtttcttcatcgagtctgttcatctctggcttttaattggtgtgttagactattatatttattataattattaatgtggtatttcagtatttattttctatttctcccatctgttctttgcttcttttcctaccatcttttgaatcaatcgagtattttttagtattccattttatttttaccttaggcttatcaggtatacatttttcttccatttttcagcaattgcttatggcttgccatgtgtacctttacttctttaaaggctgctttgaaatactattatgttacctcaggtttaacataagaaccttaaaatagtatcttccactttctccttcccgtcctcccatccattgtgctattgtgcccagacattttaattctgcagacactttgaactacactactatctatatctatatctttttaaagttatcctatctaaaaaaaaaaaaaaaaattgaaacctatttcatgattactcacttattagccatttctggcagtgtgtttactggagttgctgaatgcgtgaggcattcttcccttaccagtccgaaagttaaaccagttaaactctgccattttgcctcttagtgggcatgcttaagcccgcttgcccaattcttgatcttatcaagaattgacagaatcttatcaagaatcttataagatcccagttcttgagatcttatcaggaagctgctgatcaccagtttcagatgtttctgtccatcaggagactgcctttccctggcacttacccctttttataaatctgtttcaatttggtgtcatttttcctctacccaaaaagctttctttaatatttttgtagcttttacatatgacattgcttctgcttgaaaaatgctcttcccccattacctgcatggtcagttccctcaatcctttatgcattttgctcgaatgttgcagtctatgtggggtcctttaaccacctttcaatactgcaatgctctgtccccatggctctctctgtaaccccgccttactttatttttcttacaacacttaacatctgacctgtttggtagtttggtttttgtctgtctccctgtcattagaatgtaagctccatgaggatggagctttatacatacttttttccacccatgtgcctatacaccccttcctagttatgttaccaactgaatgtacccaagtcacacagcaccaaagtatgtaagcggcggcgaatccatacgggtctgcagcaacctcagttcttgtctcctcagaagaaagaatccaaacgaagagcagagtgagagaccgaggcaagtttagagaaggagtgaaagtttattaaaaacttctcccctgattcttcccttgcggtgggctgtgcccatgtacagtggcccagtagcacttgggaggggctgcatgcgtggtgcgtttactggagttgtacgcatgctcacatgaggcattcttcctttaccagtccaaatgctataccggttaaactccgccattttgcctcttagtgctcatgcttgagcccgcttgcccaactcctgagatgtcatcgggaagctgctgatcagcaattacaggtgtttctgtgtattgggagactgcctttccctgtcattgatcaattatttttttagagagatacttaacaactacctcaccatcacttgatggttgcctgacattcctgattggtgagggagagagggagggagtca

SEQ ID NO: 21315 - DNA, 2300 bp, Homo sapien
aacagtattgcagttggggcattgatctcgggtccattttaaaacacaaacttccttaaaggtgactttgactgaaacgggctcagcagaggacactgcactctgagagagggcaggtaagactcagcggtcgggataaggcagagctgactgaggacaggtctgggcgacagaaaagaaaacagggactggagtggcctggttatatgattctgtgactttttgatgtttcttattttttattataattattattatttatttatttattgagatggagttttgctctcgttgccaaggctgcagtgtaatgacgtgatcttggctcactgcaacctccgcctcccaggttcaagtgattctcctgcctcagcctccccagtaactgagatcacaggtgtgcaccaccacgcccagctaattttttttttgtatttttattagagaccgggtttcaccatgttgctcagcctggtctcgatctcctgacctcaagtaatccacccgtctcagcctcccaaagtgcttgtttcttgttctttaaaagtcaccctttggtggctttttatttaagacaaatattcttatcctttgattctaacctagaaaacgattaatgatagctatcatgcattcagcctttacaacatgtcaagggacagggtgcaatgggcctcattagccttcacaacaactccctgagtccaaccccacacaccccatttacagatggggcacagagacggagcagtgggcagacctgagacgtgcagtggaaccgcctgatgctcttccctgatgtgcttggtggctgttgccgcccacagctttccgtgtgtctctcttgtctgccccaactgcagcaagctttggggaggccatatgtgctcagaggggacatgaaatggcaacacacgtgaagccagcatgggaatgtctgaatttcagggaagaactgctcttcagaaaacagctcttattctctcatcagacaatattcctttgcccgcggagcccagaatatcctcctccacctgaaactatccctcccttgaggatgcagcctgagtttcactcttgcgggacacactgtccctgacatcctctgcctctggctggaggcagcatctcgtctcttacctgataatgtccctacattgcatgcaatgaaagtggttctcagaggcctgcactgcccggggggtctgtgttgtttaccattcaacatccttgagacatgacctaggctgtcctaggtgaacctgagggacaacaagagacacagatttgtggaagggacagctctggacagaccaagagcgtttgtcccaggtgtaggactcactttggcagttcagacacctgcaggtctccaatgcaccccaggagccaatcaaaaacagtggaccaggaagctcaaggccagctgcgatgcctagaccctttggtcgaatatggacccattacccatgagtaaaggaaaagagaagaaaagtcaggatgagaaaatcaggacttctcaggtgcagtcagaggagaagatccaattcttacaggaagacaacagagaatccccaaaggctgccccagatccacagctcatctccccaccagagcacaatagcaggaggccttcccacttgtcttggttcctctcacagacacgaggaaattgcatagaaggtccttccgaggtggttcaggactgattaggagaggagtgttgttcaccattcgacttggttctttttctgagtgatgcacagcattttaattctcaagctaatctttgattaacatctaggaaatttgagccttttaattaaaagaaagggaaagtttaaaaagaaaataggtcaatgggcctttctgaaaggtggccccagtgaggctaaaggcttgctttggaattttcaggttccccagtgttaatagaatttagatcacattgagaatttagatcgcaggaacagaaagcgctgtcctttttcactgacccaatttgagaagtaaaaattgatcagcagaccagctgggcatgcagacatagaccacagcatttgcatggactgttaagagtgttattcacagcttctggcagagagctgggtgcttccctgcatccaagacagcgtgcttgcaatgaaggaacccctgctttcatcacctgtgcatgagagagacctgttacagcccccaggggtggggtgaaaccaggtaggaaaatgcatcagggcagaggggagttgcgagaacatctgtcaaccctgctgcttagtagcactgttccctgaatctgt

SEQ ID NO: 21316 - DNA, 2300 bp, Homo sapien
tgtgtgtgtgtgtgtgtgtgtgtgtgtgtgatttatttttaaattttagattcaggggatgcctgtgcctgtttattacacgagtatattgcatactggtgagaattgggcttctagtgtatccattacccgaacagtgaacattatccctgatgggaaatttttcaacaactgcctcactcgcactctactcccttttgaaatccccagtgtctattatctccattttatgtccgtgtgttcccactgattagctcccacttataagtgagaacacacggtgtttagttctctgttcctgcattaattcacataggataatggcctccagcagcatccatgttgctgcaaaaggcataacttcattcttttatatggctgtgtaatattccatggtgtgtatgtaccacattttctttatccagtcaactgttgatgggcactaaggctgcttccacaactttgttattgtgaatagtgctgtaatgaatatattatataataatatatgtagtgctgtaatgaatgcaagtatacattataatgattaatatatacttgatgaataatataatgatttctttcctttgggtagatatccagtagtgagattgcaggttaaatggtagttctgttatttctttgagaaatctccatactgttttccgtagaggtggaactaatttacattcccaacaacaatatataagcattcccttttgttcacatccatgccaacatctgttagtttttgactttttagtgatagccgttctgactggtgttggatgatatctcattgaggcaactggtattttcaatttgcatttcacttccctgctccttgttctgctgttcctgacggacctccttgcttcttcaagttcacgtcctcagcctcctggctgtgcatgcccaggctcaggtgtgcatgttggggagcagctagaagggctccgcttcctctcagtgaccttaagtccagttgccaagacctcctgggactccacaaatgggttgatgatacaagacatgcttccccctgcccccaaacctactggagaggacaacaaaccccacttgctaaccagtttgcaagaccgagcttgccatctgaagcagaggtcaaggtattcagcactgataaagaaagctggaacagtgaggccatgccctgccctgcctctcctttcctccctggaccactttcatttttactcgccccttggttctgtcaggtaaaaccaaccacagacactgctcaaggaggtcccagaaaacctatggaacattccccaccatcctttgggtacaattcgccttggagccatctctctttgaggactgggcttatttcccccaaacatgtttccactctgtattccagcagccctgatctgtgcaaatggtttgctcacggccatccaagaagcaccatccttttgttaggggaagcacctgatgcccatagaaccgtgtgacttgtccacttgagcttctcaccactcagggtgagagggtggggtggcatttcagaaaaacatcaggaaagggagacttggaatcagagaatggcagtacagaaaggaactaaaacatcaccttctccaattatttatgccacatgtggggaaactgaggcacagggcaaagaagaaagaaacccttgggtttacacatggtaaactcccctgcggcccgtccctgcctcaccgcatggcccggctttgcagtgcattcaggcatgcgggtccatccatgctccagacacgcccagggtaggccccacctgcaggggcactcgctgtctccctcacagctgaccaggctctaccgcagaccttcagctgggcctagatcagaaacctggagccaaacaagctcccatctccgtaacacatgcagttggggggcctgcaatgcttcctccccacacccggcccctaaacttactcttatttccatctcttactgtggtcttgcgtgtcctctttcctaattcttcccctgttaatcaccctcccactccctgccacagagccttctagaaccctggttctatgacattatgatgatgatgacaacgatgacgatagtggcaatcatttattaagcattgccctggcctaagacaccacatgggtcatttcttccaggctccaacttgcttctgctttgccatatggtaacacgccgtattatggaagcaccatcattaccgccatttgcaggggaagcctaaagaggtgaagtatctcgctcaatctcatgcaagaaagccaggattcgagcctgcgagc

SEQ ID NO: 21317 - DNA, 2300 bp, Homo sapien
tgaggcatgaggaagatcttgtgcaaagctctcatctcagttccagtaggcagcaagggctctggaatggttaaccagggggatttgtagacagaaagcctatttcctagagttctctcttctccagtttcttcccctgttgttcagctatgacacttggaaaactgtcctgtttcctccttcccaggcatacttcagctggtttgtttccctgcaaaaggaactactccagcccagacgggggggcacctctcagtgtcggacattgccttcctgtgaatgcagccttgtttaattcactaatcaacacatctggcaatcaccctaaaaaactcagtgccctccagttccatgtttcaagtctttctggaggggaggaggaatactcagatttacacttctgttgctacttacatatcatgtctctcaatacaaagccatcctcttgtggccgcaggtggatgcttggtgtattagtctgttttcacactgctcgtaaagacgtacccgagactgcgcaatttataaggaaaaaaaggtttaatggactcacagttccacatggctggggagacttcacaatcatggtggaaggtgaaaggcacatcttacatggcagcagacaagagagaagagaatgagagccaaacgaaaggggtttcccctcatacaaccatcagatcttgtgagacttattcactaccatgagaacactaaaagggaacccctccatgattcaattatctcccagtgggtccctcccataacatgtgggaattatgggaactacaattcaagatgagatttgggtggggacacagcaggaccaggtcacccaggctgtgtttgtccgacctatcaataataatttaattgtacatttaaaaataactaaaagcgtataattggattgcttgtaacacaaaggataaatacttgaggggatgggttttccattatgtgattattatgcattacatgcctataccaaaatatctcatataccccataaacatatacacctgctgtgtattcacaaaaataaaaagaaaataccaaaaaaaaaaaaaaaagatctaggtgtctggatccaccttctagggtaggtttgcatggatccaaagggtgaaggttgagcccagctgattcatggtacatcagacacatgacatccttcttctatatccatgtccccaactgtagctctgccagggaattccgagaaaccaggatggaggcttttgtgctaagatctgtcttttatccatttaaattacaatactggaataattatgtatgtgtaaaaactgtcaaaagtatacttaaatgatacctttgccgtgtactaaaattacttttcattatgacctatttgtacatcgtttgaactaaatatctcagcctagaaatgtaaacgtgttttgtttttgctctgcaggttaggtcagcagacgtctgaaacaaatacgattgcaagggtgaaagtgacatgatttacttaaatcaggcaatttctccatgaaagcattgaagcctcaactcataaagacactcttcagcagatgagctgtaaggttgtccagcatttgtcatattaggtgatttgaaaggaaagaacaattataaaaatgaatgtaattctctgttgaagaaaaaataatccagtttttgcagcagggggccacagattaaaaacagatttcacagcaattcggctgctataacattatacaattaaaacgtaagaagaaacagctctcgtgccaaagaagacagttgtgggaattagtttgtttggggacggggaggcaggttccccctgcagcatcaaaggttattttgtttcccctaggaacagcactgttgccataaacggtgctggtttgcttccaacccccatcttccccgcttttctgagctgctttcaattagcagggattattaaactggaaacattttaaactgctgccgaagcggctttccggccttatgagctgaggccttatgagccgagctagaggcgtcacaataaagctgattgattagggaggaatgtactgatagcaactaatgcccagtgtctttttctatgcgtttcacagtctactctttccccactgaactgtgtgtcttcatggggagtttgactttgcttctctctctggtgccttctggagcctggaggctctcaacttccatttcaactgcctgacctgggccagccatatctccatgacccatctcccacctggacccattgctagggtgggcggatcccagaggccaggctgttggatttc

SEQ ID NO: 21318 - DNA, 2300 bp, Homo sapien
cagagacttgctcaccctacatatccaccaccatgggtcagctggggactcagctcatcattgtccctctaagatgctggctgacgggatggccgccacctgaaacactgccagtcatcaagccaaagggaaacatactctggagggaactgcactggcaattaaatgctccagtatgaagggaatgccctcactcccacacacgatccattagccaacaccagtactggccacacccccgagccacagggtcaatggaaactaaccttatgccagaagagggacaatgggaactagctggtgaataccagtaatgaccaccacaggaacttcaaacgaagatacactttcgttcgcttgttttaaaagttctttattatccctagattatattttctctattgtgtttctgcactctcccttgatcaaataattctgtcatttcgtctgtctactttcagattcatggacattacacttaagacatgactaacgaaaagcctctcttcagataatgataagttaggattgtttgtgccaatagcccaaggcaaggaatttctcatattacttgtttgttctccctttcaacacttcgtatttctgggttttcttcactgttttttctttccacccttccatgctagtctcctgctcaatctcttaccttttatcgaaaaaaaaattactcaacattttattttttcacagctatttggtctaattggcaaaggattctgtggaatagcagaattctaactttgcagccgggcgcggtggctcacgccggtaaccccagcactttgggaggctgaggcgggcggatcatgatgtcaagagatcgagaccatcctggccaacatggtgaaaccccgtctctactaaaaatacaaaaaaattagctgggcatggtggcacgccctgtagtgccagctactcgggaggctgaggcaggagaatcacttgaacctgggaggtggaggttgcagtgagccgagattgcgcccctgcactccagcctggggagagagtgagactctgactcaaaaaaataaaataaaaataaaaataaaaattctaactttgctggtttcctaacccccaaattcagatgaatttgaattctgaaatacagtaacaggaattatcagcctgtctgattctaaattttgttggatcttcctcccaggaccgtggacagcccagccagctgtaaaggcctctaaaaagatctggaacagatccccaagaggtatctcaccaaatgagtccattccactacaatggccagaatcttcagttttacacccttgctcatgcccaccgctcacccggagtccagacccaagcaccatgctgcgtagttcctaatacggcaaaactatccagcatttttggtgaaattggctggaatgcttcacttagtccgtttttcactgttagcaggagaaccaccctagtatctttcatagaacagatccgaatgacaaacaccatcgtgccctcggagggctgagcttgtgttactgggtctggtcctacaaaccctgaaaatcctgaatctctcaagcaaagagattccccagggccagctctggcccttaacaggcaccccttaacgccaagctgcgaatctggctaggacctctatattttagccaagaacaccttgaaatgtacagtcctaccaaaggaactaatacaaatccagaagcacaaggctaaagaaaaaaaaaaaaaaaaccccaatgcccattgttgaaagccaattgcggggtgagtggggtgataaggctagcccacagcggatttaggcgacgtggggagatgccaaagtgaatacacggtgacttctaaatctagacgtctggaaggggccatgagagccagacaactgggcccgaaccccgcccgggagccagggtttgcaaggggctaaaccggctggggagcctccctctcgcgggtccagcctcggcggcccgggacgccggtaggcggggcctgagcctcgccccgcccccgctgcccgccattcgggtcacctgacccacccgcggctcacgtgatccgtccccagcgccgccattttggagctccggatgaggagggggaaaccgggggaaaagagggaaaagagccgggagagaggtgggcaaggacgagggcgagggcacggccgggtcctggctggccaaacgaggctcgcggaagcagcagccgccgcctgaccgcaggtaccgcgccccggggccgcccctccgcccgctgttagcgccgccgccggccatgtgcatcct

SEQ ID NO: 21319 - DNA, 2300 bp, Homo sapien
caccgtcattgaaaaattgagagaaaggacagaccaaaacgcttcagacgatgacattttgaaagagttgcaggacaacgcccagtgccaacccaacagcgatacaagtttgtccggaaacaatgtggtggaatacatcccgaatgctgaacgaccctaccgttgccgcctgtgtcactacacaagtggcaacaagggctacatcaagcagcacttacgagtccatcgacagagacagccttatcagtgtcctatctgcgagcacatagcggacaacagcaaagatttggagagtcacatgatccaccactgtaagacaagaatataccagtgcaagcagtgtgaagaatccttccattataaggtaagcattggttcaggaagtctttcagaggaccttcgcatcttagagtgagaagggaactttgtagatctaatccaatcacctcattttatagataaggaaactgggtcccagaaaagtttgataagttgcccaaggggatcccaacttaccagtattaaagttgggactgttcagaatttctgctgtagaatccttttccctgcctgctgcctccttgacagcctctgtgttttagtgtgtatagtttaaagtgttgattttctgttgcaagagaattgtagggagtgtatagtggattgacatacgtttgacttaacgtattgacatacgtttgacttaaacaaatttaaccgtacatcatcacaacaaaaaaatacatatttttcatcttatatggccccagaatgccaggcattcagttcagcttctacataaccaacagtgatgtgtatcattgcagaaggaaaaatgggctatggcggacctattaaaaggtactgtcatggaaatagagccatgtgtgtcatgttttatgggcagggtaaagaactttcaagagttattttgactgtctgatttttatcttaagtgctgaccttatcaaaaccaatatcctgtatgaagtgctattcttttataaaggaaacgttgaatcattggtttagaacttttcttcagtgggccaggtgactccttgaaaatgtattacaaatgttatcctaagggctaactaggaggtagactttttccctcagattaccgagagctggggtctagctgtggtaaaaaggtcacaggagggaggccgaggcgggcagatcatgaggtcaggagattgagaccatcctggctaacactgtgaaaccctgtctgctaaaaatacaaaaacttagctgggtatggtggtgggcacctgtagtcccagctactcgggaggctaaggaaggagaatggcctgaacctgggaggcggagcttgcagtgagccaagatcatgccgctgcactccagcctgggcaacagagcgagactccatctcaaaaaaaaaggtaacaggaataagaaagcccttgagtctgaggttcactgcttctcagattacactcatgaaattccaagtaggatgtccacataggctgcaaagacaagttcctgaagtctccaggagtttcttttgctactgagctcttgattcatgggaatggaagtagaggagacaggatgtccttggaggagcacttccagttagatctcttacacatttagatatttcaatgaaaaattaggagtctggtgattactgattggatttttttttgtgaagttgcattattctgaacactctgctcgttcctcctctgggcctaccagtgtttcagtaaatacggacacgccctgtgtaatcacctaagaaaatggtgacttcctttcagagaatatgaagaggaactgtccgttgaatgtgattatgatttgctaatgtacttctttctataaattgtcaaatgtgtcaaatgatcctttagcagacttgattttaaaatatggtaattcgttgtactaggccatgaaagcaatgaacctgttcttctacagcctcctaagagttggacatgtatatttattgaaaattacatatttctttccactttttagagtcaattgaggaaccatgagagagaacagcacagtcttccagataccttgtcaatagcaacttctaatgagccaagaatttccagtgatacagctgatggaaaatgtgtccaggaaggtatctatgtattttgttatgcaggctgcagtgacttgcacatgacataaaagtgcccttagttgtcatggttggttattttcagggcaaaagcctatattctcctccatttttgtaccatggatgtgagtgaatctgatctctgtttctgaggaaatgc

SEQ ID NO: 21320 - DNA, 2300 bp, Homo sapien
tatataccaccactgcagtcacagtccattacaggagcccattccttttatagtacctccctggctccgggctcatatggccagaagtgtgagcaaggacctacactcattatccatcacctccatggttactttatcagaaccaaagactcattcttaattggcttattctccccaagacttactctcagcagtaggtcctacttaggaaaagtctcaaagcttcatcttgcttaggaatgtcttttcatagtattaaaaaaagcagctactgctgaattctactttctttttaactaagcgatgatatttcacaatggtcacatttcccccagagtgaaacaacttgagagaaaaaaaaaaacctataaaataagagggaaatcctatttaaggggaactcaattcacctatgtattcatgaaacagacacatgcacataaaggcatcttaacgtgaaaaataaacatacagtccttgccctcaagccaggcgacagaaaagctaccaacaaccaggctgaaacaagacaaatgccatctgaaaaaacagctgacatttgtttctatcaaagccatccagcagatacctcaacatctttccacagaacgtgtgctctttactaacaaccgacacacaaaggaggacgatctccaacagaggtgactaggaaaggcttcctggatggcgtaatttagtgttggagtcagaccaatgagccgccttttcacgggtggaggtcccagatggccatccctttaacaaaaatcaattaacatgtaaattatgtactgacaaatacaacgtttgatgggcccgctgcagtggctaaagcctgtaatcccaacattttgagaagctgaggcaggaggcctgcttgaactcaggagttttagaccagactggtcaacacaacgagaccccatcactataaaaattaaaatgaatctcagctactcaggaggctgaggaagcagggtcacttgggcacaggggactaaggttgcagtgagctacgatcacaccactgcactccagcctggacgacaaagcaagacccccatctctacgaaaaatttaaaaattagctgggcatagtagtgcgagcctgtggtcccagctactccggaggctgaggcgggaggatcgcttgcgcccaggaggccgaggttgcagtgagccgtgatagcaccactgcactccagcctgggcgacagactgagagcctcacctgtaaaaaataattttaaaaaaggttccacctagtgttttccgtggtgtgactaagaaaagtatctagaaataaagcacagtcagtacctgctctcaaaaaacggctgccaatctagtttggagacagaaaaatatacccgactgagaacacagaggagcctgttttcggaagaggggcgtctttggagacgcaaaatcctctccgcgggacgctgacgggcagtcggtaaaggacttccaagcactggtcagtgacaatcgggcgctggggctttgccaaggcccggaggcggcgcgccaaaccgggcaatgcgggaagcggggcaggcccgagtggccctactgctgccgtccctactgatccctgcgcatccgccacagagcagggaacggcagaaaggaggaaggagggggagttccgtaaatcaggccctcaggggctcccaggcccgcacccctctcaagccccggggaccaccgcggagccgctgctccgggccgtgcggctcgaggcgaacctgcctcagagccgccgggccctcctatcccgagccgtatctctagctccggcctgaggtggccggcgactgcgtgcgcaaacacaagatccgcaccccactccccgccactgcagctccgcggccgcgctcagagtctccggaacagaccggactcaatgcggaccaggcaagcggaagtgtgccgcttccttccggccagcgcagcacgagacgaggcggggaaccgcgggaggaggcggggcctagtgttgacgaacagctcccggggcctatgggcgcgggggcagccgcccggcctctccggcgcgccccctccccggggctgttgacgccccccagcccctcatttccacaaagctccgcggcggttctgccctccttgtacccgcggcgcgctgcggcccgtggcgcggccccgttcccgcctagccccgtcggcctccttcccctcccggagccgcgcgtgaggacggctgaggccgcaggtctgtggcggcgcgccgggacgcgcgggcgagggtctaccgagagggcgggcgggcgccg

SEQ ID NO: 21321 - DNA, 2300 bp, Homo sapien
aaaaaaaaaacctataaaataagagggaaatcctatttaaggggaactcaattcacctatgtattcatgaaacagacacatgcacataaaggcatcttaacgtgaaaaataaacatacagtccttgccctcaagccaggcgacagaaaagctaccaacaaccaggctgaaacaagacaaatgccatctgaaaaaacagctgacatttgtttctatcaaagccatccagcagatacctcaacatctttccacagaacgtgtgctctttactaacaaccgacacacaaaggaggacgatctccaacagaggtgactaggaaaggcttcctggatggcgtaatttagtgttggagtcagaccaatgagccgccttttcacgggtggaggtcccagatggccatccctttaacaaaaatcaattaacatgtaaattatgtactgacaaatacaacgtttgatgggcccgctgcagtggctaaagcctgtaatcccaacattttgagaagctgaggcaggaggcctgcttgaactcaggagttttagaccagactggtcaacacaacgagaccccatcactataaaaattaaaatgaatctcagctactcaggaggctgaggaagcagggtcacttgggcacaggggactaaggttgcagtgagctacgatcacaccactgcactccagcctggacgacaaagcaagacccccatctctacgaaaaatttaaaaattagctgggcatagtagtgcgagcctgtggtcccagctactccggaggctgaggcgggaggatcgcttgcgcccaggaggccgaggttgcagtgagccgtgatagcaccactgcactccagcctgggcgacagactgagagcctcacctgtaaaaaataattttaaaaaaggttccacctagtgttttccgtggtgtgactaagaaaagtatctagaaataaagcacagtcagtacctgctctcaaaaaacggctgccaatctagtttggagacagaaaaatatacccgactgagaacacagaggagcctgttttcggaagaggggcgtctttggagacgcaaaatcctctccgcgggacgctgacgggcagtcggtaaaggacttccaagcactggtcagtgacaatcgggcgctggggctttgccaaggcccggaggcggcgcgccaaaccgggcaatgcgggaagcggggcaggcccgagtggccctactgctgccgtccctactgatccctgcgcatccgccacagagcagggaacggcagaaaggaggaaggagggggagttccgtaaatcaggccctcaggggctcccaggcccgcacccctctcaagccccggggaccaccgcggagccgctgctccgggccgtgcggctcgaggcgaacctgcctcagagccgccgggccctcctatcccgagccgtatctctagctccggcctgaggtggccggcgactgcgtgcgcaaacacaagatccgcaccccactccccgccactgcagctccgcggccgcgctcagagtctccggaacagaccggactcaatgcggaccaggcaagcggaagtgtgccgcttccttccggccagcgcagcacgagacgaggcggggaaccgcgggaggaggcggggcctagtgttgacgaacagctcccggggcctatgggcgcgggggcagccgcccggcctctccggcgcgccccctccccggggctgttgacgccccccagcccctcatttccacaaagctccgcggcggttctgccctccttgtacccgcggcgcgctgcggcccgtggcgcggccccgttcccgcctagccccgtcggcctccttcccctcccggagccgcgcgtgaggacggctgaggccgcaggtctgtggcggcgcgccgggacgcgcgggcgagggtctaccgagagggcgggcgggcgccggcggaaccctcggctacagccccgagcccctggggccgcccctccccgccgcgtggcgcagtcggggggcgcggccgcggcgtcggggcgtcgggaggggcggagcgcgggagtgtctgccgggacgcgggccgggctgggctccggaaggaccaagtttgcggagcggcttctgctcgtcggccgtgcggcgaggcagggcctgggctgcgaccccggcggccgctcgcggtcttgggagagctggggcgcgtgcctgaacttcccggctgcccctgtccttggagacctacctgatggggacgccaggtgtgcaggggcgtggcgcgtaggtaagcggacccggtgcctgcc

SEQ ID NO: 21322 - DNA, 2300 bp, Homo sapien
ttccagaacatcttgggacattccagttccggctgatcttctccctccctgagccatagcagttaccacgcaatgcgtcacgtaactacacagttgtatattattttctacttccataggcggtagtaggtcttcagtacctcccacagaagtggccacgtgggagatactccatagtaaatgtgttgacaaccggattttgaagaattaaaatattgttttgtctcaggtacctgaattttaacaccagtgttctataaaacaattcacactggcagcttcaggaatacgcctcagtggtgatgactgcgggggtgtgccaatcagggcagctgctatcccagggagcgtcggtgggagtaatgggtgggggggagcaggagcctggtttggcagcagcaagtgggaggcgggggagtggtggcagtgagtaagcgggttccagtcctccagaacatcttgcttcactcctctgaataatgaacagcctcttactaattatttcttaaatgtgactagtagcctgacatgattgtttccacagtttattaattcctaagggtaacttgctctacagaacaaaccaactaacattatacaattcatgtattcattcataccaaaaaaaaaaaaaaaagcaggaagccagatttaagtactgtgctttcaagcactggaaatggagaatctggaacagagagggagaagaggagtgtttaacaaagtcctacagccacagatgggcttatcccccatgtgacctcatcctagagtcctccctaagtgtgagaggacttttttaaacaattcatatattctaatatgttaaggcagaaaaccaacacatatttaagtaccaattatgtgtcaggcactgcaacagtcccatgaactaagaaaaaaagttcctccatcagatcaaaaggaatgccattgtaaacaactgaaaagggaccagaagcgattctttattaataaggacgactagcgctagccgggcgaggcggctcatgtaatcccagcgctttgggaggttgaggcaggaggatgacttcagaccatgagtttgagaccagcctggggaacagagcgagaccctatctatacaataaaatagccaggctcggtggtgcatgcctgtggtcccagctactccagaggctgaggtgggagaatcgcttgagcccaagagttcgaggttgcagtgagccgtgataacgccactgcactccagcctgggcgagacagcgagacccctgtctctaaaaaataaaaataaaaaagcctagcgctctagtgagcatcccctggacgaggcaggcaccgggtccgcttacctacgcgccacgcccctgcacacctggcgtccccatcaggtaggtctccaaggacaggggcagccgggaagttcaggcacgcgccccagctctcccaagaccgcgagcggccgccggggtcgcagcccaggccctgcctcgccgcacggccgacgagcagaagccgctccgcaaacttggtccttccggagcccagcccggcccgcgtcccggcagacactcccgcgctccgcccctcccgacgccccgacgccgcggccgcgccccccgactgcgccacgcggcggggaggggcggccccaggggctcggggctgtagccgagggttccgccggcgcccgcccgccctctcggtagaccctcgcccgcgcgtcccggcgcgccgccacagacctgcggcctcagccgtcctcacgcgcggctccgggaggggaaggaggccgacggggctaggcgggaacggggccgcgccacgggccgcagcgcgccgcgggtacaaggagggcagaaccgccgcggagctttgtggaaatgaggggctggggggcgtcaacagccccggggagggggcgcgccggagaggccgggcggctgcccccgcgcccataggccccgggagctgttcgtcaacactaggccccgcctcctcccgcggttccccgcctcgtctcgtgctgcgctggccggaaggaagcggcacacttccgcttgcctggtccgcattgagtccggtctgttccggagactctgagcgcggccgcggagctgcagtggcggggagtggggtgcggatcttgtgtttgcgcacgcagtcgccggccacctcaggccggagctagagatacggctcgggataggagggcccggcggctctgaggcaggttcgcctcgagccgcacggcccggagcagcggctccgcggtggtccccggggcttgagaggggtgcgggcctgggagcccc

SEQ ID NO: 21323 - DNA, 2300 bp, Homo sapien
ctactgtcatgttttaaatggcactgaggagggttagggctcacctgacaaacatgttttattgttcccttttacagaaatatttagagccagtttatttttatatttacaccttatttgggctccaggcgatctatgtcacagctctctacataaccagctggctactcagtggtacatggctgtcaggactgttggcagctttctggtatgtcacaaataggtgagttggagtcagtatgcttcttttttttccaaaatgtaagtaaaaatgaagtcacttcatttccagctcagagaaatttcttctgccacatttgtttggttgggagcagtttctctttggtttgcctggtggtttactcaatttttcttatttagttagggagaaagtgctacttacatgtaattccagctgaggaacagagagcattgaattgcatatcaagaaaatcattcataataatcccaaacctattatctgtttgctgggtgatcaagatttctccagccgcatatctcatctcttaaagggtttttttaaattggcaaataataattatacatattcatgggctacatagtgatatttcaatacatatagaatgtatagtgatcagatcaaggtaattaacgtatcagtcattaaaaagttttttgggtttttttcttgctgttttttaaagccaatgaagacttttaaaatttttatttatttaggggttgtttttgttttttgtagagacaggatctccctatgttgcccaggctggtcttgaactcctggcttcaagcagtcctcccaccttggcctcccaaagtatcaagattacaggcatgagctactgtgccttgcctaaaaagttttaattatatcttcactatcaaccttaatagggttgtgtatggctctcagttagtagagcttaaagataaaatgcaagggcgtttttgccttatttaatatctactattataagcagtagagccttatgaaatcacattttaaaaaaatgtattcaagatcattaaattattgcctgtcctataatggcaataccagtattcaataggagtcttaaaacttgaacatgagttctaatacaggttttattttgtaagtctaagcaaattacgtgttatgacagtcctgttgggggtttactgtatgccaagcactttacaatatgtgttatatgggttcttagaagaaccctatagagtagatattattattatccccattttagaaatgataaaattgaggctttaaaggttacattttgtatatagatacagatattacagacatctatatatatttcttttatatagagatatatgtagatatagatacattgtttgatacattgtttcatatatatctctatcttttatagagagatatatgtagatataggtaccttgtttgagatgtagatacacacacgtatattatgtgttacataagtgtatcatttattgaatgcctagtatgtgtggggatggtgtacaaagatgaaaaattttacccatacttgccctgttgggattcacattctagagaggcaggaagtttttttaaaaaatactgtcaatgacatatttaagactcaagtataaaaaacaccaaagaaatacagagagagggaaaatgtgtattgcctcttgacactaataaagtgagggagaaatgaaagtaagggtttggcatgatacatttgtgagtttaggagtaaggctaacctgggcttgaaccctaggtgctaagggcatacccatggacagagcacttaaatgttctctatgccaattttatgttacagggatgatgatgatgatgatgatgatgatgataaggacaattattgagaaccagtggccagaatcttaagtatacttgtccttaatgtaatatatctttcgttgaggaagtcttcgaggaaattattgtaaaaactatcactttggccatttgtgttttcttttgtgcagaatagataccacaagagttgagtttaccatcccactgagggagaactgggcgctgccattctttgcaattcagatagcagcaattacatatttcctgagaccaaacttacagcctctttctgaagtaagtgtttataaaatttcatatattttaatcccccaattttatatatgaagcttcaaaaaatgtgatgtgcttagtatcccaatgcatgtgaatagttcttattccatgaccaatttttaaacttgagttaaattaagttttcttttcgtgagcttttttctactttgcaaagaaaatg

SEQ ID NO: 21324 - DNA, 2300 bp, Homo sapien
aaaccagactcatcatgttctctctgcatcctaaatctgtctagttcagaggaccaaagacagccactttttggcatgggtgtgtcaagttatcgtatcgttgattgctgtggaatggctcatgccagttgagagtattcaaaggaaagaagcctggcttggaaaaatggtggcactttaaaaaactaatatttgttcatacttgtttcctttagcaattacactctaggtaagggtagcacagtacacaaggcccagagtaagtgtttagtaagtgtcagttgaattaaactgaatttcagtaaaacctttcactaaggaattctgtgcaccttcacgttttcattgaaaccctcttattcctctgaccatgtgggacagaatgtgagagagtccctgtaaattgttgatacggggaacagagctaacatctatttgttcttgttcctgggtctgtcagaatgacaagctctcaagtgcagccaagctcatgtgaaacttttttcctgctggaatctgcattctagactctggcatgggagaggggatgcatattatgtgtcattatgtatgctcattgtcattccagccactttttttcctcacttaagaacgcttattggaatgcaagtgaatgagagtgtcattgttagaaagaaaatcttgaatttttcaaaagtaaactatttgtaaatgtcacaacttgaattgtgggatgtcttgcttgtagacatccaaggcctctgttggatggcattcacgctggagtcttagcgctgagttggaataaataaaacatcctggtgggatgtatgaatgtgatgaggcttctcttagaaaccgcagcaccagagctagttgcgtgccctgctccaaaaccatggagaacagcctgccatggctttttctgcagaggatgttgaattttaatgattttaaataaactcctcataaccatcttcctcattttagttcagtccagcaggcacagactcctctcaatgcaagaaggataaacgcagcccgcagtgtcctcagtgggcctctgtgggaaattctgcactcaggagaatccccagaagagagctcttagggcctcctgagaaattaactccttgaccgcttacaagtgactctcaggtttccaaaaaaaaaaaaaaaaaaaagaggaaaggaattaaatcagctactaagattccttttttccagggaggaaaaaggaaaaatgcttttcctatattctgggagtcttttcttggtccctagtccctgcccctcacacccctggaagacagaaaatcgtagcgtggtgggaactggaaagtgagtttgtgccttagtattagggtgccccgtgttccttaaactgcatatagtttctcataatcaggaccaaaggtatatgtaaaataattgcgttttcacatcagaagtatttgtgtatcccccatattaagtaataagatattggctatttcagaatcttgtttccatgttttgttgttgttgttgttgttaattctgtttttatttatggtggtatctgtgatttttttccttattgcttttttaagcaaaaacccttggaactgactcatgatcacctgcagtttctggcttgatgatttgttacatgttgctctaggtagctcttttgttaagttcaatacgcaaagcagtggcagtcttttaggttatttttgttagactctgcccctctggaacaatagcaggagaggattgtgggtcttggcctagaagcctggactcaagagctacactgcctgccttctaagacaattccttataaaagtaaacctagcaaaacagtaagaagtttccccaccgttattctggtgaacagtcaaaatcatacaaaacattgttgtaaaaaacatggggctggtgcaaaagtaactgaggtttttgccattgaaagtaatggcaaaaaccgcaattacttttgcactcaatagtttgagtacaaatcaaaaccgaagcaaactcccgttttttttccctgactcgtaacacttggtaacatagctggattcttctgaaaaagtttgatattgtcttctttgttgtctttaaggatctcttaacagtggggttaattcagactctaaaatctttcagctctaacactccaagaaaggctgtgtttgcgggaagcatgcagttgctggccggagtcaagctgtgcacgggaaggaccctaaccaaccacccgcactatgaagacagcagcctgagagagcggaccagagcggtgaggctccccagtgcctcccctcgct

SEQ ID NO: 21325 - DNA, 2300 bp, Homo sapien
ccgttaggatggttactatcaaaaacaatcaaaaaacaaacaaacaaaaaaacagaacacaacaaatattggtgaggagacggtgaaattggaaccttcattcactgttggttggaatgtaaaatagtgcagttgctgtggaaaatggtatggccattcctcaacacagaattatcacattatccaacaatttctcttctgggtatatatccaaaagtgaaagcacagacctgaacagatatttctacacccatgttcatagctgcattattaataatagccaaaaggtggatgcaacctaagtgtccattgtcagatgaatggataaacaaaatgtgctaggtatatccatacaatggaatatattcagtctaaagagggaaagaaattctgccacatgctacaacatgaatgaacctttaagacatatgctaggtggagtaagccagtcacaaaaggacaaatattgtatgattccacatatacaagatacccagaataggcaaattcatagaaactagaatgagaatgggtggagactgattattattctcagacccctcccacccccacccattcccattagaggcccctcacaccaacctaaatctttactgggtagagttccagttcaggatgataaaaaaaaaaagttgtagagattgatggtggacaaggtggttcatgcctgtaatcccagcactttgggagaccaaggcaggtggatcactttaggtcagaagttcgagaccagcttgaccaacatggtgaaaccccatctctactaaaaaatacaaaattagccgggcacagtggtgcacgcctgtggtcccagctacttgggagactgatgcaggagaatcgcttgaacccgggaggtggaggttgcagtgagctgagattgagtgacaactgcacgataatgcatttcataccactgaaaagtacacctaaaaatggtgaaaatggtaaattttgtattgtgtatattttgccacaattaaaacacacaggccaggtgtggtggctcatgcctgtaatgttagcagtttgggaggctgaggcaaaaggattgcttgagctcaggagatagaggccagcctaggcaacatagcgagaccccatctgtatttttttaatgtaaaaaataaaataacacacacacagacaaacaaacagaatctgtatgagtcacacgtttaggtagctgaatatcctctctgcccccaattcccccaagtcaaaggcagaagggatttgttccaccaaagagtttacaccagccacagctgcccactgcagtatcctcccaggaaaagcccttttgtgcgtggaggaggcagatggcgaggaggcagatgtgcactttttttttttttttttttttttttagagacagggtctggctgtgtctcccaggctggagtgcagtggcgagatcaaggctcactgcagcctcgaacttccgggctccagcgatcctcctgacacagcctcctgagtagctgggactacaggtgcacatcaccgcgcccaactagttttttaaaattttagtagagataggctcttgccatattgcccaggctggtctctaactcctgacctcaaatgaccctaccgcctcccgaagcgtcgggaccacaggcggcgagccaccggccggcctctgtgtgcaccgaggagccgggcagccaccgccacgatccagctttaggacatttccatcaccccactcagccttcctgcgcccctggttcctcatctataaatagagataatatacgcctaaccctctaggtcaccagcacattgcacccataattattatacttgttgatgccacactttcaggttttaacctttccaaagcgcagccccgccccagcgcagcccaagtccctgcacgcagaggcgccgatcacgggtgggaggtggatcccggaggccccgccccaggccccgcccctccgtgcgcccaagctcgaccgcctgaaatcggggaatcgggcctctgccggcgccctggcagcggcgcggggcgtggctccgggctggattggtggcgcctgggccccgcgagcgcctgcgcagtggtcaaggccgcgctcgcgccgaggggctgcgagagtgaccgcggctgctccagcgctgacgccgagccatggcggacgaggagcttgaggcgctgaggagacagaggctggccgagctgcaggccaaacacggggtgagcgcatcagcccccgccaggcttggccctcgcggggcgccgccctcgcccggagtgtagggcgcgc

SEQ ID NO: 21326 - DNA, 2300 bp, Homo sapien
ttatataatttatatttacataaagcatatgtatttaaagtatacaatttggcaagttttacagatatataaacctgtgaaaccatcaccaccatcaagatacacaacgtttccctcacttgcaagagtttcctgtgagattttgccttcccccccactatgacccccccattcccccatcgcctctcccaggcaacccgtgacctgcttttcatcatcatggattagttaacactttcgagaatcttttgtaagtggaattctaacgcatgtcccttttcatgtctgccttctttgactcaggatatttttgagacccatgttggatcaggagttcattgctggatagtagttgattgggtggacacaccagaatttgttgtttcattcacctgttaatggacatctgagtagttttcctgcttctggatttgtaaataaagccattgtgaacatttgtgtacaggcctttgtgtggatatatacgttggtgggtaaacacctaggagttacaggcctttgtgtggatatatacgttgttgggtaaacacctaggagtataattgctggattatatagtaaggatatgtttaaccttaaaagaaactgccagttttccaaagtggttggagtagtttctgttccctccagcagggtttgagcattccagttgctccacatccctgccaacatttggtattttgacttttttttttttttttggagatggagtctcgctctgttgcccagcctagccaacgtggcaaaaccctgtctctactacaaatacaaaaatcagccaggtgtggtggcacacgcctgtaatcccagctacttgggaggctgaggcaggagaattcgcttgaaccggagaggcagagattgcagtgagccaggctggatggagtgcagtggtgtgatcttggctcactgcaaccttcgcctcctgggtttgagcgattctacagcccaatgcatgcctgtaatgtagctgggattacaggcaggtgccgccacacctgggtaatttttgtatttttggtagagacggggtttcaccatgttggccaggatggtctagaactcctgacctcaggtgatctgcccacctcggactctcaaagtgttgggattacaggcatgagccactgtgcccagccttgagtttttaactttagccattctgataaatatgcagggtatttcatttagtgtgtgtatgtatgtgcacatgtgtgttttccagcttcttttttatttttgagatataatttacatataataaaattcagcctttaatttagcatacagtttttttttttaaagaggtaacatttttaatcatcaaaaagtaaaattattctcacctaaacccaagaatcactgtttcttatagcggtggtttaaacagaggtgcaaacagcaagtgaatctcgtcgcctttgcggggctgtggccatgcccctcaaaggaaatttggaggctctacagccctggtgaaaaaaaaaaaagtgaaattagccaggtacagtggcatacatctgcagtctcagcactttgggaggctgaggtgggaggaccacatgaacctgggagttcaagaccagcctgggccagctggtgagaccccatctctacaaaaaaaaaaaaaaaaaaaaattagctgggcacaatggcttgcacctgtggacctagctacttgggaggctgaggcgggaggatcacttgagcctaggaggtcgaggctgtagtgagccatgatggtggtgccactgcactccagcctgggcaacagagtgagaccctgtctcaaaaaaaaaaaaaggaagttgttttttggcatgccacatacttctaaacaaattggaatccatcctggatcccgccatgatcccgcattgtgtgtgggagctgtggggggcacatggtgccaatcactccagcccagtttcttcaatactgatgacgtttgtgtttccatcttctgcgcttcccagaggctggcgaaggttcctgccagtgggcttggtgtgaacgtgaccagccaggacggctcctccccgctgcatgtcgccgccctgcacggccgggcggacctcatccccctcctgctgaagcacggggccaacgcaggtgccaggaacgcagaccaagccgtcccgctccacctggcctgccagcagggccactttcaggttcgggctgtgtgttgggggtggtggagcagggtgtctgctttgggctaggaccttgtgcttggtaggaacgctgcaggggtttggtggctaccctggaggaca

SEQ ID NO: 21327 - DNA, 2300 bp, Homo sapien
tcctgctcccatcctgcatcccctccttccaaggcctacgggctgtgcctcctggatctgccccctggatttcactcacgcctgtccaccagcaacacaacaaagcgatctttccagcgccgagctctgcaggattcctcaaaggattcccctgcactccccaccaggtgagccctcaacttctctgctaggtgctcaggacctggcacatctggcctctggccacctttgcagcttcctcaccctctgctgtctccaaagcttcccccgaagggaaagagtattttccctctttccacccattttgtcctgaaaactactatccccctgggaacgaccctatgtagcgtgtgggtggctgagaaccccccttccacacaatggtcaaggccaggagtacccaagccctggcagcaaacacccagcctactgctcacccagttaaaggacggacccctgggtgacagcaggccccggggctcagtacaccggacccttaggccacctcaacaccagtcctcatgccaggctgatctcgaaacgtaacagctactgctcagcaaaacgtggtggctagtgcctgtaatcccaacaccttgggaggccaagacgagagcatggcttgagtccaggagttcaagaccagcctaggcaacctgctagactccatctctacaaaaaaaaaaaaaaaaaattaaaaattagccgtgcatagtggcatgcgcctgtagtcccagctactacagaggctgaggtgaaaggattgcttgagtccaggagtttgaggctgcaatgagctatgatggcatcactgcactccagactagccaacagagccagaccctgtctcaaaaagaaaaaaacgaaaagaaagaaaagaaaaaaaatatccactgctctactcttcggccagtgggaagagtgcattttttaatcaaaataggggcctctatccatgaaacccatcaacttgtaaaatctgagctctctgcagcctcacagtccctccagcactgccagcagccctcgttccctgcatgctctaaatcctcagcgaagacccgtcccttgctccctcgcccagcacaggccgcgagtgcccacgtcccctgcacctcgtggggcagccaagggggcaccgcgtggctcgtgtgctcctgggcagtccattttcaaccacaagacggaacagactcagaatccggaacatctctcggtgcttaagagttttcctttaacaatctttacctgtgggaatgcagagacccccccgccctgcgagaggccggcagccagggattccccgctccgcgccctcatcaccccccggaaaccacaaccgctgcgcgcgcggctcggacccccacccgccgctcccctccagcagaccctaggcctccgggaaaccgcgcggcgaccgccccgcgccccgccagatccgaaccgccggacccggcaccccggccacacccgccggtgtcgacgcagcgaggctcggagggtgcattctccgcgccgaccgctcccctcctccagacccgaggggcggagtgggcagggcgcgccggctgcgcaccgggcacccacctggggacgcgggggctggggcggcgcggggccacctggcggacccgggagcggactccggagagcagggagcccctcccccctcactctccgggccccgcccggccgccgcgccccgaggcgcagccatcccgcgggaggggaggcgcaggaggaggccagcgcgaggacacttacttaaaaggctacatcgcttcattcccagcccatcctgggcgacggcggcacctccctcgtccgctgctgggacctcgatgcccaccaccctcgcgcggcgatctggccctatagcccaccccttactccgccgtggggcggagccgcgccacagctgacccaatgagaaaccgtcgtttcccagagtgacgtgtacgcagagcaatcatggagtccagcccagccgggggcggggctcaggcggctccctacgcttcctactccagctggccccgccccacgcccgcaactgcgcgtgcccagaacgtgaggggcggggctgggagccgggctgacactagaggtggggttagcgcttggaagcaccgaccaacgtgagcgcaacgcggcagggacacctgaccccggcggcgcccagcccctcggattgccagtcactgctcgctttggggcacggaggtgcccagtcctgcggggcacccgacgtcctgtcgccgacagggtccgggagtcagtatagctgggttctagtccca

SEQ ID NO: 21328 - DNA, 2300 bp, Homo sapien
cctgtaaagacgccccaacagcacatgtgttaactcattaactcggagggatctagggtcactgtgacggttttctattaatagggaataaagctcctgcagacgttagcggtaatgccctgacggccggcgcaaagttaactcctcccgggccagcaagaggaaaccgtgtcctgcccaggcagatgtgcactggaaacgcgcgtgtacccatgcacacacggggttttaggaccactccccttgcacaggccagaccccacacccatcccgagtcttttctcaggggagggagcggcagcagcaggcggccgtcgggtgtccgtcagctcagcttcgccacgcacacggctagggccacagccgccagcagcacggcgccgaaaaggatggcggccagggccttcctggggtcgcaaccccccccgcgctcctgcaaggacacgaccgaggaggggccggcgctgaccgtggacaggagctcggcgcccgccgcctgccgggcttgcacggtccagcggggcacgttgaccttcatctccatgttgtcgatcatctcgcccacctgaaggacctcgcgctccagctcccgcaggtccgcgacgtcgaagtcgccctccgcctcgagccgcaggctgcgggtgctcagcgcgcgcgccgccacgccggaggaggcgccagccacacctgtgcgcaccagcggccgccgcggcgcgtgcagcgggaacgcggcgcccagctccagcgcgcgtcgcatgtccgcttccagcaggtccaggcagcccgagaaggccacccagagccgctcgaactcggcgcgctcgtcggcggccaggccccggtcgcgcagcacagcagtcagccgggcgcaggtggacaccgccagctcctgcgccttctggcgcgtcttttgcagctcctgccgcaggttctgcgagtccgccgagccaccgacggtcagcaccaggtggtggtagcacgcagtcgtcttgttgagcccgtccagcagcgccttgcactcctccctcgccatcgcggtgggctccggctgggcccggccgcccgcgcccgttagcctccccctcagcgcggcaggatgtggctaacccccatcccggccttgggccgcgcggcacgaacgctcttcatggtccgtgactcgctcggcgctaccgccaacgtccacggagcccgcccgggaccctcgacgtgcgcctctgcggacggggcgcgcagagggagccccgttagcggtcccccgctccctcgtccatcctccccaggcgcactccgagtcacacgtcgtgtctctgcaccgccctggcctccacggtggctccctgcgaagctgagggtgcggtccccatcctccgtgggtgccaactccggggcaagcaggctgcagagccgcgcgctccgccttaggcgctgccaagggcggccgggtagggtttcctaggacccgcccaccccgctcgtcccggccggagctgccaccccctggatcagtggtaggcggggctccacgcggggaggtcacgtgtgggtggcccatccctccctccccttcgccccatccgagttctggaatgttagcgctcgggagatccaacccgttctattttacggatggggaaactgaggcccaggtaaaaagcgggccaggctcccgcggagtttttgcctgtgatgggactagaacccagctatactgactcccggaccctgtcggcgacaggacgtcgggtgccccgcaggactgggcacctccgtgccccaaagcgagcagtgactggcaatccgaggggctgggcgccgccggggtcaggtgtccctgccgcgttgcgctcacgttggtcggtgcttccaagcgctaaccccacctctagtgtcagcccggctcccagccccgcccctcacgttctgggcacgcgcagttgcgggcgtggggcggggccagctggagtaggaagcgtagggagccgcctgagccccgcccccggctgggctggactccatgattgctctgcgtacacgtcactctgggaaacgacggtttctcattgggtcagctgtggcgcggctccgccccacggcggagtaaggggtgggctatagggccagatcgccgcgcgagggtggtgggcatcgaggtcccagcagcggacgagggaggtgccgccgtcgcccaggatgggctgggaatgaagcgatgtagccttttaagtaagtgtcctcgcgctggcctcctcctgcgcctcccctcccgcgggatggctgcgcctcggggcgcggcggcc

SEQ ID NO: 21329 - DNA, 2300 bp, Homo sapien
agctgggaagaaatccaggaccaggaacctttccaaaaggtgcagatcaaatggaaatgttgccaggaggccacgaagacccagggattcatgactgtccaggactcttcctcaccaccaaggcttccagctcacagcgtttaaggggtgtaggctggcctagagaaagcaggaggacaggggccccttagcaggcaacaaggaccaactgagggcctggtgtggtggttcatgcctgtaatcctagctgctcagggggctgaggcggaaggatggcttgagcccaggagttcaacaccagcctgggcaacacagcgagacccccatctctacaaaaaaattaaaaaattatccaggcgtggtggtgcatgcctgtagtcccagctacttgagaggctgaagatggaggatcaactgagcccaggaattcaaggctgcagtgagccatgattgtgccactgcactccagcttgggcaagagagccatatcctgtctctttaaaaataaaataatgaacttgtaaccacctaatgggttcaccttgcccgctgcctagacagagccaatttatcaagacagggaattgcaatggagaaagagtaattcacgcagagccggctgtgtgggagactggagttttattattactcaaatcagtctctccgagcatttgaggaacagagtttttaaagacaattgggcgggtaggagcttgggaagtggggagtgctgattggccaggttgaagatggaatcagaggttgttggagtttttcttgctatttactcttcctggttggtttggcagaactggttgaggcagattatcggtgtgggtggtgtcagctgatccactgagctgattcaaggattgttgtctcatgcctccctaaaatgtaaaagaccaagtgaggcaggaaaatagggtctggaggtagggaacataaggccgattcacgcttcagctataaggggaaataccctctccatagggcatacaccgagtaaatgacttcgtaactttacttcaccgtcttcatttacatcgggcgtaccccaagcagaaggtatttaaattcacagaaattctgccgggcctttgagtccctgtgttcaggcctgctcccacactgtggagtgtactttttcaataaaacccttcattccttccttgctttgtgtgtgccttttgtcaaattctttcttcaagacaccaagaacctggacaccctccaactttaacacaagctgtgcctcgaccacgtctagcaaatgtcgttaggacttcctgtgtcaggggcgcctgtcctcaaccttggcaaaattttttgttttgttttgttttttgagacagagtctcactctgtcgcccaggctggggtgcagtggcctgatctcagctcactgaaacctctgcctcccgggttcaagcgattctcctgtctcagcctcccaagtagctgggattagaggcgctccccaccatgccaggctaatttttctatttttagtagagacggggtttcaccatgtcgaggatgctagtctccaactcctaaccttatcaggtgatccgcacccctcgcctcccaaagcgctgggattacaggcctgagccacctcgctctgctggccaaataaactttctaaatgaactgagacctatctcacattttcaggattcacaggctcttatcaattttgtttcagagtcaaaccatggactgaattccttcccaaggttagttgggcttccgcccaggaataaacaaggacagcttaaaggttagaggcaagatggagttgattaggtctgatttctttcaccatcacaatttcctcagttacaattttgcaaaggtggtttccaacggactcagccgcacgcggcccctctgtccctccgggggacaggcgagtgtccctggggcctgcagggcagtcctgctggctgcaaaagagagaatcacgcgacccctagccgggcctcccagggcctccgcgcgtcagtcctcctggccaccgcgtggcgctgtgccttacgttgttgggccgttgggtggaccacgtggtctccgacgcctcaaggcctgctcagcgtgcgcgggcatccggtgggtgcgggaggcccgaggccaggcaggcagggatcccgcagcgaggggctggttactgccaggacggagcgcattgcctcgagccgaccccggggtccgcgagggctcctggggacgaggagtgtggggcacctgccgcggggggcccaggcgctaaaggtggagggaaggaacgcactcgc

SEQ ID NO: 21330 - DNA, 2300 bp, Homo sapien
ctcactagtacgaggccatgggcgagttcctttccacacctgcctcactaaactctgctgttagccttgtggacgagagggggtgatgacctctgtgatctcatagcattactgtgaggctcaaatgaaatgcatggaatattttgcaaactgtatggcatatacaaaataaggtattttgttaaagcctcacctaaaataatgttaagtgcttttttcaggttactaggtacattcatcataaaattgttggaaaattgcatgatgcaaaagtgatcctggctttgggaaatacagtttggattgatccaatggtaagtacgcattttttcttagaaataaatttgtttgaatgggcggctaaaattatccagattattctaagccctcacttgaataactgctgcatagaaacggtgacttatttggggatttgttagggagaggtgtttttcatgttattgggtcatgaattgggttgtgggtttagtttttgttcaggggaatattttacattgtaaccccagcgcacacgtgcattgtgtatgcgaggcacacgcacgcacacacatgcagccgaacaaagctttgtgaggactccatgctacattctctgatgctgacagtttctaactttctcattcaccacgcacttaactgagcacctgccacgtgccaggagcagtgctgggcactggggttccttctgtgagcaaagcagacgaagcccccatcctgcagagcagccgtgggagggggcgggggaaagggggaggggaggacacatgacaaggacatgtgactcacgggcctccgtgtctctccacggctgctggcaccaccctccctgcttgttccccaagagctccactcctccactcaaagttctgctgtattagacttaaatcttactatgaatacttaccagatttaacagagtcaatttataaaaacttttgctgaatgttatttttatgaggttggaaaagttttaacatgttaaaagggagtttggatgtaaggtttaagactaagcagaaaatggttttcagaagagaaaatatggattacaaatgcaggtaaatgaggagatttgggcatcttagttgatgttgtgatagtattgtgtttgtttcttgttggggggagaaaagcagatattttattaagcagagatttaaaagagattgaagtaaaaaagaaagcccacctggcagatgtgtccacactgcagcacgtgtggcagtgaccacggcggccagagggaaacagacccaccctcaccatctccacccgttcctgcccccacccattttgagcagagagaggctcctccacacattccccggtggacacacattcctggggttcacctaggaaggggccccagccagggcaggcctggagcaccccccaccctcaccatgggagggacagcccctcctatacccacactgccaccaacagtgccaggctgttgcagatttttatgttttacttaattttgtataaatggaaatggatgaggatgtttggttgcagaaaagacgaacagaagaaatggcccagaacaggattcaggtccttggcttaggtccttcccatcaggcagacgctgagcctcaggaggtaaaagtagttgagaaggaatgagaaagatgtacgaattatgcatctgactaggggtttatcccagatttgcaatttggtcttgactaggggtttatcccagatttgctcttgccacccccccaccacctgcccatatttctgtggcatggggtgaggcctggatgatttggatggaacctcaggtaggaagcaatccagatgctgccatggaaagccctgcacgttgtggcaagcgccgaagtgcagccaacgtggcaggctgaatgaaccagagaggccctgtgggaatgtctatgcttcagttaaaattcagagtgattactgctaatgttcaattttttcattgattcaaggtgcacattacaaacctttccagtttaaaaacctctgtcattgattataatgttcgagctgaaattttgtccatgggcatgggcattgataatccagaacacatagaacaactgaaaaaattacgcgaagatgctaagataccagcttgtgaagaaagcctaagccagaccccgtaagtggatttctgtctcctttttggaagagttgttttttggaaatacaactcacaagtgttaaggacatgttttatgaaagtagaagagttggctgggtgcggtggctcacacctgtaatcccagcactttgggaggcca

SEQ ID NO: 21331 - DNA, 2300 bp, Homo sapien
tcaagaccaacctggccaacatggtgaaaccccatctctactaaaaatacaaaaattagccaggcatggtggtggatgcctgtaatcccagctactcaggaggctgagacaggagaatcacttgaacccaggaggcagaggttgcagtgagctgagatcgtgccactgcactccagcctgggcgacagagtgaggctccatctaaaaaaaaaaaaattgacagcagggaggtgaaacttcagtcacatggcagaagcactggatacacaatgaaccaatggtcttcaagaactgaggaaaattttgctttttaaatgaaatccgtattattttccatgaggaagagcttatgagaattacttgaatactttctgtgtattcaagggagggagagggtgggactgcggtgaaaaacacaactttaagaaacaggcttaagaaatgctcaccgtggacccaaaatgaactgaagtggaggtttctgacttaacaaaggaccctcacatcccgatgttccagactcggcacttggaagaggcccaggaagaccagagggctggtcccggacattcatggaacatgcaagttcagtgtgttccgtgaggaggcgcctgttgctcgccctgcgtcgcaggttcagaccctgatcctggcagtgctgcctgagcccatgtgggtagtgggtgaggttgcagggctgtctggccccagcgggggaccactgccccaccctgatgtcctcacgtggtctcctgtcagcctgccaggagcacttttgacccagggggtattctgtggtgttttgcaaacatggatgtgccaggtactatgatgagtgctgcaacattaggaggagtgaccccagcaagccggtgggcaggttctgtctagggtggcaggacctgccactagcctctctgctcagggctctgggcatggcaggcaggtaaacaggtgggccctcccaagatgggaggtgacgaacttctaaatcaggaccgtgcctctgggacaacaagggtccctgtgctctgcagacggctttcagagaaacctgtgcctctctcaggtctgcttgccccaaactgctcccaaactgacccccagagactggcccagctccttccatccctgacctttgcttccatctgatatctgggatgcagttaagtttggcccaaggcaaagctaccagagttttggctgaaggtaacagctacgatgcttcagatgcagtgcttatgctgtgccaggctgtctcataaggtctcataaggtgcttccttccctatctgaaagggcttcgtgctgacccctgaggctgccgcctgagcctaggtccaatcgcagtgcgggagaacctctgctccctcccagagagatccagaccctggcagccctggatgcggaccggagcttcctggccttgtgttgcctgtccccctccgtttccccgaaggggaaggttttgtgtcccttgtgatgagccaggacatggctacgtgaacagcaccacagccaaacctgatgggcatttggccgcagctgcagggaggacacgaggccctgcattgcctcaggcctgcttgtgattccaagtggtgaagccccatcactggtaaagaggagtgggacgggctcagccgctctcacctgctcagccagaggcaggcccttggcttgggggaaattcctgggcggggaggaaactgaccaacagctgagttacgcacacacagcggttcctgtttgagctgcctgacttgggttttaaatatagcctattaaggcaattagcgaattggttccaaagtttatctcctctgattcccaaagataaaagaaggcataatttattttatctttaggtaaaaagtgtagacgatttgggaccatctggttttaaaaaaataatctgacctagacacaaatgaacaaaacaaaaacggttttggagagaaattggtgttcctgaccctccccttttttgtgtggcgtatctaagcttcattgcaaaaaaaaaaaaaaaggtgtttaataattacccttattgacctctgtaccttctggacttcctttgctcctgggcacaagacatggccatttctagggttggaccgtgcaggcacgggcggtcagctgggccgcagctcctccggctctgcagggtcacggaggaaggtaagtaaggtcagtaggtgatagaaaggctcatggctctcctggccggggcctggacagataatttatttagagagagggtacaggagtgcatggttttctcctagttcagtctggaa

SEQ ID NO: 21332 - DNA, 2300 bp, Homo sapien
tttgcatatggaaatttgatttttccagcaccatttgatggtaaggctattagttatttattgctgtgtgacaattgcaccaaaatgtagtaatttaaaacaaaacagcagctgggcgtggtggctcatggctgtaatcccaacattttgggagactgaggcaggaggattacttgagcccaggagttccagaccagcctggagaacatattgagaccccatctctacaaaaaatataaaaattagccaggtgtggtggcgtgtgcctatagtcccagctattcaagatactgaggtgggaggatcacttgagcccaggaggttgaggctatactgagctgtgattgcgccactgtactccagcctgggcaacagagtgagatcgtctcaaaaaaaagccccaaaaccaaaatatgaaaaatggtggtttttatcccacatctgattgatgctcttttttttttttttttttttgagatggagtctcgctctgtcgcccaggctggagggcagtggcgcgatctcggctcactgcaagctccacctcccaggttcacgccattctcctgcctcagcctcccaagtagctgggactacagatacccgccaccacgcccacctaatttttttttttttttgtatttttggtagagacagggtttcaccatgttggccaggatggtctccatctcttgacctcatgatccgccctcctcagcctcccaaagtgctgggattacagatgtgagccactgtgcctggccgggtctttcttatatgatttgttaggtggggtgtggagcagtgcccagccagggctaattattccccagtacccaggccagacctttctgagtgctgcacccggcatcttgtgaatgataggtttctccagtcttcctggtgggagcagctgccgtcttgggctgtatgtaagcacctggcactgctcctctgatcctggtgaatggttcttcctccactgtctggtaatttcctcacacttgtgtgctgcactgtatcccgctgaaactaggggaccttctgcagatctcctcgttctctctgtgcagttctctcctttccggcactctatcctacacattctctcagctccatctctgcaactcagggagtctgcctggctccacccattcctcctccctgtgctgtgacctggaaattttcctaggcagcaagctgggacggtggtcttttgttttgttttactatttttttttttgagatggagacttgctctgttgcccaggttggagtgcagtagtgcaatgtaggctcatagtaacctccacctcccgggttcaaccgattctcctgcctcagtctcctgagtagctgggattacaggtgcgcgccaccacacctggctaatttttttgtatttttagtagagatgaggtttcaccgtgttagccaggctggtctcgatctcctgacctcgtgatccacccacctcggcctcccaaagtgctgggattataagcatgagccaccgcgcctggccttgttttacttttttaggcaggagggtaaatctgtttactctaactttcctgtaaaatattcctgagtaattcacaagtatttttaaagtccccttttaaatcttttagtctttctatatctcattttctttttccattctgatcttccattctaataagaaaactacttgaatgtaggcttttgtgtctgcctggattagaggccctgttctacctcctattggctaggtaatctttacaagtcatttaatttctatggaaaatgggatgacaataatatgtagtcatacagttgtgtgagaatcaaatgagattgtctgatggcctgcggtagatgatgggtgcagagtaaatgctcagtcgacactgtccagcagaaggtaagccttgatgagtttatgtaccttgttcagcattcacctggaatgttcatgtctcactgtctccatgggatgtttttgtccgcagatctgctctggcagcagccattctggcgacaacattgactgggcggacggttgctattcctcagcctcgccagaggtcccggtctgagagtgatgtgagcagtgttgaacaggacagcttcatcgagccctatgccaccacctcacagctgaggcctcggtaggtaccagatcgccgcctctgcttcctctgagagtggaagaggggcaggctcagcctggtctctacgtgtatgtgtgcatgcgtacatgtgtgtgcatgtgtacctgtgtgggtgcgtgggtgctcatgcatgtatttatgact

SEQ ID NO: 21333 - DNA, 2300 bp, Homo sapien
tcccagtattttgggaggccaaggcaggcggattgcctgaggtcaggagtttgagaccaccctggccaacatggtaaaaccccatctctaccaaaatacaaaaattagctaggcatgttggcacatgactgtggtcctagctacttgggaggctgaggcatgagaatagcttgaacccaggaggtggaggttgcagtgagccaagatcgtgccaccgcactccagcctgggtgacagacaagactgtctccaaaacaagcaaacaaacaaaaaccatttcttgtcgtgtagcaggtggtggaggggggcagggtggaaacatggaaactgtggaatcacttgacaaatacagggtggcaggtgccacacagaggtaaacagagtgggggtattgggtagagactgcttggagcttctgctcctgtgggtggctgtgcaagtcggtggtgggggctgtaggagatgactggaaggtgtgcccatccctcactcctgaaagatgcccccactctgtgccacccttcccagccttgtgtctcgtgctgaccactacctaacattcctggggccactgtcagtgggtgctcctcactaggccttgggatttcctccatctgctctggaagcccttcccatgggaattgtccccaccatgcccccaagccccaccctcgaagatgcctctagtctagcaaaacggagaatcgtgcttatgatttccgagcactgcaaccaatgtcttgctccattcctttgttcatgccgttccctcttcctagaatgctgttccgtcacatttccaaatgtgggaccagtgggcatctctgaaagcccagtctaaacgcctgtgtgattttctcgaaggaaagcatttgaaattcccaggctggccccagacctggaggaatcttccctccctgcccaccccagcactttgtgctaattactggcttcaaatagaaaacaatagtgtttttatcccacatctcattgatgctcttttttttttttttcatttttagtgagagcctttctcccggctcattccataattctatgttctgtaataattatttgggtgtttttcctcccttctcaccactttggggatgaagacaaggtttcttcattgctgtcatggtgttttgcctctagtaggtgtgaatgaatggctcgtgccaagaaaatgattggactagacccagaaacgtctcagagactcccagttacagttacctaaagcggagctctctgactttcattgtgtataggagctagttttcattactctcgtcttggagataagccacctaaaagcttatattaagcccctatgaggtgtgaggcaatgtgctcaatgctagagttccaggattgataaagataagagagtgggccaggtgcagcactcgcacctataatcccaacactttgggaagctgaggtgggaggatcacttgaagctagaagttcgagaccagtctgggcaatgtagtgagatcctgtctctacaaaaaaatacaaaaattacctaggcatggtggtgaacatctgtagtcccgtctactcgtgtggctgaagcgggagtttgaggctgcggtgagctatgatcgtaccactgcactccactctgggcaacagagcaagaccccatctcaaaaacaaaacaaagcgaaaaacaataaggatatcacttgcttctcaggaagtcgccctgctctgcagggggagccacatgagacatcactggggggagtgctgtgggacacatggaagagctagagggtgactcttggggacagccagggaagctctgaggagggaaggacaagagggccacacaatgagcagctatcatgatgctccttggctgtgtgcacttgtctggcctgatggggactggggatggcaggggaggagtgggcttctgatgggtttggatccatgggtggccagtgcaggtgtccccttgcaggcccagggagagtggtgacaagactcaggtgatccagtgacccaacccagtgacttctgttggatttcatttgtgcagaaacacatcatccatggccttttacctgcagccagcgttgctccgaaggcagctgtgccacgcacacctcctccccgcagccccaacccatctccagagagaccaaggtgagtatcagatgagcaggcactgaggtcacccctgtgctcagcctccaagtactggatcctggaactgctcaaactgcccagaaaagtataagtagggtggttagaatcatgtccttcaaaatgtttaccacgattcc

SEQ ID NO: 21334 - DNA, 2300 bp, Homo sapien
cccagaattctttccttactccctgccaggcccaggccaactctccaggctgacgtcactgcccttctggtacacacatcaacagcagttcttgttttaccattgtgtacagaattatttatgggcttgtctatcctacagaccgtgtggccataagctgtcagttgtgggtatcagcacacagcagggactcattaatgtttggggctttaaataaaaactcaagccagatgcagtggctcacacctgtaatcccaacactctggaggccaaggtgagaggattgcttgagccaaggtttaagaccagcctgggcagcatacccagaccccatctctaccaaaaaaaaaaaattatgtttttttgaggcagagtctagctttgtcgcccaggctggagtgcagtggcacaatcttggctcactgcaacctctgcctctcgggtttaagcgattatcccacctcaacctcccgtgtagctgggattacaggtgcccaccaccacgcccgctaatttttgtatttttagtagagatgggttttcaccatgttggccaggctaatcttgaactcctgacctcaaatgatccgcctgcctcagcctcccaaagtgctggattacaggtgagagccacctcacgtggcctctacaaaataatttttaaaattagccaggcattgagacttggcagagtgtgaggcaaaaaataaaataaataaaaaatacctaggtgtggtggtgcacacctgtagtcccagctactcaggagcctgaggcaggaggatcacttgaacccaagaggttgaagccacagtgagctatgatcatgccactgtactccagcctgggcatcaggacaagaccctgtctctaaaactaaattaaataataaataaatataagaatccccttggctgctacgtggagaatggacctaggggaagggcgagagtggaagcagagaaaccagtgaggatctgccgcagcagtccagacagatgctggaggccggggtgtgggtggagatgggaacagctggcagatgtatgtagtgggtatatcggatgggacttgctgatggggtgtacatggtgggtggaggagggaaaaatgaagaatggctatatccagcagtgcagcaggtgtacgtcgtccaggagttaactccgggcacggggacgaatgctacaggggaggcagggtgctcctgtccaactgtggccgaccctggggcagaagattgttaacgccgggcacagtggctcacgcctgtgataccaacactttaggaggctaaggagctcaagaccaccataggaacatagcaagatccctgtttccacaaaaatattgaacaattagccgggagtagtggcgcgcgcctgtagtctcagctcctcgggaggctggggtgggaagatcgcttgagcccaggagttcgaggatgcagtgagctatgatcgcaccactgcactctagcctgggcgacagagcgagaccctgtttcttaaaaaaaaaaaaaaaagtttagaacacgaaaaatcaaggcttcctcaactgaaaaccactttctcttgtgccgcccccttgactggatctcaggccaaaccccaacccgccccaacactttacccctaattcccggccccacagagccccacgcgcggcgggcgagcatctacttacgaaatgactcctgcggcctctccgaaatcccaggagcatccttgcagcgcgaggagaatggaccggggcctggactcatcagcagatctatccacagccagggaccactccctaaagcccgccgcaggcccagccctcacgctttctcttcgcaatggactttgcagcaaccacgtcggccattggctcagctcggccctcgaccaatcagagctaaggttacttccacaccggtcgttcttggcaaccagtgggtaccgttcaaatccccgccagggcggaaacgtccgcccttatccgttctcttattggtcaggttagacgtccatttctgacgccacagcctatccggcgctgcgggaggcggagggcgggctggatgaaggactgggcgagcaccgagggcgtgaacccggaaggtggcgcggccaccagtaacatgatctctagactgggacggtggggttcctgccggctgtattcgggccttggactggactgagaagctacggtgcggatccagctggggtatcaggggctaggcacgtgatgaaaatgaaggacgcggacaccaggacaggaatctcctggttcttagagaatttatttcgcca

SEQ ID NO: 21335 - DNA, 2300 bp, Homo sapien
tggacttgaaaggaaaaaagacagtaagtcattttgcaaccaaattgcttttcaggttaagaatgctatcacttcgtgcctgacctggccaatgattttaaataaatgataccaagggatggagggaagggtggggtgagacaaatcaatgttcgagtttctttaatccaatgcttacatttcttttttgtttttgttttttgttttttgagttggaatctcactctgtcgcccaggctggagtgcagtggcgtgatctcggctcactacagcctctgcctcccaggctcaagcaattctcccgtctcagcctccctagtagctgggattacaggcgtgcgccaccatactcagctaatttttgtatttttagcagagacagggtttcaccatgttggccaggctggtctccaactactgacctcaggtgatccacccgccttggcctcccaaagtgctgggattactggcgtgagccacagcacccagcctaatacttacatttctaacccgaacaagcctctttctgtagccatttcctgccaccaaatcagcttcggtgacataaagaatgcagcatctgttcgacagataaaagtctggtgtcaagccatcctcgaaaatgagcttaattttcccttaaaatacagagaagaaaatgagttccataagctttggatgaaaagatggcaataataggcagattttttttttttaatatgtcaggggaggaaagggctggcagagggcaggccaccgaccttgcatctcctgcgccagctgtgacccgcgccatttctcattggccacaatatgccccaaaggcacgtgcacggggcccgtatcatcaggggggttcttttccatggatggtctccacctaaggagggaaaagccaggcggcacttgagcaggctctcctgcacacggccctgcattccactccaagccagggcctctggggcaggatcccctctgcaaactgaattatttgtcaaagaactgtcaaataagattccctttataattactaataagaaaacacaggctgggcgcggtggctcacacctgtaatcccagcactttgggaggccgagcgaggcgggtggatcacaaggtcaggagttcaagaccagcctggccaagatagtgaaaccgcgtctctactaaaaatacaaaaaaattagccgggcttggtggtgggcacctgtaatcccagccacttgggaggctgaggcagagaattgcttgaatccggaaggcggaggttgcagtgagccgagatcgcgccactgcactccagcctgggcgacagagcaagactcgtctcaaaaaaaaaaaaaaaaaagaaaagaaaaagaaaacacaaaggcctgaatgaaggccagggtggctggagacgggatgtgtggtggtggaggtggtaatggcattggattccaataaggccagaggcacgatcagatttaagttttaaaagaatcctgggctgggcatggtagctcacgtctgtaatcccaacattgggcaaggctgaggcgtgaggatcgcttgtgcccaggagttcgagaccagcctgagcaatacagcgagatcccgtttgccaattatttgtggcgaaataaattctctaagaaccaggagattcctgtcctggtgtccgcgtccttcattttcatcacgtgcctagcccctgataccccagctggatccgcaccgtagcttctcagtccagtccaaggcccgaatacagccggcaggaaccccaccgtcccagtctagagatcatgttactggtggccgcgccaccttccgggttcacgccctcggtgctcgcccagtccttcatccagcccgccctccgcctcccgcagcgccggataggctgtggcgtcagaaatggacgtctaacctgaccaataagagaacggataagggcggacgtttccgccctggcggggatttgaacggtacccactggttgccaagaacgaccggtgtggaagtaaccttagctctgattggtcgagggccgagctgagccaatggccgacgtggttgctgcaaagtccattgcgaagagaaagcgtgagggctgggcctgcggcgggctttagggagtggtccctggctgtggatagatctgctgatgagtccaggccccggtccattctcctcgcgctgcaaggatgctcctgggatttcggagaggccgcaggagtcatttcgtaagtagatgctcgcccgccgcgcgtggggctctgtggggccgggaattaggggtaaagtgttggggcggg

SEQ ID NO: 21336 - DNA, 2300 bp, Homo sapien
taatcctagctactcgggtgactgaggcaggagaatggcttgagccagggaggtggaggttgcagtgagccgagattgtgccactgcactccagcctgggtgacagagcaagactccatctcaaaaaaactaataataataaaataaaaattaatgcaaaaaaaatctgtgatgatcggaattttattttattttattattttatttattttattttattgttagagatggggctggagtgcagtggtatgatcatggctcactgccttcttgaactcctgggctcaagcgatcctcccaattcagcctcccaaatagctgggaatacaggcacatgccactacaccagttaattaaaaaaaattttttttttatagagatggagtctcactatgttgcctaagttggtttcaaactcttggcctcaagcagttgtcctgccttggcctccccaaagtgttgggattacaggcatgagccatggtgcctggccagggatttttgatctaatgagtactaatccaggcagcctcccaaggaattaaaaagacagcctctggagccagacttcctgggttcatatctcagctcttccatgaatgagctgttttaccttgggcaagttacttagctgtcctctgcctcaattttctcatctgtaaaatgggtatatggagagaacctgcctcacaggctgtcatgaaaacgaaaacgaagggcctgtacgcaaagctcaataatgctttatatactgtaggttctctgaaagtgtgagccgccactcctagtactatatagtctattaggtgagacaagatgtgaaaacaaatagaaataccatatagtgcctcggtgattgctgtagagacacaaatgcagcagcaggtggactccatggtacagtcatggatggcttcttagaggcagtgacatttgagttcaacttttccatctgcacaggagggaagggtcagcctagagggagtaaagtgtctgagcacagaacagaggcggagggtgctggggaagtggagagtggttttgtgaggtttgagagcaggatgcgcgccacgaagggtgtggttgaagcaggaaggggctctgctgcaggtgtgcaggcccgcagaggggtgcaggccgggcatgacagggtctgggctatgccaggaggttctgtgtggtgggtgagttggaggaggtagcgtgtgggggctcagggtcaaattacaaaccttgccgggtgtggtggctcacgcctataatcccagcactttgggaggccgaaatcggtgtggatcacgaggtcaggaccagcctggccaagatgctgaaaccccatctctactaaaaatacaaaaattagccgggcatggtggcatgtgcctgtaatcccagctactcgggaggctgaggcaggagaatcgcttgaacccgggaggtggaggttgcagtgagccaagatcacaccactgcacccaagcctgggtgacagagcgaaactccatctcaaaaaaaaaaaaaaaaattatgaacctctggagtgtgactggtcccagtgagcaagagctttggggtagccaggcatagtggctcacacatttgatcccagcactttgggaggctaaggcaggaggatcgtttgaacccaggggtttgagaccagcctgggcaatgtagcaagaccttgtctttacaaaaaaatttaaaaattagcctggcatgtggtggtgcatgtctgtagtcctaactactcaggaggtgaggtgggaggatcacttgagcccaggagttcaaggcggcagtgaactatgattgtgccattgcactccagcctggtaacagagtgagaccgtctcaaagaaaagaaaaccttgagggttagacggcctggggtgtgtccgggggcagaaaggagacccatgatcccaaatgccttgtgaaactgcagaaaaaaggaagctggagacatggtagagaaatctctacgtgggtctgtggccaggtccatgagaggggatttaacctgtggttctctttgcagtgaagccaggcacggatctggaccaccaggagaagtgcctgtcccagctctacgaccacatgccagaggggctgacacccttggccacactgaagaatgatcagcagcgccgacagctgggtgcgtgtccccctgcacccagatgtgggccccacttggtgcccagctggtcctgctcacagccagccacagagaggtccctgaagagggcccgggagaggggggtgttccgagtcatcgtggccactttgggttcaga

SEQ ID NO: 21337 - DNA, 2300 bp, Homo sapien
tgcatttttagtagagacagggtttcactatgtcagccaggatggtctcgatctcctgacctcgtgatccgtccgtctcggcctcccaaagtgctgggattacaggcgtgagctaccacacccggcctattcctggacttttattctgattcattgcctatctttatgtcagtaccatgctatcttgatgactatggcttcttagtaagtttatttttaattttttttttggggatggagttttgctcttgttgcccaggctggagtgcggtggcgcgatcttggctcactgcaacctctgccttccgggttcaagtgattctcctgcatcaggctcccgagtagctgggattataggtgtccgccaccactcccagctaattttttgtatttttagtagagatggggtttcaccgtgttgaccaggctggtcttgaactcctgacctcaggtgatctacccacctcaacctcccaaaatgctaggattacagacgtgagccaccatgcccagcccagctttttagtaaattttaaaatcaattgtcttccaactctgttcttatttttcaaaattattttgcctattgtaggttttttttgcatttccatatgaattttaggatcagcttgccgatttctattaaaaaggttagtgggattttgattgaggttgcattgaatgaatgtaccaactaaggaggcttgatatcttgacaataatgagccttcccatccataaacatagaatagctcttcttttaatatatctcagcattgttttgtagttttcagtttacatgtcttgtgattcttttgtttattcctgagtattttattctttttgatgctattgtgaatggaatggttttctcaattttaagattgttcattgctagtatatagaaatagaattggccaggcacagtggctcatgcctgtaatctcagcactttcggaggctgaggcaggaagattgcttgagcccaggatttctgggccagcctgggcaacatagtgagactccatctctacaaagaaacacaaaaattagccagcgtggtggtgtgcacttgtagtcccagctccttgggaggctgaggctggaggatggcttcagcctgggaggttgaggctgtagtaagccataatggtgacattgcactccagcctaggtgacagactgataccctgtctagagaaaaaaaaaaaaaaagaattgatttttgtatattgattatgccctgtgaccttgctaaatttattagtactaatatttgttttatggatgccttaggattttctatatataagatagtgccatctgtaaataaagacagttttatttcttcctttctaatctggatgcctttaatttctttatttgcctcattgattagaaatagcaaaagtgggcatctttgccttgttcctggtgagaagaggaaagcagtcattcaccactaagtgtgatgttaactgtgggtttttgtaggtgtcttttatcagatttcataaattctcttttattcctactttgttgagaatttttattatgaatctgtgatggattttgtcacagtgttttcaatatctgttgaagtcaccatgtgtttttttgtcctttattctgttaatatattatattatattgatgttcagatgttaaaccaaccttgcattcctgggataaatcccacttagttatggtgtacaatcctatttatatgttgctaggcttggattgctaatactagtcttacagaatgaattgggaagcattacctctcccttcattttctcattcatttattttattttactttctatcttatatatttttatattttatttcattttatcttattttagcttttagagacagtgtcttgctctgtcacccaggctggattgcggtggtgtgatcatagctcactgcagtatcaacctcctggactcaagcaatcctcctgcctgggactataggcatgcaccaccatgcccagctataatcatccatttctttctttttttaaaacaaattttatgtttatttatttatgtactgtgatttctcccaccgaaaggaatcattcatttctttttttttttttttttttttttgagagggagccttgctctgttgtccaggctggagtgcagtggcataatctcagctcactgcaacccctatctcccaggttcaagcctcagccttctgcatagctgggactacaggcatgcaccaccacacccagctagtttttgtattttttagtagagacagagtttcactatatg

SEQ ID NO: 21338 - DNA, 2300 bp, Homo sapien
tagagacggggtttcaccatgttggccaggccggtctcaaactcctgacctcaggtgatccaccagtctcagcctcggcctcggcctcggccttccaaagtgctgggattacaggcgtgagcctccgcgcccggactttttttttttttttttaaagatatgttaacgctgggctggttttgcagcacattgcattctgttccacctgtggcatctatcgcgaccgctgagggcggtccctttgctgggggagaagcagttgtaacagtaagcagcggccgggaggagcatggcccgcgggctgggtgtccctgcttaggtggcaaggtcctggcttcacgtgctgccaggcgtctgcccacagagtctagcagccagcaggaggttggtggcagactgatacaaaccctgtccccatgggtcaccctttccctcctaaactaagttcatccctactttccaacactcacttttgtcctactgccctccatcagcccgagaaaaaaagaatccaagaataataaaagagccccattttgcagcctagaaaacggaggtggttaagaaccgtgctccacggccgggtgcggtggctcacgcctgtaatcccagcactttgggaggctgaggcgggcagatcacgaggtcaggagatcgagaccatcctggaaaacactgtgaaaccccgtctctactaaaaatacaaaaaaattagccgggcgtggtagccggcgcctgtagtcccagctgctcgggaggctgaggcaggagaatggcatgaacccggggggcggagcttgcagtaagccgagatcgcgccattgcacttcagcctgggcgacagagcgagacgagtgaggatcacttaaggtcgggagttcgaggccagccttgatatcatggtgagaccccgcatctatttaaaaacaaaacaaaacaaaacaaaacaaaagctgtaatcccagcactttgggaggcaggccgaggtgggcagatcacaaggtcaggagttcaagacaagcctagccaacaaggtgaaactgtctctactgaagattagctgggtgtggtggtggacgcctgtagtctcagctactcgggaggctgaggcaggagaatcgcttgaacccgggaggcggaagttgcagtgagccgagatcgcgccattgcactccagcctgggcgacagggcgagactccgtctcaaataaaaaaataaaaaaaataaataaaaaggccgggcgcgttggcccgcgcctgcagcccctgctacttgggaggctgaggctggagcatcgcttgatcctgggaggtcgaggctgcaaagagtcgagatcgcaacactgctctccagcctgggcgacagagcgaggtcccatctcttaaaaaaaagaactgtgctcaaggacatctgccgtgtctggggcgcaaaacccctcctggtcccctctctcagggcagtccgcgagcccagcggatcccactcgtctttgcagcgcggacagggaatcggctgagttgatcccatgccaacaagcccgagtagtccgggcaaggcgctcggcggggcagtcaacgctccctccgccatgggctcccctcttgggaaaagcttttccaaaccgccgggcccagggcccagagctcccgccgcgccctcgacgtggcgtcgagtctggccccttcccccgcggcgcacgggcttcacccaggagggacgcgcctggatccacgccttcctcactgactccccgggctccagggcagggtgcaggtccacagccagggcttcgctgcggcccctgagaccccagtgcctttcctgcgctctcgcggcactcgcaaagttgagtcagccacgacgcccacagacaaccccgaggcgccgcgcccagggcgcagctctccgggtgacgagcgcctcaaggggcgcgggttcggggcccgcgacggggcggggcgcgtctccagggctccagtgctcggcctcaggcggggctagaagggccgcgggacggggtgggagtggaggggcggggaagggcggggacaggggcggggccgcacgtcctctcgggccagcctcagccgccgcgcctcagtccgccgtccgccctccgcgcccgcgccgctagcatgaccgacgcgctgttgcccgcggccccccagccgctggagaaggagaacgacggctactttcggaaggtgggcggcttcgggcgggcgggcggggacctgcgggctccagacctcctttcccccgggccctgcaggggccgtgggagcgcgcagtcggggtc

SEQ ID NO: 21339 - DNA, 2300 bp, Homo sapien
gacagggtctctatagacagagatcctctgtctatagaggatctatgagcaaggtggctcatgcctataatcccagcactttgggaggctgaggtgggtggatcacctgaggtgagaagtttgagaccagccttgccaacattgcgaaaccccgtctctactaaaaaaatacaaaaattagccaggtgtggtggcgcacgcctgtagtcccagctactcaggaggctgaggcaggagaatcgcttgaacccaggagttggaggttgcagtgagacgagatcgcaccattgcactccagcttgggcaacagagtgagactctgtctagacaaagaaaataaactaaaaaaaaaaaaaaaaaagaaaattacaattaaattacaattacaactggaaagcagttgggagatttcctgaagaacttaaaacagaactaccattagacccagcaatcccattactgggtatatacccaaaggaatataagttgttctaccataaagacaaatgcatgcatatattcattgaggcactactcacaatagcagagacatggaaccaacctacatgcccacaaatggtggactggataaagaaaatatggtccacatacaccatggaacactacacagccataaaaaaagaacaagactggccaggcgtggtggctcatgcctgtaatcccagcactttgggaggctaagatgggcggatcacgaggtcaggagatcgagaccatcctggttaacacggtgaaaccccgcctctactaaaaatacaaaaaattagctgggtgtggtggcaggcgcctgtagtgccagctactcgggaggctgaggcaagagaatggcgtgcctgggggacagagcgaactccgtctcaaaaaaaaaaaaaaaaagaaacaacaagaccatgtcctttgcagcaacatagatgcagctggaggccattatcctaaacaaactaatgcaggaacagaaaaccaaatactgcatgttctcacgtataagtgggagctaaacattgagcacacatggacataaagaagggaatgacaggtgccaggcgcagtggctcacgcctgtaataccagcattttgggaggccgaggcgggtggatcacttgaggtcaggagttcaagaccagcctggccaacatggtgaaacccagtctctactaaaaatacaaaaaaaaaaaaaaaaaaaaaaaaaaatggccgggtgcggtggctcacatctgtaatcccagcactttgggaggccaaggtggatggatcgcctgaggtggggagttcgagaccagcctgaccaacatggacaaaccccgtctctactaaaaaaaaaattacaaaattagccagacatagtggtgcatgcctgtaatcccacctactagggaggctgaggcaggagaatcgcttgaacccgggaggcggaggttgaggtgagccgagatcgtgccattgcactccagcctgggcaacaagagtgaaactctgtctcaagaaaaaaaaaaaaaaaaccaccacaacaaccaaccaaccaaacaaacaaaaatttagcagggcgtggtggggtggacgcttataatcccagctatcaggaggctgaggcaggagaatcacttgaatctgggaggcggaggttgcagtgagctgagatcgcggccactgcactccagcctgggcgacagagcgagactctgtctcaaaaaaaaaaaaaaaaaaaaagggaataacaccagggcctacttgagggtggacctacttgagggtggaaggtacgaggagggtgaggatcggaaaaactacctattgggtactatgcttattacctggggaggaaataatctgtaacccaaatcccttgcgacatgcaatttacctatataacaaacttgcacatgtacccctgaacccaaaataaaagtaaaaaataataataataaaaataaagcgaagccccacggggcgagcatgaaatctgggagctcagccatttccctggaggtggctgggtgggcggtgggagtggacggggctgggcagtgactgctgccaaggcagggggctggcgcgagggacgggggtagggggctgggcaggcatcggtgtcgcctcgcagggaacagttgggtggcttccagcttatgccaggagtctcctcctcacccgcacatcgcggggctaggatgggatgtcgtggctgccaaatcctccgaggcaactcctgcctgggacggcctaccacaggatgggcctgagaatccggagcgcaggctcgggccgctaggacaccttc

SEQ ID NO: 21340 - DNA, 2300 bp, Homo sapien
gaggtggacttggactcttaggggctcgggtctcactgccatggggaactcaataggtgtctcgtataattggcaaacagaacccttggttccccacccccatcacacactgcgcttcctcatctaagtcttctcatctcaggaagtggtgccaccatgatccactgctcggaccaggatgtaggaggcctaattcttttttttttcttaatttttaatttttatttttttttattatactttaagttctagggtacatgtgcacaacgtgcaggtttgttacatgtgtatacatgtgccacgttcgtgtgctgcacctattaactcgtcatttacataaggtatatctcctaatgctatccctccccgcttccccgggaggcctaattcttagctcctctcttttcggtcctcccgcaccctccctgaccctccttggcccttagtgagtcctctcggctctacccacacgtgtgggggttctgtccactactcatctgcatttccgtggcctcccgggtctgagccccacccctccacctggaccgttgctgcagtctccttggtggtctccttgtttcctgtccatctcccgtagactgttcccctcaccagcagctggatgaggccaactataccagccaacacctctcccacctacagaaacctccaggctccccacgaggccctgtgcggccccgcccctgcccgcctttcaggctgcaccatccaccaccttcccttaccctcccacagtgtagcgtcttcctcctcctttcctcccctggaacacgccgtcatccatgacactgcctaagggcctttgtgtttgctgtacctccctttctgttcttccctcatatttttgtgaatctggctctttttttttttagcttatgacttatctcgaatgttactttcttccagccttccccgaccaccatataatctggttatctgcctgtcccctctaccagcccgctcacacaagcccccctcagtcacatcgtcctgtttttttcatagccctcctctattgagggccagcgtattgctcctgggcttctttcgtgtctccactgccctccaagctcctgggccaggtcctggcatagagctggcactcatgagtgtttgtcccattggtgagggcttgctggggagctgtactcggaaccagggctagtggtggtggactgcaggtctggagccggggatgtcaggttccccatcctggaatcactcacgtgccctgtaagtgtgcatgtattaacttccatttttgctgactataaaacaggaatcttggctggacacagtggctcatgcctgtagtcccagaactttgggaggccaaggtgggatgatctcttgagcccaggagttgagaccagcttgggaaacatggcgtaatcccgtctacaaaaaatacaaaaagtagtcgggcatggtggtgtgtacctgtggtcccagctactcaggaggctgaggtgggaggatcacttgagcctgagaggtggaggttgcagtgagccatgatcacaccaccgtactccagtccaggtgacacagcgagaccatgtctcaaaaaaaacataggaattggccaggcgtggtggctcacgcctgtaatcccagcactttgggaggccgaggcgggtggatcacctgaggtcaggagtttgagaccaacctggccgacatgatgagaccctgtctctactaaaaatataaaaaattagccaggcattgtggcacatgcctgtagtcccggctactcggtggggatgagacaggagaattgcttgaacccaggaggttgcagtgagctgagatggtaccattgcactccaggctgggcaatagagcgagactccatctaaaataataataataataagaagaagaatctcaatttttatcactgtctagtccacagggacatattaatataaatgaaacactaaacataaaatcctcatccccaattatgtaaatttgtgttattgaaatgtatgtacagagaaacgtaaatgtggttgtctcatggctcttttcatctcttctaattactgtttttatttaggttcagctacttcagtgttagaatttctgtcccaaaaagacaaagagagaatcaaagaaatgaagcaggcaactgacctgaaagcagctcagctcaaggccaggagtctggcccagaacgctcagagcagcagagcccagctctcccctgcagcggctgctgggcactgctcttggaacatggcattaggtggtgggacggccaccttaaaagc

SEQ ID NO: 21341 - DNA, 2300 bp, Homo sapien
tggctggggatggtggctcatgcctgtaatccaagtactttgggaggctgagatgaggatcgctttagcctaggagttcaagaccagcctgggcaacatagtgagatcctgcctctaccaaaaaaaaaaagatatatatgtatatataaaatatattatatatatatatacacacatcatattttatttatttttttgaacggagtcttgctctgttgcccaggctggagtgcagtgtcaggatcttggctcactgcaatctcagctcactgcaacctccacctcccaggttcaagtgattatcctgcctcagccttctgagcagctgggactataggtatgtgccaccacgcctggtaattttttgtttcccgtctctactaaaaatacaaaaaattagccgggcatggtggcggacgcctgtagtcccagctactcgggagactgaggcaggagaatggtgtgaacgtgggaggcggagcttgcagtaagcagagatcatgccactgcactccagcctgggagacagagtgagactccatctcagaaaaaaaaaaaaaaaaaaaaagagagatggggtttcaccatgtttgccaggctggtcccgaactcctgacctcaagtgacccacccgcctcggcctcccaaagtgctgggattacaggcatgaacaactgcgcctggcctaaattttttttaaaaaagcacaattttgaaggaaacagcaatattacctgccaaatacctcaccattcccatagtcataaaaacaaggataaggacttatgaaatatacagggatacagtggtgcccagcagatgttctcttgtaagccccatgttttcctgaaaagtgaagctgcttcttgttctctgcccccgcagatgctctggaacgctgtctggaccccagcatgacagagtgggagcgaggccgtgagcgggatgagtttgcccgggcggccctgctgtacgcatcttcccattcgaccttgtcctccaggttcactcacgccaaggaggaggatgactcagatcaggttgaagtccctcgagaccaagaggtctgttgtcaccatgtcccttacctggtgaactttaatattaaagcactgcctagccaaaatagttttttccttttttttgagacggagtctctctctgtcgcccaggctagagtgcagtggtgtgatctcggctcactgcagcctccgcttcctgggttcaagcgattctcctgcctcagccttccaagtagctgggattacaggcgctcgccacaacagccatctaatttttgtatttttagtagagatggggtttcaccatattggccaggctggtcttgaactcctgacctcaggtgatccacccgcctcggcctctcaaagtactaggattacaggcatgagccaccatgcccggccgagccaaatatttttaatcccttggtgagaagatcaaaatatacatgtataggagaataggaaaccattttatgccttagtttccaatgtactggagcataaatgttatagcacaaacttttttcacagttctagaagattgcttgaaaattttaaatgggagagcagtcaggtcagtggtgcggccacttgatggaacagaatgcatgtctttttccagaatgatgtcggggataagcagtcggctgtgaagatgaagatgtttgggaagctcacccgagacacgtttgagtggcaccctgacaagcttctatgtaagagatttaatgtccctgacccttatccagagtaagttggataaacctttacatcagtacaaaatgtattcttgatattaaagctaattttccccttacatactcatataaattcttattttttctacatgaacttatttgcatatcactggatatacaaatctacacattttatagatttgctttgataaattacttctataatttgttactaaaacaaaatctggatagcaaactttattccatattgaagctatgaaactcagatatgtcaagttacaaaagcattatgcctctctcatttgccaccttcttgttgctgctcatgtggtttacatttataatgttacttatgtttttaaattatcattataaaagttaaacactttcttatttgattaataacacttcaagaggtggggtgtggtggtgcacacttgtaatcctagcttgggaggccaaggcaggaggatcgcttgagcccaggagttcgaggccagcccgggtaacatagtaagaccccatctctaaaaaatcaaacaaacaaacaaacaaa

SEQ ID NO: 21342 - DNA, 2300 bp, Homo sapien
gttattgtgagtgcattttgtaggtgcagacatgctgctgtgatatggggaggcctggcattctcagcctccacggagctgtttggtttttcactttagctaactttccatttctctcttttctgttttcttttccaggctgaaaagtcttccactaagaaggcagtaattgaatgctgccctggctcgtcctagaatcatttctcctccatgatggaagcccagtgattgttcagttaacgcattgtacagagtgtatttatatgtaaattcctgctgtaaaataatttttaaaaccttgacatttcaaagactgccttgaaaggtcgcagaaattgatttctatttttaatttcagttagtatcgggggaaaaaaatccagactgaacagtttaattaaagtggaatttttctattttcttcttgatttttaaaaaatttcctgggacgttaaaaaagaagttaaaagtgaaggcttctctctggttttgtgatgaagacagcctggactcactgaaggacaagcgtgtgagaaggggcggttgcggcccctcctgccgttttttgggagtgaagctcttccctctctgggtggctgggttactgttggtgcccaggaagccccatgggagggcagagccagggcctggcagggggcctcagcctctcagggtagatgtcactaaagtgtctgagacaggcagggaaaccaggcaggagaatgtgcacccacagcctgggttacacggctgcagctccctgctctgaggccacctcatgtgtaccaaggagacctttttgaaaaataaagtgcagaccaggtgtgatggctaatgcctgtaatcccagagctttgggaggccgaggcgggaggattgcttgagcccaggaattccagaccagcctgggccacatagagacccctgtctccacaaaaaataaagtattgagcatttgtattttacattatgaaagtagcatcatagatcacaacaattttaaaagcagaaagaaggaagaggccgggtgcggtggcccatgcttgtaatcccagcactttgggaggccgaggccagcggatcacttgaggccaggagttcaaaaacagcctggccaacatggcgaaaccttgtctctactaaaaatacaaaaaaattagccaggtctggtgagcatacacctgtaatcccagctgtgtgggaggctgaggcacgagaatcctttgaaccctggaggtggaggttgcagtgagccgaaattgcgctactgcaatccagcctgggtgacagactcttgtctccaccaaaaaaaaaaaaaaaaaaaaagaaggaagaaaatcacttttagttttatcatccaaagatgacacccttcttcaatattttgaataattccaccctgtccttttctagctatggggctgttatctgactggtggtagcattttattccctgtcactgttgttggggttgtgacagatatttccctcatctattataaatgttgtaaacccacccctaataactgcatcttatttcatgcaggggctaccccataacttactgaccttttctgttttgtcatgaagtgggttggccaggagctgtacccaggcagaggacatgaagaaattgccctgtgacaggagccagggaaaccacagcggagggctggaggctggggtgctggttttgctggctcggcctggttcccagaatgcaaagcccatttttcttttttttgcaacctccacctcctgggttcaagccattcccctgcctcagcctcccatgtagctggaactacaggcgcacgcccccatgcctggctaatttttgttattattttttttaagtaaagatggggtttcactaaacctgttggccaggctggtctccaactcctgacctcaggtaatccgcccgcctcggcctcccaaagtgccgggattacaggcgtgagccaccgcgcccggctgcaaagcccatttttctataggtaacctgtgctgcgcggggtggcactagttttcacccagcgggcgaggaggcagcgaagtcgcgggcccagcgtagcgcgcgcctccgaagggcttggtgcgggcgcgggcgcgggcgcgcggcgccaccgttcccatccaggcttgtcggcggccaccggcggaccgggcttcgagatggcctccccgccgcggtgctccccgacagcccatgacagggaatgcaagttgccgccaccctccgcccccgccagcgagtattgtcccggcaagctgtcctgggggaccatggcgagggc

SEQ ID NO: 21343 - DNA, 2300 bp, Homo sapien
actgggccagagctgcattggggacccccagcaagggtcttgcctggcacagcaacctctagggggcactagaccatcatgagacaaacgggaaatggggtgtcagttatgggccggggtctcaatatgggccgggagtaggatagggcagtgaggcactcaccttgggcacagaattgaaggaagtgccaaaaaactcaataatgaagataaatcaactttaatgcaaattttttgtgtgtgtgcaatggggacagttgtttccaatcagcccaaggttcctgggtaccttggccgtttcttgccttatgggtttatgagggttcacaatgggatgtgcatagattggggagcatggagatttagatatagtcatgtgattgtagagcttttcttagcctttccacttggttcaaaatatgggaggatattttgataagtgtgtctaggggctcacatttttcttttgcttcaggctccaacatgattcccatattggtcattggtctggaccctagattccttacataacgtgcaaaacatgcattgaagcaggcagcatcttcaacaaaaccgcatattttggccaggtgtggtgggtcctgtctgtaactccagcactttgggaggctgaggcaagaggatcccttgagtccaggagtttgaggttgcagtgagccgtgatcacaccactgcactccagcctgggcaacagagcaagaccttgtctctacaaaaaaatgaaaaaattagcctgacatggtggtgcacacctgtcatcccacctacttgggaggctgaggtgggaggattgcttgagcccaggagtttgagggtacagtgagctatggttgcagctctgcactctagcctgggtgaaaaagtgagactgtctctaaaaaaactaagaagcagcagcagcagcagcaacaacaacaacaacaacaacaaacgaacaaaccgcagatccaccctaccattgcccctgcctctgttgagcatttttgccatgcgtaaataaatgcctgctcatccgcagtcagcagtctgaggaaattctgaaaccaaattacacataggctagtgctctatgccatcaatctgtaatgtatcttgttatttgatttttacgtcctttaatacatttcctaagaagtctgctttggaaaaatcaccaaaggaattagaagagagagaataagaaaacccagaaaaactaaaaggatttttcttccccccattttttattaaaatccaatcaacctgcacagtgcgagtgagtgagtgactgtctacgctttcactaacggaccatcagtttctctcaaccttctctccataaacggagaatatcaaatgagggtctgggggtgttagaaaagggttgggagcctcagctcaggttggtgggcccgctgtgccatggagcctttggggacctctgatttcacatccgtcttggccctaaatggccttctcaaaccttccccctgtctctcctggttcttgcctcattggactcaacctcttggtgggcagctctccagagggcacccccagcctaagaagcaggcctcctcccaagtccccagcctcacgaggatagtgggtaacagggtgggctcagggggccctgggagatctccagaggcctctggtgtgttcaccaatgtcccctgacaggtcttgcttggcacagggggttcctcttagagacgtgacagggcacttggactgtggcaaatgaaagaagcggaggggcaggaacagggacaccttgcgaagaagacaggccttagccttgtgccacccctatgaggtccctaagccgtcctctctctcccaccttttcccagtcctcgctccccggtcctcctcagcacagccggctccaggagggatcaattcgtgggcccgggaggaggccaggcgagcaccggctgcctggagcactgggctggagcgcggggagcgcggcggggggcgcgggcggggcggggctggtgcgcagagctgtccagcaccccgaggcggggcgtgcgcccccggcccgccccagccgcctccgcccgcccagccagcgccactgcggctcggcgggcgcgtcacgtggctggcgcagcgcggcctccaggctccgggcgcgggcgaggggccgggcgggaggactgacagacccacggacgctctaccggcggcacccggccgggcgggctgggcgcagcgcggggcggcccggggacgccggggccgggcgggctgcgcgccgcggggcatgggcgcgccgggggtccccgggc

SEQ ID NO: 21344 - DNA, 2300 bp, Homo sapien
tcacaatgggatgtgcatagattggggagcatggagatttagatatagtcatgtgattgtagagcttttcttagcctttccacttggttcaaaatatgggaggatattttgataagtgtgtctaggggctcacatttttcttttgcttcaggctccaacatgattcccatattggtcattggtctggaccctagattccttacataacgtgcaaaacatgcattgaagcaggcagcatcttcaacaaaaccgcatattttggccaggtgtggtgggtcctgtctgtaactccagcactttgggaggctgaggcaagaggatcccttgagtccaggagtttgaggttgcagtgagccgtgatcacaccactgcactccagcctgggcaacagagcaagaccttgtctctacaaaaaaatgaaaaaattagcctgacatggtggtgcacacctgtcatcccacctacttgggaggctgaggtgggaggattgcttgagcccaggagtttgagggtacagtgagctatggttgcagctctgcactctagcctgggtgaaaaagtgagactgtctctaaaaaaactaagaagcagcagcagcagcagcaacaacaacaacaacaacaacaaacgaacaaaccgcagatccaccctaccattgcccctgcctctgttgagcatttttgccatgcgtaaataaatgcctgctcatccgcagtcagcagtctgaggaaattctgaaaccaaattacacataggctagtgctctatgccatcaatctgtaatgtatcttgttatttgatttttacgtcctttaatacatttcctaagaagtctgctttggaaaaatcaccaaaggaattagaagagagagaataagaaaacccagaaaaactaaaaggatttttcttccccccattttttattaaaatccaatcaacctgcacagtgcgagtgagtgagtgactgtctacgctttcactaacggaccatcagtttctctcaaccttctctccataaacggagaatatcaaatgagggtctgggggtgttagaaaagggttgggagcctcagctcaggttggtgggcccgctgtgccatggagcctttggggacctctgatttcacatccgtcttggccctaaatggccttctcaaaccttccccctgtctctcctggttcttgcctcattggactcaacctcttggtgggcagctctccagagggcacccccagcctaagaagcaggcctcctcccaagtccccagcctcacgaggatagtgggtaacagggtgggctcagggggccctgggagatctccagaggcctctggtgtgttcaccaatgtcccctgacaggtcttgcttggcacagggggttcctcttagagacgtgacagggcacttggactgtggcaaatgaaagaagcggaggggcaggaacagggacaccttgcgaagaagacaggccttagccttgtgccacccctatgaggtccctaagccgtcctctctctcccaccttttcccagtcctcgctccccggtcctcctcagcacagccggctccaggagggatcaattcgtgggcccgggaggaggccaggcgagcaccggctgcctggagcactgggctggagcgcggggagcgcggcggggggcgcgggcggggcggggctggtgcgcagagctgtccagcaccccgaggcggggcgtgcgcccccggcccgccccagccgcctccgcccgcccagccagcgccactgcggctcggcgggcgcgtcacgtggctggcgcagcgcggcctccaggctccgggcgcgggcgaggggccgggcgggaggactgacagacccacggacgctctaccggcggcacccggccgggcgggctgggcgcagcgcggggcggcccggggacgccggggccgggcgggctgcgcgccgcggggcatgggcgcgccgggggtccccgggcccaggccggccgcggcggggctcccggggcgcgggggcagcggcgggcgggggtcttccctggcggccgccgctgagcccccgcagggcccgtgacgccgcggccgatgtggccgcgcgcgccctacgggcctgcaccgccaccgcacaaagacgcctcgggagccgccgcctgcacccgggccgcagcagccacgccagccggagcccgagccctagcccgagcccgagcccgagccgcagccagagccagagccggagccgcagccggaaccggagccggagccgcggggcaggaggcggcgcccgcgggcggccgggcccg

SEQ ID NO: 21345 - DNA, 2300 bp, Homo sapien
tgctggcttgcacctcactgacctgggactgtcaagggtctgatggtgacgcagtggtggccagccttgctttaggaccaagagttctgttcttatccttgatgctctcacgagctgtccgtgggggttactggctccctatttgtcacagtcccgactcacctgggccttcatggtcctagtaggcccccaggggaaggggcttcagctctcagctcatggctccagctgcccagcaggtcctcagatggacccgtccactcagggacccacatctctggagcacctgccatgcattaggcactgtgcagggccctgggacatggcacggccctacctgcctgtgtgatgttcatccatcagtcccaacaacaaaagggaaatgctctgtggccgaggctggggggagggatggagggttggagctctgtgggggctatcccggagggcttccctgggaagggaccttggagctaggggtggaagctgaggagtccgtgaatgggataagaaggtggggatagcacccactagggaccaccagggcctccagggcaaagtcccctccaatgtgagagatcggagaggtccggggggctaggggttatgggagggatgaggcagagtgtggggcagggagggggctggcgctgctgtagtgaattgtggttttgtcctaagagcatgggaggcagccagagggctctccttcctttcctgcagctgggtgccagagagtcttgctgagaaccagagagaacttggcttgcaaggtcacggtgccaggggccagccatgggagagtgaggagagagtgtcactgggctcgggaaaggggtcgtccctcacctcagtttttccatctgcaaaatgggccctgccttcatctcaggctgttgtgagaatcagatggaccagcgtggggaagggtcagggtgctgtggggtgggaggtgtggtcaagtgcaggggccagccgcctggtcctgggagggtcagggcacagcggggcagggcaggctcaccacactgccctggatggtttagaagcagagagcatggagaatggatggattaaagcgaggcccatggggctgggcatggagggctcctcctttgagctggcgggcgtgatgctttgctcaacctgagcggtatacagttggcactccatgagtgcatgctggctcagtgctgcagcaagaagctgaggcccccagaggcctacagtgattcctgactctgcccctccctaactgtgtggccccaggcaagtcgctgaccctctctgagcctgtttcctcacctggttccgagatctacctttggcggctttgcacttgtactcaggataaaactcaaattctgcacaaggtgtgatcagatccaggtggcgtttccagccacagctggactttgccacctctcttcaggcctgttgtagtatcttcattccactgaggggttctgcgtaaagttcgtctgctcccacccccagcctatgagttccatagagcaggccttattcccaccttactcagtgtgcctaccatgcatgcttggcatgtagtaggtgctcagtaaatacttgttgagtgagcaaagcctcagggaaggcaggcagggggccatcgcaggatgggctatgccggctgggcaggcctaggggtgtgggattctccactgacccgaggccacgaggctacaccttggaggtgccggctggcaggacgggttgttggtgggttttctcccagctctgccagagatgcgggggacaggacctaggctgtagtccactgcatagggttgggggctacagctgcctcaagtctagggggccctccttggcctcccgtacacaccacctccatgaagtcacaagttgtggccttgcccttggccatggccacccttggctggactcgatcccaccatgggggaggcctgtgctgaagcccccttccccccactgcaacccgcatcccaaccaaagatgggccggcctttctcggcctcctctcccgacagcggcctgcagtgggaagctggagcagcacacggagcggcgtggggtcatctacagcccggcctggcccctcaactacccgccaggcaccaactgcagctggtacatccagggcgaccgtggtgacatgattaccatcaggtaggggcacccgggggtgtcggaaggaatcaatgtgggcccacgtgcatggggtgggtgagaatgtgtgtgtgtgagcaggtgtggagggcacacgcctgagggtgtacatgtgtgtgagcaggtgtggg

SEQ ID NO: 21346 - DNA, 2300 bp, Homo sapien
gtgtggtcaagtgcaggggccagccgcctggtcctgggagggtcagggcacagcggggcagggcaggctcaccacactgccctggatggtttagaagcagagagcatggagaatggatggattaaagcgaggcccatggggctgggcatggagggctcctcctttgagctggcgggcgtgatgctttgctcaacctgagcggtatacagttggcactccatgagtgcatgctggctcagtgctgcagcaagaagctgaggcccccagaggcctacagtgattcctgactctgcccctccctaactgtgtggccccaggcaagtcgctgaccctctctgagcctgtttcctcacctggttccgagatctacctttggcggctttgcacttgtactcaggataaaactcaaattctgcacaaggtgtgatcagatccaggtggcgtttccagccacagctggactttgccacctctcttcaggcctgttgtagtatcttcattccactgaggggttctgcgtaaagttcgtctgctcccacccccagcctatgagttccatagagcaggccttattcccaccttactcagtgtgcctaccatgcatgcttggcatgtagtaggtgctcagtaaatacttgttgagtgagcaaagcctcagggaaggcaggcagggggccatcgcaggatgggctatgccggctgggcaggcctaggggtgtgggattctccactgacccgaggccacgaggctacaccttggaggtgccggctggcaggacgggttgttggtgggttttctcccagctctgccagagatgcgggggacaggacctaggctgtagtccactgcatagggttgggggctacagctgcctcaagtctagggggccctccttggcctcccgtacacaccacctccatgaagtcacaagttgtggccttgcccttggccatggccacccttggctggactcgatcccaccatgggggaggcctgtgctgaagcccccttccccccactgcaacccgcatcccaaccaaagatgggccggcctttctcggcctcctctcccgacagcggcctgcagtgggaagctggagcagcacacggagcggcgtggggtcatctacagcccggcctggcccctcaactacccgccaggcaccaactgcagctggtacatccagggcgaccgtggtgacatgattaccatcaggtaggggcacccgggggtgtcggaaggaatcaatgtgggcccacgtgcatggggtgggtgagaatgtgtgtgtgtgagcaggtgtggagggcacacgcctgagggtgtacatgtgtgtgagcaggtgtgggatcatgtgcatgtgtgtgagcatatgagtgaggcgtgtgtgagcactcgtgtgaacaggtgtatgggtgtgtgcatgtgtgtgagcatttgtgagtaggtgtgtgtgcatgcagatgtgtgtgtgtgaggtaggcgtgtgtaggtatttgagcaggtatgtggtgtgtgcatgcatgtgaacacatgtaagtaggtgtgtgtgcatatgtgtgtgtgtgcatgtatgtgaacacatgtgtgcttgtgtacatggaaaagcccatgtcggagaagacataaaggacacatgtgagagactgcatgtgtgagcacatgtatgtgcacgagccatgcctgcaaaggtgcagagagcgtgtatgtgcgcatgcatgtaagataacaggtgtaaccatgtgtgaaccgtaagcatgtatgtgcacatgtgaatgcatgcacgcaagtgtgtccagtgctctgggtctccacgggcctctgtggcgaggtgcccaagctggacctcttcctggtttgagcctcgttcatggggtgtggggggtctcagtcactcagctctgccaggaaggcagggccagcacacaggccactgggaacacagcctgggactggtgggcatggtctgatgtctctgaggtggcagaggtgtcctctctgtcctgcaggggtggctgggggccaggctggcactgagcccagagcatggtttctggagggggccttggggaggggagtgaatcaggcaaagcccgggtgcttgagctgcagggacatgcagagggaaagggggccaggcagtgagcggtggtcctggccaggggtggtcacagggacatttggctggggagtcactataggttccatctgccatagttttcctaaatgccagagcccaaaaagcgcaacccctgacttactccatagctgcaatgcgtgaggatgtgatgggcatgggca

SEQ ID NO: 21347 - DNA, 2300 bp, Homo sapien
cagctagggctcttggtaaggtctagtctctgcaccccataggtctccctcagggggaacacagctcagagtcacccatcttcagccacagtactctgcgagagccagggctgaagccgagaggtctggggacagggaccctggctcaggagacagcctccgtccaatggggggcctagttgttattagaaaagcatttggtgactgggcgcagtggctcacgcctgtaatcccaacactttgggaggccgaggcgggtggatcacgaggtcaggagatcaagaccatcctggctaacacggtgaaactccgtctctactaaaaatacaaaaaatttgccaggcatggtggcaggcgcctgtagtcccagctacttgggagactgaggcagaagaatggcatgaacccgagaggtggaggttgcagtgagccgagatcatgccactgcactccagcctgggtgacagagcaagactccgtctcaaaaaaaaaaaaagaaaaaagaaaagaaaagcgtttggtgcctatgttgttcccagcgcctgccccacagcagccttgtcaatgtttaagtacgggtaacaccttctctgttaaaacagtctatcaatgcagccgcaagacctcaacaaggtcaaccctgcctccctggaccggtgctggcctctggcagcctcgccagcccccgggcgccaggcccagggcagccctgctgcacacatcagggccaggttggccgggaagggctctgggcagcttgagccactcccgcccctgctccttccagctttctgctgctctggagcgccgtcctcatcatgtaccccaccagccttgctgtcatctccatgaccttctccaactacgtgctgcagcccgtgttccccaactgcatcccccccaccacagcctcccgggtgctgtccatggcctgcctgagtaagcatcccctttggcccactgtccccagatcagccacctgcccgggctccatcctgccctgagcaggaggacagaggggtgaaatttcccttcagaaaattccagctgctataggggatgccattctcgggccgcctgggctggacttggccatggtccactgtgaaaggtcccggcctcggcgcccacccccgccttccctccgcagtgctcctgacatgggtgaacagctccagtgtgcgctgggccacgcgcatccaggacatgttcacaggcgggaagctgctggccttgtccctcatcatcggcgtgggccttctccagatcttccaaggtagggccgagtcggggtaagggccgggctggggagatggtgctgacccccgacttctgggcctccaggacacttcgaggagctgaggcccagcaatgcctttgctttctggatgacgccctccgtgggacacctggccctggccttcctccagggctccttcgccttcagtggctggaacttcctcaactatgtcaccgaggagatggttgacgcccgaaagtgagtggggcccccaactgggccctgggaagcagccaggccctctggtgggacaggcagcctctccgcccagccccactgccacccaaggctcgggctggtcctcggtggcccacgcctgttgccctgcaaaaatggccctgggaagaaagccggggggcttgcattctagcctggccctgttctctctggctatggacacgtcacagccccttgcagggcctcagaaaggctgaatatcatcatcctgctgtaaatagatccagagatttgcatttggcctaaaattatgcatatacacacaatatggtccctacaaatgaagccaatgactgcgtctgatgctcggccagggatctcgacagtaaacctttgcagctgagcgagctgggactggaaagttccaggaagactctgggtctgtggactgggctctggggccattttggggaattttccaggctgattttggctgtatgcgattttatctttctgcacagacatcagaccctgtcctcaggatgtgatggggcccctcccccatctcccatcctaccagcctgtgtccaggtgggggtggggcagggcagacaacagggtccctgtgtctcgggcagcaatgctgccccctttcctgccccaacatccccagcagacacaagagatggagactatgagctgctctcgtggctgggtctcgggggtcctgcaccctcaggagctgacgctgacgcactccactgcctgtcaccaggaacctacctcgcgccatcttcatctccatcccactggtgaccttcgt

SEQ ID NO: 21348 - DNA, 2300 bp, Homo sapien
atgtcagctgtagggtttttgtttgtttcttggtttcttggagatttgtttttaggtagatacttttatcagattaaggaggttctcttctgtttctatttgctaagagttgtttgtttacatcacggatgactgttttttgcatctgttgaggttttccttttttctctctattaatgtggagaatcatgctgattggtttttggatggtaaaccaatcctactaaccttttgttcccattgaaatttgcaggttctagttcaattccacgaaaaggacctcctgagctatggggcctggctgacaacatacaaactccatcctgtgcaaagccctaggccgacctttcccccacaaacgcatactccacattccaggtcccagagagacaccctcgaaaaccacaggcttcagagctgcgaggcttgcgccagcccctgccccttggcaagctgcccctgattgcaccagccctggctagaccctctcccagcagaccctagaattgcgagggcaactggggggctggggagagtcaaaccagaaggtcgaggcctctggcccctaacacccgcgacaatcaggggtctccggagccagggctgcccctaccctgcgcgaggctcctttaagagagtcggcctctgaatggtctctggggctggaggtggagggcgccaagaatgccggtctccgacgacagaagcgagagggatgcagcttcgccgggtggcctccccctcggcgtcccaccagcacgtccaccctggatcctcccgctcctactcctaccccaagtccccgcccccaacttcgaagctcctgtgtgcctgcaaacgccggccccgccccgctcccacctccaggccctgccgctgccagggacccgcccctgccagggacccgcccccgccccgtcccaccccggtccaccctgcagccgtcggacccctggcagggccccagcaaacccggaggccgccactggggggaaggacggggcgcccggcgaggcctcatccacatgcaggggacggcgcgtcgcggcggccgccaggaagaaacaaaggctgttccgccgccggccgcacagtgccaggctcgccccgcccgccgccccggtggccccgacgcggcccccctggatcttttccgccggcctcggctgcacagtccggacggcttccgggaggaggcagcctccctcggatccccgcactcccgaccctctcccgcgaccacagcctccttctccgtgtctcccgggcattccaggtcgcctggccttcttgagccgggctggatcgcgcgggacctgcaccagagacccgagttctagtccgctgagccctcactctgacctgggacgaggagcctgtagtgaagatctcaggccagaggtggcccagagcctggtagggtgggcgagccgtgtccaggactcgtcacaggtcttgggtccccgtgatgaggatgagagcccccgggatcttcacctcgaccctcaggcctttgatccagggtgcataggacacccagacccctcagaggagttccagacctcaacccccacccctcctgaggttgtccgcctgggagcctcaggaggcacgagaaagggtttggtctcagccctgcacttgctcggcgatcgctactgatctctgggcttcaacttccacctgtagaatggactcaccctgggagctgtctcctacacacacacacacacacacacacacacacacacacacacacacatcgtgcaggcatagagtactaaagggagcacacactgcatccccacacgcggccagctgttattcttgccgtccccctcggcctccctgagagcagggattgtcttgtctcggagctctgctccccaacccggccccaagaatggatgtaactcaggcaactggagggtcccttccttcgcccaactgggaagtccttcctagatctgccccaagtcctctccttccttcccaggccgggactgggggagggggcgttccctttaagggaggtgggggagggggctgtgggccggccctccttccgcccctcccgggcccccgccgcccggggcccccagtcccgggcccggagccagcgcatgcgcccgcctgtgggcgctgtcccggctgcgagggccgtgagctcacggaccgacggaccgacgggcggccggccggacagacggggcagcgcagggagcggggacgcggcgggacagcgacatggccggccacacgcagcagccgagcgggcgcgggaaccccaggcctgcgcc

SEQ ID NO: 21349 - DNA, 2300 bp, Homo sapien
gagaccctccaccttcatgtagaactaggggaacaaccttaggttccaagccccaagtccctatgtttccacccctttctaaggacaggcgtggaggagcggctggggctggcgggcttgtcgggatctcagctccctgagccctcctcctgccacgggcctgctcccctccttctctcatgggggtctgctgtagcctcgggaaggaggcaggaaacctccaaataaaatgacaaggcacgatttgctccccctactcagtaggcattggagcggtgagtttgcatttccaaggcacaaggttatcctaaatactagagttgccgggctcccagctcagccccaagaattctcccctcctcgcagggagaagccaccgcctggccccctcatcttagacgcaccaagtccggcgcagaggaagggaggggacacgcggagcaggccaggctttcaggaggcaccggaatctcctagtcctggctcgcacggctcgggcaagcctcgagatccggcgaccccaaaccactccctgggtccccgccggaggctggcccagggcggtcccacagccgcgcgcctcacgcgcagttgcccatggccttgaccaaggagctctctggcagctggcggaagatgccccgcagcgtgtccagttcgcggctcagctgttccacccgcttgcgcaggcggtcattgtcactggtcagctccagcaccttctgctgcgtctccacgttgcgctgcttggccttgtcgcggctcttgcgcaccgcgatgttgttgcgctcgcgccgcacccggtactcgttgctgttcttgtccaccgacttcttggccttgcccgcgccgctgccgccactcgcgcggaggtcggggtgcgcggcgcccagccccttgagcgcgctgccagggcccggcaggccggcggcaccgagcgcgggcgcggggtgcgggctgggcacgggcgtgggcggcggcgtggggtgaccgggctgcaggtgcatggtggtctggccgcagtgcgcgatctggaactgcaggtgcggggcggccaggtgcgcgggcggcgggtgcgggtgcgggtgcgagggcggcggcggcggcggcggctggtaagggaagaggccggccagcgccagctgcttggcttcatcctcctcgcggggctcctgcttgatcaccagcggccgcagcgccggcgccccgacgcgctcgtacaggggctccagcctgccgtccaggtagccggcggccgcgcagccgtagccgggcgggggcccgtgcgctcccccgggcatgacggcgccgccggggcccgcgggcgcgcccgggtagtcaaagtcgccgccgccgccgccgcccgtggggcccacggccgccttggccttctcctgctgccggctgtgctggaacaggtcggccaggaactcgtcgttgaaggcggccgggtcgatgtaggcgctgatgtcgatggacgtctcgtgctcgcagatgccgcccagcggctccggggcggcaggtggggcgggaggctgcgcggggcccgcgccccggggaaagccgaaggcggcgctgctgggcgcgtgcggggggctctgcaggtggctgctcatcgggggccgcggctccgcctcgtagaagtcggccgactccatgggggagttagagttctcccggcatggcgagcctcggcggcctccagcctgcgcggggcgtcgccgccgcccacccggagaccctgctcgcccgcgcccgcgcacctccgggtcgcgaatggcccggcccgcgccggcccagcttttatacccggcaggccgcgtcgccccctagagtccgaggcggcctctgtccccgggctgcggcggcgcggcgcctgctgggtcctagcgcgcggccggcatggggcggcgaaccagcgcggcacagcgccgcgctccccaggcaggccgcggcgcaacgcccaccgcctccagcgcgcccagcagagccgcggcgctcgctccaagctccgcccccggcccggccgtcgcccccgcgcccacgtggtcggtagcgggggccccctcctcctgcctgccctaggcgcccgtatccagccacggccgggagcccaggagtatcccgaggctgcacggggtaggggtggggggcggagggcgagtcttggtcttgagctgctggggcgcggattctctttcaaagccagaaccaggcctgtcccggacccgcgtcccggggaggctgcagcgcagagcagcggggctggggccggtggggggccgtttgggacgcgcgga

SEQ ID NO: 21350 - DNA, 2300 bp, Homo sapien
cccgggtgggtgaattctggttcaattgtaggaggacctgtggcccctggggttggcgaaccccgggccgggagtcccactccttgccattgtcgcccccacacattcatcagccccctattggacaaagtcttattcccattactgaggtttcttccagtcctacggggcagagttcccgatctctgggcaggcaacagcagctgtgcaaaaaaggccagacatcgccttcctcccacaactccacaggccgggaaccgtgcatgtacagtggcgtttctttgttcctaggtaggaaaagccattagttttagcaccgcagaaaaaaacgcaaatcgctcttggtgctttttgatttccgtccaggtctccctccacaggtgaatgctatatgaatgggtcctgcatttggctcagcaagcagctctccggctcacatcgggatatttatttaacgtatctggtttttactccctcccgtccaaaagcgtcaagctaaaaatatcttgtttatgagctctggaccgaaaacgaagcagttgggctattaatcactgggactatgttgaataggaacttgattaaagcgcagtgtgcgttgcccagatgaaactgcttctttactgcgatcgtcgtggaagctcggggctctccagcggtgtttttagctgtgccccctccggggctcctgggcgggtcgtggcgccttgccaggcctaaggccactgtcggtgaagggggtcttccctcacctgtaggcaagcgcgcctctagccgggacgcaggcggcgtcaggcctcagcgccagtggcgaggggcggcgcgggcaaggacaggagacacttgagggctcccaagactccatctgggcccagctgacggtccgtagccgccaccccggccccggtaaagaatgcgagggacgcacgtggctgggggtctcggtggcaagctccttcccccgccgcggtgagagcattagctgccgcactcaaggggccccagggcctggccgcctcggtccctaggatcccggggactacagcgcccggcgaaccactgggcagagttctccctgtgcgtgctcggacctggcagcccggcggcctggacaccctcgctcccgccgttggcgcccacctgaatggggaggcgggggaggaagcggtggcttcgggcctcgagggctgcggcccccgcctcggaatcccggccccagagttaagtttgtctcctccctcggtgcgcccctccccgtgctcgccccggcgtccagctccgctagtctggggggccccgcggtcccgcaggaaaaaaaatcggcgactccacgccgggtaacagcgccggccccgcgcgcctagcaagccgcgcgctccgacctggagaagtaattataaagaaagttttccagcccgggcggatcgaccggccaggtcctccaggctcccgggccgaggccgcctccgctccccgcggggtcctagcgccctgcgcggcgccgcccatgggaccccggcgtcctccgagaggtacctctgcgcggaatcacaggggtagcctggagatcagagctaggagacgcagagccaccgcgctcaggacctctccgcgcgtcccaaacggccccccaccggccccagccccgctgctctgcgctgcagcctccccgggacgcgggtccgggacaggcctggttctggctttgaaagagaatccgcgccccagcagctcaagaccaagactcgccctccgccccccacccctaccccgtgcagcctcgggatactcctgggctcccggccgtggctggatacgggcgcctagggcaggcaggaggagggggcccccgctaccgaccacgtgggcgcgggggcgacggccgggccgggggcggagcttggagcgagcgccgcggctctgctgggcgcgctggaggcggtgggcgttgcgccgcggcctgcctggggagcgcggcgctgtgccgcgctggttcgccgccccatgccggccgcgcgctaggacccagcaggcgccgcgccgccgcagcccggggacagaggccgcctcggactctagggggcgacgcggcctgccgggtataaaagctgggccggcgcgggccgggccattcgcgacccggaggtgcgcgggcgcgggcgagcagggtctccgggtgggcggcggcgacgccccgcgcaggctggaggccgccgaggctcgccatgccgggagaactctaactcccccatggagtcggccgacttctacgaggcggagccgcggcccccgatgagcag

SEQ ID NO: 21351 - DNA, 2300 bp, Homo sapien
tccttttttatttttatttttttatttttgagatggagtcttgctgtcacccaggctggagtgcagtggcgtgatctcagctcactgccaacatttgcctcccgagttcaagcaattcttctgcctcaggctcccgagtggctgggattacaggcacccgccaccacgcctggctaatttttatatttttagtagagacagggttccaccatgttggccagggtggtctcaaactcctgacctcaggtgatccgcctgcctcggcctcccaaagtgctgggattacaggcgtgagccactgtgtctggcccccttacacattttttaagtgattaggaaatattcagggtaaaattatgattttgtgagcaataaatcacaatcctattttaatagtactaaaatcttgatcaaagcaagttcaggcaggacttggttactcacacccttaatcccagcaatctgggaggccgagacagaaagatcacttgagcccaggagtttgagaccagagtggacaatatggtgagaccttgtctctacaaaacatttttaaaaaattagctaggtgtggtggtgcatgcctgtaatcccacctacttgggaggctgaggtgggaggatggcttgagcccaggaagtcgaggctgcagtgagctgtgatcaagctgtggcagtgccattgcactccagctggggcaacacagcaagatcgtctcaaaaaaaaagaagaaaagaaatttaagctgagaatactgagagccaacgtgaagaaacacacttgtttcaatgacacttattctcctaagtgtgcatctgtgagcattattacctgtttttttttttttggagacagggatctcattctgtggctcaggctggagtgcagtggctcaatctcagctcactgcaacctccgcctctcaggctcaagccatcctcccatctcagactccagagtagctgggaccacaggcacagcgccaccacacccggctaatcttctgtatttttggtagagatggggtttttccatgttgcccaggctggtctctaattcccgacctgaagtgatcagcctgcctcggcctcgcagagtgctgggattacagacctgagccaccgcgcccagcccattgttcaccgttgtgaccccttttaatttttatttattgctttatcatcttactgattcctcgaaacaatcttacggggcgagccggttccatgggcgctgaagaaacatttcctctttcaaagcctcaattgtttgaacgatacgcgttgctaaagaggaagcaattaaacctatcaggcgagttctgccctccgcccagcgagctgctgcttcctggtgttaaaacgctttcggggccaggcgcggtggctcacgcctgtaatcccagcactttgggaggccgaggcgggcggatcacgaggtcagaagatcgagaccatcccggctaaaacggtgaaaccccgtctctactaaaaaaatacaaaaaattagccgggcgtagtggcgggcgcctgtagtcccagctacttgggaggctgaggcaggagaatggcgtgaacccgggaggcggagcttgcagtgagccgagattgcgccactgcactccagcctgggcgacagagcgagactccgtctcaaaaaaaaaaaaaaaaaaaacgctttcgggttctcctggcgagttttaagtcacactggatcgctgcttattttcagagatcacctcgcacccatgcacctggaaggcacccaaagagaatcattttaagaaattcacttcatctcaccctaacaacaaagcacagcctgcagcacatggatttcacccatgtgacatcaatgctaatcctatgtgtgaaacatctgggttcattcgattttttaaaaattagtaactgagatggggtctcgctatgttgtccaggctggttctccaacgcctgggctcaagccattctcccgcctcggcctccctcggcgctgagattataggcgggagccaccgcgtcagcctccactctttttgcggcgacaaagcccgcccgcctgcggggcgttccgttcgcagaaactctgtgagggacgccgcgggggcttccaagggacgcggcgaaaccaaaacagtcgccggtggttcacaaaaccacctcagaaaatgcttccaaaggcacgtctggcctccacaaggtgacggcttttcagcctccgactcgaacttgagtcgtccacagcactaggccgccgccagcccgggcgagctgcctagggaccgcggacgccgcagc

SEQ ID NO: 21352 - DNA, 2300 bp, Homo sapien
actctaggaggcagcaggcgtgtattgggatggcagggatgggccccatggctccctgtggtatacggaggccatgaggaggggggaatcgggaccctggccaagacaggggtgcatctgtgagcattccacagaactggacatagaggcggtgctgtctgcctgctgggcccaggtgtcacctgtccagaaggtggcacacagtcaggatacggtgcatggggccccacaggacagtggtgctaaggacaggtcttcgtgatggagctacgtggcacccctcacgtcctgccgcctctggcttcattcagacctggggcgtggggagttgatgaggccccacccactggcgactcaccctggcccctcacaaacccggagcagccctgctctgccgctggttcgccctctcctcccaggcccctgggccgcacacctgggaccctgcagcctcctcatccccaggcattctggggcccgttggcagataagggaggctgggggccatctccagacaaggttccccggccctcagaggaccacccagagggtaagtgaggcttggggaggcccaaccgggcaggtggctacggcctctcggctgggcggctggggcgctcccatccctgcccttggcgggctgcccaatgcagggggctgattgtgcaatcgtgcacgccctggggccccccagccagttagccaagacaaggctcagcctcttggctgcagggtgttttgaaagcactaagaatgattttttggcagggtgggggcagtggggggaattgcttaagagaagcattattattcaattatttttttcctcaagtgtaaacagttaaatttggagaaacaaaatcagttttaatttcctaatgtctattcatcccattgtgtgcagggagccaagagctgggccttccagacattgttagctgaggttcgttattcattagtcgccaaagcgctttttttccaccagcaaaaattggcagcaaactgttttcatcttttccagtaagcacctctttgtgctcagagtctattcttctgacagataaacattgtggaaaaaatatggcttttcctataaaagtcatttgttttatttcaggcctgcagacacatctggggctcctctgcttggagcccaataaaagttgaggccttgtcaagccctgtgcccaggcagaggcgagcatgggcgcggtgagggcaggacccctccccacccctgaaggctgcgcttcctgggccacaggggctcgtgccctccccacatggctctgcgctccacccggcccagcccttcccattctcttatggcgcctgcgccctgttctcagcaggtcccccgggcaggcccctagagccaacaccctgaaggggcagctgcgccactgggctgaggcaggccttgccctgtgcccgctggggatcccttctaatctcccccaccccacttcagtggtggacctcaagatttcagaggggaggaaagttcgtttctctggggaaacaaacctgcccctcaaccgtgtaccatggagcagccggggtgggcccatggggatggaggggtgactggaaggaaggaaacctgacgttggcaggcccttgcttcccccaggcccctggcttcgattgctgtgggtggagacagggacggacacttcaggaatagcatgaaggagagggatgggcggcggtggggtgggggagcccagcacaggcttcggatgacagggacgggaaggtcctggagcagagaccctgggacccccagcagcttctgggcaggagacaggccccagctcggtccacatgcacctctcacctgcgcagagggactgtcactccatacggttcctcagccacggggcatccctgccctccggcctcagctcccggtcagcggcccagaggcaagtgttgtggggccggggccacaccagccaggctgtggtgtctcctcatcgcctcccgcctggcctgctctctccaggtcagcgtggctgtccctgccctccgtggaatcagtcacagcctctctggccgtgcccagcgtggaggccgagccagcctgtttctggttaccttacgtgaactgctaattggagtctgatgttcttggcccccaaacagtcagaaatgacagctcccgctccagcagctgggcttcctggggagggagtgcagccgggcagggcaggctcatcccctgaccagaaagcatactcgtgcccactggctcagaggccctggccgccggccggatggtgccccggggacctgag

SEQ ID NO: 21353 - DNA, 2300 bp, Homo sapien
ggcaggggtcatgggcagtgcctccatattactgtccacaaacaagggagctccactcagttggtgggtgccttccttccattattttgtgtttgggatattgacttctttttcatattagtaagcactcagagctggcagctggcttaattttgacatattttatgtcaaaagaaatggtgggaggcaggtgcaatgaatgagctggggggtatgttttccttccttgaaggcgcatggaaagctcattctgctcaccctttgttattatgtattttttaaagcgccacttactagggagttgagtttcttaagctgaaggcggacctactgcttaactaggggtgttagaagttctcaggggcccctaggccaggcagtggggtgtgaatccttacctctgttcttcttcctggaaactggcaagagggtggagagagctcctcttggaccttgcctggaggtcagggacccctgcaaattgtccatgtgttgtgggaaggggtagaagggatgaggccccccctcttccattagctctcgttttccttatctgggaccgggaggtgggaggggctgtctggaggggccacattcctcctggcagctttggtctctggctgtgcctgcaggtttgagtgtaaaaccctctagcagccctgtgaggtggccccattagctctctcctgacagatgaggacagcagggatggtactgggcttccaggtaactgtgccacgtgcccttcactaccctgcttatggctggctcccttgctcctatttaaggggcctattctcctccctgcttcatggggacaaacagaagctgcttctccagtcatagcccctggctcccaccagcctggccatggtgacccacatccttgtttcgataaagaaacaagaagcatcccccaacccacaacctttgatcagaagccacttccagctgtgggacagctgcagggtggggtcaggagccccacacgcctatcctgggccacccatccacctgtccacacacatctgtacaccacacacatctgtacacccttggcgccagggacgccctcccccaacagtgtggggcccccttccttcacaggggcagtgaggtcactcctcagggtatggcttcatgagctcagcctctgtgtgagcactctctggcctcagtttcctcatctgtataatagacttaaagatagtctcgacctcatagggctgtggtgaggtttctatgagctcacatgtgcaacgcatttgggccgtgcttgtaatgccctgactctgttggcagtagggagggcagcgtctgctgcagggtccctacaccttctctgcaggactctgcacccagtaccagtgcccagtggggcagaggagtaagccttctggcagactctccctcctaaacccttctcggctgtgcccacttctcgcctgccctcctccctggcttcccttcctccagcttctccattctgcagcccaggaaacctagaaaagatcctaccagacttaactcataggccccacagtggaggccccgcagggtctggcccttgcttcccttaggctgcccctctctcgcgcacattctcctggacgctgcacatttagagtcctccagttgccccacggcctttgctcaagccctttcccttcttaaacaaaaatcgccacctctgccccgaccctagcctgggtcagtctccctcctctcctcccacgtggtttctttattcctatgtgttcttctcccgggtgggctggtacgccagatcggggactgaaccagaatcaagatgtcctctgcttcaggacctccctcccaccacgaaaaggctgcagatgctgcccgctaacccgacctactgtctgcagccggcagcccgctcatttatcctggccgagctcttgggcccccaatctccgggagccccgccccatcggggctccgcccttccccaggtaccgccccttcccgtcccgtggaatttggctctggaggaggtgggtcaaggactccatgccccgccccctgccccgcccttaccccgccccatgcattggcacccggaggggctcagctgacgccgcacttcacgtgacgccggtgccgggcgaacatggcggcggccaccgggtgagtgctgcgcctccctcgctctttcccgctggcgtggagaggggcatgggtgtcccggccggaccgcgggtgagagcgtcagccggggtcgctgaatgccgcgggtaggcgcctcttcccgttggcccggagtcccagcgccggtc

SEQ ID NO: 21354 - DNA, 2300 bp, Homo sapien
gacagagttaaccactcaataaacagcagccatggccgtcgtcaggagcattgtggagcactggatgctgtcgctggtataaggtgtgggcagaggagacagggagaggttaccaggcaatgtcccagcccagaaggaggccctgcccccacatgcttataggtggcagaagcacggttcctgctggctcagcaatgcctccttgccttcttccatcagggcccctcctgctcagccagggtcccgtactgtgcccaaaccagttctgcattgttcctccccaaatagctcaggctggaaggaaggagctagggaagtgaggaggggctagggagggggaagagcagcggccatagctccagcacagtaggatctgactatgggcgggagagcctcgatcgcggggtgctctggtgcccaacttggctccttcctcttagcgatcgccccagctctttgctgagctgttggatgcctcagtgttcccaggcaaatccccctggggccctacctttggagctgagctgtgtctggcctgcacatccaccagcaccacaccaacaccgggcactgaagaccaaaagcggatccaaactcccacccgctctgagcaggttttctctcctacggcagccttcacccggaagccacagctgttaaagctgctagcgggtggtgagggccttgtggttctgcacccaagaaagccttctcttcactggcttcaaaccatcttagtcttagatagcagcacgggcctcagggatagcccccaggtctaccttgtgggaatgacaccttccactcctggaggcttgtcccatgagtccactaatagggaaagggctgaaaagagcgctggggctgaaacattcagctggctgttgggtccccaggccctcctgactgcacagtttagtggagacgtgcaaactcgcccagttgcacacactcacatgtacacatatgcacacgcacacacacacgcacactttcacatgggcatgccacacatacacacatatgtgcgtgctcatacccacgcacactctcacatgggcttgtcacacatacacacatgtgcgtgctcacatccacacacactctcacatgtgcacaattgcacacatgcacactctcacaggggcatgttcacacccacgcacactctcacatatgcataattgctcacatcggcatggtcatacacatgcatactcacattgtgtacacttacacacacacacacacacactcctacacatgtccacactctcatgcatgctctcacatgaaccaaaatacttgcctcttctgcctatagcagagcagaggtgcgtccgtcgatgccccatggtgtttctcaggatccacgcatcccatgtactgagtgttgttagccgggagattgcctgctcctgtgtggctgcgctctcaccagtcctgaaggtccttataaacattggtgccacccatcttgtaggacattctctgcccggccccaggagcctcagcagaggtcccctgatttcaaacattcttttctgtcattagagcttatgttccacagatgactttgaaaatcttgccaccttcacaggcccagacatgacggtgcagaggacatcaggaccagcaggacataaaaccctcacggtcacagggagaaagtcagatcccgggcacctgacacagccaagccctgctctcaacatgtgtatgacaatgggtgtgatagaggtgccccctgcctctgggtctgggttacatgcccccttctttgagtcctagagggaacagcctgatagtgggcacaccccttcctctccctgaaatgacctggcagacccccttcccccagtgatggccttagggattcccagccatcacccctccctccaggaacccctcatcccatccttccatagggccaccacacagacaggccctctcgacctttcccaccatgctctgcacaactaggatgggcagtgccccacccaaagcactgcatgccccgctccccattgtcacagtaggtacaggacatgggtctattagatcttagacactacagtccgtacatgccaatccattcccagaagacctcccctccccaccccagtgtcactgagccacttcctccagcacagccccacggagggaggcccttttgtgtcttgcccatcacctggctggccagatctgctcagctcttccctgactcaagaaaaacaagagagcttcattagtccgttttcatgctgctattaaaaactgcctgagactgggtaatttat

SEQ ID NO: 21355 - DNA, 2300 bp, Homo sapien
ccctttccagctttgaggctgggctctggaaatgggagctcctattatctccccattgcagttaagtctctctttctctctccgtgtgtgtgcatgtgtgtgtgtgtgtgcatgcatttgccctctggagtgttcatggtactgaagagattctcttgaccatcaggcctctgtggcaaaagttgtgtgctctgttccaggcctaactgcagacagggagctcatgggcagctgcccagccaagctatggtcaggaccttgggtggcaagaggggctgcaagtgtggggtaaggggaccacagggacagggatggggtcattgcactgtgagctagtccggcaagtgactttttgctcactccactctcccctctctttgttcctaccttctctcctgctctgctccaacagctttgggatgtaggatgaataagggttccactgccctgtttttcctgacacttgagtccctggcccttgcactcagctcctccaatctgcacctgactgaggcggaggagggtgatttcagacacacacacacacacacacacacacacacattcccctcatgcgtgcagccagtggagtgtgcctgggtcccagcgcagccccaggcctgggtcactccgagcctaaagtcctggaaagggaaccccagaacaaagcctatcccagtttggaatcatcacacctgggccattctccagatgcgtggagtccagcaaaatggtggcatttttgcatctcaattcgctcatctgtaatacgggagtgataatgtctactctgttgctgcaagaattaaaggaagaccatgatctctttgtcatgcttctatttatcttcttatctgtcctggtctatttttggatgctctgagcttacctggggcattaaggaggcctcatggccctggggctgaggggctccctggccgtccccaggagtggctctgctctccgcctggtgtcccccactctggtcagtcaagacccatgggcccagctcactccccaattccatcactcactctaggtcagctggtaggagtcaggccaaccagccagcaggtaccattagagaggagagagtaagggtctttcactttattaaaggcttctctgctgttgtttgaaaatactgagtgtcccttcaagactaacaggtgactgtgtgcacagtttcctccagctcctgtgagaaagcagttgccccccttcccaaggcctgcttgtcccctgcaggctggggctgcctcttcttaggaagaacaaggacccgaatccagggccccgtgttcctgtccctactctgtcccggtgctgtgtggccgtgggccggttccaccctccacgctgttttcccgagtgtgtatgaagagggtcggttggccccgctctcaggctggtgacccgacacaaacttccaggatgaagtcctgaagggagcacctgttcgcagggcactttcagcagaatctagagccccagggatttgaggatggatgcggacacccgggcctgaggcagctcgcggccttgaccgaattccacgcgagctgaagcccagggatatcccagaatcttcctcaggatcaatcttccgcctttcaccggccctgcgcccccgcagcatcgggtcctgggcgcgcgcccctgccccgctgtggtcaaggcccgccccggtgacgcctggtccttttcccgggttggcgccgcgtgcgacccaccgaggcagtggcagcactggccgcggtctggagcctagcgtcaggccggagtccggctctcctgaaccgggagaccggcgcagccccagccacgaccgctcccacccccgcggccgccggaccgcgcccagcagcgactctttctgagagcgctgccagaggggccgcgggagccgcagagcgcgcgtgggcgcggcgcccgcgagcccccgggagggccgagtgcatcgctggagcgatccccgcccggcccggccaccgccgtagccgccaccacggcggggcggggcacgggccgggggcggggcgccgggcgggcgcggcgctatttccagcctcgccggaggcttcgctctcacttcgctgggagccttcccggcgcgcaagccggatccggcagtgctgcggggaggagagaggacgaggcggcggcggcagcaggaggtgggggaccgatcgcgccgggggccgaagaggaacgccgccccgcgccctctcgctccccgcacgctccggctgccggccccacgctgctcgcccacagatcgcactgggttccgcttggag

SEQ ID NO: 21356 - DNA, 2300 bp, Homo sapien
taatcatttttaagtgtacagtccagtggcattaattacattcacattgttgggcaaccatcaccactatccatctccagaaccttttcatcatcccaaacagagactctgtacccattaaacaactccctgttcctccttccagtccctggtaacctgcattctactttctgtctctatgaattggactactcctggtacttcacacaagtggaattatacagtatttgtccgtttgtgtctggcttgcttcacttaacatgatggcttcaagagtcacccatgttgtagcatgtgttgctatcattgactttttgattgacacatgcaagctgtaattttttgggggggttcctagcatcacaatatattttaaaggtttggggatgcattagtccacttttgtgttgctgtaaagaaatacttgaggttgagtaatttataaggaaaagaggtttaattcgcttgtggttctgcaggctgtacaggaagcatggtgttggcatctgctcggcttctggggagggcttcaggaagctcacaatcatggcagaaggcaaagtgggaggaggccggtcacatggcaagagaaacagtgagagagagatgagtggggaggtcctagactcttttaaacagtcagatttcacatgaactgaatgagaaccaactcatcaccaaggggatggcaccatgccattcatgagggatccaccctgtgattcagtcccctccaaccagaccccacctccaacactggaaatcacatttcaccatgagatttggaggggacacatatccaaaccatgtcaggggacaatcagtcaattttgtggcatctcaatggtgtgtgtcttttgtgtaaacattgcacctgttaatgtgtatgtatatgtagagggagaatcaacatttgtctttaaaagtgtatttgtcttcaagctctgtgatctgaaatctgtcatactgacatgaggaggcaaaagtgaggtcctggtggcgagcgggcctcgggtatttcaagctttaaggctccactgggctccctgggggccgtttcttccttgcttcttccttgcctcctgtcataggattgggctactctttggacctgattccaaggcagctctgaggaaaacaaaccctcagctccctgaaacatagatgacctttttaaaattccaggttcatggagtgcctctctccagatggccccaaacacttccatctattaactcgtgctcattcaacgtgcagcagaggctattgatcaccttccctgtgccggggactgtgctaggtgctgggaatacaaagatggggagaggcctcgatgcgattcccgattcagaggcaggtggcaaatgcttttcccacagtgagggaagggctgtcaccgcgatggtgctctcagggaaccaaggttcacacattcagggaattcggggcactgagtcagcattctagactctgccaggatgaggaggagcaggggactcagtttctttacatgcagaatgactgtcccctgccctgccccactggcataaaatgtcctcaacatgtaagaagccctgggcagagatagtgtccagggtgtggtcagttgacgtggcctgtcagtctttggccacgctctcaggcccccctcgctgtggctgtgtgtttgcaggcgcccctcagactccaactggaatgtgtccgtgatggtgggaggccgggctgtggtgctcctagtagggctatggtggcaagctttaggaccttgtgagcctgattcacccggtaatctccacctcggaacgccctttctccccgctgcagagcatggggctgggggggagtggagagaaccctgccttgtaacagggcagcggacagcaggtaaattgccttccccgggagtagcgtgccgcccggcaggggcctgggtgtgccaaggcccggctctggggatttcaggacccaggccagcgctccccagcagcagggcaggaggcagcctgagagtcggcagccccgccttggagtctgagcactcgcgcccatccgtcaaccttgcagagcattgcaactttatgcctacgcataaaaactggagggactcgtcccagagtttgctgccgccgccgccgctgccattagagcggttttaattagctgcaggatttttaatgagctgaaatcaagaagagccccatctcagaagtaagcgagagccgcgcgcagggaagaactagtctgacaaaacagaaggaggtggtgctctcgggggactgggctgtaggctcccaccgatc

SEQ ID NO: 21357 - DNA, 2300 bp, Homo sapien
cactttctatttgtgtctggtccctcaatgctgagtgggatgtgcattgatggagggctttgctgttcctatgtcgtgcttgggacagtcggccacaaagctgggctgacctctcgggccgggccgggcctggccagcgtgccgaacgcgcagagagcgcgctgctgagccgaagctgggagctggaagcccggaggtaccggggcgtagggagcagagtgggcagcccttgggcctcgcgggagcccctcccaacccctgcacagatccctgacctacttccagggcttctttctgttccaggagcagctcaaaatccataaattaaggaaattaactgatggggcctgcggcatctttgtaagctatttaaatctataaatttacaacatcttctgcatatatcaaataattgaactaactgcagggatgtaactttaatgagaaaatttccccctttttcctgtagttcgaactcgaaaataaataaataaataaaaccttcccttaggaggaaagtttcggctgattcccgcgtaaagaagttacggaagcgctgtctggacgctctctccacgcgcgcgaggtcctctagtagagggagaaagccccccccacttcaccttcctcccactggcaccccgagtccccctcaccccagctccaggccgaccccgagcgccccccaccccgggagtgcggccgctagggggcgtccaggcccggccggagccggcggtcgggacccaggcgccgttccggcccgtgcgcacccgccccgcggtcccagccggtctccggcccgggcgtccctggagccaggcgggggcgcagtgccggccagtcgcgcgctccgtttcctaggagccgggaaatggtcgccgaggaggaggaggaggcacgggcggggcgcaaaggaaacaggaggaagaggaaggggaggaggagtgggagtgggagaaaaggaggaaggggcggccgaagcggagactggggaggggcgtccggggcgcggacctcggccgcggggagtcttggctgccgccgtctccatcgcgccgcgcgcgtaaaggaaatggcgcgtctagccgcgagcggtcggcccggtgccccagcgcgtccctcccccgcggcggccgaccgcgtgtccgcagacgtcacgggagaggggcagcggggcagagaccctgggagggcggccagggagcgggggaggggcggcctggcccccggctccgctccagccccgaccgactggcagcccagtttcttcccaagtcccgcccccagccccgggcgccgcggcggcggctgctctcctctttgtaaccgaggagtcaagaaatgtgagaaacgtgccctgtgttacttatttgggagccgaaaatttatgcccagctgaaagcgcccggggaaatattacatcagatgaaatgacaatgattaaaatcagcctctcccccgccccctccccgagcccggaggaggcccgggcgccgcgtggccggccggcggggggcggggggctgggccgcggagggcgctggggcctgggcgcaccgctcccgggagggtcctggccgcggccccggcgggaaggcgcgggcttcgggagaggcgggtggggatcgcccggcgaaaggaggggaaacggcgcgtttttgtcgccaggcgcgggcgcgcggagctaattgcgactctaatcctctgccccgcggcgcagccgagccccgagccaggagtcgccgcgcgcgcccgttcgcgctgggtaatttggggccggatcgctgccctttacgtccgggctgggccgcggcgaggcgctggctaggggctggagtggggggctggttttctctccagcaatcgagggaggccgccggagagagaggagggaggagaggaggtgggagcggcgggagggcagccggagagcggcgcgaggaggaggcggcggcggcggaggcggcggccgcgaagaggggaggaggcgaggggagggtggggaggggaggccccggcgcgccgcgccgcgaggggccgcgtgaagcgggggccggggcgggaggggtgggtggggggagggttgggggcgagagagaaagtaactccaggacgagaccggagcgacccgcgcagcgagcataggcggcgaagctgcgcccggcgcccgagaccggcagctgcgtggggcgggggctgcgcccgagcccgatctgccggctccgaggtaagctcagcgcgggcggccaccgctcagagccgcgcaaccctgccccgaagtggctgcgataccgaga

SEQ ID NO: 21358 - DNA, 2300 bp, Homo sapien
aggggaaacggcgcgtttttgtcgccaggcgcgggcgcgcggagctaattgcgactctaatcctctgccccgcggcgcagccgagccccgagccaggagtcgccgcgcgcgcccgttcgcgctgggtaatttggggccggatcgctgccctttacgtccgggctgggccgcggcgaggcgctggctaggggctggagtggggggctggttttctctccagcaatcgagggaggccgccggagagagaggagggaggagaggaggtgggagcggcgggagggcagccggagagcggcgcgaggaggaggcggcggcggcggaggcggcggccgcgaagaggggaggaggcgaggggagggtggggaggggaggccccggcgcgccgcgccgcgaggggccgcgtgaagcgggggccggggcgggaggggtgggtggggggagggttgggggcgagagagaaagtaactccaggacgagaccggagcgacccgcgcagcgagcataggcggcgaagctgcgcccggcgcccgagaccggcagctgcgtggggcgggggctgcgcccgagcccgatctgccggctccgaggtaagctcagcgcgggcggccaccgctcagagccgcgcaaccctgccccgaagtggctgcgataccgagaaagtcgcccggccagggtctggacctgggcgggggcggccgctttgtccctctgctgggcggcgggggctggcggcgcgggggtgcccagcacaaaggcctggtgcaagagtggggttgcccacgtgggctggtcctggccgcgggtggaccctccccacgcgggcggtctcggagcttcctgccgcgcggtgtgtgtgtgtgtgtgtgtgtgtgtgtgtgtgtgtgcgcgcgcgcgcgcgcgcgcttgtggaggtccccgcactctggcccctgttctgggccgagcgccctgcagagctggcgagtttccggggtcagaaacgggctcacgcaactggggcttcgggatgcacaagtcccggcttggcgcccaaaatcagagaaagtctccagtgggacagatgtgcgtcctctgacgcccaccccacgagtccgaaacctggcaggaggggctgtcgcgctggtggtggtcccgggcgcgcagggtttggggctgggagaggggccgcgatgggagggatcgccgcctgcagatccggttccccgctgcccgcccgcaccccctgacctggacgcgcgcacccggcacacactcgcaaacacacccgggggcggacccccgcctctgcagcgcctttctgtcttccggcggcccccacccgcgactgcagaaagataagcttcaagttttcgctccgtatctcaaatgtgcatgaaggaatttaactgcacgagtgaataacagcattagtttcaattaatttttttttaatcccggcaacaataaactttgagaacaaaagcgcttttacgtccttaattaggcgagcttcccatctgtggtctccaagtgtctgcctcttgatttaactttgtccccgccccgcctccgcggcaacccctcccagcccagccccgcgcttcgggtgccgcggccaccccgccccgcggcgcctccagccttggcccaagccctctcccgtcgcccctaagttcacaccggccggctggctccgcggcggaggcgggagggggggggtggggaggctggcgcgcaccaggtggcccgcctgcctctccggggccacccctgggacaattgtgcaggcccccaggactttcgccccgggccagcgccctgagtgcggagccgaggggagctcgagaggcgccttctgtttaccttttatggttaaaataacagcttagcaaagaagcgacttcagaagaagcgatttagtgaaatcgtctcaagctgccgcagctcagccagtttaatcacccccagagagccgaacaactgcgagcgcaatgggacacaaaatcattttgtgtgtaaatgagcgtggcattctgctcacttctctctgctcgggcgggcggggctcggcggcgggcgggcagggacccgggtctcccgccgcagctggagaagcgggtcactaccgggccagtttggaaacctgtgggccctcccgaccgctatcgctgaggcccctgcaacaggcgggccagggcgcactggggctgggtgctgggtttgatgctggtgctggtggaatgaacttgtatctctcactgcacccacttttgtgcttctgacttaagcagtggtctcggaaagagggtcgtggtcccgca

SEQ ID NO: 21359 - DNA, 2300 bp, Homo sapien
cagcaacaaaaacaacaacttgtaatctcacctcatagataagattttgttgtacacactttttccttggaaacagattgtacatgctattttataatttgtattattcccatgataatgtgatgggaactttactaaaaagttctaaattcaagaccagcctgggcaacctagtgaggccccatctctacaaaatgaaaaaaaaaaaaagaaattaacaatgcatggtggcttgctcctgtagtcccagctattcaggaggctgatgtgggaggatcacttgagcccaggaggtccagacggtggggggcagtgattgcgccactgcactccagcctggggaacagagtgtaattgtattttgccacactgcacaatatcactttcaatggttgtttagtatgttcgagtatgaatgtatatagttcatttaatcagtttactctcttgttaacagtacatgagtctgactattcacactcttgcctaccgtgggtattattattttgtcaatctgctgcattcattcaacacatagatattgattactaaccatgtactaggcatattctcagtgcttgggatagattattgaaaaaaacaacctctgatctcatgaaacttatatttgagtggaggacatgtacatacatgataaatgttataaataagtaaatcctttagcattttagaaagcaaaaagtgctatagttaaaaaaaaaacagagcaagttaaaggagtagggagtggagaagattgtagttttttaattttaaatttattgtagaggtgacatctccctgtgttgcccaggctggtctctaactcctaggctcaagcagtcttcctgcctcagccacccaaaatgctggggttaacggtgtgagacactacacctggccaaggattgcagttttcatttttatttttattttttgagaaagggtcttgctctgtcacctaggctggagtgcagtggcatgatctcagctcactgcaaccttcatctcccaggctcaagtgatcctcctgcctcagcctcctaagtagctgggactacaggcccatgacaccaagcccagacgtattttttttgtagagacagggtttcaccatgttgcccaggctggtctcgaactcctgggttcaagtgatcctcctgccttggcctacccaagtgctggggttacaggtgtgagcccctgtgcctggccaagggttgcagttttaattagagaaaccaaggtaagcctaattgagaagggggcattgcaagacttgaatcaagttatttgaatttgcaattttattattactatagctgatatggtttggatctgtgtcaccacccaaatctcatgttgaattgtaatcacgagtgttcgaggtggggccttggtaggaggtgattggctcatgtggatgggtttcctcttggtactgtcctcatgatagtgagttctggagagattttgttgtttaaagtgtgtggcacctcccccacctccctcttgctcctgttgccacgatgtgagatgcctccatccccctttgccttctgccatgactggaagcttcctgaggcctccccagaagcagaggctgctatgcttcctgtacagcctgcagaactgtgagccaattaaacctcttttctttataaattacccagtctcaggtatttctttataacagtatgagaatagactaatacaatagctaaactttctttcatatgtttattctttttttttttttttttgtgatggagtctctctctgttgcccaggctggaaggcagtggtgtgattttggctcactgcaacctccgcctcccagattcaagcaattttccaccctcagcctcccgggtagctgggactacaggcgtgcaccaccatgcccggctaatttttgtatttttagtagagatggggtttcgccttgttggccaggctggtttcaaactcctggcctcaagtaatccacccgtcttggcctcccaaagtgctggggttacaggcgtgaggcaccacacctggcctacataccttaatgtaaaaatactttattggttcccagtttctatgtgcatagaagatgggaggtcctctttctgtgcctattacagctgtggcttccggtcccaagcagcatctgaagcgggtagcagctccacaacgttggatgctggataaattgactggtgtgtttgctgctcgtccatccactggtccccaaaagctgagagagtgtctccctcatattttcctgaggaacagacttaaatatgccctga

SEQ ID NO: 21360 - DNA, 2300 bp, Homo sapien
aggccaggagttcaagaccagcctggccaacatggtgaaacccatctctactaaaaatacaaaaaatcagtcaggcgtggtggcatgcgcctgtaatcccagctactcgggaggctgaggcaggagaatcgcttgaacagaggagacagaggttgcagtgagccgagatggcaccattgcactccatcccgagtgacagagtgagactgtctcaaaaaaacaaaaacaaataattcaacttcctcgcatggaccttgtactgaaacagggatttccaaacctttctttgtagccactgtgcaccagccccatcagagctctgtctctctcctgtgtccctctcttatgatgccaggcttctcgccatttgctcactcagctcaccgtcctgcctgtgctctgccttcatcctgctgttcattcatgcagcaaatattaactgagcagctgccctgagccacgtgctgttactaggcccctgatgatacggcagcaaccaaaacaacatcactatctcaaaatgtttacattctagtgaaggagacagatacatacaaataattaaacagacatacttgagagagatacatgctataaagaaaatacaagctgagttaaggagatgagtggtattattttaaacaaggctgtcagggacgtcatctctggaggtgatgcttgagcagagactggaataaagtgctcaagtactggttgaattagacgcgactggaacagaacgagaagctaaatcatgtatatccttagacaccaaagtctggttttctctctgtgtaacatgggatcagtagagtgagtagaggaaggacatgatctgagttagatttttttttttttttttgagacggagtctcgctctgtcgcccaggctggagtgcagtggcacaatctcggctcaccacaacctccgcctcctgggttcaagcaattctcctgcctcagcctcccaagtagctgagactataggcgcgcgccaccacgcctggctaatttttttatatttttagtagagacggggtttcaccatgttggccaggctggtctcgaactcctgaccggtgatgcgcccgcctcgggcccccaaagtactgggagtacaggcgtgagccactgcgcccagccctgagttagattttaagaagatctctctggctgctgtattgagaataaagtactgggggcaagagttgacacagaggcaacttttagaaggctactgcaataattcagcccgagtaatcgtggcttgtgggagaagtgtaggaatggagatgagaagtcagatttaggatatattgtgtatacataacggagaggtgtagtcagaacagatgtggaagcaagacagggcaaggctgactcacggcttttagtctgagcagctgagtaaaaatggtaccgtttacatcaaatagggaacggtggtgaaggagcaggttagaggggaaacagggagcatggctttggacccttaacgtttgagattcgacagaaaccctggttcacggaattgatccaagctacatactgataattgggattagtgagttacaatggcgttgcaagccatgaaactggttcagaccggctgaatgagcgggacaggaaggggctgaaacacttgagtccttgtgagagccccagctccaggggcagcctcgggggaagctccccgggcgatgactgcggtaatggagccgtaggagctccacgaggtgcaggttcagcgtcttagaaggatgagcagcggctcgccacagctcggaggcgggtgggcagcgctccaggccgagggccccgcgtcggcaaagacacaggacccacgacaaggcggccacggcctgagtcaaaaggaaggccgcgcgcctcctctccagcccgcagcaagcgggtgccacgaggcactcagccggtccccgaagttcctctcacgcggccccaagaccaccaccgtagtccaggccaacaagcgctgccgggactcccgaggccacgaatgagccgggagccaccagtagccggccaagtctcgcgagagcgcggcctcgccctcccagcatgccccgcgccgccgccgctgccgccgccgccgccgccgccgcgccgcggcttgagggcgggaggctgggggagggtagcggagccggcgccgccgccatgttgggtctgaagcggctgctgtaggcgccgacggagcgagcgggcgtgcggagcgggcgacagtggcgtgggatctgcctctctgcgagcagctgggagcggcggcggcggcgccatga

SEQ ID NO: 21361 - DNA, 2300 bp, Homo sapien
gagcagctaggactacaggtgcatgccaacatgcccagctaatgattttttgtatttttagtagagatggggtttcaccattttgttgaggccggtgtcaaactcctgacctcaagtgatctgcccaccttggcctcccaaagtgctgggattgcaggcatgaggcgctgcatcagttctgcaaaaaaaaaaaaaaaaaaaaaaaaaaaaaaaaaaagcgtatgcattaaaaatactaagggggccaggcgcggtagctcacgcctgtgatgccagcactttgggaagccgaagcggatggatcacttgaggtcaggagttctagaccagtctggccaacatagtgaaaccccatctccgctaaaaaaaaatacaaaaattagctgcgcatggtggcacacgcctgtaatcccagctgctcaggaggctgaggcaggagagtcgcttgaacccaagaggcagaggttacagtgagccaagattgcgtcactgcactccagctggggcaacagaatgaaactccatctcaaaaaaaaagaaaaaaaatagaaatgttaaggggtttacttcctttagggtactctttaaatgaaatatgatgtttcatattctctatttggaacttctgtatggatgcagacattttcagaaatctcccaggacaatgaacctgaaacttatgtatttataagaaacttggggatttggttattttatttacttattttgaaatagggtcttgctgtgtcacccaggctgcagtgcagccacgcttcagtacagcctcaatctcccaggctcaagcgatcctcatacctcagcctccttatagctgggactacaggcatgcactaccacacctggctaatttttaaaaatgtttatttttttgtagagacagaacatcactgtgttgctagggctggtctcaaactcctgggctcaagcagtcctcccaccttggcctcccatagtgctgggattacaggcatgagccactgtgcctagccagaaattggcttaaaatgcagatttttggaccctgtccccagcaaaaagattcggtagaaatctttattcgtagccagtttactgtgttgcaggtggtccccagtttaactttgagtaatgctgtcttcattgttaaaataatcagatttaattatatggtagatattttaggtaactagggtatttcaagctgtcccatggggctgagtagctggcagctgcttgacttggcttctagaggacttactgctcagcaaggtaaatgttattaataccttcattgctctctgtgtcccaaaggtcaatacccaaactttgagattttgtagactggaggaatctttgtctcccactccttccccaagaaagacatgggttgctaatttttattttgtcgaatgaggacattaaaaataagttaaccgtgagccaggcacagtggcttaggcctttcatcccagcacattgagaggctaaagcaggaagatcacttgaggccaggagttcaagaccagcctgtgcaaaatagcaagacctcatctctactaaaaaataaaaaaagttagctgggcttagtggcacatgcctgtggtcccagctacgtgggaggttgagatagaaggatcgcctgagcccgggaagctgaggctgcaggaagccatgaccacaccactgcactccagcctaggggacagagacccagtctcatcaataaataaataatgaaaggacattttaacaccccactacaaccactaaagatacaaataaataaaaatataagaggaacacaacctcataatacagatagtcttttatattgcatatatttaacttcgggcaaaagccactctattttcctctttaaaaaaacttttttagctatagattaatgaatactttctcagacatttcagaactactgcttagtacttgaaatacaacatttagaatctggggtactacctgaatgtgatgagtagtcacacatctcatatcctttgttttcttgccagttcgatcctttggtacagaagacagaccgacagatcgtccaataccacctcgagatgaagtctttgaatacattatattccgtgggagtgacattaaagaccttactgtttgtgagccaccaaaaccacagtgttctttgcctcaagacccagctattgttcaggtaactgatggtaaatttgtcttggagtacaggtaaactccgcacagggttagccttggcttttttctctctagttgaatgttcatgtagcttatcatttccaagttac

SEQ ID NO: 21362 - DNA, 2300 bp, Homo sapien
ctaatgaaattgaaacagtaatttaaaatcacccagaaagaaaattctagactgtttttactgttacattctaccaaacatttagggaagaaataattttcactaatcttacacaaactctttcagatagctatgcaccatgatgcatgcctgtagtcccagtaactcaggaggctgatgcagaaggatctcttgagcccaggagttcaaggctgcagtgagccatgattgtgccactgcactccagccaaggcaacagagcaaaaccctgtctcttaaaaagtaaaaaaagactgggtacggtggctcaaacctgtaatcccagcactttgggaggccgaggcgggcagatcacgaggtcaggagatcgagaccagcccagccaacatggtgaaaccctgtctctactaaaaatacaaaaaaaaaaaaattagttgggcatggtggcgcgcgcctgtagtcccagctgctcgggaggctgaggcaggagaatcgcttgagcccaggaggcggaggttacagttagctgagatcgcgccactgcactccagcctgacgacagagcaagactccatctcaaaaagaaaaaaagaaaattcagagaatacaggaagaggaaatatttgctgaccctataaccaaggccaaataactgaaataccaactgtgactggatcgttacaagaaaattatagatcattgtcccccatgaacataaacgtagtaatgtttattagatgtagaagccagcacttcagaagaaggattgtatatgatgacaaagatttatctcaggactgcgaagctgcaacatttgaaaatcagttgtaacttaccacgttaacagaccaggaataaagaatagagaatccagaaatagacccactcagatacttaaaacagagtaccaagacagttcaatggagagaaaagacattgttttaacaagaggtgttgcagcagctgtttatctgtggaaaaaataaaacttgacccctggcttaaactataaattaaaaataatttggaatagattatagacataaattggtagtagaattggagtagagcgaggggggtgtggcacgatcaggaactcacggaagagatttgctctaaccattgaatgcgtaatccagaggacaagcaatgggaggccaagccaggtgaggaaacacagagcagcctggagatgcaaatatacatcaaagtggctgatgtcttggtcatcacccaggaatactagaaataactggatgggttctactccccacagaattcttgaaagcgctagtccccacattaccgggatattgtgggaagttgtattaggcttctcctgagcttactggagctgcagccagactggactgcacctccaagggagtcccagtggctccccttgtctaagatactgtgctgctttctgaagccacatttttttttttttttttgagacagagtctcactctgtcacccaggctggagcacagtggcccaatattggctcattgcaacctccacctcccaggttcaagcaattttcctacctcagcctcctgagtagctgggactgcaggcatgcgccaccacgcccagctaatttttgaatttttgtagagacgaggtttcatcatactggtcaggccagtcttgaactcctgatctcgtgatctgcccacctcggcctcccaaaatgctgggattacaggtgtgagccactgcgcccggccctaaagccacattttaagagggataagaacaaatagaattcattaaattaggagtccaagaaaggaaggggagagtgtcctaaagaccatgtgaagtgagtaatggttgaagggactggagttgactaacctgaaaatgagcaaattgcaaggggcatgattgtaatcttcatgtgttttaggagcagaaggataaacttctgctgtgggctagactggtgaaaatatagaaaatgttgagagaagaggtaggttttattaactgaagtgaatagtttgaacttttatcttgaggacagtggaagccaccagaaggtctaaagcacgataatgttattacatttatattttgtaaagaatcactctgactaccatctttaggttggatttagaggttgtggaagggggaggtactgttgaaatatagtgaaaacctgcttagatgaaataccaaggaaagagcacagtatatcaaaagtgaatgatccctaagtactgtagaaacttagagaagaaatttgatataacctagtatggcagagaattgggccctttctagggaccttt

SEQ ID NO: 21363 - DNA, 2300 bp, Homo sapien
tttttgagatagattctcgcttcatcgccaaggctggaatacagtggcgtaatctcagctcactgcaacctctgcctcccaggttcaagttgttctcctgcttcggccttccaagtagctgggattataggcctccaccaccacgcctggctaactttttgtatttttagtacagatgggatttcaccatgttagccaggatggtctcgatctcctgacctcatgatccgcccacctcggcctcccaaagtgttgggattacaggcgtgaaccactgcacccggcctcttttttttttttttttgagatagattctcgcttcatcgccaaggctggaatacagtggcgtaatctcagctcactgcaacctctgcctcccaggttcaagttgttctcctgcttcgaccttccaagtagctgggattataggcctccaccaccacgcctggctaactttttgtatttttagtacagatgggatttcaccatgttggccaggctggtctggagctcctgacctcaggtgatcctcctgcctcagcctcccatagtgctgggattacaggcatgagccaccatgcctggcccgtctctatgtttttgactactctaggtaccttatgtaagtggaatcataggatatttgtctttgtgactggtttcttttggcataatatcttcaaagctcatctatttgcatcgtagctgggattataggcatgcgccaccacgcctggctgattttgtatttttagtagagacggggtttcatcatgttggtcaggctggtctcgaactcctgacctcaggtgatccacgcgccttggcctcccaaagtgctgggattacaggcgtaagccacggcgcccggcctccttcaacgctgagtaatattctattgttatgtttataccacattttgtgaacccattcacccgtggatggacattgggttgcttccaccttctgactaatatgaacatgggtgtacacatttatatccactcttgcctcccctccgtagtccttccttctccacactgcatctagagtaacccctttacactctcaagtatggacaaatcacctcttgcttaaaactcattagttttgcaacactgtcaagtaagacctaacttctcaccactctgatttattattggaacacaaaactgggccatgctccgtggctcaagcactttgggaggccgaggtgggcggaacacctgaggtcaggagtttgagaccagcgtggccaacatggggaaatcccgtctctactaataacacaaaaattagccgggcgtggtggcgcacgcttgtaatcgcagctatccgggaggctgaggcaggagaatcacttgaacccgggaggtggaggttgcagcgagccaagatcacgtcactgcactccagcctgggcgatagagcaagactccgtctcaaacaaacaaaacccacagaactggaagacccttgctgctgcttctgcgtaatgtgttctcctcccttctcgtttttttttttttttttctcccttctaccccttaggacctcagctcctgctctttccctgggggaattccggatcactctcctttactaggtcagggtactctctccctccctcttactctttcccctcctaccacttgtcaccattggtactatattatcacccggatatgtgacaatggtattgtgtatttaccactaaggaataaacttatgagggagagagcactacccgttcctgcagtgcccgtcggggcctggcatctaggaaacactccatacgccagtaatcgatttcagtcaatttcagtaataaatccaggaggacgcagcccgacccctcccgcccgggggccaagccatggtgggggatctgggtggacctccggctctggccgccagtcctcaacctccgccccggccgtcccgcttgggggcccagggtcccaggagaggaggctccggggcgccccctcccctctaatgcgagaggagagtccgctctaggcgcgggatccgcaacctccccgcgtccgcccgaggcgggggcggggccggaccggagacgtaacttccggtgtacacagccggtccaaggcggtgcgctgggggccggggcgcgtcgcaggtgaggagcgggcgcggcgggcgcaggcgggggctggcgggcggggtcgggcggtgggcggtgggcagcggggccgcgggccgcagccagggcagacggcgagacgggcccgcggggcgccgctccgctcggggccgcagggcgcggggccgtgggc

SEQ ID NO: 21364 - DNA, 2300 bp, Homo sapien
tgcataagacactcactgtggccaactcaggtgaaggttttccttcagaggccacagagtctccacgggaacagcctgccccgcttcagcattcctgtagagtgcttctgttgtatatcagaatctataaattgtggagcactcgggtggggatagatgtgattgccttatttgtcatgaatttgaaaaaagaaaacattttggaacacattttttacaagtagccatttgatatttgtttcttgaaaagtttatgagattttttttaaagagctcaaattttgttgaacatagagccataaataatggttgttttattgactttatatgttatgtgtttgtatccacagtgtccttctcatctcttgcctttgtaacctacctaattcctgtgttgccaacacaatcatagaaatacaaaggaattatggtaattggccataagtgacgaagtatgagttacatttaattatatattcaaaaaaggaaaatagaaaacctggttatcaataagtagacgaaactatataccaccattacataggttgcagttgaatatgtggtcaagcacggtggctcatgcctgtaatctcagcattttgggctgaggcgggaggatcacttgagctcaggagtttgagaccagcctgggcaacatggcgaaacctcgtctctacaaaaaatacaaaaattaaccaagcatggtggtacatctgtagtcccagctgctccggagactgaggcaggaggattgcttgggcctaggagttcgaggctgtagtaagccaaggtcatgccactgcactctagcctgggtaacacagtgagactctgtctcaaaaaaaaaaaaaagttggccaggcgcagtggctcaggcctgtaatcccagcactttgggaggccgagacgggtggatcacctgaggtcaggagttcgagaccagcctggccagcatggtgaaaccccatctctactaaaagtacaaaaattagccaggcatggtgggcgcttgtaatcccagctactcaggaggctgaggcaggagaatcactggaacctgggaggcggaggttgtggtgagctgagaccacgccactgcactccagcctgggcaacagcaagactccatctcaaaaaaaataataataataagttaaatatgtggtaaatgtgactttcagtgaaacgtatttgaacttttgtttgggagagcagatggtttcaagcaaatgttattcctgattttagctttatgagaagagtcacagtattccgctgttgtaggtatcagaaactacaaccagcgatatccagattctgctatttgaacctatccagagtcaggggttctaagaagccacccaaggtgtgaaactggtataccttgccaggctcccgctctgcacacccagagggaaactggtaccggagtgaggattggaagaatcgtgtctgtaaaccgcctgccagccactcccttctccaggctctgtttctgcaccctgcacttaagcccagcttggtatccgactgtcccgtcctactttgggacctttgccgtggtggtcctttaccttgtgagtcccacctgtcccttttgcacttgtccaaacctatcctacaatcaaggcctacctcagaagaatatttttttcgtaacaacctttttgatttcccttgccctttgcccatctctgcctttgctgatgccccataaagtttatgagtgctgtgtgtgtcaacagccctcaccataatctgagtactcatgtgatcctcctgaagcttgtgagctcttcaaagaggaaaggagaaaatgctgaacgtggatccaggccctgttcaacgtgccagcctcagctttgaaggggccagtctagaatcatacttttttggttgcattgtttttgtattactacttgaggaattttctaacagtcatcatttcatagttcagtgctcactattgtacctgctcctctaaggttataatatgatttcttattcatttgtagcccacctgtgtggataatagcatcacaggagttattgtccagaattactgtagccttcctcactttatcttatttttccccccgacaggaaaggacttagaagccttacaaatacatctgtgcattcttgcttcagactttacaactgagggccagcccagtctggaagcatctcttattaatgttacaaggaaaccgctacctcagcaaacaaaaggaatggaggaggagacttacaacaaacgccatttaaaaaaaaaagaaaaacttgttttcaggaaacat

SEQ ID NO: 21365 - DNA, 2300 bp, Homo sapien
gctcatctctgatggattcaggcaggggtagaaacacgggtgggagaggatggttttagacaaagaacaacagccgtccatctggtcaccaaaataacctactagaaaaaggcagtctcagtttgcaggtgcagtgctgcatgcctgtaatcccagcactttgggaagccaaggcaggcagatcacttgcacccaaggattcgagactagcctgagcaacatgatgaaacctcgtctgtacaaaaaataacaaagcttgtctctacaaggaaaaaattagctgggcatggtggtgcacacctgtagtcctggctactcagaagggtgagttgaaaagatcgcttgagcctgggaggcagaggctgtagtgagacaagatcgtgtcactgcactccaacctgggtgtgacagagtgagaccctgtctcaaaaaaaaaaaaagaaggaggagtcagagggagtcagtggttactattgggctagagtcatctgaggaatcacagggtaagtgataatggggcagtggctactgagactcgccttcccattggttgaggttttgttctgaaacagaggatttggggtgggaattctcttctgtgtagatgagtaactggcttagaaaaccctgattggagtgtttctcagaacccccgtagaggccaggcgcagtggctcatgcctgtaatcccagcactttgggaggctgaggcaggcggataatgaggtcaagagattgagaccatcctggccaacatggtgaaactccatctctactaaaaatacaaaaattagttgggtgtggtggcgtgcgcctgtagtcccagctactcaggaggctgaggcaggagaatcgcttgaaccagggaggtggaggttgcagtgagctgagatcacgccactgcactccagcctggtgacagagcgagactccatctcaaacaaacaaacaaacaaaaaaagaactccagtagaacagatactgttcagcactaccagggttgtgctaggtgtggaagctcagtgaaatcttaagagttgacagttcttagaaaagggccatgtggacagggctgttccctggaaagtcctgtgacccctcagtgaccacttatttcttttgttgtcagcctttccctattttcttttcttttcttttcttttttttaagacaaggtgttgctgtgtcacccaagctggagtacagtggtggtaatcacggcagcctctaactcctggactcaagtgatcctcctgccttggcctcccgagtagctgggactctgcagatatgcaccaccacatgccccgctaatttatttttagtattttagaagcagtgttttgctgtcttgcccaggctcggcttgaactcctggcgtcaagctatcccacctcccaaagtgctgggattataggcaggagtgcccagccccagagttcttacaatgacttacaaggtcttacgtgatcttgttgcctcccttttgctctctgacctcatctttttttttttttttgagatggagtctcactctgccacccaggctggagtacagtggctcactgcagtcttcacctcccaggttcaagtgattatcctgcctcagcctcccgagttagctgggaatacaggcacgtgtcaccaggcccggctaatttttgcattttttttttcagtagagatgaggtttcaccaggttggccagtctggtctggaactcctggcctcacatgatccgcctgcctcggcctcccaaagtgatgagattacaggcgtgagccaccgcgcccggcctagtcacttttttcttaattgcaaccccgattctcagcacccttttcatcttggttttcctcaatagcccttaccaccagcagacacacatcatctgttgtacttgcttatttggcacatatgtatccacagcgcctagaacactgcctgtaacgtggaaggtgttcgatctatagagttttgtcgaatgaatgaatgaagccgactagtgcacagggagtgcagcggcgcgatggtagctctctgcagcctccaacacctgggctccagtgatccccgggctctgcccaccctccccactgccacttccgggcagaggccagcaaagcggcggcgcaagaggtagggagagaggagctgaggccccagatcagcggccgcgggcaaggtcgctcagcgggcacccggcctgggtatcggggcgcgggtcgggggcggggccggggctcaggggtggggccgggccgggccgggccgggcgcctgcgccataaaggccgccgc

SEQ ID NO: 21366 - DNA, 2300 bp, Homo sapien
gggattataggcaggagtgcccagccccagagttcttacaatgacttacaaggtcttacgtgatcttgttgcctcccttttgctctctgacctcatctttttttttttttttgagatggagtctcactctgccacccaggctggagtacagtggctcactgcagtcttcacctcccaggttcaagtgattatcctgcctcagcctcccgagttagctgggaatacaggcacgtgtcaccaggcccggctaatttttgcattttttttttcagtagagatgaggtttcaccaggttggccagtctggtctggaactcctggcctcacatgatccgcctgcctcggcctcccaaagtgatgagattacaggcgtgagccaccgcgcccggcctagtcacttttttcttaattgcaaccccgattctcagcacccttttcatcttggttttcctcaatagcccttaccaccagcagacacacatcatctgttgtacttgcttatttggcacatatgtatccacagcgcctagaacactgcctgtaacgtggaaggtgttcgatctatagagttttgtcgaatgaatgaatgaagccgactagtgcacagggagtgcagcggcgcgatggtagctctctgcagcctccaacacctgggctccagtgatccccgggctctgcccaccctccccactgccacttccgggcagaggccagcaaagcggcggcgcaagaggtagggagagaggagctgaggccccagatcagcggccgcgggcaaggtcgctcagcgggcacccggcctgggtatcggggcgcgggtcgggggcggggccggggctcaggggtggggccgggccgggccgggccgggcgcctgcgccataaaggccgccgcgcgcccacgcgcctcgcttgctgcgcgctgccggcgctccttcctcctcggctcgcgtctcactcagtgtaccttctagtcccgccatggccgctctcacccgggacccccagttccagaagctgcagcaatggtaccgcgagcaccgctccgagctgaacctgcgccgcctcttcgatgccaacaaggaccgcttcaaccacttcaggtgcgggcgggccggaggcgggggctgccacgcgcggcgcccggaaccgggcacgcgggcctggggtctggaggcgggggcagcggtgcccggggaccccagtccccgacctccaggccacggactggggcccaggccgagtccgcacttcgtccttggagtctccttggagtgcgttcctgggggcttgcagcctcgccgggagtctcggccccgggtctgcttcgttacgaggaaaaacgggcccctccgtggggacatttcccctcctcctccccgtgcagctctggccatttgagcaggggctcctttcgcagttgtgaagagaggccttggctgacgcagcaagcgggaaagggctgtccctttccatccgctcctggccacatgagcttgggagcgtctgcagggcgggcagcccgggcgggggtgtttgagggagctgggtggaaggatggagacgtcgggcgtgattcctgcagaagacacctgtgcacgaccgggaagtgggaaggagtgtttgagcaaatcatgggcgggagtgcggccaagggagctctgatcactgatactggtggaggcgggggaggggagcgactgtggctccgggctagacgtcccgatggccatccctgtcatctggatgggtgcctgagtaacttacggcagaaagtggaagccctgggaaggggtggtcccccacttcagtccgggctcctcatccagggtctgcctgcatctacggtctgtgaggatggcttctttctctgggctgctgttgcagatcatcctggtgggccagcaggtgacagacaccaccactgtgctgggtggccgcggcccttgtggggcgtgggtcagggaggatgtttcttctgggaacagctcctgcttagggcatggctccccgctagggagaccagggtgtggtcagcagcatctccatctttctgcagcttgaccctcaacaccaaccatgggcatatcctggtggattactccaagaacctggtgacggaggacgtgatgcggatgctggtggacttggtaatgttctgcttggggaggcataactggtaaccgacagagtggtgggtgagctgggctcctgggagtccccaggaccttgagtatcttgagttcttcctctcattagacctcagtcacctcctctgtgctggtgaggcacctgtccctgg

SEQ ID NO: 21367 - DNA, 2300 bp, Homo sapien
tctggcacaggtatgaagccctgagtcttctagtgtctggggaagtgaggctgggtacaagtatgaggatctgtgtccatcagtatctgaggaggtgggatcgggtcctggtatgaggatctgggtctgtccatgtctaaggaggtaagatctggccctggtatgaggatctaggactgtccatgtctgaggagttaccatctggtacaggaatgaggatctgggtctgtcaatatcagaggaggtaggaatctggtacaggtatgaggatctgcgtctgtcaaagtctgaggagttaccatctggtacaggaatgaggagatgtgtcttccagtgacttaggaggtacgatctcttataggtatgaggatctgggtctgtcaatgtctgaggaggtaggatctggccctggtatgagaatccgggtctgtccatgtctgagcaggtaggatgtgtccctggtatgaggatccgggtctgtcaatttctgaagaggtgggaatttggtacatgtatgaggatctgggtctgtcagtatctgaggaggtaggatctggtacagttgtgaggatctgggtcttcgggtgtctgaggaggtggcatttggcacaggtatgagaatctggatcttctagtgtctgaggaggtgggatctggtattaattatgagaatctggttctgtcagtgactgaggaggtaggatctggcataagcatgaggatctgggtctgtcaatgtctgaggaggcagtatctggtacaggtatgaggatctgggtctgtcatgtctggaggtaagatctggcatgagtatgaggatttggttctgttcatgtctgaggaggtaggatctggtgcaggtataaggatctgggtctttcaatgtctgagaaggtaggatctggtacaggtgtgaggatctgggtctgttaatgtctgaggaggtaggatctggcactggtaagaggatctgcatctgtcagtttctgaggaggtaggatctggccctagtaagaagatctcagtctgtcaatttctgaggaggttggatctggcccccttatgaggatctgagtctgtcaatatctgaagaggtaggaatctggtacaggtatgaggatctgtgtgtgtgtcagtgtctgaggaattaggaatctggtacaggtgtgaggatcttcatgtctctgtatctgaggaagtaggatctgatacaggtattaggatctgggtctatgtctgaggaggtagcatctgatacaggtatgaagacctgagtctgtcagtgtctgaagtggttggatctggccctggtatgaggatctgggtttgtcagtatttgaggaggtaggatctgtccctggtaggagggtctgtgtcttctagtgtctgaagaagtaggatctggccctggtatgaggatctgggtctgtcagtatctgaggaggtaggatctcatacaggtatgaggatctgggtttttcaatgtctgaggaggtaggatctggcacaggcatgagcatctgggtctgaccatgtctaaagagttgaagctgtgtgcaggtatgaggccttgggtctgccagtgtctggggaggtgaggctgggcatgggtgtgagaccctgggtctgtccatatctgaggaggtaggatctggtatgagtatgaggatctgggtgtgtccgtgtctgaggaggtgggccctggcacaggtatgaggcctggggtctgtccgtgtctgaggaggtgggccctggcgcaggtatgaggccctgggtgtgtccgtgtctgaggaggtgggccctggcacaggtatgaggtcctgggtctgctggtgtctgcagagacagggcccgacatctcagggaagaccacggtaagctcttcagtttgtcttgtggctgtggtcagtcatctgtagtctgccctgttggtcttcccatgtgttgccagcacctgcctgctgccttgcttcctggaggtgggttgggccagggccctccgagacgcccctgtgcaagaccagggacagggtttccggcaggaggtggggggcggggtgtgccggccctccctcagcaccttgtcctgtctctcctagtgggtgggaggacgctactcgctgtggtcggccatcggactctccattgccctgcacgtgggtgagtgtgtttctgtgtcttgcagcccctgtgggagacagtgttgcagtctaaggtcggggtagggggcttgtgtccctgaacatcatgctgtcctcacaggctgctggcctctctgcagctggctgggatatttattt

SEQ ID NO: 21368 - DNA, 2300 bp, Homo sapien
ggaaacctctaaagggtacttaaaccccagattttctacacagggcacttgcttgagcctcatcccgctttctggaatgtacttttgcttcaataaatctgtgcttttgttccttcttttgttgctttgtgtgttttgtccacctctttgttcaatattccaagaacctggacgacttgtagtcaagatcctcccctggtaatactactgtgttgcccaggcttatcttcaactcctgggcttaagagatcctcctgccttggcctccgaaagtgttgggattacaggcgcaagccactgtgcccagcatcacagggccttttaaagctatcaggatgaagtgtggtaaaaaaaggagtaaatgggtttcatctccagatccttgctgggctagagccaaacctcacaaaggctggtgcttcctcctttgaggtgtaaatccttgaaaacattcatttcttttgcataccacgttatgaatcctaaaataatgtttttgcagcctgcatttttaaaaagtcaggtttattggggtgtgatttacatatagtaagattcacctttctttggtatacagttatgagttttcacaagtgtatatacagtcttagaaccattacagatgagatatacagcattttcctcaccctcaaaagttcctgacacttgtggtccagtcctactccctcatcccaactcctgactaccattgaactgatttttttccctccgaagttctgcgtttaccagaatggcgccttttgtgtctggcttcttcccatgatgcttttgaaattcacccatgttgtgctgcaggaattgaaaaaactgtattgtgtggctgggcgcggtggctcacacctgtaatactaacactttgggaggccgaggtgggcagatcacttgatttcaggagctcgaaaccagcctggccaacatggtgaaaccccgtctctactaaaaatacaaaaaaggccgggcatggtggctcacgcctgtaatcccagcactttgggaggccaaggtgggcggatcacctgaggttgggagttcgagaccagcctgaccaacatggagaaaccccatctctattaaaaatacaaaattagccaggcatggtggcacatgcctgtaatctcagctactcgggaggctaaggcagaagaatcgcttgaacctgggaggcagaggttgcagtgagctgggatcacgccagtgcactccagcctgggcgacaagagcgaaactccgtctaaaaaaaaaaaaaaaaaaaaagccgggcgccgggcgtggtggtgggcgtctgtaaccccagctactgggtggggctgaggcaggagaatcacttgaacctgggaggctgagatgcagtgagatggcgccactgcacttcagcctgggcgacccagcaagactctgtctcaaaaacaaaacaaaacaaaacaaaaataaaaactgaaaaatctcaaacatataaaacccaaatagaataaatctccatgtgcctggcaccaaatttcaacaattatcaactcatggtcaatcttactgtatttacaccccaccaccttaattatgtagtagcaaatcggaggtatttcatctataagcattttggtgtgtttctctaaaaattaaaaactttaactttttaaaaaactttattgttcttgttaatgactgataataccattatcccacctaaaatttttattttccgggaaggcttttttctggtggctcacacctgtaatcgcaacactttgggaggcggaggcgggaggatcgcttgaaccccaggagttcaagaccagtgtgggcaatatagcaagtcctcgtctcaggaaaaaaaggaaaaaagaaagttagctttttggcaaaactacttcctagtagatggtgtgtacttcctatcacagcgcattaaggggcacataatgcctgggactccgggatttcgagcccctgacgccagcggcgcctctgtggctctgggacctgagcgcacgcgccttaaagccacgcctccgcatcggatcctagtaagggagcggggttatcattttagcgtagcgttgcgcgtgcgcagagaggccgccgtagtttgcgttttcacctggtcgcccggcggccatggcggccgttctgaagccggtgctgctgggccttcgagatgcgccggtgcacggcagccccacagggccgggtgcctggactgctagcaagctgggcggcattccggtgagggcgggtgccggagctggggtcgatgggtgctgctgaagggtgcggagggagtg

SEQ ID NO: 21369 - DNA, 2300 bp, Homo sapien
gccgggccaggacctcctgactgtgggttggtctgcccttccagggtccagggccagctgtcacagtggcagctaggaaggtagctcctctctagtccagagggctggtgttgtctgcacagccgttctggtgggcattctaggggggaggagagcagcgaaagagccaagagcagtggtcagcctcttgtgtacacctctgacacgtgcactccagtgcttcctatgctgtttctggcacctgatcaagccactgaacctgctctagctgctggaggtttttgctctgtgaccctggctgtttagacctgcccatgttcatcagcccaggtccccgccctcacccactcccatcttctgctcctgcagtatcccaggaaggggtctttactccgttctggagactgtccctttatccagctgccttccagtcttcccctttctttatttttaacatgatcaaccccttcccttcagccccataacagcagtataaaaacactcccagccatgttcagacatgctctgcctacgtagatgaggataatgaggcctaggtgatcatggggtgggcttgtttcttgcatttaacattatatttggagcattttcccattaatatttttcccacaacataatttataattgctctattttttaaatatacatcaaaagctttatacaatttttagccacttgtattttccaatttttattcccatgatggccatccctgtaactaaatttatatatattttaaatcaatgataactgctacaggacagtttcctagaattggaatgaatgagtcaaaagttgtgcacaattttagggtttttttttcttttttttcgagacagggtcttgctctgtctctcaggctggagtgcagtggtaagggcatagctcactgcagcctcgacctctcaggcttaagtgatcctcctgcctcagcctcctgagtagctgggactacaggtgcaagccaccacgccctctagagaagctttgctttggaatctttacctggagtgtgttggagtgcttgtttcccaatcccttgataagtgttacttattttttctttctaccagtttagtaggtgaaaaacttttttttttttttgagacagagtctcgctgtattgctcaggctggagtgcagtggtgcaacctccgcctcctgggttcaagcaattctcctgcctcagcctcctgagtagctggggctacaggcttgtgccaccacccccagctgtttcggtgtttttttttgtttgtttgtttgtttgtttttttgagacggagtctgttgcccaggctggagtgcagtggcgcgatctcggctcactgcaacctctgcctcctgggttcaaacgattctcctgcctcagcctcccgagtagctgggattacaggcgcacgccaccacgcccggctaatttttgtatttttagtagagatgggggtttcaccatgttagtcaggctggtttcagaactcctgacctcgtgatccacccgcctcggcctcccaaagtgctgggattacaggcgtaagccaccgcgcccggcaggtgaaaatcttaccattttgcatggtttacatttttttcttttttgagacggagtcttgctctgttacccagcctggagtgaagtggtgcgatcttggttcactgcaacctccacctccagggttcaagcgattcttttatggtttacattttaatacgcttattgatcatattgtccaattttttgtgagtttcctgttcacatcctttgcctatatttttttgggggtgacacttgttaatttgtaagagctctttacgtatagggacatcagttttctaacctgtaaggaagtcttggctgggagttgaaaccccaggctagaaggcgacccttagactttttaggtctgatggcgggcctatgctggtgtgggaataacaccgccggtctcagctggaggtcgccagccctttgcaagagcctgccggtccccgcgggctgcagcacaccccggcgcgatgtgccctgcctgtgtctgccggaggctgtagtgcgcaggagcggaaaccaggccgcccttcccccacccgcttccggccgcggctcggttctcccgcctccgcctccgccgcggctcgtggttgtcccgccatggcactgtcgcgggggctgccccgggagctggctgaggcggtggccgggggccgggtgctggtggtgggggcgggcggcatcggctgcgagctcctcaagaatctcgtgctcaccggtttctcccaca

SEQ ID NO: 21370 - DNA, 2300 bp, Homo sapien
ttcagacatgctctgcctacgtagatgaggataatgaggcctaggtgatcatggggtgggcttgtttcttgcatttaacattatatttggagcattttcccattaatatttttcccacaacataatttataattgctctattttttaaatatacatcaaaagctttatacaatttttagccacttgtattttccaatttttattcccatgatggccatccctgtaactaaatttatatatattttaaatcaatgataactgctacaggacagtttcctagaattggaatgaatgagtcaaaagttgtgcacaattttagggtttttttttcttttttttcgagacagggtcttgctctgtctctcaggctggagtgcagtggtaagggcatagctcactgcagcctcgacctctcaggcttaagtgatcctcctgcctcagcctcctgagtagctgggactacaggtgcaagccaccacgccctctagagaagctttgctttggaatctttacctggagtgtgttggagtgcttgtttcccaatcccttgataagtgttacttattttttctttctaccagtttagtaggtgaaaaacttttttttttttttgagacagagtctcgctgtattgctcaggctggagtgcagtggtgcaacctccgcctcctgggttcaagcaattctcctgcctcagcctcctgagtagctggggctacaggcttgtgccaccacccccagctgtttcggtgtttttttttgtttgtttgtttgtttgtttttttgagacggagtctgttgcccaggctggagtgcagtggcgcgatctcggctcactgcaacctctgcctcctgggttcaaacgattctcctgcctcagcctcccgagtagctgggattacaggcgcacgccaccacgcccggctaatttttgtatttttagtagagatgggggtttcaccatgttagtcaggctggtttcagaactcctgacctcgtgatccacccgcctcggcctcccaaagtgctgggattacaggcgtaagccaccgcgcccggcaggtgaaaatcttaccattttgcatggtttacatttttttcttttttgagacggagtcttgctctgttacccagcctggagtgaagtggtgcgatcttggttcactgcaacctccacctccagggttcaagcgattcttttatggtttacattttaatacgcttattgatcatattgtccaattttttgtgagtttcctgttcacatcctttgcctatatttttttgggggtgacacttgttaatttgtaagagctctttacgtatagggacatcagttttctaacctgtaaggaagtcttggctgggagttgaaaccccaggctagaaggcgacccttagactttttaggtctgatggcgggcctatgctggtgtgggaataacaccgccggtctcagctggaggtcgccagccctttgcaagagcctgccggtccccgcgggctgcagcacaccccggcgcgatgtgccctgcctgtgtctgccggaggctgtagtgcgcaggagcggaaaccaggccgcccttcccccacccgcttccggccgcggctcggttctcccgcctccgcctccgccgcggctcgtggttgtcccgccatggcactgtcgcgggggctgccccgggagctggctgaggcggtggccgggggccgggtgctggtggtgggggcgggcggcatcggctgcgagctcctcaagaatctcgtgctcaccggtttctcccacatcgacctggtgagggccgggcgcgcgcgcgtgaatggcgggctgtggtgcgggggctgggattcgggggttccggggctccaggggctctgaggctcagggcccggagcccgggaccggagttgcggagcgggggcaggctgagaggctcgggttgtgccccccccgcgggaggagactgttctttgggcacggggcgggcctccgctcgctgggccggctccggacgccgaggaggccgcgggcccccgcctccccggcagcgccaatgtgtggcgcttcgtgggcgtgaagccgcctcttatcctcccttcaaaacaaattcccggctgttaggagatgcgggagaggattgagtccctcgcggatgttgtgactttaattttgaggtccctgtcgtaactccgaagtaacgacgcggggcggaggatggcaatgatagcgaccaacgcgtcccgagcgctggtcacgagcgggtttacacacggaacgcgcaccatcttcataccacccg

SEQ ID NO: 21371 - DNA, 2300 bp, Homo sapien
cagtttttaggataactttattaataaaagagaatctcagcttaatactttcaaattgtttgttaacactctgttcagcagtaaagagccattctaccatgaaaaaaagttaatcttgttcattgctgaatttctatcccctagatggggactctgcacctgaggtatataataatgtttgttgaacaggtagctgcaggtgtaaacacaaacattattctggtgttagaatgttatccaggttgtaagtgaaaaccactcacctgtttcttgagcagaggttttaacattgaaatgtgcagagcctcgctgataggaatggatgtaggtctgctaaaatttaaccttgcttacattgctgttgaaattgggatgcaagctgtccaagcacattgtgttaaacttttaagtttatagtcatttatccgttattcacttttttttttttttttttgagacggagtcttgctctgttgcccaggccggagtgcagttgtgcagtctcggctcactgcaacctccatctcctgggttcaagcgattctcctgcctcagcttcccgagtagctgggattacaggcgtgcgctaccacgcctggctaatttttatatttttggtagagacgaggtttcaccatgttggtcaggctggtctcgaactcctgactttgtgatctgcctgcctcagcctcccaaaatgttgggattaaaggtgtgagccactgcgcccagccagttgttcagtctttatctctgctaaatatttggaatattctaaattacatgtttgtttagaatgctttgttatacagaagtatttactattcttaaattatagccagttgtttggggaagaagatgctgatcaagaagtatctcctgacagagctgaccctgaagctgcctgtgagtaaattatttggcatatgttttatcagatactattatctttattttgttgatttaattttggtagcttaagggaaaaaaattgctatatgtgctaggtaatgtgtgtttaacatgtgttttttttttgttttttttttttttttttttttttgtctcagaggtggagtttctctcttattgcccaggctggagtacaatggtataatctcggctcactgcaacctccgccttctgggttcaaatgattctcctgcctcaggctcctgagtagctgggattacaggcacctgccaccgcgcccagctaatttttgtatatttagtagagacagggtttcaccatgttagccaggctggtctcgaactcttgacctgaggtgatccacccgccttggcctcccaaagtgctgggacaggcgtaagcaaccgtgcctatccaaaacaatgttttacaaaaaaaatatgattccgttttactgatgaggaaatcaaggttaagagaaatttcacaagtctagtaaatagagctgcgagttgttcctagatctcatgactggtctgtgctttgaactgttatatgtgtagctttcagaaactaagttacaacaggccaggcaaggtggctcacgcccgtagtcccagcattttgggaggctgaagcagctggattgcatgaggtcaggagtttgagaccagcctggccaacatggcaaaaccctgtctctacaaaaaatataaaaattagccaggcatggtggtgcatacctgtagtcccaactacttgtgaggttgagacgggaagatggcttgagcccaagaggtagaagctacagtgagccgagatcttaacactgcactccagcctgggcaacagagtgagactttgtctccaaaaacaagaaagaaagaaactgggatacaaaaagatgctgatgaatgtgttattttcttattccttgaactcagaatgtgttgcatttggggatttccatgagtgactttctttttattcccaaaggtgagtgaaaagagttcagttctacatttattacggttgaaaataaaataatgatcgttttataggggaaccaacggaagccgaagccagagctagagcatctaatgaagatggtgacattaaacgtatttctactaaggaatgggctaaatcaactggatatgatccagttaaactttttaccaaggttagatttactttttttataatcatggatagatgtattgttgtgcatagatgtattgttctagttctgcttgttttaaaatagtccataaaattgaattaagcttctatgtatatgccttgtgatgtcctaataaaatgattgatgcagtcaggatatgcaagttttaaaatgttaccatcta

SEQ ID NO: 21372 - DNA, 2300 bp, Homo sapien
tatcatggccaggctggtcttgaactcctgacctcctgatccacccacctcggcctcccaaagtgctgagattacaggcgtgagccattgtgcctggcctcttctttttttggagacatctcactctgttacccaggccggagtgcagtgacatgatcatagctcattgcagcctcaaactcccaggcttaagtgatcctcctgcctcagactcctgagtaactgggaccacaggtgcatgccaccatgcctggatatttttaaaaatttttgtagagatgagggtctcgctgtgtttcccaggctagtctggaactcttcggctcaagtgatcctcccacttcggcctcccaaagtgctgggattacaggcatgagccactgcacccagcccgcttccttatttccttcaggcctttgctcaagtatcacctggtgagtgaggcttctgtgaatacctggtttaaaaatcacacatccttggccgggcatagcagtacctgcctgtggacccagcttcttgggaggccgaggtgggaggattgcttgagcccaggatgtcaaggctgcagtgagctatgattacaccactggactccagcctgggcaacagagcgagactctcctaaaaaaaaaaaaaaaggccgggagcagtggctcacacctgtaatcccagcactttgggaggccaaagtgggtgaatcacctgaggtcaggaatccatgaccagcctggccaacatggtgaaaccctatctctactaaaaatacaaaaaattagccaggtgtggtggcacatgcctgtaatcccagctactcgggaggctgaggcaggagaatctcttgaacctgggtggtggaggttgcagtgagtcgagatcacgccactgcactccaacctgggcgacagagcgagactctatctaaaaaaaaaaaaaaaaaaaaaaaatcctgcatctaacgccgtagcactcgtctctgcctgacgttatttgactgctgttctctgccaccttccactcgatgcaagcttcttgaaggtggggacctgggtgcattgcagactgagtggtgcctgaccttaggggcatgtgactcatctgtgtgctgactgaccaagagaataagtggaccctggcatacagaggaggacagagtgggtacagaggaggacagagtgggtacagaggaggacagagtggctgcagaggggtggtgactgcccctgagtgcccatgtggtcttcattctttgtgtctgggtcacaaaacatgttgaagaacaggatttggttcacaaacagcatgaaggattttccctcagtccaagagcaggccatggatgaaagggcttaaagcaactgtcttggtataaagataccatgataggctgggtgtggtgactccacgcctgtaattgcagcacttggggaagcccaggcaggaggattgtttgagcccaccctgggcaactgggcaacacagcaataccctgtctctacaaaagaaaaaatcagccgtgcgtgatggcatgtgccagaagtcctagctacttgggaggctgaggctggaggatcgcttgagcctaggaggttgaggctgcagtgagctgtgattgcaccactgcactccagcctgtgggacagagcgagatcctgtctctctcccaaaaaaaacctaaaagtggttgggtgcagtggctcatgcctgtaatgccagcactttgggaggccaaggcaggaggatcgctttaacccaggagtttgaaaccagcctgggcaacatagtgagactctgtccctatttataaatcaaaaaccaaaagaatctatcagaacagttgtgatggacagctttgattagctccgactctgccctgggtgctcggccaagcccttgaatcctcagacagcagcagcggcaatccctgggtcgtggccaccctgatggtgcccatgttggtcatcagtaatcgagtgatgttggcctaggaaagttagcatcccccaggtcaagcgggtgggcggtgtcaagacggggagtccgtcggtgtggcataggctgtggcgctaacccctgctctctcctgcctctcctctcctaggcatttgcatcaagtgtgggcttggcatctacggagcccagcaggcgtgccaggcaatggggagtctttatcacactgactgcttcacctgcgactcgtgtggtaggtaacctcgtgccctgggtagctctgtgaaggggacctgccacatcatccccattcccctcaaactgccttgcccctgagtccaggcagatgg

SEQ ID NO: 21373 - DNA, 2300 bp, Homo sapien
cccaaatggtgtaaagtgaggaaacatcccctgtccctgccctgctgggtccccacaccaggcctcccccatctctccctttctttctcagacacagacccagatgcagaggcagaggcagccacacagcccctcccagccacaatcacaacctcatattcatataatcacagaccctccaccccacatagtgggtggaatcctgccagcgcattccactcacacacacacaaaatcccattctcacacacgtgcacccaagcctcgtcccgcacacacaacatgacaggccacagagccggctgagagtctcagcacgcatggacgcctgcactgcgcaggttgcagcccaggctgcaggaccacaggtggcagggacgacacagcaggtggccggccagggagtggcagtggcctccatcctccctgctcagccacagcccctgcttcagcgtctgccagtccaactgtcaactcatccactcaactttacaactggaatgtgggggcgttcagggccctgccactggtgacggccactctaagtcctacccaatgctgggtaggtcctttaagaggcccaagtcctgggcgctactatgaggttctgtacgtgcacagtgatggctcatgcctggccgaggtgagcccactcagtctgggtggcacagcctaatctaggaactgctctgcggttctacatggctctcagcagcccagtgagtgtcctctgcaccgggcgtgtccctcaggtgctcctagccagaccctcccttgacacagtagggcacaaaccgctattggagcggcactggcacccgagtgtacaagcgtcagcatccctgctgccttccccacccccagctgtccccacctgctgattctgcccctggggtcacacttacaatttagggtcctgtcaggagacaaaaatcacgtgagtgacatcagctccctcatatgtaggtgctgggaaaagggcttgtggggtgcctgtataaactggccataaaaatacgggaataagttgtggaaagccacaaaaggcctctgaggaggaaagcctcctaattgccatcatgttcccatgctcagagcaagacccgctgtcttctctgtaaacactgtgctcagggagaaagacacttctttgaaacactggaatgtggacagacgtgcaggctcccagtcaaggccgctcctactagctactctccaacaagttaaagttatgctgtttgagcacaaaggagactcatttaaactgctattgctatagattatgcctgtgatgcactgccaccctttcactgtttctccctgaacatctgcttcttagatcgaagggactgtactcaataaatagtgtggagaccagagctcggcaccttttgcagcctccacattttgcactggccccctggctccccacctttcactcttaacttgtcttttctcaatcctttgtcaccaccagacttcgggtaccctacgggtagtgttgaggctggtccccaacatgtaggatcccttcactgtgtcacatgtgtccctaacacacttgctacatctcatgtcctttaggttctgtgttttactccagataatgttctttgaatctaaattacagtttactgatttctcaaaagctgcacctaatgtgctatccattcagacagacatactcacttagcaaatgtttgttgagccagcactcagtggcagattctgtgctagggcgtgccaagtgcagacacacgtttgccaagacacagggtcacatgtgcatgcacactcagacttgcaggcttacaccagtgttcagcctgctcccaatcccagggagctccagggaggacagagagaatgtcacaacacccaacccctcccactgcatgctgagtccagttcccgatacgctgccaccccaacagcatggcccagggccgagggtctctctgcagacctgccctgaccacattcacacacacacacacacacacacacacacacacacacacacacacacacacgaagaggcatgtgccttgttcagatatacataaagctcacccatcgccaaattccctgcctgtgcctgctgggaccagactccgctgtcatgagggtgacatccgccacctgtgctcttctgctggctctgatctgcagcgtccagctgggtaagaaagaggcgagcagggctgggaggaagcggtggccctgctccttcactctcatcaccatcccaaggtctcattggccatgggaggtttcgctgaattctgacctcctctgtt

SEQ ID NO: 21374 - DNA, 2300 bp, Homo sapien
gacctgacgcgccgcgtagctggtgagcgggtaacggcggccgacctccgggaacgacactgccccaaaccgttccttagcttggaagccgccgccaggcctgaagctatcgcgggactgacccagtgcaccgcccacggcgaaccacatttcccagaatcctccccctgcggtacaaatgtcccggaagccgcgaaccgccggcacccgaagaccacacttcccaagggtctctgcggctgcgcggacctggtgcgccgcgggcaaaccggtcacggctttgtaagtagcttaaccgcctggggccgtcgacctagagccggccagctaggaccatgcgcaaattgtcctggggcacacagtcgtcctctggtgaacgatacaactcgaaaccaagggacaccctctacttataagggccatggcgcccggaccaagaaattacatttcccagaaaactgcagccgtgccaaggtcttccgggtcattcctgcgctcacacaaacgtttccctccgagacatgggcagcccttgctggtaccgcgcaagtgctcgccgttgctagcaaaggggctcctctcatcccaaaccctgccgctatgctgttcaccttcaggtctttttttttttttttttttggcactcatttgcccaagacgataactcacaaaacgccctgtggcccgactgtcacgactgtagttcgccaaccaagggcatttcctggaaatgcaaggggacacgtatctgtgacactaatggccgttctgacgtgcgttacgcccctggaaggacttggaaatactgaacttgagtgagcactgggaggatggagaccctcatcctgggaggagtcactcctcccgcagccatcacagcctgacgccccctctccccagaagtgcttcttaggcccacccaaaagggcaatggacctctctgtatgcaagccagagcagtctactgtttgtgtatatttgggttgtttactttctttttaacacttaaatgttaattgacttcaatcatttttaaaattataaatagtgtcgctatagacttttttgtacttattaagtactgacctgcatgatcttcgtgaagcagtgcttctgttaccagaaaggggtccggatccgaccccaagagagagttcttagagctcacgcaagaaaaaatccatgggagagcacagtgcaaagccaaagcaagtgtattaagaaagtaaagaaacaatgggtactccattgttagagcagcagcttgggctgctggactagggatacttgtatttattgcttgatgatgtgctaaacaagggtggattattcatgagttttccaggaaagaggtgggcaatttcaatttctcggagctgagggcttcccagctttttgaaccatacagggtaacttctgaaccttaccatggcatttgtaaattgccatggcactgatgagcgtttctcttagcgtgctaatgcatataattagcatataaccgagaggtgaagccagctgggcttctggatcaggtggggccttggagaacttttctgtatagctgaaggattgtaaatacaccaatcagtgctctgtgtctagctaaaggtttgtaaatgcaccagtcagcactctgtaaaaacggaccaaacagcactctgtaaaatagaccaatcagcgctctgtaaaatggacaaatcagcaggatgtgggcggggccaaataagggaataaaaacgggccacccgaacaaccagcggcaaccgcgctggggtctacttcccaggtgtgggatgtttgttcttttgctctttgggtctgcactacctttatgagctgcaacactcaccctgaaggtctgcagcttcactcttgaagccagcgagaccacaaacccactgggaggaacgaacaactccagacacgccgtctttaggagctgtaacactcactgtgaaggtctgcagcttcactcctgaagccagcgaaatcatgaacccaccgggaggaacaaacaactccagcacgactccagacgcaccgcctttatgagctgtaacacacaccgcgagggtctgcagcttcactcctgaagccagccagaccaggaacccaccagaaggaaccaattccggacacataacaagcagcagtgaggacaccaaaggtcagtctcctcgccatcttgattttggtgggttttggctggcttctttactgcaatttgtttaaccagcaaggcctttatgacctgacctgtagcttgtgccgacttccaatgttatcctgtgacttag

SEQ ID NO: 21375 - DNA, 2300 bp, Homo sapien
tggttaaacaaattgcagtaaagaagccagccaaaacccaccaaaatcaagatggcgaggagactgacctttggtgtcctcactgctgcttgttatgtgtccggaattggttccttctggtgggttcctggtctggctggcttcaggagtgaagctgcagaccctcgcggtgtgtgttacagctcataaaggcggtgcgtctggagtcgtgctggagttgtttgttcctcccggtgggttcatgatttcgctggcttcaggagtgaagctgcagaccttcacagtgagtgttacagctcctaaagacggcgtgtctggagttgttcgttcctcccagtgggtttgtggtctcgctggcttcaagagtgaagctgcagaccttcagggtgagtgttgcagctcataaaggtagtgcagacccaaagagcaaaagaacaaacatcccacacctgggaagtagaccccagcgcggttgccgctggttgttcgggtggcccgtttttattcccttatttggccccgcccacatcctgctgatttgtccattttacagagcgctgattggtctattttacagagtgctgtttggtccgtttttacagagtgctgactggtgcatttacaaacctttagctagacacagagcactgattggtgtatttacaatccttcagctatacagaaaagttctccaaggccccacctgatccagaagcccagctggcttcacctctcggttatatgctaattatatgcattagcacgctaagagaaacgctcatcagtgccatggcaatttacaaatgccatggtaaggttcagaagttaccctgtatggttcaaaaagctgggaagccctcagctccgagaaattgaaattgcccacctctttcctggaaaactcatgaataatccacccttgtttagcacatcatcaagcaataaatacaagtatccctagtccagcagcccaagctgctgctctaacaatggagtacccattgtttctttactttcttaatacacttgctttggctttgcactgtgctctcccatggattttttcttgcgtgagctctaagaactctctcttggggtcggatccggacccctttctggtaacagaagcactgcttcacgaagatcatgcaggtcagtacttaataagtacaaaaaagtctatagcgacactatttataattttaaaaatgattgaagtcaattaacatttaagtgttaaaaagaaagtaaacaacccaaatatacacaaacagtagactgctctggcttgcatacagagaggtccattgcccttttgggtgggcctaagaagcacttctggggagagggggcgtcaggctgtgatggctgcgggaggagtgactcctcccaggatgagggtctccatcctcccagtgctcactcaagttcagtatttccaagtccttccaggggcgtaacgcacgtcagaacggccattagtgtcacagatacgtgtccccttgcatttccaggaaatgcccttggttggcgaactacagtcgtgacagtcgggccacagggcgttttgtgagttatcgtcttgggcaaatgagtgccaaaaaaaaaaaaaaaaaaagacctgaaggtgaacagcatagcggcagggtttgggatgagaggagcccctttgctagcaacggcgagcacttgcgcggtaccagcaagggctgcccatgtctcggagggaaacgtttgtgtgagcgcaggaatgacccggaagaccttggcacggctgcagttttctgggaaatgtaatttcttggtccgggcgccatggcccttataagtagagggtgtcccttggtttcgagttgtatcgttcaccagaggacgactgtgtgccccaggacaatttgcgcatggtcctagctggccggctctaggtcgacggccccaggcggttaagctacttacaaagccgtgaccggtttgcccgcggcgcaccaggtccgcgcagccgcagagacccttgggaagtgtggtcttcgggtgccggcggttcgcggcttccgggacatttgtaccgcagggggaggattctgggaaatgtggttcgccgtgggcggtgcactgggtcagtcccgcgatagcttcaggcctggcggcggcttccaagctaaggaacggtttggggcagtgtcgttcccggaggtcggccgccgttacccgctcaccagctacgcggcgcgtcaggtccgcggaggcgcgggctcggggcgcctgcgggacggtgaggccctgctgaggactccggcaag

SEQ ID NO: 21376 - DNA, 2300 bp, Homo sapien
tattcaggtcctctagtttggatctaaacgatacaccgtatacagcatctgaccattagttagcccatcaccaccaccaccactaccaccccagtccgagccacctggattattgcggtagcctcctagctggattcccagcatctgcccttaaccctcatcagtctgttctcagtacagctgtgaccatggtcctattgttatataaattcctgtcattccgcaacctaaaatttttcagtggttctaactgagtcacttctgcaatgacctatttgtacaattaggccattacctccctgatcccaccttccttctctgcctcctcattcctgtgcgctccagcctctgtcaccagttgctgtgccatccacgtggaatattcttcccccacatacgcacaagcttgcatccttatctccttctgtgtttgttccgtggttactttctcagaacagcttccctgaaagcctatttgcaattgcagtcaccttccctagcgcttccactcctccatcactgctttgttgttttccacagtgtgtgtcactcactagctgatgtactgtatgttcagtatatgcacgtgctcattgtctgttcctggtgggaggaatgctttttcttctttgttgactgttatagcgtcagtacccagagtgttacctggcaccaaatggatgcttagtaagtaattgtggagtgaataagatgagtaatgaagaactggtggggcagaatcatggcatggaaggtgaagcttgcacaggaggggatgtaagtagcagatgtacatcttgggtgaagtctgttttcatggaataattaagataattagaattgaaaaactggtgtggtagtgcatgcctgttgtcccagttactcgggaggctgatgaggtaggaagatttcttgagccctctggtgtaagcctgtagtgagctatgattatgtcactgcactccagcttggtgacagagcaagaacctgcctcttgaaagaaaaaacaaagtaaaggctaaagtgaactaatgccaaaaccattcattggttcatcttctaaacacttatgaagtacctgttaggaagagttgtacatggattttggtgtacactgacacacaggacttcatgatctagtgcagtattgtctaagagaactttctgcagtggtggaagtgctgtgcatgtgtactgatcagtacggtagccaacagccccatctgactattgagtacttgaactgtggcttaagcaatggagaaaataaattttaaattttatttaattattttatttttacattttaattaatttaaatgttgtagccaagttggctagtggctcctgtattgaagattgtggcactggtagaaaagtaagaaagcatgggaaatttaaataagtgctaggatagatatcctatgttcttttgggaactgagatgagtgaacatctcaagctgcccaggcaactgaaggggaagaaagaagcatccctggctctaagttgtaatgactggtttgtcaaagatatgagaaatgttatttttatttgggatataggcaattaacacagtggcaactccaattaacaggtgaatttagaagaaattttgtgtagcaaattgaactgtcaaatcttacttgaggataagttattgtttatttggaaaatgtgtgttggattgtatctgcttgcctatataaaaagatgagatttcttcctgtccttttcatctcaatagtggatcgcttgtgaagtgcatcaaggtctgatttagcttattcagtaataaaactgctttctttttttttctacatttgtggagaggattttctgccattggaaggcgattcgaattttaattattttctccaaacctgagaaaagtaaattctgcctttaaaaccaaagatccatgtcactggtgaacatgcatgcaaaatatccaaataaagtaatacaatactgaatgaactctcagagctaaaaaattaccacagtagagcagtctgttttacaaatcacagacagtaataactctgtattaaatggctgtactttttgcacatattataatttgactagccaataagctattattgaatatttaaacttctaaagttttactattttaaataatactgtgaaatgagtactattgagaagaatttctaagcacatctgtgagcatttccttagaatattttctttgaaatctactcttatttttttccccttccaggtcctatttaaggactgtctatggcaggagtcctcaacctttttgacaccag

SEQ ID NO: 21377 - DNA, 2300 bp, Homo sapien
ggctgtagcatgggatgcctgtctggccctggacctgccctgggccctgccctctgccaccgctcacaggacaaacccaaacaattgctgtcctccctctgaaatggtggtcatgggggtgcagggaaggcctcacgtccctcctgtgcccaggcccctcaccccaacactctggctggctgcatctgctgcccagagcccttggtcaccaggcgtgcagcctggaccacgctgatggcaagggaggcccttcctaagcctagaggtggtctaaaccttcatggaactgctggtcacagtgccagccagagtcccaggtgacgctgagatagctcaaagtggtgcatgggagatgtctgatatcaaccctctcctggaggtagatgatgtctccagcctggtgacttccctggcctccagccaccaccacccccagtgtccccaaggctgaaggtgcaagcttgccctggccctggtcctggcatagaaagtgcacgatctggtcatgtcatgcaggtgaggatacttgtgtgccaggtaacctcaggcaggcatggtggcgcttgtggggcaatcctgtaacctgcagtgtggtgggtgggatgggtgtgtgtgacacaggcaggaactactcctgatggcagctgacgacccacatgtgtactgggtgggtgccaatgggagtagcaggtgagtggctgagcacaggcaggtgaatgagtgacagctacacaaaccccaccactgagcacgtccctcccagggcaaagcagatcagatcacaggcccagccctgggaggcccagaggagcctcaggtcctcaggaaggctcctggccctcttcgccctaggaggaccccccccccgccccaagccggctccacctgtagctgtgggcgtgggagggagacagagcgctctggcggccagagaaggaaggaagatggagggagggcggacttctgctccctgacgctgctgctaggccccctgcggccctcctggagcccacacctttcagctgcagtctcccagccttcgtccccaggacgaagcccactaagccagtgcttttccactgcagctggctgttccgcttggggagggttcccagattgtgcaaagtgaggaagggtcccctgtccctgccccgcagggcccccactccaggcctcccccatctctccctgtctctctcagaggtagaggcagcattaaattaaaatttaattaaaatattaaaaataaagtaaaaaattcaaatatacaacagtagactgtctggcttgcatacaaagaaggccattgcccctttgggtgagccgggcaaggtcagggtctaagaagcgcctctggtgagaagcggttgtcaggctctgatggctgcgggaggagtgactcctcccaggatgagggtctgtgtcctctcagtgctcactcaagttccgtatttccaagtccttccagggggcgtaacgcacgtgagaactgccatttctgtcacagatacgtggccgcatgcatttccaggaaatgtccttggttcgcgaactacagctggcacaatccagcccagggcgttctgtgagctgtagtctccagcaagtgaattccaaaaaaacctcaaagacctcaaagaccatacagggtggacagcgtagtagcagggtttgggaagagaggagctcttttgctagcaaaggcgagagctcgcctggtacaaggtctgcccacgtcccgggagataaacattagtgtgagcgcacgctagacccagaagagtttgccacggccgcacggttttctgggaagtgtagtttcttggtcccggcgccattgtccttaaaagtagagggtggcccttggttccgaggtgtatctttcacctcatcagtatgactatatgccccaggacacttcccgcatggtcctaactgccgggctctgggacgacagccccaggcggtttagttttttaggaaaccgagatctgtttgcccgcggcgccccaggtccgcgcggccgcagagactcctgggaagtgtggtcttccggtacctgcggttcgttgcgcctggaattttgtcccctgcgcggatgattctgggaaatgtcgatcggctgtgggcggcgcactgggtccgccccgctgtagcctcaggcctgacggcgactcccaggctccgggacgattctgggcagtgtcgtccccagaggtcggcggccgttgcccgctcaccagcgacgcggggcgcctgcggggacggtgaggccctgctgaggactccggccagtatga

SEQ ID NO: 21378 - DNA, 2300 bp, Homo sapien
gcagtcttttcttatggctgaataatctgttataaggatatatcacattttgtttatccattcataagttggtaaatgtgttaggttgttcttgctttgctgtaaaggaaaacctgagactgggtaatttacgaaggaataccccagactgggtaatttacaaagaaaagaggtttacttggctcacagttctgcaggctgtacaggaagcatagcactagcatctgctcaatttctggtgaggcctcaggaagcttccaatcatggtgcaaggcaaagggggagccagtgtagcacatggtgagagcaggagcaagagagagtgaggggaagatgccacacacttttaaacagtcagatcttgagaaaactcattatctcaagaatagcaccaaggggatggcatcaaatcattcatgagaaatctaccctcacgatccagtcacctcccaacaggccccataatattatatggtttggctgcatccccacccaaaatctggactagatgcataacatatcaccctgagatcttaacattcagatgaggtcagagactgcatgcagattttggcttctcgcattaagaagcatgtgagagtgtagaatgtataggataaataatagaatggaaatctgatgactaaattaatagattttactagaaaatggccaaggacttatcagtcccattatctctttctggatgctctggaggacagcacatcctggcttctcttacatgtggagctatttgagtggtttgtaggccatggaatataggcagaagtgattgcaaaattgtgtcttcattatgttttcttatttctgctccatcctggggatgcctctttggatgtaatgcttttacttttcacagtgtccaggattattgccctcttcatgtgggctacaggtttgggtggtgggctgaaagtgtcttgatgagacaagatctggtgaccctgagttgctgggcataagctgggccatctggtttgtgcctggttctggcttccctgggggctggaggggcagatggggaggggtcagatcctggttgctgtgaattagagatgaacagtgacacgccatcttacatcacaaactagaaaccatgtcaactccactcttcccttagggctgcaggtaattagtctcagtgatcctaagttttgaatcatgtaagaaagtatcccttgggcaataggtctacctgtatattaggaaaccctcctgcatataccgttttaaaaagatgcatacgccaaatgctgcaacgtattattatgtaaaatttaaacagtattcatgaggctcctgttgaatcagtcaacgtatttgttttgacaaatatcagagtctgcaaagaagtatctcagaccctcccctagcagtgtattgtgatgatgttgccaataatacagaatattaataatgacagcaatagctcttatgttcttatcggtatgttccaggcccagtgctaagcaattcttagttacttcccaccaaacaggtggctttgtctcatttatttactggaatttaaagagtctggttctcaaatgttttgcagcatccacttttcctggacaagttaagcagagggctgggtcccaccccccagagtacctgattcagtgggtggggactaagaacttgcattggtaacaaattcgcaggtaatgctgatgtcatctgaaaattactgataggggaaattttaatattatcatattaaataattatcttcattttccttaggaatctccatctcaaggctcagagagatgaactgctggcgcagggatacacagggaggaaagtcaaggcgtgagttgcctggtagagacatttgagagtgggtcattgcctcagataatttccacggaactctgtgtgcctctcctttaagaagaggtgaagccaatccctttcttgggagccttgagaagccgcctcaccgagaacagaaagtgcgctccaggtaccacccggattccgtcaaactacattacccagaaggcagtgctacaagggacggaagccgaccccaagccatagacggaaggcgcagaggggcgttcccgtagcggcgtgggcgggacttccggcgtccagtcttcgtccgccgttaggttgcggctgctgtggttgccaacgctacactgggtagaacgccagacaggggccacttttcgagaccgagtagagacggacagtgaggaggataggacccacttacacgcttttatgtcagccgcgatcccacccccacaagcgtctgcaaaaccctt

SEQ ID NO: 21379 - DNA, 2300 bp, Homo sapien
ccagcccctccaacagaaacagatgtgctcaagctgagtggtccaaaggcgtttgacagaagtcatgaacagaagtatcttggggcacatgtttcttctctgttgtgcaggcttctccagcagtaacaggtttgcccaggccatatgggccccaagcgctctgaccagacacaagaagagaagacttgcagtcacaggtagtgtgttgtcccctgctactgcaacataggtgcttggaaaggtgcaacagggtgctctgcttgtggtggaaacataaaggcctccaagcatagatgtgctgctttctccttccctttgagggatgcagatgtgctctggccagctgcattccaggtggtctgtctgcaagacagaagtgtcccaagcactggtatgtgcgggctcctccaaccacaacagacgtgctttggccagatggtttccaggtgttatgaacacaagaaggaacagaggtgccttctggaacatgtttcttctcagtgatgttctaagaggtgtgctttggcaggacaggccccagctgctctgactgtaggcagggaggaaagtgtttcccaggagtttttgctttcagtagtactgccctctccaactgtaccagaggtgctgtaggcttgcaggaaccccggtgctcatgtgtaagcctccccaacataaactaaggtgctgcatgcccctctaggccctgttctaaagctgagtgcttcagatgtggagctgggtctggggcagacacactggtcctagagctgtcattatccaaagaagccccagagtccatgaatggaaatgggtcgagagaggggttagcaaaaggtgaactgtgcctgatgctgagcatccagtgatggctccagagctagaagtagtggctgtgcaaatgggaaaaggacccgaggtgccacccaaggctgagtgggtgctagcagagatatcaaagatggatatggaggtaacacgtacgcaaaatctgatggcattatgctcccattgggtgtctgggctgcagtaaaggctcagtttagagcttgtattgagattttacgtttctcaaagggtaaatgctatcaaatacattgggggatcctgccagggggaggctagaaagaggacatggtaaccatattgatttcatcagagttaaaggcagacttggctgcccagttggtcaaggtcctagctactagaaaacagacaattgctgaagtagtgataagtatgatggtgcagacaggtatcctagaagactgactctttgctgctgccctttaggagctccaaatgtgactgagaggtggcttctgggctaaaggaaaggttcaaagtggggtagggctgtttaccataaacataggtgggttagtggggactgccttttgcagggggctgtccactccacactgcaatgagccagtcaaatgggagttccaagaccagaggaaacctagcccagagcttgagtcttccaggctaaccctgggtcctggggggaccaggagatgagacccagggaatagtagtgtccatgtcggtcatctcaaaggttcaaagcaggctgggaggtcaagtctgcagatgggctgactgggcagtggaagtgataaggttggccagttaatgatgggttgatatattcatctgttttcacactgctatgaagaactatgtggggctgggtaatttataaacaaaagaggtttaattaactcacagttccacatggctgggaggccacaggaaacttacaatcatggcagaaggcaaaggggaagcaaggcatgtcgtacttggtggcaggagagagtgcagaggaaactgccacttataaaccgtcagatctcatgagaattccctcactatcatgagaacagcatgggggagaccacccctacaatccagtcacctcccaccaagtccctccctccacacatgggaattacaattcagattacaattcaaaatgagatttgggtggggacatagagccaaaccatatcagttagtcagtgaagactgaggtatctgtagaagtgagggaggagcacagtggtctggatgaaccagtggggtgatagtcaggggactggcattcagtgaggctgggggagaagcttcctaaaagcattgcccttgaaaagcagggcatacctatctgatactgaggatgtagaatgcagtttggagatgcttcctagctacctaatcttccaaggcaaaccatgcactcttcatcctgatatttgtgatgcctccctgggctacatgacagagggtgcact

SEQ ID NO: 21380 - DNA, 2300 bp, Homo sapien
gattcaagggtgagctggtggtggaagaagacagctctattgaagaggcagtgttacagctctgtgactgctcctgcagagcacggttactctatcggcagggcgcagagagcagcagctcagggcagttctgcagtcatatttacatctacttttaattgcatgcagattaaggggtggtttatgctgaaatttctaggaaaagggtagtaacttctgggtcattgggtcattgccatggaaaggagcagtaattcctgcatgttgccatgacaaatgtaaactgacatagcacactggtgggtgtgtctgatggaaagctgcttccaccctgaccctgttttagctagtcctcaatttgctccagtgtccaagccccggctctggagtcgagtcctgcgtcctacctcagaagtagtcgaaaacatacacatgaatgttcacagcagcattatttctttcttttttttttttaaagagagatgggggtctcactatgttggccaggttggtcttgaactcttggtctcaagcaatcctccctcctcagtctcccaaactgctaggattacaggcatgagccactacacctagccacagtagcattattatttctaatagccaaacatccatcaataatagaatgggtaaattatatttgttcaatggaacatcacacagcaatataaaagaataaagtgctgctaaaagcaacaacatggatgaattttatgaagtgttgaatgaaaagacacagccacaaacaggacacatggtagggttccatttatataaagtttttaaataggcaaaactaatctataatgttaaaaatttgggaggggcatagtgactaggaatgagcatgaggttgattctgaggtgcctgtgttttgcttcttgatctagattacataggtttgttcattctgcaaaaatgtattgaggaatagacagatgatttgtacacttctgtgtatgaatgttatattgtaaagtttcttgaagaatacctgtttacaagagttagagaacatggaagctctttctctgagataaaacatctaaaaagacaaaaattagccgggcgtggtggtgggtgcctgtaatcccagctactcgggaggctgaggcaggagaatgtcttgaacccgggagacagaggttctagtgaaccaagatcacaccactgcactccagcctggatgacagaggaagactctgagactccgtcacaaaaaagaaaaaacaaacaaacaaacaaacaaaaaagccctaagtcatatcatgccagtctcagcagtttgaaaccctccatggttcccatctctcagtaaaaggcaacgttcttatgacatccttcaaggccccatgtagtcttttggtccctctccatctctgtcctcctgtcatccacgtctcccacgtgctgattgggtctggtagggtgactgggtggcaaagacctcacagaggtgcctttctgctcaggtggcaaacaggagagtctatctgggccctgcaggatggatccttcctgagtcactgaatatattggaggtgcagacagcgccagagaaaggcattgagcctgccagatcagacaccgcctcttagggtcgacggaacacccaggagcaaagaccagaaattgtgggagaaaggcctggaagggggccggggagaggcacagagacagcgaggtgatgcaggcttggtgggagcgggtatggtaggcaatgggggacagaggggcagggcacagacaaagcttgctgaagatatgaagagcaattgtgagccggcgaatccttggagtagaggagaaaattgaggtctcctgttcagcccgatgcaggtgagatgctgttggaacacgtgacagagaaagggtgtgtgagcccagggcttgtgcactaagcgcacaggagcgaagggggcgagaagaaaaaacgacgcccagcaaagagcgtcaaggcccaaccgcctgcccccaaccggtctctagcgcctcgtgaccttctgcactccgttgcaggcgtttggcaccagatggtcccacgcgctctgttcgacggttgggggccgcggacgctggttgtcagcagcactgggtcagccggtgaacgggtgtgcagcgtcctcagcgccgcagcagtcagcacctgtgggtgctctagctctttccctcggggtcaccggaggcagagcctcccctacgcggagtagaggagcagctcacatggtgcgggggtggggatcgggcttcctggaaggctggaaatgggagttgggataag

SEQ ID NO: 21381 - DNA, 2300 bp, Homo sapien
ccctacaggcattctggtggatgtgcaatggcatctcagtgtggttttcatttaaacttccctgatgattaataatattgagcatttttggtgggcctgttgaacatttctgaatcaacttttggaaagggattattgctcaaatgttttgtccagtttttttaattgggtggtttgccttattgttattctatcattattattgttaggttttgaagggaaggggagagagagagagttggtggctctacagcaacacaggtttattgccagtacaacttgcagagaggggaccagcttggtgccagagctcactgctgcttacaggctggggtaattacaggtctgggcaggaggggtctgggcccgtatggcttgctgcccaggaggatgttgataaagatgttccttgggcctttgcccagcaggatgtgataaggaagtcaggtggctgggcaggatgtttctcacagcccagggccccatggaatctttcattctgaccagggtctgtgaaatggcagggacttgcaaaatggtgcagcttggactaacaattattattaatcctaaagggagaaggagattcagcaagaatggtgaaaggagaattataagtagggcttctcgtttcatgatcaatatctgatgggggggggtaagtacaggggcagtcaggattggagggtctggcaaacaggtcagctgaatcagtgtctactaatgaggcaggagccaggatccacatgatgaaagtggccacagtcaggaagtctgaaattttctcagcagaaagggagaaagaacaggcaggctgagtggccctgctgtctgaaggggcctcagttttatcctccaacgccttggggctccactggtgctcacctctcttctccaagcctaggtcttcagcagtgactatacaggaaacctagggggcagaggtagctctcctccacccaacaatagcggcagtggcagcagcaggagtactggaatttggagttacagagctcacagctgttagatgtgtttggaaagttccttcttgagagtgtctggaagctttttctccctgtgtcttgtctgactttagtgaggctggagatctgggtgaatggcctccatcaacatcttccttcgcccacctctccagtagcagagtgcagataagactggacgggacagccctgctgaacccacggcagacctccaaagaggtctgtataagctggcgatgtcactgactttggcaaatgggctcagagaagatgctttcttactcaaggtgtcttctgggtgtttggaacagaggcttcctttcaggagtccaggactgtactggaaggaagtgaccacaagatgacaccgttgatcttccagacactcccgctgttatgagggtgaggggggagcccttctctaattatccttcttttgctactttttccctctgccttagcttttcctttcctgcactctcctggggacttcaactcagtctttctgaggcaagtatggaggggaggacagggtggcccagcttcgtagagatcactacctgctcaaaccccaaacagaaaggagtcatttgcagcctggaggaggactctaccattccaagatattcagctgaacaccctagtagtgctagccggcagcagtggctcctgagacctccacaccagagtcccgcacacattcaaggtaagaaccccagagaggagcccagagcctgcggaatcagacaccgcctcctagcggtgatgtccaaccgaaaaggcgcgggactgcagtaaacctgggcgagcaaggtcgaggagagctctgtgccgggaccgcgaggcgatccagaccagatgggggacgaggggcgcgtatgaagcttgtagaagaggttgccggtgaagagcagcctgtgcgctgcacaccctgttacgcaattgagccgccgttggaacgcgtggagagaaagggtgcgcgaggccagggctcgaagaaacgcagcagagggcaaagggcgaggtccaacggcccagccccagcaggggactctcgagcttcgggattccgcctacccggtagcggctgtttagacccagaccggcccctgcgcgatatgagcaccgctcaggactgcagctgttgggcaccagcagccaggtctgcaggctccgcgaagcctggcccggaccgtagcttctgcaagcagtccaggtgtatcctggggtcactggagggcagagcctgctcagagcgagtacagaagcagcccaggtcttcccagcaccaggttcact

SEQ ID NO: 21382 - DNA, 2300 bp, Homo sapien
taccaaaaataaacaatgaatttagcaagatcccaataatataaggtgtgtgtgtatatatgtatgtgtgtatacaagtactatatatacatatatatttaatgcattttctgtgttctaccaatgaactatttgaaaataacatttgcaaatcccataacatacttagggataaattagcaaaagctgagtaagacctatacacagaaaactacaaaagagtagctgcaaactttctctgtaaagggtcagggagtaaataatataggttttataggtcacgtatgatctctgtcacatattctctggaattttctgttgtttttaaagaccttttaaagacgttaacatcattcttagctaaccggccttacaaaaacaggctatgagtggggcgtggtggctcacactcataatcccagcactttgggaggccaaagcaggtggatcatttgaggtgaggagttcgagaccagcctgaccaacatggtgaaacccgtctctgctttatacaaaaattagccgggcatggtggtgggcgcctgtaatctcagctactcagaaagctgaaacaggagaatcgcttgaacccgggggtgggtggaggttgcagtgagccaagatcgtgccactgcactccagcctgggtgacagagcgagactccctctcaaaaataaaaataaaacagactataggccacatttggcccatgggctgaaatttgctgacccttggtataaaacattgctgagaaaaaaaatgtaaaagattaaaatatatggagatatatcccgtgagatggattagaaaagttaatattgctaagttttccattttggccaaactctgaaatctgttctgtggaattattacaggagatcctggtcccttggggcacaaggattttaagccagggtgaatcttgcacccacctgatgtgccatctcctacgcttgctgaggcagctgtgtggttggctgctggggtccatttgaagagaaaggccctgtgggatatgctaacaagtggaactccctgccctacatcgtctgaggaaactggaacccagccaaagaagaccttccagtaggcagtgcctgtgatcactgtaggtgtgcatggtgctcagtaccctacaggctataaaaaatagtaatgcacgatgcacacatgataaggaggcatcacagtacaggtggttaaattcaggaactctggaatccgagagcctgggtcaaatcctgacagggccactaccacctgtgtgagccaaggaagcttctaaagttttacaaatgctgtttcaccaaatttgcaaaatgaagagaacctgcctgcctggtagagatattgtggaaagcagcatccaggaaggtctgagcacctggtccccaagtcagaaaccttcacagcccagatggggatgccctaagttcatacccttctaggcgaccacagagaagtcccgcctggctccaggactcggaaaagcgctagagagcttcctggaggaggcggcatcctcccatgctacctgcatagagaagagagaagggaaactgggtcctctgtggcggctgcctgaaaggaagcagctgggggctcttgctccctgcctgtgctggtgtcttctccccaccttagcccaggccggctgcagcggcggggctgcctgggcggagtcaggagacagcaccgcccggcccctccccaggcaccttccctgtgagccagctccctaccctgggaggatctggggagttcctgcctctggctttgggcaaggtctgcctccagagtccccagctgcaagggccggcgcacccacgcgcactggttgccaaatctcccgctttcaggccaggtgcggagcgcgcctcgacagtcctgaacattctccacttaacggctgagagccgctgggagcctaacgcctgcaaccgagtgagctcgagtccggctggggtcggaccgttggacctccccgttggccctttgttgtacttcttcgcgccctgggctcgcgcaagctttctctgccacgcgttccaacggccgctcaccggcatcgggctgaacacggtgcgcttcacctcggagttcccactccactccaaggatccaacagcgcacaagctgctcttcacgggcaactacctctgcaagcttcacccccggccccgccacgccccgcagggttccctgtctggtctggatcacctcgctctccctgcgcctctctccttggcctagctagacaagtgcttctcacgatccagcgcgtttaccgctcggtttc

SEQ ID NO: 21383 - DNA, 2300 bp, Homo sapien
cagatgaacatttttgcagagctggaaactaattccaataaggctaaaaacttgctactgctggtagggaaaatcctaactattgacagtcaaatgcttttgatgcgaggctacttaggttgatgttgataagagaaaagttcccttgtccccctggcagggcgtgcgatgggggtgtggctcgcttcttcagtgtcccgctgctcaaacctccaggggagtatacagacgggcgggctgtggggctctgaccccatggcagtgtctaggggtgaatgtttatagctgaagccccagtgggcgtgttacaggatgctctttagctgtccgcaggcggcttatgttagtcaattcaattagatccctgcgttatcgcaaggacagagggctttcatatcccggggttcctgtcttggtgtaccagaagaatcagatcacacatgggcttggaggatgactgcagggttttgagtggaagtagctctcaacagttgggggagccagaagggaaatggttttcccctggaatcgggctgctccgcagcaccggctctccttggactgccccagccaaactccgcgtccttctggtgggtggcctgcccgcgtgccagcgtctgtcatgtcttcttccgccaacatgttcctctggatgtccagcggcttgtgtgtctgcttgctagggtctcagagtatttatagggacaggatgggggcgggaacaggatgggggcgtggcaggccagggtggtcttgggaaacgcaacatttgggcaggaaaacaaaaatgcctgccctcacctaggtcagttggcacagggccaggggtggagccctagccagggaccacaccctcctgtacccagcacctccctttcccccttccatatcatttaaagggaccccgcccttccctccccagcactccccttccccacctccttatcaatgtcatcaccctggactgactccaggaatcactgtaatgtgggcttaataagaacagagctcggctggccgcggtggctcaccctgtcatcccagcactttgggaggctgaggcgggtggatcgcttgagcccaggagttcgagactagcctgggcaagatggcaaaaccccatttctacaaaaaatatacaaaaattagccaggtgtagtggcgcgcccctgtagtctcagctactctggaggccgaggtgggagaatcacttgaacctgggaggcagaggttacagtaagccgagatagcgccactgcattccagtctgagcgacagagggagaccctgtctcaaaacaaaacaaaaacaaaacaaacaaaaagcggagctgacagtcaaggtgaatttcacgtttgcctgtattcagttttagcattacataaaccaaaagaagaatgccataaaggctacaggcagctaatacagagaggtgttactggaaaaggaaccagaaagagtaaatatctcctaaacgtatgatgggacagaaagataaatgcctattacatatagttaatatctgtttgattagccttatttacattctccttttaaaaggtcttacatttagcatcttagatagaacccacaaaatttaaatatttaatagaaacttaaaattcctgtatcagaggacagaaatatatttttctcacacgtgattagtctaattgccactattaatcctattaatattctgttaaataatagcatttctgtagcgaaaagcaaacagtacggaaagataatttcaaacacctagttttcatatttttgtgttaaagtaataacatattttggtatagattatcattttttgtttgtttttgtttttgctttttctgacctggtgtgttaatgccctgggttggccctctaagaagctggccacctacttcgggcctcaggtgtcagacgccccagcttcgaggtctatggctcccagcaactcgagcgcctgcgcctgcgcattctcagccggacgggagcgcccagaagtctccgggcgccggtgggcggccttgtggactgcgccgggcatgctcggcggtgtgacggctcaggactgcatttcccagaggctgcagctatccggccaatgtagcctgaaactacatttctcagcggccactggaacgacctcaatctctgcctcctcgccagttcattgtggtcgttgacccggcagcgagctttggagttcatcgagggagaagtcagcgcccagctccgaggttggagcagccccgccgggcaacttgaatttctgcaaacgaacacagcaccgggagctctgc

SEQ ID NO: 21384 - DNA, 2300 bp, Homo sapien
tctgacggaaccccatatatactatgttttttcttatacatacacacctatgattaagtttaatttataaattaggcaccataagagatttttatttttctgtttgtttgtttgtttgagacagggtctcactctgttgcccaggctggagtgcagtggtgtgatcttggctcactgcaacctccacctcctgggagcctcccaagtagctgggattacaggtgcccaccaccacgcctggctaatttttgtatttttactagagacagggtttcaccatgttggccaggctggtctcgaactcctgacctcaattgatccacccatctcagtatcccaaagtgctgggattacaggcgtgagccaccgcacccggccaccataattgagtaatagcaataactaataataaaatagaacaactataatagcatactgtaataaaagttatgtgaacatggcccctctctctcaaaatatcttattgtaccaaaatcacctattttcagatcatggttgactgagggtaacaaagtgaagaaagtgaaactgccgattaagggggcactactgcattggagttattacgtaaacattatacatcctttatttcattttaattaaacacttgtttccacttaatttaatttatgtatctatctatctatctatctatatatatatatatatatatatatatatatatatttttttttttttagagaagggatctcgctctgtcgcccaggctggattgcggtggtgccatctccactcactgcaacctccgccgcctcccagcttcaagcacttctcccacctccgcctctcaagtagctgtgactacaagcgcacgccaccatgcctggctaatttttatatttttagtagagacggggtttcaccatgttgccatgttggtggtctcgaactcctgagctcaggcaatccacccgcctcagcttcccaaagtgctgggattacaggcatgagccatggcacccgacctgtttccactttttacttaaaacgtaagtttctctggcatgctttcttttaattctaactaaaaaattaagagcaactcttctttaaaaacaaacaaataaaaaaccaacagaaaagattctctgacatttcaatttcctctgtcccctagcagctagagagagagagctactgctgtgggataatgcaaaattgaagaaccttaagaaaaagctgggtcctatttctgtgcaatatggagattgatggaaatgtttacagctgtcatcttgctctcctttcttacataattttgtcattagttaagtaatctgcacaacagatcctttgaagtccttttccctgcactgataattttcagatgacattgctctcatctttaaaaggtgtaaatactttatacagttttttccaaacaagaagaggcttcctggcaatcccatttcttcccgctgcatgcaaaaggtatcataactatcgtttcctttttaaactgagagttgaagagtcttttgctcctttacataaatcaattacagtgattttatccaaaatagtaacaaatattaatagctcaggttcgcatggaggccatgcacccagtcttcgcggatgcacaccggccccggccgacgcaccctccctgccctgccgctcccgcactcgccggcccgggatcctcgcccggtccacccaacgctcacgcatgtctcagtccgggttccgcgccgacacaggtctgcagagctcccggtgctgtgttcgtttgcagaaattcaagttgcccggcggggctgctccaacctcggagctgggcgctgacttctccctcgatgaactccaaagctcgctgccgggtcaacgaccacaatgaactggcgaggaggcagagattgaggtcgttccagtggccgctgagaaatgtagtttcaggctacattggccggatagctgcagcctctgggaaatgcagtcctgagccgtcacaccgccgagcatgcccggcgcagtccacaaggccgcccaccggcgcccggagacttctgggcgctcccgtccggctgagaatgcgcaggcgcaggcgctcgagttgctgggagccatagacctcgaagctggggcgtctgacacctgaggcccgaagtaggtggccagcttcttagagggccaacccagggcattaacacaccaggtcagaaaaagcaaaaacaaaaacaaacaaaaaatgataatctataccaaaatatgttattactttaacacaaaaatatgaaaactaggtgtttgaaatt

SEQ ID NO: 21385 - DNA, 2300 bp, Homo sapien
tcacccacctacgaacaggagcctccaaccagggcacgcctgaagccttccttttcttttgctataaaactctcccactcccggcttgcattgagtctctcttgctatagtgagctttgagtaagtagccttggcttttctcatttcattggtctttgtttatttcaacagttagaaacatccaaaatgtgacatctggtgtgtggacgggagtgtagctgtgtgtgagatttaggaggtgaaacttcaggtcatggtgacaatgatgttaaaaaaaagaggaaggtggggctggaaaactgagagcagggttcttgcttggggactgtggcttgtttggcatcataaagacaggtgaggaacagtagtggtcatggtggtgatggaggggctatgtgggtgtatcagagggtctggcaggtggccagatcatcccaaagagtgtagacatgaatgagatggatgctgaggcttagcagtagaggaggtaatattgcagtgaggcctgggctggtgcttacacactcacctatgttctcaccaggcttctgtggtgacccttgatggggtttgtcctcaggctggggaattagcttggggcaagaggagtcagttggcagagttgctgggcttaggtgggtgggggtaggatggccagaggggttggctttttttttcttttttaaatgagtgtgagtgatgacagggtcagaatgtgcaacaaagaaggccaagtgtatgtgacatccatgtgtgccgtgggtggcttaggttgaagccaggccaggggagctagggggctccaaggcaagggtggagcgctccctctcccccttacctgggtgttgcccttggcagtggaggccatcaaaggtctggggcaggctgggatggtgcttatgtttgccaggcactctctggatgccatgtgcagagtgactcgtgggagcccatggagatggctaggataggggccaggatggggagaaggtagcagtggcaatgggaggccgtggtgaaggtctggagctgtgagggtggtgcagtccaaagagtgaaacgcacgtgggagggagtatgagctgttcaccccagggctctggactggggtttaaaggagaagcccacatttgtatctgagaagcatgacattggtgacactaggggaagaggctggcagaagagcgagctgggccctggacttcaggcccagagcttagagggtgcctctctgcaccctgcctgttgctgctgcgggctgacacagtggtcacatgaggcgcccacagaaccagggcctgctacctcctggagctgtggagctggggaggagagtgagcaggggatggatagggagtcccaaggacagagactgatcatggaacgaactgtccccatcatggcagggctgcgtgacctttgaggacgtgaccatttacttctcccaggaggagtgggtgctcctcgatgaggctcagagactcctgtactgcgatgtgatgctggaaaactttgcacttatagcctcgctgggtaaggctgtcacccctaccccggtgtcccgagctcctctctgcctgtcccctttgcccaagaaacagctctttccttcccacagccagaccgctggcactgcttccatccccactttcctggtatgtgtgttgtggcttctggggctgagctatgtgcattgttccctcctctccctgagctgcccccacacctgctgcctgaagccttgcagggaagctccaggcatgaggggtcttgcggttagctgtgtgactacctctgactcggccattccctcctgggtgattatccagatctgacagttctgtggtttagattctgtgcctttcctcttgctaatatttcctaagcctgactgtgccaggaattccaatcactgatgtggttactgcttgccgtgaccacccaatgtccctgtgtcatacggagcttcctgtcttgtagtctatcatggggtagttcaactgggcaggtgctggccactgacccactctgtctttcccttaggacttatatctttcaggtcccacatcgtttcccagttggagatggggaaagagccctgggtgcctgacagtgtggatatgacatcagccatggccagaggggcttatggcaggcctggctctggtaagcagcgatgggagctaggggaggatgtgacttcaccactgtgtttacatcataccagcatcttctctcctattcatcatcatttgataccaatgccagtagccagaccacgtctctgcttttccttcccc

SEQ ID NO: 21386 - DNA, 2300 bp, Homo sapien
gttataatttttacaaaggtggtttcaccatatgacatgtagtatcgggggaacccacccccgataattcaatgtgggttcttttctattttccctaagtgtcggctggtctgagaaataaagggaaagagtacaaaagagataaattttaaagctgggtgtctgggggagacatcacatgtcagcaggttccgtgatgcccccgagccataaaaccagcaagtttttattggcaattttcaaaggggagggagtgtacgaatagggtgtgggtcacagagatcacatgctttaagggcaacaaaagatcacaaggcagaaggtcagggcgagatcacaaggtcagggcaaaactagaatcactcatgagcttccatgtcctgctgtgcacgcattgtcatttataaacatcttaacagggttcaagagcagagaactggtctgactagagttcgccaggctggaatttcctaatcctagcaagcctgggggcgctgcaggagactagggtgtgtttcatccctatctacatgtgcataaggcagacactcccagggcagccattttagaggcactgccctgggaatgcattattttcccagggctgttaattattaatattccttactggggaaagaattcagcgatatttctcttacccgtttttggtaataggagaaatatggctctgtcctgcccgtcccacaggcagccagactttaaggttatctcccttgttccctgaaaatcgctgttatcctgttcttaaggtgcccagatttcatattgttcaaacacacatgccctacaaacaatctgtgcagttaacgcaatcatcacagggtcctgagatgacatacatcctcagcttacgaagatgacaggattaagagattaaagtaaagtcaggcataggaaatcacaagagtattgattggggaagcgatacatgtccatgaaatcttcacaatttatgttcagagattgcagtaaagacaggcataagaaattataaaagtattaatttggggaactaataaatgtccatgaaatcttcacaattaatgttcttctgtcacggcttcagcaggtccctccgttcggggtccctgacttcctgcaacaatgtagtgttatttttcccattttatttactggatttcaatgagagtccctgctgtaaagttggagccagcattggagtccccagagggcttgttaaaacagagaaggaggcctggcaccatggctcactcctgcaattcccaacactttgggaggccgaggtgagaggatcacttgagctcaggagtttgagaccagcctaggcatcacagggagatccagtctctacaaaaaattttaaaattagctgtgtatgatggtgcacgcctgtatcccatctacctggtaggctgaggcaggaggatagcttgagcccgagatggaggctgcagtgagctatgatcaggccactgcactccagcctggacaacagaacgagacccatcccccccgccccccccgcaaaaagtagagaaggctgaatcccatccccagaatttctgagtccttagatttaagttgttgccccagaacctgcattttcagccagtccccaggtgatgctgatgttgctggtttgagaagccctgaatcagagcgacatttaatattacaacgcaaagaccccgcccattgggtactatccccattttccagtgtgaatttaggtcccttaggggtgaagcggctggccgatgcccacacgcgcaggaagagcactggggctctcctcctggacctcggagggtgggcggggtttagcgcgggcggctgcaggctcgggagcggcccctttaaggggaaggcccgagggctgcaggcggcggcggtggagacccgacgagatccgctctccttcccgccctggaccctcagcctgacgagaggctgggcagaaactcgcgatccccaggccctgcctgtgcaccagcggctggcgccaggccaatgacagtacgggagagggcaactctcccggccgccacggtgggggccggaacttcctgcactgcagcctcgcaggtcatttcccggcggggaggctgagtccccaggagctggggaccccgagttgggggcggggcggctggggctacgcccgtgaagctgccccgccggctttcccggaccgcgagggggacagtgaggccgggaccccctccgcgcctttgcaccagccgtgaccccttgcaacgggggtacccagcggagctgcgcgctctcggcgcccccgg

SEQ ID NO: 21387 - DNA, 2300 bp, Homo sapien
actgcactccaacctgggtgacagagctagactctgcccacccactcccgaaaaaaagcaaaggaagggaagagggcagtgcttgtcttcaggaggaagagggtttggtgggaagacacttgtggtgtctaggggtgctgaccgcatgctttttcttgatctcagtagcggttgcaaggtgtatactttataattacatattaagctgtgcattcatattttagtcccttttctgcgtgtatcatctgtcataaaaaggttttaaaaaacatgaagcaacaaagaaaaaattgctgatggacacttatgtgtcttcacacaagatatgaaagaactttacaagaaaaacttaaaaaaagaaatagagatgggatctcaccatcttgcccaggctggtctcgaactcctgggctcaagcagtcctccgacctcagcctcccaaagtcctaggattacaggtgtgaaccacagtgaccggcacccccaccaaaaaaaaacaaaaaccctttattttaaaaaatgcctaaatgaggccgtgcgcggtggctcacgcctgtaatcccagcactttgggaggctgaagcatgcagatcatgaggtcaggagaccgagaccatcctggctaacatggtgaaaccccatctctactaaaaatacaaaaaattagctgggtgtgatggtgggcgcctgtagtcccagctactcaggaggctgaggcaggaggattgcttgagtccaggagttggaggctacaatgagtatgacggcagcctgggatagtgcaaccctgtctctaataaataataaaattaaataaaaaaataaaaatgtaagggaatgataaccatcaaacaaagggcaacggagacttctgaaaggaagacaaaagtggaatggggaggggcccaaggcagtcacagggtactccctggtaatgtgctgattctcaaactgagttggtggatggagttagggggtcgttttattgttctacaccccatatcttataacattttactgttatacattataacccacatctacgggtatatgtcaattctcatataataaaactggcacagtggctcatgcctgcaatcccaccacttttggaggccgaggtgggaggatcacttgaggtcaggagtttgggaccagcctggccaacatggtgaaaccccgtttctactaaaaaaattagccaggcatggtgatgcatgcctgtaatcccagctacttgggaggctgaagccaaagaattgcttgaacctgggcagtagaggttgcagtgaactgagatcgtgacattgcactccagccgggcaacagagcgagagtccatcccagaaaaaaacaaaacaaaacaaaaaaccaaaaaaaaaactggaaaagtaagagaaaagttcccagacctcagccttggggaatactaccagctttcacggaccagggagaggggcaggagttgtgcacgaaacgagatggagctgcatgaggtgggagaagaggaaaccgtgacatcgcagcggccaagggagccttccaggaggaagaagcgtctcccagggtcagggcttctaagagcagttggggaagacgaggactggaatttggatttggccacctgggggtgttttctgaacttggaggagcattcttgtgcccctacgatgcttgcagcagctaaggactccagacctgcagagtctgtcctgagacaggtcagacctcggcggtgggacgggaaaggggaactctctgtctagagacttgcgctccgatgtagttggaggtgctacactgtggctggccacagaccaacacgagcaatggaccacgagaggcctggggtagttagcctttccttcctgtgcagccaagaacggaaggatgagaggggttctttctgcctcctccttggcatgagcacctccacctccatgcccactctgtcctttctcccaggagcagctggccggagagtaacacgactccagccggacatggtcatgactatttcagcctgcaaggtcatgactctctggcccacctaggactcctaggggaaaggaagtgcctggtctaccgcccttcccctgcaagtctgaatgctgtgtggacagaggaggaggacccaataaggtaggggtattggagtactcgggtgcctgggaagatccaagcccggcctatagggtcaaggtcttttccaaaacaggggaaaccctttctggttcccgaaggtcctcccttccctattcgctgaacaggtgggtgccaagaagcccctgtcttgagga

SEQ ID NO: 21388 - DNA, 2300 bp, Homo sapien
tgaagcaaaatggcaaaatgtccacatctattctatataggtacaggggacatagaggactgttatattttcttcctttttttttttttttttttttttgagatggagtcttgctctgttgtccaggctggagcgcagtggtgcgatcctggctcactgcaacttccacctcccgggttcaagcaattctcctgcctcagcttcctgggtagctgggattacaggtgcaagccactacacctggctaatttttttgtatttttgatagagatggggtttcactctgttggccaggctggtctcgaactcctgataggtgatccaccctccttggcctcccaaagtgctgggattacaggcgtgacccaacgcgcctgacctgaaataaatattatttaattaaaaaactaaaagcattacactagaagaaacagaccaaagagaaatctaaagagatcagttggacagaggaaggtggtgggaggagggcctctcttccattggccggtgggaggcagcaaatgtcagatggtggatgggggttttagaggtgggggttagcatgagaggtagggcacggcgatagggggggtgctgtccatgcagagggaataaccagtgcaaaggtcttggggtaggaggcaggaaggtgcctggtgagttagaagaacagcgggtaggctggatggggggtgtgagccagggggagatgaggagctgaagtcagagagctgacaggggccttgggtgccaaggtgaggactttgcttttacctggagtgaggtacagctggggcagggctctgagccaggagggtagttaactgactcaggtggtcccaggctctctctggctgcaggtgagaacagacagtaggggcagggatgggagcagggagatcaggcaggagaggatggaggctgggccagggcgtgggcagcggaggaagaagagtttagaatggagcgattgattttatacgtggagcccacagtttgtgacggattggatgtggtgtgaaggaaaagagagggtcagaaaagactctgaagttctgggcctgccattcatcaaaatggagaagtcaggtgggcttcttttgcaggaggaggggaagggttgatggagagggttgggaagggagttttttcaaaagaggcggggacagcgtaccctggagagcgctggggagccacagccccggagctgtgaggtgggactcgcatttctgtgtggttgggccaggagtccaggacaccacctgactctgacctcttgcagacggggcgggggaggggggacgcaggttatggcgtcagagcaggatcgaatccaactctgccgcctacctaccaggtgaccccaacaagtcacttcccatcttagaggccgggcttctccttccgtaaaaggactgattttgcccgttcctgcgctgtccccgggaaaagcccttaccaccgagttagtgggactcccagcactggggtgatgagcgcaaggtctcagcacagataagagccagggaggctggattctgacttggtacttggcctggctgaccaaaactgggaagtccctagaaacggaggcaccggacctcctgggaccaggaacccgggctcagagactgggagagggaaggaggaggcggccaaccggccccaccccttcccgccagcttcaggccccctcccccatacatacacctcggtttcccagcatctccagtcctcccccaccttcgccccggctctcaggttcctccctgggaggtccaggagcttctggccaggggcatagtagttgctagggacccttttctaggtactaggggagggggctccccaacctgcgggcaggcagctgcctccacgatgtttggttttaataaagtctctttgtttccttctctgtctctctgcccctctgctttcccttctctgtccagtccctctctccccggcttctccctccttctaggcctctgcggcccctccccgccttccctcccgggctgggggcggcgccgtgacgcggcggggcgggggaaggaagggggtgtcgctgacgccgcggcggcctccggcggctccggccttttgtgcgggcggttgggtcgggtgggggcggcggccgcggaaggccaggccggtgccctgcggggacgcccagcgcagcccagccccgcgcagcccagccctgccctgccctgccctgccctgcgcccggggcgcgcccaccgcgccgcatccatgttcgagtaaggaccgggcgactagagctcagggaccgggcg

SEQ ID NO: 21389 - DNA, 2300 bp, Homo sapien
ttgtgccactgcactccagcctgagtgacagagcgagaccctatctctaaaaagaaaataaaaataaataatggaaatagattttgaaatgagagatgaagaaaataaagaaattaagaaagatgcttagggttttagctccgacaactgagtggaaagtcgctgttcaataaatatttgttgtatgaatcagtaagttaattttaaaaataggaggtataggccaggcgcggtggctcacacctgtaatcccagcattttgggaggctgaggtgggcagatcacttgaggtcaggagttcaagaccagcctggccaacatagtgaacccccgtctctactaaaaatacaaaaattagccaggcatggtagtgtgatcctgtaatcccagctactcaggaggttgaagcaggagaatctcttgaacccaggaggcgaaggttacagtgagctgagatcacaccactgcactccagcctaggtgacagagtgagagattccgtcttaaaataaaataaaataaaacagcaggtgtctttgagagctcgctatgtgccatgctctgttagaattactttacatgggctgggcacggtggttcatgcctgtaatcccagcattttgggaggctgaggccagaggatcacttgaggccaggattttgagaccagcttgggcaacttaggaagaccccgtctcaaaaaaaattaaagtaggctgggcacggtggctcccacctgtaatcccagcacttgggaggccaaggtgggcagatcatgaggtcaagagtttgagaccagcccagccaacatggttaaaccccatctactaaaaatataaaagctagccatgtgtggtggcaggaacctgtagtcccagctacttgggaggctaaggcaggagaatcagttgaacccaggaggcagagtttgcagtgagccgagatcatgccactgactccagcctgggcaacagagcaagactctgtcacaaaaaataaataaataaaataaagtaagataaaggaagtgctttacatgtcctgatttgtttaagccccaaaacaactggatgaggacatgtatttatcatccctggattactgatgaagtaaccgtagcacagagacgttaaggagcatgttctgagtgtcactgctgggaagagaaacaggatggctgggtggatgggtgtgtattcggggatcaatgggtgggcctctgaaaataggcctgtccccgaatcccagcctgttttttccagttaacacttctcttcctcttcctgcccccagcaccacaccccactctggccggagcacgccaagcagctccccatcgctccggaaacggctgcagctcctgcccccaagccggcccccacctgagccagaaccaggcaccatggtggagaagggatcagatagctcctcagagaagggtggggtgcctgggacccccagcacccagagcctaggcagccggaacttcatccgcaacagcaaggttggtgcaagcccaggtggggtggggagagggctagtgggggctggccggtgatctaggggctcatcctgactcctctccttttctttgcagaagatgcagagctggtacagtgtaagtgtctgggcaaggggcttgctggagggctgggaggaccgggtgctgggccaggagccccaggctgcaacagtcaaggagtgcgtgctgagatggagtgggtgcagacctagggtcacgttctatgctattatttatgtgctgtgtgaccttgggtgagttacttaacctctctgggcctctctctgtccttgagaaacagccccaccttacaaggctgaagggaacattgaatgagtcagtgatgctggtgggtgcttggtacggggcccggcttacataagaaatctgtaaatggcagctgtcattgtggctactggtgtgttgtgtgcgttggaatctgtcagggacttaagagactgagggggttccaggagctttgtggggcagcattgggagtgtgaacccccatccaggttctcacctctcaaacttcctcagatgctgagccccacttataagcagcgtaatgaggacttccggaaactgttcagcaaactccccgaagcagaacgcctcattgtgggtgagtcccggacccccagtcccagctcctagcccagccctgtgactctccgccagcccgcgggcgccggctgagcctcgtgacttgggtgtcctcctgtctctccccgcccctctcagattactcctgcgccctgcagcgtgagatcctgct

SEQ ID NO: 21390 - DNA, 2300 bp, Homo sapien
ggtcacatctcagcactgctacttcctggctggaccccagcatgtcaccttgcacttctcagcaccattgtcttaaaaggatgatgaggttagcacctactttccagatggttttgaagatacagtgagttagtacatctgtaaagtggttagaagaatgcacctagttgaccaggtggcaaatgtctgctgctatcatcacttactgttaactgtcatcactgtcattcagccactctggccatgggtggctgaaagctcaaggctcccgaggacacctgggaaaagattcggggggccacgatggcataggcatgggagactcagccctggagtctggcagggcttgaccaagtcacttggtgaccttgaacacatgactttccctacatgacttccccttcctgggactccgtatgctctgtaaagatgggaacattcatggctgggcacggtggctcatgcctgtaatcccagcactttggtagacgaagacgggcggatcgtggtgcccacgaggtcaggagttcgagaccagcctggccaacatggtgaaaccccgtctctactaaaattgcaaaaattagctgggcgtggtagcacgcacctgtaatcccagctccttgggaagctgaggtaggagaatcgcttgaacccaggagggagaggttgcagtgagctgagatcacaccactgcactccagcctgagcgacagagccagactccatctccaaaaaacaaacaaaaaaagatataaaaaaaatgggaacattctctggccagagtattgtggggacttgggaagcaggaagtttgagtcctgggcgcaggccctggaggggctgtagcaggggattccccgcttgctgaggccaggtctggtgcgggagatcgtggctgcctccttgtggaagccaggggaactgcggaggccgagggctggtggggaatctggcgggccgggctctggctggggtgagatggaggccaaccccaggtcccgcctccccagacgctgagtccccgcgagctctggcacctggtgcatcagtgctacggctcagagctgggcctcaccagtgaggatgaggactatgtctcccccttgcagctgaacggtctggggtgagttggaggtcaaaggaggttgaagggttcgggggagaacaggacggtcggcgtgcagagttcctggagtgctggggggcctgagatggttgtatgacgtctggaggattcaggagggtgtatggggtctcaaggacacagcagtcccgcttcctcccctttcccacaggacccccaaggaagtgggagatgtgatcgccctgagcgacatcacctcctcgggggcagctgaccgcagccaggagccaagcccagtgggttcgcgccgtggccatgtcacgcccaacctttcccgagccagcagcgacgcagaccatggggtgagcggtgggttggaagaggggtgggatactgataggaagagagaggagggctgggggtgcagtgggagaagaacagcctgacagatttggaggggaatggatagggggacaggggaggcctggatggaggaacaggacagggaggggaagacggacatgtgacagggaaagagagacagggaagagaggggacagacagaaaggatgagagacagaagggatgggagatgggtggatagatgaagcagcagacagacagacggacaggacaggtaagaaagcttatggctcaggcatctgagacaagcctggcaggggctgagaggggccctcatctgggtggccccaggctgctcgcagctcagccgtgagccctcggtgcacacaccaccccgggtctgcacaggctctggaatccttgtggccagtgtggacttgggagccctggggctgggatggaggtggccaaggctgcatcgggcctttctccacaggcagaggaggacaaggaggagcaggtagacagccagccagacgcctcctccagccagacagtgaccccggtggctgaacccccgagcacagagcccacccagcctgacgggcccaccaccctgggccccttggatctgctgcccagtgaggagctattgacagacacaagtaactcctcttcatccactggggaggaaggtgaggcaggcgggcccaattcattcgcctccggtacttgcaagcctcgctcagtcttaagcaagaggggatggattcgcccgcagcactgagaatccaggggcaggcgggatggcgttcaggcgctgttgctagaaatctctgtctttactctg

SEQ ID NO: 21391 - DNA, 2300 bp, Homo sapien
ggaagctgaggtaggagaatcgcttgaacccaggagggagaggttgcagtgagctgagatcacaccactgcactccagcctgagcgacagagccagactccatctccaaaaaacaaacaaaaaaagatataaaaaaaatgggaacattctctggccagagtattgtggggacttgggaagcaggaagtttgagtcctgggcgcaggccctggaggggctgtagcaggggattccccgcttgctgaggccaggtctggtgcgggagatcgtggctgcctccttgtggaagccaggggaactgcggaggccgagggctggtggggaatctggcgggccgggctctggctggggtgagatggaggccaaccccaggtcccgcctccccagacgctgagtccccgcgagctctggcacctggtgcatcagtgctacggctcagagctgggcctcaccagtgaggatgaggactatgtctcccccttgcagctgaacggtctggggtgagttggaggtcaaaggaggttgaagggttcgggggagaacaggacggtcggcgtgcagagttcctggagtgctggggggcctgagatggttgtatgacgtctggaggattcaggagggtgtatggggtctcaaggacacagcagtcccgcttcctcccctttcccacaggacccccaaggaagtgggagatgtgatcgccctgagcgacatcacctcctcgggggcagctgaccgcagccaggagccaagcccagtgggttcgcgccgtggccatgtcacgcccaacctttcccgagccagcagcgacgcagaccatggggtgagcggtgggttggaagaggggtgggatactgataggaagagagaggagggctgggggtgcagtgggagaagaacagcctgacagatttggaggggaatggatagggggacaggggaggcctggatggaggaacaggacagggaggggaagacggacatgtgacagggaaagagagacagggaagagaggggacagacagaaaggatgagagacagaagggatgggagatgggtggatagatgaagcagcagacagacagacggacaggacaggtaagaaagcttatggctcaggcatctgagacaagcctggcaggggctgagaggggccctcatctgggtggccccaggctgctcgcagctcagccgtgagccctcggtgcacacaccaccccgggtctgcacaggctctggaatccttgtggccagtgtggacttgggagccctggggctgggatggaggtggccaaggctgcatcgggcctttctccacaggcagaggaggacaaggaggagcaggtagacagccagccagacgcctcctccagccagacagtgaccccggtggctgaacccccgagcacagagcccacccagcctgacgggcccaccaccctgggccccttggatctgctgcccagtgaggagctattgacagacacaagtaactcctcttcatccactggggaggaaggtgaggcaggcgggcccaattcattcgcctccggtacttgcaagcctcgctcagtcttaagcaagaggggatggattcgcccgcagcactgagaatccaggggcaggcgggatggcgttcaggcgctgttgctagaaatctctgtctttactctgttttgaaggcagcatggcagggtgaacacaagcacagactgaaggcagcttgccgcggttcacatcctggtcacaccacttcctgaccatgtcacgtgggcaaattatgtaacttctctgagcttgctttcctcctctgaaaatggggttaacaatgataatacccacttcataggattgttgttaagagactataaatgaggctgggtgtgatggctcacacctgtaatcccagcactttgggaggccaaggtaggaaggattgctagaggccaagagttggagaacagcctgggcagcaaagcaagaccccgttttgtacaaaaaagaaaaaaaagaaaaaactaggtgtggtggtgcacacctatagtaccagctacttggcagaccaaggcaagaggatcacatgaggccaagagtttgagacaagcctgggcaacatagtgagacccctgtctttacaaaaaatttaaaaattagccaggcatggggtcatgcaccctatgtagtctcagctactggggaggctgaggcaggaggatcgcttgagcccaggagttggaggctgcagtgagctatgattgcaccactgcacttcggcctgagcaacagagcgagaccctgtc

SEQ ID NO: 21392 - DNA, 2300 bp, Homo sapien
cggccctctcccagcctcagtttcttcatctgtaaaatggggataatagaacttgctgaaggtttggggcagtagaagtgggttctgcaaatcccaaggacttagtgaacattggcattcatttatttgtttgacaaatattgattgagtacctacaatgtgccaggaacagttcaaggtgcaagagacacaagacaatatcctcacctgggagattttttttttttttttttttttttttttttacatggagtctcactctgtcaccaggctggagtgcagtggtgtgatctcggctcattgccacctctgcctcccgggttcaagcgattctcctgcctcagcctcctgagtagctgggactacaggcatgtgcccccacgcccagctaatttttgtatttttagtagagatggggtttcaccatgttggccaggatggtctcgatctcttgacctcgtgatccgcccacctcggcctcccagaatgctggaattacaagcgtgagccactgcgcccggcctttttttttgagacggagtttcgctcttgttgcccaggctggagtgcagtgatgcgatcttggctcactgcaacctctgcctcccgggttcaagcgattcttcctcagcctcccaagtaactgggattacaggtgcccaccaccactcccagctaattttttttgtattgttagtagagacggggtttcaccatgctcgtcaggctggtctcgaactcctgtcctcaggtgatctgccccccttggcctcccaaagtgctgggatagcggggggcggctcacatctgtaatcccagcatggtcaacatggtgaaaccctgtctctactaaaaaataaaaaaattagccaggcatgatggtgcacacctgtactcccagctacttgggaggttgcggcaggataatcgcttgaacccgggaggcggaggttgcagtgagacgagatcagccactgcactccagcctgggcaacagagccagaccctatctcaaaaaaaaaaaaaaaaaaaaaaaaaaaaaaagaacataatgtcaggtagtgaggctgctgtggaaaacactcaacaagaggtaaagagtaaaggaggtcaggttaggagcggggaaggcagtttaccctgaagggacacagaagacctgacgaaggtgacattggagccatggaggcccacggagaggggcggggcagggggggagagccggggcagaggggagagctggggccaaggccctgaggcaggaacgggttccctgtgttgggaacagcaggagggcctgaacagccagagtggagtgggaggaaagaggggtagaaggtgacatcagggacataaatgggtgcaggggatcacgaaggggtcctcctcctgaaacagcacctccagattcccggggctgcttctctccagggtgccccgcctgcttgggtgaggtccggattgtagctgtagtcctagcctgacggccccccaccctcctctaatgcctacttggggtccctgcacattgacccccaggcctggatatcagggctcaggggagataacttggaggttcgccctctggaactcctgaggatgacctccatcatttgaagtcggaaacccggcccccaaactgcgctctaagtcctcctgtgactctgggggtgacctttccagactccctgggaaggtgggggggggggggtggtcctcagagccccagcggggtcggagacacacagaccaccctccccgttcccagaagtcgcggtccctgcgccacccggagaggccggtgcagcgggcgcctcccgggccgctgcggcaaaggctgggcggccgcgccttccccccgcggtgattcatcccgccccctccctctcctccctcgtccctccctaggccgccgccgccgccgccgccgccgccgctgcagtgcgcaggagaccgcggtccgcgcccgagcgcgcccgagccggagcgggaccggggtcggtgcacctagcggatgtgcccggctgcgcgcgccagcgcagcagcccgagcagcggccgccgcccgcgcggcggggatgcccggacgccgggccccggggctgggcccccggcggtaaccggagcgggggggccgcgccccccctcctcccccctcgccggtcccagagccgcagctgctgcgcccgcgcgctcccggggacattctaaccgccgccaggtcccgccgcctctcgccccgctattaataccggcggcccgggaggggggcgcagcacgcgccgcgcagccatggggagg

SEQ ID NO: 21393 - DNA, 2300 bp, Homo sapien
cgcggtccgcgcccgagcgcgcccgagccggagcgggaccggggtcggtgcacctagcggatgtgcccggctgcgcgcgccagcgcagcagcccgagcagcggccgccgcccgcgcggcggggatgcccggacgccgggccccggggctgggcccccggcggtaaccggagcgggggggccgcgccccccctcctcccccctcgccggtcccagagccgcagctgctgcgcccgcgcgctcccggggacattctaaccgccgccaggtcccgccgcctctcgccccgctattaataccggcggcccgggaggggggcgcagcacgcgccgcgcagccatggggaggctgctggccttagtggtcggcgcggcactgggtgagtgcgcggggggcgcgcgcggccggggggcaccgcgggggcactggcggggcggcgggagtggcgctcgggacacggggcagccgcgcgagggccacccccggcccatccccgggccccgccaagtcagcttcagaagttgtgcgcgcgggagccgggcttggggagggcagtggaggtgagggtgggctccagcgggtgggggccgggctggcacagcctggcggctgcaggcgcccagccgggggcgaggaaacgcggagtcagctgctcccggagccccgcaggctgcaatgtgacacccacagccgcgggaggggggtggggggaaggcggcgcccggagactgggacgggaaagacggagggacagggagagatgaagacgggaggaagggggcgagagacagagaaggactcggagcgcaccggagtggtccgctgggatgctggggacatgggggtcaagggggagacggagacagagagaggggtattggagagagagagagagagagagagttaagagactgagcgcgatggagaaagggaaacttgagaaaggcagaaggagatggagagaagagagagggagatgcgggtgcccgtgaacaccgggagagaatcttgcatggagtttgaaaagggatagacgtagaaaggtggaaagagattaggagaggtctccttctgagcccagagagtggacaaaaagtggagggaccttcagagagacccctgagagggacaaagataggagggactgagacagaggccctcagggagtctgaaagggaccgcaggggaggcggatggatgagaagtcctgaggatcaggaaacaaggacagcacagggctgcagcagaagagacacagcgttagctacagagtgctgggaggcagaaaggaggtgccaggtaagagtgtgaaggaattctaagactggaattcagtgggctgcaaaagccctggggcaggagagagctcaggaaagctttgagtagtggatggggttggggtgggaagagctctagaggcgaggagcctggggaagaggggatgatggaggcaggagaggccggggaggggatggctcacacaggggcttgtgggctgtggagaggggctgagtgtgggtcagccccggtttcagtgcccacctccccacaatcccccacccccagaccttttctcccaacccatttctcctggagctagctggttttacaatttaatggtgaaaatgactgccaccttaaacttctaacttagctggaattctcattctaccacctagatgcttgggttcctccagcaagggactttctgaggaaggggcactcgggtagcataaagtctgagttaccggcaacgttgacagtcccacttatggggcctcccatgtacaaggccctacctaatgtatgaaaatgggcccagccattgctggaagcaaaggaccatttctttcaacaagagagagggaaactgagactcagggatgaatgacttgctgaggtcacgcagtgagtgacagggctcagcctagcatccagtcctgtctgctggtaatcattgaggggggaacagatggtttgtgaggggtctggcattgcttagggcaatgggtgcctctgcctgacctgagcctgctgtccccacagtgtcctcagcctgcgggggctgcgtggaggtggactcggagaccgaggccgtgtatgggatgaccttcaaaattctttgcatctcctgcaagcgccgcagcgagaccaacgctgagaccttcaccgagtggaccttccgccagaagggcactgaggagtttgtcaaggtgtgcgggtgccgggaacgggcatgggagggcaggggtccacgagtgggaggcggtggggctggatctcagggagggggcttatttgt

SEQ ID NO: 21394 - DNA, 2300 bp, Homo sapien
gcagtgctggctgcgagctcatccaagcatgttacgggtgttaactcatttcctctccagcaaccctgtgagagggtctgagtgttcccatctccattttacagaggctcagagaggtgcagtcctttgcctgaggtcacacagctagtaagaggcagagccgggatttgaaccctggcagtctggccctagagccccagctgttaaccattaggctttatagccccagttataacaacaataataatactaatacaagtgaaccttcactgagtgccatttatagatcaagcactattctaaggattttaaagcatatttaattctcacagcactctgatgaaggaggtattcattttacaattgaagaaacagaggcctagagacattgagtcacttgcgcaaggtcacacagctggccagtggcagagccagcctttgaacctgagccttctggttgcagagctacggcttttaggcaccgtgctgagggcctccagaatgacacagatgtggcctcgagttacacagggaggcaggttgagggtgacccccaccaggcctacccaaggctgggtattaataatcacagtgcatacaccaggcccagggaggttgagccactcatccaagctcacacagcaagctcacagcacactcaggctgtcatgcagcctgggctacccccttaaccctgcctggcccctgcagccaacagagacatggcatccatcgtgtctgagatcatgatgtatgtgctcattgtggtgttgaccatatggctcgtggcagagatgatttactgctacaagaagatcgctgccgccacggagactgctgcacaggagaatgcgtgagtagggtggctgggaggtgggagggcacccagggcaccgtcacacttgccagagaggaactccggagcccgggcagggaggaggcagcggagcggcccagggcgccatctctcagtactacccagaggggagtgctccctgtcagacacaggataggggtcgtcagacccagccccttcctccctccaactcaggagcccaggctcccagccagattcctcaaagaccctgaggagtccacccatagactccttctctctctaactaaggagccctgtgtacctggggtggagaccgctaccttcccccatcccccgggggttgggtcggtctgatgatggggtcactgtatacctggcctttcccccacagctcggaatacctggccatcacctctgaaagcaaagagaactgcacgggcgtccaggtggccgaatagccctggtaaggcggatgggctggcagaggggaaggggattgggaggggccgaagtcccccaggtccctaattccccctctcttgctccccttcaggccctgggccccgcctcaaggaagagccagccgtaatggggactctccaggcaccgcctgcccccagcgtgggggtggccactcctgggccccagaaagcctcagagtcctgccgacggagccactggggtgggagggggcagggggcttggctcgcacccccactttcgcctcctccagctcctgccccgccggccgcgcaccgccatgcatgatgggtaaagcaatactgccgctgcccccaccctgcttctgctgcctgtttggggaggggggcggtgaggtgggggcagcggccccgcacccctcctccttgctgatttgcacacattggccgcttcagacacgcacttctggggccagcccctccccgcctcctccctgcctggcggcaggggtcgcgatgatgggctggagcagtttggggcagggggttctgggacccactccgactccccctccccggcatcatttcccctcccgcttcctccggctggacctggggtcccccctccctgtaatgcactcctgccccggcccaacctcgccctctctcaccagccttgaactgtggccacctagaaaggggcccattcagcctcgtctctttacagaagtagttttgttcatgaaataaagactcttggacttgatgcatagtttcgattgtgagccccgtcaccttccccccattcccgtccccgaatcttcgagcccgctttccagggaccctacctgagggcccacaggtgaagccacttagtgcctgatctgtgtcggggttgggggagccatgggctcaggggtgagggagagtggaacggagccaggaagggagggggtgccgtggagggaagagaatcgaggctgatgctggggtgcaggggtggcatggggtgtgtggtgtgc

SEQ ID NO: 21395 - DNA, 2300 bp, Homo sapien
cacagctcggaatacctggccatcacctctgaaagcaaagagaactgcacgggcgtccaggtggccgaatagccctggtaaggcggatgggctggcagaggggaaggggattgggaggggccgaagtcccccaggtccctaattccccctctcttgctccccttcaggccctgggccccgcctcaaggaagagccagccgtaatggggactctccaggcaccgcctgcccccagcgtgggggtggccactcctgggccccagaaagcctcagagtcctgccgacggagccactggggtgggagggggcagggggcttggctcgcacccccactttcgcctcctccagctcctgccccgccggccgcgcaccgccatgcatgatgggtaaagcaatactgccgctgcccccaccctgcttctgctgcctgtttggggaggggggcggtgaggtgggggcagcggccccgcacccctcctccttgctgatttgcacacattggccgcttcagacacgcacttctggggccagcccctccccgcctcctccctgcctggcggcaggggtcgcgatgatgggctggagcagtttggggcagggggttctgggacccactccgactccccctccccggcatcatttcccctcccgcttcctccggctggacctggggtcccccctccctgtaatgcactcctgccccggcccaacctcgccctctctcaccagccttgaactgtggccacctagaaaggggcccattcagcctcgtctctttacagaagtagttttgttcatgaaataaagactcttggacttgatgcatagtttcgattgtgagccccgtcaccttccccccattcccgtccccgaatcttcgagcccgctttccagggaccctacctgagggcccacaggtgaagccacttagtgcctgatctgtgtcggggttgggggagccatgggctcaggggtgagggagagtggaacggagccaggaagggagggggtgccgtggagggaagagaatcgaggctgatgctggggtgcaggggtggcatggggtgtgtggtgtgcccagcagtgtgagtctctggagaggtgggcgctggggagaaggagagggaaggagagacgggtatggatggaaaggcagaggaagccaggctaaaccagcgtgtcccaatgaggggccctgggctgagtggaggaaatgggtgcggtggaggtgggtttggctgggcacagcgggcacgtgtgggtaagcgggtggggccggttgtgcgggtggcctatctggggcaagcagccgaggccgactgtgtccggcgtgtggttgagcacgggcaggtgtctggcggtgaccctgcacgtctggtgtttacctggccctgggtctgacgtgggccgcgcctggctgctggcgggacagtgtgttatctgcctgcggacgcttccggccacttggcctgggcctctgcccttagcgctgtgttttcccggccaagccccccatcccccctatctagtgctaggactttctggctccagaggtcaccgcggccgggcggaggctgccaaagcaaaccagccccgtgacttgtaggaagccagcgggggaggggccggggcaggatgagcagggcaggcgggagaggctggggctggggttggggcccaggaattgggcagggaattaggcagaggtgcagcaagtggcgggcacagccaggacctggggctggaggacgcagaaagggcggggggaagggttcgctgggtgagggtggagtgggcttagggcagctggggccctccatctgatctcttctggtcagacccccacccttcagcctgcactttctccctaaacccccagcctccggccaggcctgtccctgttcccacatccccgcagacaggcacacctgggtccccctggaggtccaaggcaagccccgtagctgggcccgcctggtccagcccccacaagcccggccccatcagccaggtggcctccagtgctgccaatcgaatggtccggcccctccccgccccttcacccgcccctcgcccagccccctcctcctcaggtgaggcagcctggcctagcaggccccacgccaccgcctctgcctccaggccgcccgctgctgcggggccaccatgctcctgcccaggcctggagactgacccgaccccggcactacctcgaggctccgcccccacctgctggaccccagggtaaggacaagggcccccagactcacagttccagccctgaggacaggggttccctca

SEQ ID NO: 21396 - DNA, 2300 bp, Homo sapien
ccttggttcccactaccttccccaagctctggccatctggccatctcgatggcctctccagcctctgacataagagagcctgcttattcttgcctcaaggcctttgcctgtgctgttccctctgcccacagtgcccttccttgtggtctgtgtgtggctggcacctcacctttcagagcttagctcagaagtctcctctaggggaggccctgtgatccctgatcccctgcagaagcccacctgctgccccagcctgcacggttttcttcacagcctctgccacaatctggaaattattgggttcatttacttgtttccttgttaatgtctcccactccccacctacacgcatgagaacgtgaacccctgagagtcgtaaccttatctgtcttctttgggttatgttcccggaacctagaaaggtgccaggcacacagcggatgttcagtaggatggtaaacaaataaagcttctttaggctgatgaaaaaactgagggtcaggcgcggtggctcacgcctgcaattccaacactttgtttgggaggctgagacaagcagataacttgagtctgggagttcacgaccagcctggtcaacatggcaaaccccgtcaatacaaaaaatacaaaaattagccatgtgtggtggtgtgcgcctataatcccagctactcgggaggctcagaattacctgagcctgagcgcttgagactgcagtgtgccatgatcgcgccgctgcactccagcctgggcagcacagtgaaaccctgtctcaaaaaaaaaaaaaagaaaaagaaagagagagagagagaaaaagaaagaaagaaagaaagaaagaaagaaagaaagaaagaaagaaagaaagaaaaggaaggaaggaaggaaaagaaaaaaactgaggctgaggctcagagaggggaggggagttgctcaggcccacacatctctgatgatttataaagcatttatagagaacttgctatgtgccaggcacttccgcacagtgagagccaggatggcttcgtggctgtacacaggggacctggcatcaaacctgcccagggttctggacgctgctctgcctcttccaggctgtcactgtgggcacgtgaccccacttctctgagctatctcaaaaacaggaatcatagttgtgggattgaaataaggactaaatgagctgatgtatttagaacggtgcttagcacctggaggcatcaatacaatttgagctattcttcttcttcttgaaaataactttaaattattatttttagaagtaggtgctcagtggatgcccatttaatagataagaaagttgaggctcaaagatatgatggcacctgccttaggttccagctaggaaggggtagggtcaatatttttaaatgaggctggccagacgcagtggctcactcctgtaatctcagcattttgggaggctgaggaaggaagatcgcttcagcccaggagtttgagaccagcctgggcaacatagcaagaccacgtcgctaaaaaaattaatacataaaataaaatgaggctggcagattttcaagtggaggggcaaatttgatcttgcaactgggtaccatgagagaggtctgatttagggggtatctaggggcaaagcatctagaacagcagaaacgactgaggcagcgaggaaatgccagcggcagggaagagagctaccaagagggcaaaggttgggggtcacagtcccaagaagagatggcccaaagcaaagacagaaatacaaaagcacagtgtcactggggaggagacattccctaagtgccaggaaagtgcagggcggaggtggagaccgtggcaggtggcccggccatgcccccctcccagctggaaccctgggggagctgggcacctggttgttcacacggcaggggaggaacagccctgtcaactgctggccccgggaaactgggcctggggaggacatgcttgggcataataagttagccctgggggcagggcagagctggcctcgggcccagaccctgccgcaatgaggacaggcctggctgtggccccagcatggtgtctgttgcaggtggccggactgtgccatgctgctccagacccaaggtggcagctctcactgcggggaccctgctacttctgacagccatcggggcggcatcctgggccattggtgagagcggttcctgtgcctctgacctcccctggcccctgcagcctccagcctgcctgccctcacccctcccttctctgcagtggctgttctcctcaggagtgaccaggagccgctgtaccca

SEQ ID NO: 21397 - DNA, 2300 bp, Homo sapien
gctggagtgcaatggcgttatctcagctcactgcaatctccgcctcccgggttcaggtgattctcctgcctcggcctcccgagtagctgggattacaggcatgcactaccacgcctggctaattttgtatttttagtagagacggggtttctccatgttggccaggctggtctcgaactccctacctcaggtgatctgcccgcctcagcctcctaaagtgcaatttttttgtatttttagtagagatggggtttctccatgttggccaggctggtctcgaactcctgacctcaggtgatccactcgcctcggcctcccaaagtgctggaattacaggcgtgagcctccatgcccggactaatgaacaccattgttgagagttactatatatcccaggccccgccacagatgaatcagacatgccacctccttaatttggccacagctttttgggagcacacagtaggcccacagacagaaagggaagggctcagaacctgacagcctgggttccaatcctagcacagccactttctccttatgcgacattaggcaagcaagtctgccttcccgggcctcagtttccccatctgtaccactgggataatagcagtccatctgctgtgctgccctttggagtcaatgggctcgttgtgtgggacgctgacagcatgactaattctgaaagctggttcccttcctggaagggggtggagtgggaggggtgtggctgtgtgttttccaatagccaacaatggaactcttgtaggcaggggccctcgggcctagaaaacacatccacccctgtgggttctagacaaaagtttcaggtctcagagtggaggtttaccagggcatttacactctttgaagattgttaagaagaaatactggtttcgggggacatagggacacaggggtggattcccattttgccctctctccctgcaagaagtagctgccagagatggggggtaggggcaggatctctcccacctacaactcctgagtaggattagataggcttaagaaaacctctgggctgcactgattggctcagtggggtttaatcaaagtgaagcattggaatttttgttgagtacttggggtaagaaaagattcgggttttggacaatggggaatacacatttaatgactggaaaattggcagttattttgccatcacaagaaaagccagcctgaggacaaagctaatgctatagagaaacacagaccaagagaaatgctgaaaaactgagttagcaccctgatcaaaccatgcctgatctccctctggaattttcagttatgtaattagtctaaaaatcataaaacacagtctgtgactggtttgagttaccttttatgaggctttctgtaaccaaaacagccaaagtggtatatagggaacttctgtggacccagaatctctacactttcactaggctatcacatgatttttacttagtttgagccaatgtatttcttttagcttcaatcggttcaagagtctctagatgccaatgagtgcttacctcatcaggtcggggctctctctgcagacaaacctgggtcccatgaacctacatctttgaaatgaacacaatgggactgctggacttgtttctccttcccaatttccaccttgaaaaggcgcaatgagctggaggagccacaggacttggtaaaagcagaagcgcaagtgcctggaaactcaacactcttccggtcaaaggaggcgacgtgtgagtgcatggttgcttgataaatgccaggggagagtgggtggcacccaaagatgcccctgagggtctcacatctctgccccggcccacaggaggacggggagcagcacacggcgtgggtggaggcctggcagtggcagaattgctcacagcgctccccagtccagaaggcctccccagccgggtggtggtacctgccccccatggagcagctgcactggattgggggcacgcagtccatgccactgagcacaaagcctgggtcacactggcagccatcctggcatggtgtcaggcagctgtcgggcagggcaggctcggcacaagagctaggacaggaggagccgcagagctcgtaattgctgcggggaggacaggccagctctggaagaaaacaggtaggagttaaataattgagcaagcattactattctggagcatttccaaccagaataggaccaagggagcggagagagggttgtgggggccaagggtaagtcataaaggcaaaggaggggaggtggaggcatcatcaggatgtagcataatggtggc

SEQ ID NO: 21398 - DNA, 2300 bp, Homo sapien
ggagaaatcacagccactcacagccttaacaggttctttgggcccaaatgattccaaaagcaaaacgagagaaactttttcaaatatgtttattatgtatattatatacaatatattaataaaacatattacctacatgcatttaaaacataactgaagtcagattggcccagaagactcactccaaatgagacctaatccccaatagggtgcaagtgactgcacaaactctactcctcacagcccttcctaagactcagtgtgctcatcacactagggtctcagagtccttctgaccataaacccaagccccagcgccagcccaacacacacttggacgcagcatgttcacgtccagcctaggaagaatttatggttgacctggattgggtaaaaaccgtaaacgtctgtacctcagaatgtaagatcatggtgtttaaaactacagaacattcagaggttgtcagaagtctctaattgctggtcccccaggttgaaaccagcccttaggttgaaattttgacctgcaaatttttttttaaatctgaaccaaattttttaaattaaacccctttaaggtagtacattttcaagatgcaaaattcaaaaaatataagagggcacgtgataatgagtgagtctcacttccaccccaccctccagcctcccagtttccctctccagaagccatgggtatggatgccaatctccaaaaatattttattcattacaagtatatacatatgcattattttaccgctcacaaatggtagcacactgcacggtttcccaataccttgttttttttccccttagcaagctgtctgggaaatacttctgtatctaaccacgggcaggggtgttcctccaagatttttagacaacagttctccagttcaccccgttccggtgaagggcagagcaccccccgcccttcccagccaccctgtacacgcccctactcgctctcggatgcctgcagttcccaggcttcccagcagagggagacaccattccactcccaagaccaccaaggggtcgtcccagacacaagcttcaagggtctagggaagagacgctatccgcccagacacaaagaccccccttagctatactgagttggcctccgggcctccccttcctgtttctatctcctcctggacctgttgcttagagccctaccccgaggtccccccgcccggcttccttatgggaactggccccgccttaagagtggtaggagggagccttacccttgtctaggacctgggcttgacaacttgccccagggaaccacatagagaaggggtgtagcgctgggcgaacattgccctccccgatccctcagcgatgacaagtggggggtccttctctctgcccccagcaggccagtttccggaagagccttgacccaaacccccttttcctgtcctgtgctccacactcccagcagctgcttctccctggccaggccctgcagccctcctccccgcccccacggtggtgttggggtcgcctggagtccagctggtgtccagggcagagctacccctttcctggccctacccctccccgtgaccccaatcctccgccaaccgctcaaaggatccttgttctccatccagcccccagacaaaagtccctctgtctaagaaggcggaattgaggggagggggcacccccaactgggaccatgggggagcctgcacagaccccatccggaaggaatgcctggaggaggaggagcaggagacaggggaggaaagggggagggaggcttgtacagtgctgggggccttatgtggactaggaggcagccgcccccaccagcacccactctgtagacccaggcgtctggctcccagcacccacggaaagagcctggctaggaaactgcagcctggtgcctggcagacagttctcattctccccagggcagggagcaggttatgaccaggactaaggtcccagagtccccaccctgacccctccctgctgttccagccgctccctcatatccacccctgccccatctcctgactttggtcacgctagcatcttctgctgatcctgaaattgtaccagcggcaagatgtggcctggaaggggactttaagttctccacaactgccagcaatccttccaccaggcaaaacacatcatctaaggaaaagaagtgaggtcggaacaccaacgcatcatctcactgcatggccctggaggctctgccgtttaaagaccccagaaccttccccattcaaggtcctctcctgggcacaggagattggagaaagctcctc

SEQ ID NO: 21399 - DNA, 2300 bp, Homo sapien
acaacacacctggcgtccccatgggcaggccaggtttacaggtcctggtgacagggaaacctggaatggcccaggcactgcactcctggttgtgtgaacttgagcagctctgtgcctcattttcacatgctccaaaatggaaaaatcactaagatcacgtgtataatcctggacagggctcagaggtctctgaacttgacattgtcttatgattaacttcattttttgtttgtttgtttgagaccgggtcttgctctgtcacccaggctgaagtgcaatggcacaatcatagctcactgtagcctcaacctcatgggctcaagtgattctcccacctcagcttcctgagtagctgggactatgggcgtgcgacaccatgcctggctaattttttaattttttgtacagtcggggtttctctatgttgcccaggcttgtcttgaactcctggccccaagcgatcctcccacttcagcctgccaaaatgtgggattacagaaatgagccaccgtgcctggcctattattattgtccttgtcatcctcctccttgtgaactggactgctgggctgggcaccctatgagagtgggttcagatccctctgtgcccctggcactcagctctccaacttcactttcagggaccctgtttatcatacccaatagtcagtgaaggaaactgagagctgacgggcatggctcaaaccacaagctgctggggtctgctcctctaggagctggatccggagcccacccccaagcttgccgaccactgtgggatgcccaccttgtgctgaaccccaaaaggatgagttgcctccatcacctgagtcctctccacaactgggaagcgggtgccacgattgtccccgtttgacagatgggaaaactgaggccacacaggactgggcctggaacccagatctgcatgacctccaagctgttaagcccccttatcctccaacgaggcttctgggcgtgggcgtcagtgtcaagagaggctgcatgcattcctcaatcacaggatgagtctcgtccccaggcgatgaggtggtacagcctaggggttaggtttagagctgactagagccaggaaactaatcacataacttccctgtgcctcagtttccccatctgtaaagcagggatagcagtactgcccatctcacagggtggctgtgaaggctgagtgagtataaacattactactatttcatcttagctaacaagtgtcatttacttatgtttcttatttagtggacagaatctatccaaatgactaaaatttagtccagattaaaacaaccaattatccatctatccatgaactctgatctccaaagaaagaatgcaaaataacctggagccggatgcctgggtttgaatcccggctgtgccctcagctgggtaacctagagttcaggttccctgacctctgtctccacttcctccagctgtaaagtggtgatgatgacagcactaacttcagagggctttggcaagatcagaatgagttaatagatgagcttttaggacaaggccaggctcagagtagacgctgaagaaggggtggcatcatcatcatcatcttcaccatcatcatcatcttcatcatcatcatgtcctcgggttggtgctgtcccccagtgggtgttggccactagagggttaatttcagggtaggggagggaggctaagggcttggggccgggcagaggtcctgccgagtatgaccaccagagggagcagctggacgtgatctggccccactgacagcgcccaacacaccctcctgtagccaggggagggggctggcagagagtggccaggacgggatgtccccagcccccccagggcctctcctcccaccctgctccagaatgcagagccatctggtccccaccctggtgacatcgtcctcctgctcccccaatagggttgagtggggaatctggggagggggctggcgggagtggtggggcggctccagcccttggtggcccctccccctcctgtggggctgtccagtcccttcccccaaggccgaccttctcatggcctctgaccccctcctccttcccatcctactctgccgggtgtgccgggtgtccagcgaacccctttcccaaaccttcggggagaagggaggtgggaggaggcaaagaaactacaggcagggagctggaagggggggtggggggggcaggagacaagaaatcaagacaccaggcagcaggacacacacacactcacatacactcacacacatagagaccaacagatagacagctacctaaagc

SEQ ID NO: 21400 - DNA, 2300 bp, Homo sapien
ccagcccagcagtccagttcacaaggaggaggatgacaaggacaataataataggccaggcacggtggctcatttctgtaatcccacattttggcaggctgaagtgggaggatcgcttggggccaggagttcaagacaagcctgggcaacatagagaaaccccgactgtacaaaaaattaaaaaattagccaggcatggtgtcgcacgcccatagtcccagctactcaggaagctgaggtgggagaatcacttgagcccatgaggttgaggctacagtgagctatgattgtgccattgcacttcagcctgggtgacagagcaagacccggtctcaaacaaacaaacaaaaaatgaagttaatcataagacaatgtcaagttcagagacctctgagccctgtccaggattatacacgtgatcttagtgatttttccattttggagcatgtgaaaatgaggcacagagctgctcaagttcacacaaccaggagtgcagtgcctgggccattccaggtttccctgtcaccaggacctgtaaacctggcctgcccatggggacgccaggtgtgttgtccccgacaagagctcaggggaaggaaagtgtggggttaaatacatatctgtggttttggaatgtgtgaacatgcaagtgtgtcagcctgcgcatctgtcaccgtggccaaccatgtgcctgtttgctcaagcatagggtgtgaaccagtgtgtgtgtttctgcttttgtgggtatgtgtgagagcggcgggttgtccttgatggtgtttctgcttgtgtatctgtgcccatggaaatctgtctgtgtgtacacaagcttgttggccttcctatctttgggaccatgtaggagtgctggctgcatgtctgtacctttggggtttttttgttttgtttttgtttttgagacagagtctcgctctgttgcccaggctagagtgcagtggcatgatctcagctcactgcaagctctgcctcccgggctcaagtgactctcctgcctcagcctccggagtagccgtgattacaggcgcacgccaccacacccagctaatttttgtatatttttttagtagagacgagctctcgtcgggttggccaggctggtgttgaactcctggcctcaagtgatcctcccgccttggcctcccaaagtgctgggagtacaggtgtgagccaccgtacctggccatgtttggccatgcatcttagaatgcatttatgtgcggtgtgcacatacttgtgtgtttctgtatggccatttgtgggtgggtcttcacataaacatgcatttttgtggccagtttgtgagtgtagatggtgatgtggctatgtctttgactgtatctctgtgtggccatccatctacatgagcgtgcgtgggtctgtgtagacataaatgtgcttgttctggtattttgtgactggcataaaaggtgttggctgtgtgtccgggtctttgggtttctctatcagtgtgtcattctgtgtgtgtctgcttctatggatgtacatacatacatggttttgtctggttttgtacctgtatatctgggtctttgggattgtgtgtgggtgtgtgtgtgtggtgcatttctggggatctcaccacagcagatagcgcacatgcgcgcgcacacacacacacacacacacacctccctcccgtcctctaaaacagccctgttaaggacctcacggagcactgggatcgggggtcagtgggctcctgggcagtcaggctgggtgaccttcggccctggctggacccagttcccagggggcagccgcctcagcccaaaagctcttggaggcgtgtgtgtttgtgtgtgtgtgtgttcacaaccctgtcctccacaatcctcctagcctctccagcctgcctgctggctgcctgctgctgctctctctgaactgagagagttaaccaagcgggccagggcagtctgggctgggggccgccccctggcccccctccagccccagctccagtttcagctgctggttggggagggcatgggtggggtggggctgggaggggaggctgctgggggcggcgcgtccagctctgggccagggggtccaaagtgctcagcccccggggcacagcaggacgtttgggggccttctttcagcaggggacagcccgattggggtgagcgtcccccactccttccctccaggcctcacccctggtctggctgggccgcctattttgggagcaggagtggccagcccgaggcttcccaggcaggccaacccaagagggagggagtgtggttgaggca

SEQ ID NO: 21401 - DNA, 2300 bp, Homo sapien
tgcgcatctgtcaccgtggccaaccatgtgcctgtttgctcaagcatagggtgtgaaccagtgtgtgtgtttctgcttttgtgggtatgtgtgagagcggcgggttgtccttgatggtgtttctgcttgtgtatctgtgcccatggaaatctgtctgtgtgtacacaagcttgttggccttcctatctttgggaccatgtaggagtgctggctgcatgtctgtacctttggggtttttttgttttgtttttgtttttgagacagagtctcgctctgttgcccaggctagagtgcagtggcatgatctcagctcactgcaagctctgcctcccgggctcaagtgactctcctgcctcagcctccggagtagccgtgattacaggcgcacgccaccacacccagctaatttttgtatatttttttagtagagacgagctctcgtcgggttggccaggctggtgttgaactcctggcctcaagtgatcctcccgccttggcctcccaaagtgctgggagtacaggtgtgagccaccgtacctggccatgtttggccatgcatcttagaatgcatttatgtgcggtgtgcacatacttgtgtgtttctgtatggccatttgtgggtgggtcttcacataaacatgcatttttgtggccagtttgtgagtgtagatggtgatgtggctatgtctttgactgtatctctgtgtggccatccatctacatgagcgtgcgtgggtctgtgtagacataaatgtgcttgttctggtattttgtgactggcataaaaggtgttggctgtgtgtccgggtctttgggtttctctatcagtgtgtcattctgtgtgtgtctgcttctatggatgtacatacatacatggttttgtctggttttgtacctgtatatctgggtctttgggattgtgtgtgggtgtgtgtgtgtggtgcatttctggggatctcaccacagcagatagcgcacatgcgcgcgcacacacacacacacacacacacctccctcccgtcctctaaaacagccctgttaaggacctcacggagcactgggatcgggggtcagtgggctcctgggcagtcaggctgggtgaccttcggccctggctggacccagttcccagggggcagccgcctcagcccaaaagctcttggaggcgtgtgtgtttgtgtgtgtgtgtgttcacaaccctgtcctccacaatcctcctagcctctccagcctgcctgctggctgcctgctgctgctctctctgaactgagagagttaaccaagcgggccagggcagtctgggctgggggccgccccctggcccccctccagccccagctccagtttcagctgctggttggggagggcatgggtggggtggggctgggaggggaggctgctgggggcggcgcgtccagctctgggccagggggtccaaagtgctcagcccccggggcacagcaggacgtttgggggccttctttcagcaggggacagcccgattggggtgagcgtcccccactccttccctccaggcctcacccctggtctggctgggccgcctattttgggagcaggagtggccagcccgaggcttcccaggcaggccaacccaagagggagggagtgtggttgaggcagtgggttctgcagggtgggatgtgggtgactcctccctgccctgctggtgcgtgtgcaccctggcagggtgtggagttgggacacacacgtgtgtagggctggttgcgtcactgcgtgggggcaccggaggcccagaggaggagtattggatgcctgacggtgtttacaccccacgtcctgctccaaccagcagtttggggagaggttgttgttcatgtccattccggccccactgtgtgtgtgtgtgtgtgtgtgtgtgtgtgtgtgtgtgtgtatccctgccccagcatgtgttttctatctctaaggcccactgggctgggcctcatgtcacttgcctgacatccgattgtgaaagatgtcacccagaggcgggcagaggggctgtcttttccttttctcgttgctgcccagggaggagacggggtgacctttcccacaggggcagcctgtggcgatgtggcagctgggcctcaccccggcagggctgtgcgtgaccccctgagtgggggaaggcaggctgttgccatggtggcctgagcgagcagaattcctccagggtgaagtgggagatatttatacccggggtcaggccgcgagcgggcgggcggagagggcagggagctgggatttcgcggggcacagtgaggccgggcatg

SEQ ID NO: 21402 - DNA, 2300 bp, Homo sapien
atacttgtgtgtttctgtatggccatttgtgggtgggtcttcacataaacatgcatttttgtggccagtttgtgagtgtagatggtgatgtggctatgtctttgactgtatctctgtgtggccatccatctacatgagcgtgcgtgggtctgtgtagacataaatgtgcttgttctggtattttgtgactggcataaaaggtgttggctgtgtgtccgggtctttgggtttctctatcagtgtgtcattctgtgtgtgtctgcttctatggatgtacatacatacatggttttgtctggttttgtacctgtatatctgggtctttgggattgtgtgtgggtgtgtgtgtgtggtgcatttctggggatctcaccacagcagatagcgcacatgcgcgcgcacacacacacacacacacacacctccctcccgtcctctaaaacagccctgttaaggacctcacggagcactgggatcgggggtcagtgggctcctgggcagtcaggctgggtgaccttcggccctggctggacccagttcccagggggcagccgcctcagcccaaaagctcttggaggcgtgtgtgtttgtgtgtgtgtgtgttcacaaccctgtcctccacaatcctcctagcctctccagcctgcctgctggctgcctgctgctgctctctctgaactgagagagttaaccaagcgggccagggcagtctgggctgggggccgccccctggcccccctccagccccagctccagtttcagctgctggttggggagggcatgggtggggtggggctgggaggggaggctgctgggggcggcgcgtccagctctgggccagggggtccaaagtgctcagcccccggggcacagcaggacgtttgggggccttctttcagcaggggacagcccgattggggtgagcgtcccccactccttccctccaggcctcacccctggtctggctgggccgcctattttgggagcaggagtggccagcccgaggcttcccaggcaggccaacccaagagggagggagtgtggttgaggcagtgggttctgcagggtgggatgtgggtgactcctccctgccctgctggtgcgtgtgcaccctggcagggtgtggagttgggacacacacgtgtgtagggctggttgcgtcactgcgtgggggcaccggaggcccagaggaggagtattggatgcctgacggtgtttacaccccacgtcctgctccaaccagcagtttggggagaggttgttgttcatgtccattccggccccactgtgtgtgtgtgtgtgtgtgtgtgtgtgtgtgtgtgtgtgtatccctgccccagcatgtgttttctatctctaaggcccactgggctgggcctcatgtcacttgcctgacatccgattgtgaaagatgtcacccagaggcgggcagaggggctgtcttttccttttctcgttgctgcccagggaggagacggggtgacctttcccacaggggcagcctgtggcgatgtggcagctgggcctcaccccggcagggctgtgcgtgaccccctgagtgggggaaggcaggctgttgccatggtggcctgagcgagcagaattcctccagggtgaagtgggagatatttatacccggggtcaggccgcgagcgggcgggcggagagggcagggagctgggatttcgcggggcacagtgaggccgggcatgtaggcaggtgggacttgggcgtgccctgctgtctcctgctctgtgtttgtgtgaggcagcgcctcctctgccctgccagggtaggtctgggaatcgggggcctgctgcgggaggtggaggcccaagggaggccccccggggactgtgtgtctcacccccgtccctgctacgttgtgttgttgtgtgatcccatcgtggaggttgttttggtgacactgtgtccccacgaagctggggatacccgtttctctagcttggagccaccaagatagaggacaaacacttctgtgattcagtccccagactgtctctgacttaatcccttgggttcaagccctatgtgggagagcaagggcacacactgcctaatccgtggtgtcccccccaggacaatggcgtctcttggccacatcttggttttctgtgtgggtctcctcaccatggccaaggcaggtgagtgcaggggaggctgcccgctacccacctcagccccaggggtggcggtggggaccgaagaaccaagttggagaccccaacctagactaagtcggctggggtaccaagaagtttgggggtctccacgtgggg

SEQ ID NO: 21403 - DNA, 2300 bp, Homo sapien
tcggaggcctcgtcatcgccgggatcctcttcatcctgggcatcctcatcgtgctgagtgagtgcccctagctcccgccctctaccccgcctctccctggccccacctctctctggccccgcctctccctggccccgcctctccctagcccccctctccctggccccgcttctccctggtcccgcccctccctggccccgccccgccccaacccctcccaggccttgccccgcctaccctgccttggttccccggcccccggtctcgcctctagccccgccccgtcccccaagccccgcccctcgcgagggcgagctggagctacagcgccgcttggcgcccgccgggagggagcctcagcttctcctacctctccacgcccacaggcagaagatgccggtgcaagttcaaccagcagcagaggtaagacgcccctccccgccctccttcgcccgctcctgctctggagggcgccgcgggtgaggcggggagtacccctgacccgcagcccgatccccgtcagcgactatgtattaagcacctactatgtgccatggcccaagcctggccctgggaccaagcgaggaaaaaacctcccgcccttcctggccgagctcccagcctagtggaggcggtggccgtgggttccaacagccccacagatagaaaaatcacaaagcgtgataacacaaagtgcaggaaagaagaaacggcggtgaaatgagatcatctcacacgcggcccagtttagcttagagtcttgttcctagctctttgattcctcttcgaataaaatgttaaagcatggacaatgtatgaatatgttagaacaattatagatattatcataagtagtagctaatatttactgggtgtgtaccacgtgttagatacggtttcacttcctctgggagggaggtgctgttattaaccccatttgacagatgaggaaactaaggcacagggaggtaaagtcactttgttcaagatcactcaagtggaagatggggggttctgggtttccaacccaggccatctcatggcagtctgccaagtccccatgactatccctcccccaccaacttcacatccctgcccccaaatccgcggaggtactcactgttaaccagcttagaagccccctgccagcacataagctgctcctgggtgctcctcatttctggcggaccccgagcctgctcttcgtccatatctgggcctagttacaccaatctgggaaaggaggcttgtactggggggttcctagaagggcagcctctccccctttccatcccgaaatccctctgcctctgtcttcccaggactggggaacccgatgaagaggagggaactttccgcagctccatccgccgtgagtctggggagactgcgggtattctggggagagggctggttccaaggaccgcttttcccggccctccctggctgcgtagagggaagggctggatctgaaagcggagggcggggagttgccccgccgcgggccccacctgcccaggagctggggatgcctctccagaatgacccccgatctccgtgttccccccaggtctgtccacccgcaggcggtagaaacacctggagcgatggaatccggccaggtgctgcagctctgacacggcggtgggagggaaggagggaggaaggaaaggcgggagagggagggggccaagtgccagagttgaagggcggcgaggggtggggctggacgtcccccctcgcctctcacccttttcaccctcacaggactcccctggcacctgacatctcccacgctccacctgcgcgcccaccgccccctccgccgccccttccccagccctgcccccgcagactccccctgccgccaagacttccaataaaacgtgcgttcctctcgacagcactttgtcggtctcggtccctcagcgcgaaacgccagcgccactgggccccagcagggggcgccccaccctagaggaaggggcggggacgacggtggtgggcgggggcgggggcgggggtggcctgcacgggggcgggctccccgggcccccattggctgcaggcccccccacgccagggctccccccagctcccccccacatcggtccgtcctgcttccagctgctgcagcgcgccttcgccgccaaagcatccagcagccccctgctccggcccagcatggcgaccccgacccagacccccacaaagggtgagcgtcgtttggggagggggttgcaggggggctccgggatctgagagcctaggagagagggtgtcgggagattcaagcaatg

SEQ ID NO: 21404 - DNA, 2300 bp, Homo sapien
cgggttcccttcactgccaggggcttctcagcacccctggtcccctgccctcagtgctggagacccttgctgggcactggctccctcttgaagcagtctgtgccttgctcatctgcagaagcaggattagcagtgggggctattagggggcgacggtagaagtgggtgtttaagtgggtgcataactgggttaattggtgtggaatggaaatcagtgtgtggctggatgggggcagtaggggcagctaggtgtatacccaacagcacctctgggattggaaaacacccctgctgtgggctggaaggagggtcccatcgccccattcccacacatagggtctcactgcagtggtttgggccccaccccacatggctcccttcttctctttctactcccctctctccccatgggtccgtctctctccctccgtctctctgcttctctctccatagcggtctcaatcccactatctcccaggctctcatttttttttctctctctctctgcatctctgtctactgctctcagcctctcccctccactgggaatctctctgagtccatctatttgtcttcctgggtctttgtatctgtgactctggatctcctgcctctcttggtctctgtctcttccaggttctccctgtctgtctcttgctatatcccttctctctgtctcttccttcagctctcactcctttcctctgaacctggctgtcaagggtttcaggaaacagacaccctaggagacagcactggaaagaagagggacatgaacctcctccccttcccttgcccaccccagggaccctgaaatcttccagaacgtctctggtcgcagacccacccgctcccaccctgcaagctcatctcttccccgtctgctaccaccacggtgcgggaccagccacccggttgccatagcgacctgtccgagcatcccttctcccgggactgccactctccaaccgcaggtctggcacaggacgcctgccggggagggggtgtcccagagacccggaggggcgatcgggggggcgcattacaggggcttccgcccacaggaggagcggacctccctcccccaactcccttgccttaccattgcttgaatctcccgacaccctctctcctaggctctcagatcccggagcccccctgcaaccccctccccaaacgacgctcaccctttgtgggggtctgggtcggggtcgccatgctgggccggagcagggggctgctggatgctttggcggcgaaggcgcgctgcagcagctggaagcaggacggaccgatgtgggggggagctggggggagccctggcgtgggggggcctgcagccaatgggggcccggggagcccgcccccgtgcaggccacccccgcccccgcccccgcccaccaccgtcgtccccgccccttcctctagggtggggcgccccctgctggggcccagtggcgctggcgtttcgcgctgagggaccgagaccgacaaagtgctgtcgagaggaacgcacgttttattggaagtcttggcggcagggggagtctgcgggggcagggctggggaaggggcggcggagggggcggtgggcgcgcaggtggagcgtgggagatgtcaggtgccaggggagtcctgtgagggtgaaaagggtgagaggcgaggggggacgtccagccccacccctcgccgcccttcaactctggcacttggccccctccctctcccgcctttccttcctccctccttccctcccaccgccgtgtcagagctgcagcacctggccggattccatcgctccaggtgtttctaccgcctgcgggtggacagacctggggggaacacggagatcgggggtcattctggagaggcatccccagctcctgggcaggtggggcccgcggcggggcaactccccgccctccgctttcagatccagcccttccctctacgcagccagggagggccgggaaaagcggtccttggaaccagccctctccccagaatacccgcagtctccccagactcacggcggatggagctgcggaaagttccctcctcttcatcgggttccccagtcctgggaagacagaggcagagggatttcgggatggaaagggggagaggctgcccttctaggaaccccccagtacaagcctcctttcccagattggtgtaactaggcccagatatggacgaagagcaggctcggggtccgccagaaatgaggagcacccaggagcagcttatgtgctggcagggggcttctaagctggttaacagtgagtacctccgcggat

SEQ ID NO: 21405 - DNA, 2300 bp, Homo sapien
gaggggagagagtggagaggacggaggtgttggggagaatgtgggaaggaggagcccaggaaggaaggggaggaggatgggaggaggagggcgtggagggtggaggagggagaatgggtgtaagcatggaaagtgtaaagggagagcgagagggatgcagggcaagcatgtcaacgaaagactgatctctttgaggctgttaattttaattatgtaaaaataacttgacctgtttttagtggaaatgcagcctttctggagacttgtaaaagaacagaaatgggaatttctgtgtctcttataaagttcttataactaaaaaaaaaaaaaaaaaaaaaaaaaatgcgggagggggacacgggttattcaatggttgagaagtatttggtgtggaatttgtttcacgttcctttttttttttttttttttttttttttttgagacagagtcttgctgtgtcctctgttgcccaggctggagtgcagtggcacgatctcagcttattacaacactgcaacctctgcgtcctgggttcaagcgattctcctgcctcagcctcccaaatagctgggactacaggcacacaccaccacacccggctaatttttatatctttagcagagatggtggttcaccattttggccaggctggtctcaaactcctgacctcaaacgatccgccatcctcggcctcccaaagtgcttggattacaggcgtgagccacagcgcttggcctgtttcatgtttatttaatgagttttaaaacatgaacaaggcacttatggatgcgtggggcagcatgggggttggccttgtcacctggggcacagctgaagactttgcacaggtttctggtctatcctaggtgaatgatggtctgcagcgggtggggaatgggggacttcccgttgtatccaaatgttcaggacagggagtgtaggaaaggagtgagggtgtaggaggagattgcaaatgggaagggagatggggactccctttctggcaggcggatagccccaaaagcccaggttgggtctggggtcgccagccccgtagcaggtgtttctctccatgacagcagccaggaggtgtccccaagggaacaagacattagagtgtgggaggcaagacagctcctcagtgttagctctggggtgacagtccctggggtctggcttccatggtgccggggaatggagagccaacgagctgtggggagggaggcagtttccacctttctagtggctcacgcaccccctctctccccagcccctggtggcggcggcgtgtaacaccttcccgaggaaactccgctgccgaccctgcctgagcgcgggagcctgaggaccgggtggaggcggtggggacccagccgcgcgccgggagcgctccccggaatgagccgccccacccaccccaaggctggagccgctgcaccctgctgtccctctccaggccttggcaatgacgatcccccaaagagcccgtctgcaccccagacccagggcctcaggcctccagctcctgggatccgggagtccatcccggcccagcacccccagcatccccgtgtatggcccccctgcacctccttgtctcatccccgaagatccgtccccctggcccctcagtgtccatgtcttgagcttaataaatgtgcatttggttttttcctctgttctgtctgtgtgttctcatctgtggggcacggtgtgggtaggggtgcagaactgaacctggggtagctctcccctgcgtgcccggagtcgccccctcttcattctcctcccccagtgccccgagatgccccccttcaatcccttctccttcctcaacacctccggatttgtcctttcccttcctccagcgaccccagaatagagccctcccgtttctccccctgctctctcagaggcgtccactcaccctagacctgcctgccccatccccgttcccaccctctcccaccactatgccctcacccctgccccccgtcgccctcagcgattccccctcctgctcccaccccgggctctgaagccaggaaacccaagaggaaatgactgagcccgtctgggtccccgcccgctcgcgctcccctggccacaccctccgcctggacgcagcagccaccgccgcgtccctctctccacgaggctgccggcttaggacccccagctccgacgtaagtccctctcgtgcgccacctccatccgctgcccctctgcccacgggccgggctcaggtgggtaggggtttgaccccttccgctcctctccgccccccatccacgcccaca

SEQ ID NO: 21406 - DNA, 2300 bp, Homo sapien
cccggctaatttttgtatttttagtagagatagggtttcgccatgttaccctaactggtctcgaactcctgacttcaggtgatccacccgcctcggccttccaaagtgctgggattacaggtgtgagccactgtacccggcctgtcctaggtttttaatagaaacactttatcttcttagaaaatttccttttgttcctagtttgccaaaagttttgagccataaatgaatgttgagttttatcagatgcattctctgtatctactgagataataatatggtttttctcctttattctgttaatgtggtgaattacattaattgatgtgcaaatataacccaaatttgccgtcctgaaataacccaatttggtctttatatttatccttgtgtaaagaaaatcactggaatcaatttgcaatattttctttgggatagtgtgtctgtgttgacaaaagagattgacctgaggtttttctttgttgtaatgtccttataaggttttgagataaggtgatgcaagtctcatagaaatcttccatctttttctatgttgggaaaagtctggaagatcatttaatttatttatttatttatttatttatttgaggcagtgtctctgtcacccaggctggagtgcagtggcgcaatctgcactcactgcaacctctgcctcctgggttcaagctattcttctgcctcggccacctgagtagctgggattacagatgcccgacaccatgcctggctaattttttgtatttttagtagagatggggcttcaccgtgttggccaggctggcctcgaattcctgacctcaagtgattctcccatcttggccacccaaagtgctggcaagtgctggcattacaggtgtgagccaccgcctgagaaggtgtttagaaaaggggatggaaggaaagggagcaactgagaaaaatatttgttgaagatgtattgagtcatgcagatggctgagggaagagacggggaccagcatgtgcaatggttctggggcaagagcccctctgcctgcctgacagattcagggaacagcgggaggccagcgtggttggagggtagggagtagggggaaaggtgcaggaggtcagaacagtaaccagagataaatttttttaaatttttattattttttttgagatggagtttcacgcttgtcacccaggctggagtgcagcggtgcgatctcggctcactgcaacctccgtctcccaggttcaagtgattctcctgcctcagcctcctgagtagctgggattacagatgcccgccaccacacccagctatttagtagagacggggtttcaccacgttggccaggctggtcttgaactcctgacctcaggtgatccgcccgcctcagcctcccaaaagtgctgggattacaggcatgagccaccgagcccagcccgagaggatttgtttactgctttatccccagtgctaagaagtgtgcccagaacatagtaagagttcaggaaatatgtgttgagtgttcacatgtgacaccttcatgctcttatttcatccctgggaatgtagtctcacccctgggaaaggaagcggggcaggtagtagagaaaactctgaatagacaaattaagtttgctcctttcccagcaaaatggagggcttggaatagaaattaaatatggtcagcggggcacagtggctcacgcctgtaatcccaacactttgggaggccaaggtgggaggatggcttgaagccaggagttcgagaccagcttgggcaacataacaagaccccgtctctacagaaaaaattttaaactagctgggcatggttagcatgcacctgaagtcccagctactcaacaggctgaggtgagaggattacttgattccaggagtttgaggctgtagtgagctgtgattgcagcactgccttccagcctgggtaaaagagcgagtccttgtctgaaaaaaaaaaaaaaaagaaaaacagtgttgtcagcttgtcacaaaacaaaaggggatggtgacctcacacacacatgtggtagctgcaattcatcccactgcccagggctgaggccagagttcatgggtgacctcacaatgttcggggtggcaccagcccactgccacagccccagtccaccatgccacccatgctgtggctgctgctccactttgctgccccggcactggggttctacttttccatcagctgccccagtggtaagcagtgccaacaggccctactctcaggcaatgatattctcctgtattgcaactcctcgggggcgcactggta

SEQ ID NO: 21407 - DNA, 2300 bp, Homo sapien
aaatgaaataaaataaagtggctcaaagactcaatttaagagttaaaactataaaactcttagaagaaaatattgttgaaaatcttcatcacattggacttggcaacaactgcataaataggataccaaaagtacaaggaagaaaaaatagtaggtaaattgaacttcatcaaattaagaacttttgtgcaccaaaggacactatcaagaaagtgaaaaaacctggagaatggaagaaaatatttgcagatcatatatctaacaagggattaatattcaaaatatatatagaactcctacaacttgacaacaaaaaaacaaacaacccaattcaaaaatgggcaaagtacttgaatagacacttctccaaagaagatatactaatggacaataaattcgtggaaatatgctcaacatcgttagtcattggggaaatgcagattacaaccacaatgagatgccacttcacactaaccaggatggccataatcaagaaaatggataataagttttggtggggatgtggagaaattggaatcctccgtgcattgctggtgggaatgtacaatagtgcagtcattggggaaaacagtttggcagttcctcaaaaggttaaaaatagaactaccaagtcacccagcaattccattcttaggcatatattcaaaagaaatgaaagcagatatttgtacaccagtgttcacagctgcactatttacaatagtcaaaaggtagaaacaacctaggtccatccacaaatgaatggataaataaaacgtagcatatacatacaatggtacactagtccgctgtaaaaagaaattttgatcttactgcatgctacatggcttcgacatactacaacatggatggaccttgaaaacattattctttgtgaaataaactagacacaggacaaatgttagacgattccacttatatgaggcacctagaatgggcaatttggtaagcaaagtagaatagaaattactaggggcacaggtagcagggaatggggagttactgtttaatggtcacagagtttatgttggggatgatgaaacagtttcggggataaagagtggtgattggtacacgacattgtgaatatacttaatgccactgaattttacacttgaagtggttaaagcgataaatattatagtttgcatattttatcataaaaatatttttttaaacgatgaagggacgtgaacgggttgaaattttataaaaagtggccagggaaggtgtcactgcaatggtgtcctacaggaggaggaagatcatgtggacatctgcgggaagggtgttctggcagagggagtagcacgggcgatggctctgaggactgtgagaagtatagttggaaacagcgaggaggccagggtgtccgaagctgagtaagccagagagagtgggaggaggtgagataagagggggaaggtcagtttctgctgagagtgaggaggagccacaggagggctgtgagcaggtggacgtgatctggcttgagttttaacagggccagtagaacaaagcacgcctgggtaccgaaaccagccactggccagttggcaacctgggggagtctaacgcgaggaagcgcccagggttcccccaggatgcgctttccctcgccgccacctggagacagcagagtcacgcccagcgctgcgcaggctgatcgccgcgccgcgcccccgccctcggtcgcaggtggctcgttccgggaattcctaagcggaaaccggtcccaagccccgcgccttcgctcggcccctttaagagccagaatttccggagggctgacccgggggctagggatgcccaggggccgaaccacaagttgggaacgggtgggggaggtggcgaaaacttccgaagtggaattccaacttttcctggccctgattccccttgggcatccctgagggggcagagcttcccttccggggactttagagggttcctcaggtcatctaactgggagacacaggaggcccgaagcgccccccctccacccggtccggaggaaccccagtggaagtggagaagtcaggcgccaccaacaagcctctcccagccaggactttgcttagactcgctcctcccggcagggcgcacctaggcgggtccatcgccagccggggagaggggtttgggcagggagggaacaggtgcgcggcgggacccgccctatctcaacaggtgaatcgctccaagtgggtctcggttgcatggatctcggtgcgcttggtttggccggagcagatgggggccggaagggacctgtggtc

SEQ ID NO: 21408 - DNA, 2300 bp, Homo sapien
ggttaaaaatagaactaccaagtcacccagcaattccattcttaggcatatattcaaaagaaatgaaagcagatatttgtacaccagtgttcacagctgcactatttacaatagtcaaaaggtagaaacaacctaggtccatccacaaatgaatggataaataaaacgtagcatatacatacaatggtacactagtccgctgtaaaaagaaattttgatcttactgcatgctacatggcttcgacatactacaacatggatggaccttgaaaacattattctttgtgaaataaactagacacaggacaaatgttagacgattccacttatatgaggcacctagaatgggcaatttggtaagcaaagtagaatagaaattactaggggcacaggtagcagggaatggggagttactgtttaatggtcacagagtttatgttggggatgatgaaacagtttcggggataaagagtggtgattggtacacgacattgtgaatatacttaatgccactgaattttacacttgaagtggttaaagcgataaatattatagtttgcatattttatcataaaaatatttttttaaacgatgaagggacgtgaacgggttgaaattttataaaaagtggccagggaaggtgtcactgcaatggtgtcctacaggaggaggaagatcatgtggacatctgcgggaagggtgttctggcagagggagtagcacgggcgatggctctgaggactgtgagaagtatagttggaaacagcgaggaggccagggtgtccgaagctgagtaagccagagagagtgggaggaggtgagataagagggggaaggtcagtttctgctgagagtgaggaggagccacaggagggctgtgagcaggtggacgtgatctggcttgagttttaacagggccagtagaacaaagcacgcctgggtaccgaaaccagccactggccagttggcaacctgggggagtctaacgcgaggaagcgcccagggttcccccaggatgcgctttccctcgccgccacctggagacagcagagtcacgcccagcgctgcgcaggctgatcgccgcgccgcgcccccgccctcggtcgcaggtggctcgttccgggaattcctaagcggaaaccggtcccaagccccgcgccttcgctcggcccctttaagagccagaatttccggagggctgacccgggggctagggatgcccaggggccgaaccacaagttgggaacgggtgggggaggtggcgaaaacttccgaagtggaattccaacttttcctggccctgattccccttgggcatccctgagggggcagagcttcccttccggggactttagagggttcctcaggtcatctaactgggagacacaggaggcccgaagcgccccccctccacccggtccggaggaaccccagtggaagtggagaagtcaggcgccaccaacaagcctctcccagccaggactttgcttagactcgctcctcccggcagggcgcacctaggcgggtccatcgccagccggggagaggggtttgggcagggagggaacaggtgcgcggcgggacccgccctatctcaacaggtgaatcgctccaagtgggtctcggttgcatggatctcggtgcgcttggtttggccggagcagatgggggccggaagggacctgtggtccgcaggcgccctcccagcgggccagtcacttggttcgggccctgggggacggagcgcacctgggtcagcccacttccggggagggaggcagaggaacccctccccgccgctcacccctaagcccagccctcggctcccacccttgtgtacctgggccgaaccattcaccggagcgcgcagcgggtggagtgtggctcggaggaccgcggcgggtcaagcacctttctcccccatatctgaaagcatgccctttgtccacgtcgtttacgctcattaaaacttccagaatgcaacaggacggacttggagtagggacaaggaacggaagtgggaaggggaggagcgtgcacccctcctggccttggtgcgcgccgcgccccctaaggtactttggaagggacgcgcgggccagacgcgcccagacggccgcgatggcgctgttggccggcgggctctccagagggctgggctcccacccggccgccgcaggccgggacgcggtcgtcttcgtgtggcttctgcttagcacctggtgcacaggtacggggcacggggcctctgacgctgcggaacgccggagggaactgtagagggggatggatggagttgg

SEQ ID NO: 21409 - DNA, 2300 bp, Homo sapien
gggtgggccaggatccatcctcccaaaccgaccaccacccccctgtccctagaagtccgcagtggctacaggattcaggccagccagcaggacgactccatgcgggtcctgtactacatggagaaggagctggccaacttcgacccttctcgacctggcccccccagtggccgtgtggagcggggtaagcaggagccttggggtctgagggcttttaaggtgggggggtgaaacatgtctccctgatacctgccgcagggactcttggtgcaaaccctggaccccgggctcctccagcagtcagtgacaccccccttccctgcagccatgagtgaagtcacctccctccacgaggacgactggcgatctcggccttcccggggccctgccctcaccccgatccgggatgaggagtggggtggccactccccccggagtcccaggggatgggaccaggagcccgccagggagcaggcaggcgggggctggcgggccaggcggccccgggcccgctccgtggacgccctggacgacctcaccccgccgagcaccgccgagtcagggagcaggtctcccacgagtaatggtgggagaagccgggcctacatgcccccgcggagccgcagccgggacgacctctatgaccaagacgactcgagggacttcccacgctcccgggacccccactacgacgacttcaggtctcgggagcgccctcctgccgaccccaggtcccaccaccaccgtacccgggaccctcgggacaacggctccaggtccggggacctcccctatgatgggcggctactggaggaggctgtgaggaagaaggggtcggaggagaggaggagaccccacaaggaggaggaggaagaggcctactacccgcccgcgccgcccccgtactcggagaccgactcgcaggcgtcccgagagcgcaggctcaagaaggtgagggccgccctccctggcgtccagaccgtccctgggcccccagccggtccccgcggctcatacccttctttctttctcccttgcagaacttggccctgagtcgggaaagtttagtcgtctgatctgacgttttctacgtagcttttgtatttttttttttaatttgaaggaacactgatgaagccctgccatacccctcccgagtctaataaaacgtataatcacaagctctggagagaaccatttgttcggccgcgcggggcgggggaccggggctgctcccgtatgcgtctgtaaagcgccgcgtcccgggggcaccggagtccggggccgggaggaagagacccagcctggcccggcccgcgcccgcgccgccggccggagaacgtgccccgcgcagccgccgcccgcctgcgtgcgcgccccggccccgcccaggcgtgcgcatgcgccccggccctccgccttcgcgcaccgcaggctggccgtccgggacgcgcgcgcgctcctctccccttccagcccatcccccccagccccccaccgacctactttactgtctccaaactcgggcagcccacctggcccccgacgaccccagcccctgcaccgggtaccccgacgttccatccagacccgcgtttcaccagggcggcgcgcggcgacctcgcgccccgcggagccccgggctcgcgcgcgcccgcccgcccccggagacagaccagcgcgcgcgccccgggccgcctccccccagcgcgcgtccgccccggggctcgcgccgccgccgccgccgccgccgcgcgcgcgcagctcaagtaaaggaggaaaaaaaaaagggggaaaaatagaaagcggcggcggctgcagcagcgatccgccgccggactgggccaagccgggcggcggccgcgcgagccggcgatccagggcactggcggcggccagccagggcgggccgtgttcaaaaaaaaaagtcgcggcggcggcggctgctcagggaaggaggcctgagggccgcgtgcagcgggcgggcagctgggtgggctgggggcggccgcgcggcgtcccggagcctcgggccgcccggagccggcgggcgggcggaggcggaggcggcggcggctgcagcggctgcaggagcggcggcggctgcggcggcggcggcggcatctcctcctcacatgaccccactgtttgtccccgtgatcagcgcgagcggctcccgtatctcctccgtcccctcctgccgcgcggcgtgagcgccgggctcggggcccccccggccgcccgccccctcccctccctccctcccctcccctcccctcccccccgggccccgcgccccc

SEQ ID NO: 21410 - DNA, 2300 bp, Homo sapien
ccgttgcctcccccacctgccaatctgacttctactcctcacctccagcctgcaagctctggtctgtggtctgtacggacacagccgtagtatctcccacactggacgctgggaaataggcaaatcgtgcctccccgctgacagcctcggccgccggactgccaccattgctgaagggattttggatcacagcctggggagtaggagggcagaggctacccttagctttctctgttcctccatcccgtcccctcattgctgtgcttggggtttactgcattctctgcaattaacaggagtggggactccttctgcgtgtagcattctgtcctgtgtttcaaacagccctggaacatggcgggaggtcagcgatcacttgctgagcaaatccgtttcgcactctaagaaactttcctcttaagacacatcattcccattttgcgggaaaaaaaaattccaagagcactgtccccaggtttcacggtgcacaacagggatctggccccatgcagcctgaggcctgaaggcagcatccgctgggcgacacctgccccacccccggggctccccaagagcagagccagtgtcccctctccactccctcccccccccacccaggggtggcagggcacctaccagcgggaagggcgctgcaggacctgggggcacagaggcagcggcggggcccgggcgctgggctgccccgtccacacccacctgggtcacagcctgctgcccccccgcgaaggcagcggtggacacgacgctgacggcgccagctgtgtcgccctggccgtccagctgaccatcagtcacctggactacgcggtatgtcacctgcagggggcggcagagcggcgaggccggcgctggggccaggtccgagccttcccggcgcgcccgcccgcccgcccgttcgccctcgcggcccgccgctcacctgtcctccatttgtctctgtgcggaactggtactggatgttgtggtcgccgaacgccgcctgctggacgctggtgatggccaccgctgtctgctcctccgctcctgggccgtccccgcctggggccgaggagggtcggggcacggtcagggccgcgccgagcgcccccagccctccccgggcgcggccggcccggcaagcactcaccttcctgcagctcgacgccctcctccgcctcgggtcccttgtcgtggctgccaggggcacaggagggagcagggtcagcgcggcccgcgcccgcgcccccgcccccgcgcccagctgcagggccccagtcccacccggccgcgcctgaggccgggggcgccgccgaggccgggggccgggggcgggaggcgccaggtcccccccgcgccggcggcctccattttgagccgggcccgcggccgctcgggatcatggcggccccggcctgcaggccgcggggccggggccggggccggggcgcgggggcacggccgggccggggatcttacctggcggcggcagcagcggtggccgaggcagcgggatccagacccgggtccagcatgtccatggggggggcgggggcggggggggcgcggggcccgggggggaggggaggggaggggagggagggaggggagggggcgggcggccgggggggccccgagcccggcgctcacgccgcgcggcaggaggggacggaggagatacgggagccgctcgcgctgatcacggggacaaacagtggggtcatgtgaggaggagatgccgccgccgccgccgcagccgccgccgctcctgcagccgctgcagccgccgccgcctccgcctccgcccgcccgccggctccgggcggcccgaggctccgggacgccgcgcggccgcccccagcccacccagctgcccgcccgctgcacgcggccctcaggcctccttccctgagcagccgccgccgccgcgacttttttttttgaacacggcccgccctggctggccgccgccagtgccctggatcgccggctcgcgcggccgccgcccggcttggcccagtccggcggcggatcgctgctgcagccgccgccgctttctatttttcccccttttttttttcctcctttacttgagctgcgcgcgcgcggcggcggcggcggcggcggcgcgagccccggggcggacgcgcgctggggggaggcggcccggggcgcgcgcgctggtctgtctccgggggcgggcgggcgcgcgcgagcccggggctccgcggggcgcgaggtcgccgcgcgccgccctggtgaaacgcgggtctggatggaacgtcggggtacccggtgcaggg

SEQ ID NO: 21411 - DNA, 2300 bp, Homo sapien
cagcagtaatatggcccagcacagtggcttatgcctgtaatcccagcaatttgggaggccaaggcaggagggtcgcttgagcccagaagttcaagactagcctgggcaacatagggagaccccatctctacaaaaaaaattttaaacaaatttagccaggcgtggtggcacacatctgtagtcccagctacttgggaggctgaggcagatcgcttaagcccaggaggctgaggttgcagtgagctatgattgtgtgactgcactccagcctgggtgacagagtgagaccctgtctataaaacataaaatagcagtaatagtaatagctaacatctacagtccgatgagtacattttatacgatggcacatatgttgactcacttctgcaccaactcagcctgtgctgcctgttctcccagcagcacttactgccccaccttcagctctgctctgtattcaggggctgccttctcagtcacccaaccccagaggcctgggctccccagaccctgctcccttttaggaacctcctccccgtcggacactcatttccttcactttacagaaaaggcactgaaggcagagatcagggcatggcccaagcttgctcagccagaggcagagctgagattctagcctggacagcctgactccagggcttttgctcttacccaccaggtttccccatctcccctaaaacacagcagggcacagcggtatgctagacctggctcaacatagcagaccatgcacatctcgaaactctgcattcagtggcatcatgctggtatcctgaaatcagcagcagtgggagtcttgacacccagaaattggcaagcactacaagccagggatgtttttggggagccggttccttaggacaccactagctgggggatgaacccaggctgcctgactgcagtgccttcattcctttccactaccaggcccagctcagggtgcacacggcccaggggatcaacaaaccttggttccagatgggcccttgcacattttgcctctttgcctttttcattccagggccatccagtgtcagccaagtcaccagagcccggggatgttgttgtcgaggaatgaacacttcttcctggttgctgaaccactttcaaggcccactcaagcacagaaatgcacaggccctgccatctgcctcctcatccacaccacgtgggaggctcctcttgtcacagcctgggtaacaaagcgagaccccatctatacaaaaacttggctgtggtgctacgcacctgtagttggtcaaggctgcagtgagccgtgattgtgtgccactgcaccccagcctgggtgagagtgaaaccctgtctctaaaaactaaatgaataaagatggcctcagatgggaatagctaggaaaaggagacagggctcttgtgggaagagacgagtgcagggagtgggggaattggggaggaaaggcagatggagctccacaaggtgagcagagtggcaagcccagctcctgggagttgaagggtgctgcaggctgaagcagggcccagtgaataggggtgtgctcacctggggagacacaggagcagcccccagccctaccaggcatcgctgcatctcagctgaggacaggtttcatcatcagcaggggcaggggtcacagcacaggcgccagagccttggtgcaaggcgacaggctgacgggccaagcttggcgccctggccatctgccctccctgggggtgaggggctcaaggccaggccccactattggctggtgcagaggggagggctttggcccagcagggcagggccaggggctggttgtgttttcaggaactgttgacacggagacccctgcctctcctccaacatgggacatgtccttgaccccagctccccacaccctcatgcacgtctagggcctcaaaggggacattcattccttaattcctccatccatccaaccaaccactgggtaatgggtggtgcagctggcagggaccatgcacagccatgtgcacaacagcagaaccatgcctcgtggagctctgcagaccccaggccccctccccactcctgagatggacaaacacacaagcagacaaggcgggggccacatggggccagtttattgcagttaaatacctctctctctattttttttttgtcaatttttccataaagaaaattaaaacacacacacacacccccaaaggggagcagggacccagaaacaagaggtggggtgggacgtggcctccctgcataggtccaggccccgggtggccccccaaaggctcccctcc

SEQ ID NO: 21412 - DNA, 2300 bp, Homo sapien
actcccaggagctgggcttgccactctgctcaccttgtggagctccatctgcctttcctccccaattcccccactccctgcactcgtctcttcccacaagagccctgtctccttttcctagctattcccatctgaggccatctttattcatttagtttttagagacagggtttcactctcacccaggctggggtgcagtggcacacaatcacggctcactgcagccttgaccaactacaggtgcgtagcaccacagccaagtttttgtatagatggggtctcgctttgttacccaggctgtgacaagaggagcctcccacgtggtgtggatgaggaggcagatggcagggcctgtgcatttctgtgcttgagtgggccttgaaagtggttcagcaaccaggaagaagtgttcattcctcgacaacaacatccccgggctctggtgacttggctgacactggatggccctggaatgaaaaaggcaaagaggcaaaatgtgcaagggcccatctggaaccaaggtttgttgatcccctgggccgtgtgcaccctgagctgggcctggtagtggaaaggaatgaaggcactgcagtcaggcagcctgggttcatcccccagctagtggtgtcctaaggaaccggctccccaaaaacatccctggcttgtagtgcttgccaatttctgggtgtcaagactcccactgctgctgatttcaggataccagcatgatgccactgaatgcagagtttcgagatgtgcatggtctgctatgttgagccaggtctagcataccgctgtgccctgctgtgttttaggggagatggggaaacctggtgggtaagagcaaaagccctggagtcaggctgtccaggctagaatctcagctctgcctctggctgagcaagcttgggccatgccctgatctctgccttcagtgccttttctgtaaagtgaaggaaatgagtgtccgacggggaggaggttcctaaaagggagcagggtctggggagcccaggcctctggggttgggtgactgagaaggcagcccctgaatacagagcagagctgaaggtggggcagtaagtgctgctgggagaacaggcagcacaggctgagttggtgcagaagtgagtcaacatatgtgccatcgtataaaatgtactcatcggactgtagatgttagctattactattactgctattttatgttttatagacagggtctcactctgtcacccaggctggagtgcagtcacacaatcatagctcactgcaacctcagcctcctgggcttaagcgatctgcctcagcctcccaagtagctgggactacagatgtgtgccaccacgcctggctaaatttgtttaaaattttttttgtagagatggggtctccctatgttgcccaggctagtcttgaacttctgggctcaagcgaccctcctgccttggcctcccaaattgctgggattacaggcataagccactgtgctgggccatattactgctgtcatttatggccaaaagtttgctcaaacattttccagttaccagagccacatctcaagggtctgacactgggaaaacaccacgtgcggatcgggcacacgctgatgcttgccctgctcagggctatctagtgttccctgccagaacctatgcacgtgtggtgagagcttaaagcaatggatgcttcccccaacatgccagacactcctgaggagcctggcggctgctggccatgccccgtgtgcatgtaggcgatggggaagtgagtggaggagagcggaaccttgattctgctcatcaaactgcttaaccgctgaagcaaaagggggaacttttttcccgatcagcagaatgacatcgtgatggggaaagggctccccagatggctggtgagcagtgtgtgtctgtgaccccgtctgccccaccccctgaacacacctctgccggctgagggtgacacaaccctgttccctgtcgctctgttcccgcttatctctcccgccttttcggcgccaccaccttcttggaaatgagacagagcaaaggggagggggctcagaccaccgcctcccctggcaggccccataaaagcgactgtcactcggtcccagacaccagagcaagctcaagacccagcagtgggacagccagacagacggcacgatggcactgagctcccagatctgggccgcttgcctcctgctcctcctcctcctcgccagcctgaccagtggctctgttttcccacaacaggtgagagcccagtggcctgggtccttagcagggcagcag

SEQ ID NO: 21413 - DNA, 2300 bp, Homo sapien
tttgtttgtttgtttgtttgtttgtttgagtcggagtcttgctctgttgcccagcctggagtgcagtggcgcaatctccgctcactgccagccccgcctcccgggttcacgccattctcctgcctcagcctcctgagtagctgggactacaggcgcctgccaccatgcccggctaattttttgtatttttagtagagacagggtttcaccgtgttagccatgatggtctcgatctcctgacctcgtgatctgcccgccttggcctcccaaagcactgggagtacaggtgtgagccaccgtgcatggcctcaattccggtttttaagccacccagtttgtgaaactttgttgtaacagccctggaaaactgatacacctgctctctcgtaaaagatcagctgatacggcagcaccggccactggatctgcgggtcagttgtccccttagacagggcacctgcccgccagtcacaggtcctgtcacccagccccttcctctcatgggctccagccgcctcgctcccacaggtctcctggagacccgagttgctgatgtcagcgactattgcgagtgctcctgtgggacactgtcctctccccagcaacagccttcagttcacacccagggaggagatggagccccacactgcaccagcacacgactccagctccaactaggtgggtgttgatgctgaaggctgtgacatgcaaataccccccaggatctccttgtcaccccgaccaccaccaccaaagcccaggcaccaggcccctctcttctccaggacccaggcattcaagccccgcccgactctcaatggtcctttgtcccggactgggaaaggcacgggcagagtctgacatcatgaagcctggggtgggggtgggactccccctccccctccaactcccccccagccccacaacgcttctctccctggtctgagggatttccccgcccctcaccccctgggttctcccttgagagcgaggaccccccctccccactgctctggcctgaaggaggacaggagatgtcccagtgaggctgaacagctcatggtgaaatcactgctgcactttgtcacgccacctccagctgccccgagcccccacccaccttgcaaaagtcatgaccaaggggtggaatctgcactcagagggtccttgcccaacttggtcagcacagtcctatgtgcaccaagcactgccccggggacagaagggtgcacatgacagacagagaggcagataggtttctggtgagcccctgcctctgagagctcctgggttagtgggaggcagaggcgggcagacctagggtgcacacgggccagcctgccaaggctacagaaggaaaggacagcattgcaatggaggggcctggctgatgggcgaagatgggaaagcttcccagggaagcggcacccaggctgctgagcctacaggatgggtgaacggcagccagtgccagagtggggagtgctatggggtggggactgctttccaggaagaatgagcagcaggtgcacaggccttgagtctgaaggtgccctggggctctggggaacacattcaaccacccacactgtttattaagctcaactgcctgccaggagcttgtctacgagcaaggatggattgagaatatccaagacgaagcttctggcctggtggaggtcacgttctcatgaaaggagttggtgaacacggaaggtcatttcagatggcaagaggaggtgacactgacgttgagggtggaaaggacctgtctcctcctgctgcccacctaatgttgccaccaagattccctgaggacaatgcctctgtccctcagcctgggacttccaaagagattagactgcccccccacccccgggacccagaatcagggtgtacagggatggaagatggggagagagcaaggcagccactcccgacccctccaggaaagagctaggagaacccaggcgtcaggctgcccagtccgagccccgtggtgacaagggcccctttgtgcccccctcccccgggggtagggaggagctgggccctggaggcaggcggcccctggcacccagggggaggggaggggctggcaagtgggggcctagaccctggaaggcaggggactgcgagctgggctggcggagcagaggtgcagaagcaactgagtccaagtgagtatggtggcagggaggccagggcaaggggagcagggcaccggggcagtggcacccagacgtgagcagggtcaggtgctctgggtgagggagcatcgctgtgcaccgctactgatt

SEQ ID NO: 21414 - DNA, 2300 bp, Homo sapien
ccatccggcctttgctgacaagggtgatgatggaacttggatggagcggagcaggtatggactaaaagagctctgtctttctaggatgcccctttcctcgttctttggctagaaaagcatagttttgctagaacttgttctgttgggactttttcttgtttgtgccccttggcattttcagttgttggcttctccagtattcagcctgagatatatgaggcaaagagaaatcccagggaattcaccaccattccttaagtcccgaggttcctaaccagtctgcttctctccatctttcagtcttcttatgcttgtcttgtcacgttcaaggttttcagttatacttggcagaataaataaatacatctactccatctttccagaacatcactgctttttgttcattttatttatttattatttactgagacaaggtcttactttgttgcctgggctggagtgcagtggtgctatcatggctgactgaagccttgaactcccaggctcaagcgatcctcctgcctcagcctcccaagtagtttggaccacaggcatgggccaccatgcccagctacttttcattttttgcttttgttgactagccccacagagttttgctgtgttgttcaggttggtctcaaacttctggccttaagcaatcctcttgccttgctctcccaaagcgtattacaggcataagtcaccacacccagccctatcggtgcttttggaagaaggtgttcttccctctctctgtttccctccctatggccagctgcccatagagggcagtggtgctggagtgaagacctctcagcgcatccctcttcatctgtaggatgtgcatggcttccaatgctgtctgttctgctcctgagacactcgctggctacaggattataaaggtgatgaggtttcagcctaaagactctccattcaataacacttcctacaagatatcttttttgtttttttgagacaggatctggctctgtcacccaggctggagtgccacagcgcgatctgctcactgcaacctcagcctctcgggcttaagtgattctcctgccttagcctcctgagtagctgggaccacaggcgcccgccaccacacccagctaatttttggattttttttttttttttttttagtagagatggggttttaccatgttgcccaagctggtcttgaactcctgagctcaggcaatccacccgccttggccacccaaagcgctaggattacaggcatgagccaccatgcccagtcctacaagatatcttttctttttctttctttctttctttctttctttttttttttttgagacagagtctcactctgtcacccaggctggactgcagtggtgtgatctcttctcactgcagcctccgcctcctgggctcaagtgattctcctgcctcagccccctgagtagctgggactacaggcgcctgccaaaacacttagctaattttttgtatttttagtagagacggaatttcaccatgttcgccaggctggtctcgaattcctgacctcaagtgatccacccgcctcagcctcccaaagtgttgggattccaggcatgagccaccgcacccggccgagatatctttttcctcctcaatatctatgtgctcctccctcaacccttgggggcttcagtgtaggtggtcagattccccaccatttatgcctatgatgaaaagagtggaaatggtaataactggatggtgtcactaaactacaaatactttcaggtaggcctgtgcctttttcagcgggctgcagttctcctgcttggcttgagtcattcgcatttcctgagagctgggtagagggggagttgtggaggagcccattctgaaactgatctgatattgcaaacccatacacggaaaggaagaactgcccatacgtattcgagtcttccaatctgactccgagcccgcatccccctcaatcgtctcttttccccactccccagatcacggtgctgcttggtccccctcagagccatagagaagcagggggtgtggccatggaggggaaacctctgtcaccagagactttactgtacttctccttttgctctcagatgctgccagggtccctgaagagggaagacacgcggaaacaggtaaaaatcattttgcttttattttgcattcaacaagcaagttattacggaacagcagttatgggccaggcatacctcccagagctgggaacacagtggggacctccctggctctctcttaccggtgttacaacaggttgtagacagacccctgtc

SEQ ID NO: 21415 - DNA, 2300 bp, Homo sapien
atttctcagttcccaacaacacactgaacagtaggaggccagttctccgctcacagcgggcgctgcaccccaggtgctgctctcgagaaaaaggcgagcatggaccaatttagtggctccgaggtatgaaaagcagtgagatggtgtctttgagggagttagtgataggctgagacccccttgctgtcccccctgaagcctggtgaccagagctgccaggaggccacacagagagaggtttatgatgggggacctggaattcggaaggggcagagtggtcaggtgacccatacacgcctgagaaaactgatgtggagagctgtgttgtcattctgaggcaggaaatagagacagactgacagacagacagaaagacacgggcacattgagagacagagacagaatcacagagcagagctggcttctcaccagcaggcgtgggcacacctgagagagcatccagagaggttagaaatcttccttaggtcctcctgggaggctcaggtgaccccagtgggaaacatgaaaggctgggaggacttccagggctgagagaaggaagctacgcagccggccggtgccacattccctgtgccttggggagtgtcccccagtgtccccagccatgcaccctggggggagtcggcttggacatctgtgccaccccttgacaggcagagtgggggccacaacctgggccctccagtgctggtcagcagaggctgcccccgccccttgccttcctcctcccgctccttcctccagccctgggaaggtcggaagccaccaccatggggctagtgcggaagcagagggagaacagaggggccctcctcgcaaaaactaaaacaagcccacagcctgtgcagaaccgcacccgggtgtgatcactccttaccccacacacccactgccacttggagatggcttcatggctgcagtcacagggcaccctgtgttgtcaggggtgagccagtgaggcccgggacctgcccaggggtgcatcaagggtggagaagacctggccccagcgcaggtgtgaacaggcaggagggctggggagggaatagcgctgggttgtggccgagcccccaagccctgctcttgagaggcactggctacacactcggcccctacccagacaggaccccaattcctccctggcccctctgtgttcctgcatcttcccagcccctcacctcctctggcgtggcctcacctccagccgggatgccccattagctgctcacccaagctgctagaacctcaggctaatggccctgtcacccgccctcctccccttccggctcactgcccatcccgggcatcctccatcagcccgctgaggggactgctgagcctcagagacatctggcagcaccaggaggtgggtccctctctctgtggctcctctcttcacctgactgttccccagacccccagaccccctgcccaggtggcccctgagaactgctaagctcaaccgtgacatggatggggcctggctgacccttgggctctccctgggggacccccttttcctgtccctggccacaccctcaccttatccacacccttctcctccctgctgccccgccggctttccaatgtgggtggggggtgggggcagctcctgccttgccagggaaccagggagggcagtgggctcaggagtcaaactcccattcccagggaaggctcaggctgtgggcccagccctgttctgaattctctccacccctcctccccacagagtctcagaaatcgagaagctttcttcctctgggacctgtgcgccacatcctatctcctgtgacgctgcaggagcttccctggttttaagaggtgacatggtggagagaaagcacaggactgggggccacaggtcctggcttctcatccaggctccgctgctccctgactgctgcctttctctgtgggcctcgtttcctccctgatcccaccaggtgaattgtaattctccacacagggctggaacccgcgagtgatcccaggagcccctcctctccggggccccaagatctgaggacagggagccaggttgcacacaggagccgtgcaggccaggacggcggccccatggacctgcccccgcagctctccttcggcctctatgtggccgcctttgcgctgggcttcccgctcaacgtcctggccatccgaggcgcgacggcccacgcccggctccgtctcacccctagcctggtctacgccctgaacctgggctgctccgacctgctgctgacagtctctctgcccctgaaggcggtggaggcgct

SEQ ID NO: 21416 - DNA, 2300 bp, Homo sapien
ggcacatgccactaaacccagctaatttcttttttctttctctcttttttttttttttttcccctgtggacatagggtctcctcatgttgcccaggctagtctcaaacaacctgtgctcaagcaatcctcccacctcagcctgccaaagtgctaaaattacggacctgagccaccgtacccagcctactgctgcacttttaacagcttaattgagatattatgtacatatcatcaaattcaccaatgttaagtgtacaattcaatgatttttagtaaatttactgaggtgtgagtccattaccatcagctagttttagaacattttcatgaccctagtaaaggattttacttcatgttcatttaaacttaatcttgggccaggcggggtggctcacgcctataatctcagcattttgggaggctggggtggacggatcacctgaggtcagtagttcgagaccagcctggccaacatggcgaaacctcatctctactaaacatacaaaaattagccaggcgtggtggcgggcacctgtaatcctagctacttaggaagctgaggcatgagaatttcttgaacccgggaggcagagtttgcagtgagccaagattgcaccattgcactccagcctgggcgacaacaagaccctgtctcaaaaaaaaaaaaaaaaaaaaaaaaacaacttaatcttcatttctacctccatcccccagacaaccacgagtctactttctgactctataactttgcctattctggacatatcatataaataaatgaaatctgacaatatatgtacatggtcttttacgtctggcttgtttcactcaacataaggctgtagtgtgtatgggtagctcattccttttctttgccaaatagaattccagtatatggatgtgccacttttttattcactcaccagctgatgggctgccaggtaacatttccactgttggtgactatgaccaacactgctgtgaacatttaggactgagtctttaagtagacctgagtttccacttctcttaagtaaatacctacggtggaattgttggatcgcatggtgaatttatgtttaactttttaagcaactgccacctgctttccaaagcagggacaccacctcccattattctcaccagcagtgaatgaggcccctatctctctacattctcgccgaccataggcattgtctgactttttgcttgtggccattctagtggatgtgaaatcatatctcattgtgccctgtgattgtttgaatgaactaatagatcacctgtgaaactggacagcacttgggtttgaaccctagtggtgacatttcacaagctgtatcacctggagcaagtcacttccctacggtgaaggacaaggattttatgacataaaagcgttgccctagaagcagtgtctgctatggattatgtgcccatgaaaaggcagctgctgtcatcatcgccaccaccattattattgttattattattacattgtcaccccagagataatcctgcaccagtgacagggaaaatagcagctggcatccgctgcctgctcacgaccacacgccaggcttccgtcaaaccactcaacatgtattagtaatcttttaatcgacctacatattgttttaatttgcatgtgttaatgcgttgatctatgagatgggtattatgatgagctctgttctgcaggggagaaagcagaaacatggagaatttaagtcatttcccccaaatcacaaagtcaggaagaaacagacctcacggagctcgctctctgtcattgcatcacacttcctgcccttacaaggcaaattggataaatgccattctagagaagcagacaaaattcaagtgaagaaggggagaggaagacgtcggctggggcctgcttagagcatcccagctgagactgcatgaggagggaggcacgcagttgtggaatttgttccccttttagcatgctgaccagccctggcaacggagctcaaggcatctatgtgccactgctcaacagtgagtgacgtcatgggcacggccaggtctttatcagttctgccggataaatagccaactgcactaggtctggagagacagcaaggtgctgtgcggcagagcatttggggtctcaaagaagcaggtgagcctgggcccgaggggctgggtggaggagcaccttggtgcttctctgctggggaagggacaggggacagggcatgctcaggaagacaggcaggctgaccccgcctggaaggcacccagagacaagaggggtgggcgtagtgacctc

SEQ ID NO: 21417 - DNA, 2300 bp, Homo sapien
taccacctttaaaaagcccttgaccagatggattcacagccaaactctaccagacctgcaaagaagagatggtaccaatcctactgaaactttaccagaaaattgaggaggagagattccctactcattctacaaaaacagtctgattctgatatcgtaatctggcaggacacagtgaaaaaagaaaactgtaggccaatagcccgatgaacatagatccaaaaatcctcaataaaatactagcaaaccaaatccagcagcatgacaaaatcataattcagcatgatcaagtgggctttattcctgggatgcaaagatgtttcaatatatgcaaatcaataaatgtgactcaccacataaaattaaaaacaaaaattatatgatcatctcaatagatgcagaaaaaaacatataataaaatccaacatcccttcatgataaaaaccctcaaaaaactaaacatcgaaggaacacacctcaaaataataagagccatccaggacaaactcacagccaacatcatactgaatgggcaaacgttggaagcattccccctaagaaatggaaaaagacagggatgcctactcccactactcctattcaacatagtagtggaagtcctagccagagcaatcaggcaagaaaaaggaataaaaggcatccaaatagaaaggggaagtcaaattatctctgttcactgatgatatgattctatacctagaaaaccctacagattcctccaaaatactcctagacctgataaatgactggcagtttcaggatgcaaaatcagtgtataaaaatcagtagcattactatataccaacaattgtcaagctgtgagccaaataaagaacagaatcccaattacaatagccacacacaaaaataaaatacctaggaatacatctaaccaaggaagtgaaagtgaaagatctctacaaggagaactaaaaaacacaaataaatgaaaaacattccatgttcatggattagaagaatcaatatcattaaaatgtccatactgctcaaagcaatctacagattccacccaattcctaccaaattatcaatgtcatttttcataaaatggaatcattctaccaaaaagacacctgcatgtgtatgtttgtcacagcactattcacaatggcaaagtgatggaatcaacttaggtgcccatcaatggtggactagataaagaaaaaatggtacatacacatcacgaaatactatgcagctataaaaaagaatgaaatcatgtcctttgctgcaacataaatgcagctggaggcctaagtgaatgatcctaagtgaattaacacagaaacagaaaatcaaatgctgtatgttctcacttttaagtgggaggtaaacaatgggtacacgcaaacattaaagatggaaaccatagacagtggggactccaaagtgggggagggagggcggaggacaagggtgggaaaactgcctattgggtactatgttcacaattttggtaatgggttcaatagaagcccaaacctcagtattatgcaatatacccatgtaacaaacctgcacatgtgctcccgaatctaaaataaatattttcaaaaagcaattgacctatattattaacattttaatctacctgtatatatgttttaatctgcatgtgttcatgctttgaaatatggtacaggtactatgacaatccctgttctgtaggggaggaagaagagacacatctcttcccccacatcacaaagtcaggaaggaacagacctcacggagtccagtctgtcactggctcatgctttgtgcccttaaaaggcaaactggataagtgccattctagagaatcagacaaaattcaagtggaagagaggggaggggaagaagacgtcagctggggcctgtttggagcatcccagctgaggctgcgcaaggagggaggcacgcagttgtggaatttgttcccctttttgcatactgaccagccctggcaacggagctcaaggcatctttgtgccactgctcaacagtgagtgatgtcatgggcacggccaggtctttatcagttctgccggataaatagccaactgcactaggtctggagagacagcaaggtgctgtgcggcagagcatttggggtctcaaagaagcaggtgagcctgggcccgaggggctgggtggaggagcaccttggtgcttctctgctggggaagggacaggggacagggcatgctcaggaagacaggcaggctgaccccgcctggaaggcacccagagacaagaggggtgggcgtagtgacctc

SEQ ID NO: 21418 - DNA, 2300 bp, Homo sapien
tgttgtcaagataccacaagggcatggaaccagaagggggctgtcagtttctgactggctgcagcagcttatcagaacgtatcacagatcaggagaggacgatatgatcaacggatgaggtaaccatcagctgagggcaaacagctcctaactaaagtcagcactttacagctggctccagtgcactctccctgtggctgcaggcagagcagccagggcccctcctccagcctcctcccacctcagagcttcagagcttcagacatccttggtgctgaggcctaggttccatgaggtcaaagggagaattcaggccgggcacagtggctcacgcctgtaattccaacactttgggaggccaaggtgggttgatcacctgagctcaggagttcgagaccagcctgaccaatatggtgaaacctcatctctactaaaaatacaaaaattagccaggtgtggtggtgagtgcctgtaatcccagctactcaggaggctgagtcaggagaatggcgtgaacccaggagaatggaggttgcagtgagccgagatcgcctctgcactccagcctgggcaacagagtgagactctgtctcaaaaaaaaaaaaaaaaggagaattcagactaagctgttttgcagcatcccaaggctgtgttgacctcacgtacagctgcatcatgggagtgggcggtgcgacatctcaagtccaactcaaccgagccatggttcaggctaagttcccgctggtgcccctacctggaacgctcttcagatagtggctccttctcacccattcaaatgtcccaggcctttcctgacaggccctgcccatctctctctctctctctctcaatttccctgcttgctttttgttgttgttgttgttgttgtttgatttttggtccttttttttttttttttttgaggcagagtcttcctctgtcgcccaggctggagtgcagtggcatgatctcggctgactgcaatctctgcctcccaggttaaggtgattctcctgccccagtctcctgagtagctgggattaccagtgcccgccaccatacctggctaatttttgtatttttagtagagacagagtttcaccatgttggccaggctggtctcaaactcctgacctcaagtgatgtgcccgcctcagcttcccaaagtgctggggttacaggcatgaaccccaccacgcctagccgatttattttctttcccttttttttcccccagacaggaccactggattggagtggtgccatcatagttcattttaatttccaactcctaggctcaagtgatcctcccgcctcagcctcctgagtatctaggactacaggtgtgcaccaccatgcctggctaattttttatttttatccttttttgtagagacaggggatctcactatgttgcccaggctggtctcaaacacccagccttaagcaatcctcctcctgcctcagcctcctaagtagctgggattataggtgtgagccaccatgcctgactttttatctcactttttgtagagacggggtatcgctatgttgaccaggctggttttgaactcctggcctcaagcagtcctcctgcctgggcctcccaaagcgttgagatcacagacgtgagccaccttgcctggcctacttcctttcttcctgtaaaattgccttgttggtttgtctacttgttttctgttcatcctgttcactcttgtctccagctcctagaacagtacctcacacagagtaacggctccatgtgttttgtgacagggaagcagacagtgtggcttgttggagaggagccacatacccccgccccccgattcatacatggtgtgactcagcccgaaccattgctcagttgagttggatttgagatgatgcactgcccactcccgtgatacagctgtgtgtgaggtcagcacagtcttggggtgctgccagacaacttagtttgaattctccctttgactcattggaacctagacctcagcaccaaagatgtccccataccagtaacccgggcaacagaatgcagataaaggacaggagacaaaaggcgcaggttctgacacattctttgcttgtgtcatcagctagcaagtattcacaggcacatccaacctccatccttacattccacaaggatttgagtgtctgttataggcaagggacaatgctaggtttttttttctaaaaacaaacttggggctgggcatggtggctcacacttgtaatcctagcactttgggaggccaaagcgggtggactgcctgagctcaagagttcga

SEQ ID NO: 21419 - DNA, 2300 bp, Homo sapien
tgagaattaagaatgtggaagtgattacacagaactttagataagggtccaacttcctgtgatgacaggctgcattataaagacgatgagagaaaactgaacttggaaggaactgtgaaggatattgctcttgtgaaagtttacccccttgaactcggtctgagaggttgggtttccttttcctgtgacgtaggtggacatcatgaactgtgagactgaaagcctccttggtgatgctcccttcataactgcggtgaacattcataactgctgtgaacccagagagggggtttcgttggggcgtcttccacagggggactcacgacagtgacggcgaaaggcaggaggtggggggagaagaacgtgcagagacagagaggcagtcccactcctcaacacttgttttccaatgagtttcctggattctgcaattaaatccagatcctcgtgcatgtttataggaaatcataaaagcgaaatgacacaaataaatttggtggcaacaagagagaatggtctctttcttagttctcctgttgatctgagaagcgacgtgtgctgggggaaggaaataaagaactagaacgccttcagaggagagtagagtggacgagaaagaaaagctaaatatcaaaatgtctagaccctggggttacagaccacaaaaagaataaatgactgactgactgaatgactgaatgaatggcaaacaataggaagtaggtatgtcctagggaaagaatggggattctgtgagcaggaatcaggccacagatggcagaacagagacttctttctgagacttcctccctagttcaagaggaaaacacgttccaacgatccttgctgcattaggtgtgtatttcaaagggaccttcaggagctcctaacctggggctaccaaggtcagagagggggaaacagtgagactttatcagggaaaggaatggagcctgagtgccactccctgacgaaaagccacatgggcacgtgaactcgggcctcctgaattcctgacactttcccaagagggacagcacatccatgccctgagcctctggaggctgcaccaagtggctcactctctgtgaagctgcgttacaggcttgagacgaggcagcacttacgggcatctgctaagtgctttatatacacaacctcactgaatcctcgcagaagtcctaggatgtcagaattcgcatgctcacttgactacagcaaactagacttcagaaaacggatctgcccccaaggttgtaatgaagggacctggatttgagcccatatctgcatgactataactcccacaccatttccatcacaacaagatgcaggccaggaccagcctgtttcagctgagacgggcaaaagaaatgtgttgggggcagagggcaggagaccatagagaaagtaaaaaaattgaagaagaaaaggaaggagtgccgggtgcagtggctcacgcctgtaatcgcagcactttgggaggccaaggcaggcggatcacttgaggtcaggagtgcaagaccagccaacatggtgaaaccctgtctctactaaaaatacagaaattagctgggcgtggtggcaggtgcctgtcatcccagggaggctgacgcaggagaatcgcttggactcgggaggcagaggttgcagtgagctgagatggcgccactgcactccagcctagacaacagagcaagattcagcctcgaaaaaaaaaaccaaaaaaaaagaggaaaaataaaaaggaaggaggaaagctcatttctgagaatgagcagaatgacagaagaaactgcctaagaaagagaaaagaaaataatctgacttgggaagtaaaaaaagaaaaatgcctgggaattttttttttaaatcaggaattaaggacagaaaaatctgaatttggaagtcaagagtgaggattctctagggagagaataaagatgctgggcctttcctttgggtttgagaggaaatagtgcttaaagactgaccttcctttctctggtcacgtggctggtgctagtataaatgcttactaccagccaggttcctcaccattttttcctgcatggcatggacagaagcaggggctaaagctctgttcctctctcctggaagcttgcagacctcccttcagaaccaatcccaagaagccacctatccggaacaacacaaggcaaggcagctagtgtagtgcttgtgctctgggaagagaggccaggatcaggtttgaggggaaggttctgggagactggaggaaggatgtcagaaccaaatggaagactcatacccagaga

SEQ ID NO: 21420 - DNA, 2300 bp, Homo sapien
cccgcctgtcaaatcgtagctggttatacaacatcagttctcttttgtctgattcttcactccctggagtcgaccctatgcggatggaatggtggctaatgagctttttcagtcactgttcgttaattagcaaggattcattacacagaacttgtgtcctccagaaaaccttttgggaggtgctccacccacctcagtcattctctaactcgtcccctccaggagcaccaactctgtgacatccactactgtgtggccatctgggctaagggagtgttctctaagcagtgttccctcaggtagctctgcaaaggggaagctgccattataaaatcagaggaggctgaagaggatgtctgggactggggtgtgggggcagcgtgaggatggagctgaggtgcccagcttctggggttcgtaaaggttgttcatggatgccgtccagccctcccacccagggccaccgccaccgtgcattgcatcaggttgtgttgataaggtcttgcttttccctgacagcgccggtccatgtcccagcccctccctgttacagcaggagccggtttggccacctgaacctcactgtggagaaggctgcttgactaggacattgtgtcacagtgaggtgatccaacttccaaactgggggtggggcaaggtgggttagggcaatgacatggagtgggcactccaggttcagggtacctggatcccatctccaactgggcaccctaagagctgttttttgttccctgttccttgtcatcttagctcaagacagtcatttctctgaagacccaagagtaaaagacgggcagttggaaaatggaaaggttcagccccatgaaaggaaaatgtacactgtggctgaaggatgcctgaatactaagtctaacgtatcatatctgaccaatgctgactctacctgggttctgtgtgagccatggttctagggggatgtaaagctgatcaagatacagctcctgacctcaaggaacttgatactctaaaagggaaacaaggcgagaacatgacttacttagatacaatgccagagacatacaaacgaatgaatatgggaattctgtgaaaggaaaggtgtggagagaaggactgggcattgcaggaaaaatctgggaagcttcatccaagatgagtgttgggttctgagaactggagatgagagaaggccatgttaggaataaggaacagcatggccggatgctttgaagagggaaaaagaaggatatagttggtaaggggtctaatttggccagaatgtgaggtatgtacaaagctagtaaaggaagaagttataaaggtgggttgagttcagagcatggaccaccttcaatgccaagctaaagagtttacatagattttggtagggtggaagaaaaggcctgaatgagcatggagcgcaggctcacacctatagtcctttgggaggtcaaggcaggcggaccccttgagtccaggagtttgaggccagcttgggcaacatggcgagacattttcatctctacgagaaaattaaaaaaaaaaaaagctgcaacatctctacaagaaaataaaaaagttagctaggtgaggtgatgcgtgcctctagtcccagctactagggagactgaggtgggaggattgcttgagcctgggaggtcaaggctgcagtgagctgtgatcacaccactgcactccagtctgggcaacgagtgagagcctgtcaaaaaaaaagaaaagaaaagaaaagaaaaagcctgaattctaagagaggaatgagggatataacgaaaagagacaaagacaaaaggagaggttgcttgggtaccactgccaatcccttggagggacaggtccaacctgtctctgtcccagccccatctgcatgaagagacccattgcagtgttaccttccacgtgcctggggcagaatgcgaattgagaaatccgaggcaaatgaggaacagtccatgcctccccctcccagagccccgggggtgggcgacaagatctgggggtgagtcagtggggtggggaccccatttctgtgctcatctgcctccttggcaatataaagagcaagcactgaggccccgcctcagagcaccccaaacttgacgccatgaagatcccggtccttcctgccgtggtgctcctctccctcctggtgctccactctgcccagggagccaccctgggtggtcctgaggtgagcacgtcacctgcatttttattcttatacgtgttacccacctacccctccatctctctacctcctgtccattcctggataagtggct

SEQ ID NO: 21421 - DNA, 2300 bp, Homo sapien
agggagctgaggacttcagccagagtgaggagggagcagaggggaacgcagtgtaatgttcctgacgatgcagggggttcttaagcccaagccaggatatctgggtttgtttggatagcagtggtgggcaaaaaggtccctgtaggtttctggagcaggggtctcttatacccttgtgctggctcacaatgccctggaattcctatttctcaagctctctcttagaacctatttctggccaggcgcggtggctcatgcctgtaatcctagcactttgggaggccgaggctggcagatcacttgaggtcaggagtctgaaaccagcctggccaatgtggtgaaaccccatctctactaaaaatacaaaaattagccaggcgtggtggtgtgcgcctgtagtcccagctacttgggaggctgaggcaggagaatcgcttgaacctgggaagcggaggttgcggtgagctgatatcgtgccactgcactccagcctgggcgacagagcgagactccatctcaaaaaaaaaaaaaaaaaaacaaaaaaaaacctgtttctttgcccaggaccagagaagctctcgcatcccgtgacctccagacaaggagccaccagattggatgggagcccccacactccctccttaaaacaccaccctctcatcactaatctcagcccttgcccttgaaataaaccttagctgccccacactcctggcctctgctcctttcttacgtctccgctgttatccagggtggtgtggaaggggtggctgcagccccacagcttcgggaaacgggctggaggaggcccggcaggtggaaaggggacactctgaggcaggtcctagtcttgaggttttgctagaattaggttctgctggaggctggggaacttgggatagaaaacattgtatgctctgggacagggagagttggttagtgcctctctctctccctgtgtttcccaaaatggtttcctggtgtccctaaagactctcagctcctcccatccccaaccttagtcacaatgacattctgaaggttgagatagggcagtagcaggaggaggggtgggtgagtgggcccaggctctctgctaacctgctccccgcctttcatccacagaaccaggtcccgccccccagcacccgagccctcctctacttcagccgactctgggaggtaggagaattcttgctgtttgaagaactgggggcctggccctcctgactctccccaagcctccctcaaggcagccaccctctgctccaaccacctgtttcaaaactccccccctttttttttttgagacagagtctcgctctatcacccaggctgaagtacagtggcactatctcggctcactgcaaactcctgcctcctgggttcacgccattctcctgcctcagcctcccgagtagctgggactacaggcgcctgccaccgtgcccggctaattttttttttgtatttttagtagagacagggtttataccatgttagccaggatagtctcaatctcctgacctcgtgatccacctgcctcggcctcccaaaatgctgggattacaggcgtgagccaccgcgcccagccaactccccctcttcatttttgagacagctcatccaaatcttatcaccaaatcttatcaccaataccatctcaagtgctgacaccctcaatctcccacgtgcttaccttcctccaaccccaagccacacccaaaagctccttcctacccgagatctggaatccccccaatttgctgcatagaccaccccgtgggttctgcctccccggcccactctgccctccttctccctgcaggatttcaaacagaacactcctttcctcaactggaaagcaattattgaggtaaggggggcaggacttctcagctctgggacacagggttcggggccctgggcgagccgctgacccaggtgtctgtcccagtttcttcccctcccttcccactttcccaggctttgtgcaatcccgagtgggggcggggtgagagggagaagccgtgagtcactgaggagcagggtgggaggacctccctagcataaaagccgaggccgagggctggggcctccacaagcacatgaacatgaagccggccactgcctctgctctgctcctgctcctgctgggcctggcctggacccaggggagccacggctgggtgggtaccgcagggtgcacaggtgcggggagatcgtattgaggggaagaaggggcctaggctgcggcatggggaggacagctgaggtggaacgggagggcggtgtgcagg

SEQ ID NO: 21422 - DNA, 2300 bp, Homo sapien
tcctctcccccatctagggcagttctgggaatggtgaccaaggcagctacggccgctcccaggtgagggctctagggtcccttccacttgctgccccctggtggcaggatcgcggctactgcgcggccgggctccaggggttcccacccccggcctgcggtgggcagcagctcaggttctccaaatcattgcgtagttccgaataccctcggccacacctggccttctccatgctcggaataacttcctgcagcgaccaacaggctaaagagggggaaggtctggaggttggaaagaggactggaatctgattggggttccaacaaatctgtaacaccgctgggaacgactgggtcccctttaggtcctttaggacagcgtttgaaatcttgctttcccctgcagggatccagcaccggctcctcctccggcaaccacggtgggagcggcggaggaaatggacataaacccggggtgagtggctggcgtgaatctcccaccaaccgcgggaaggaaaaggagagcagctggtttcactcgcaggatcggggagccaaggctccgcggagatggggctggatggccgcggaggtggagcggaagcggctcgccccagggttaaaatgctgccattttggggctgggactggtctgggaggggactgagggaaagtctcccctttctctccccggcagtgtgaaaagccagggaatgaagcccgcgggagcggggaatctgggattcaggtgagagccaaagtctcttaagtctcctggggactgcagttcctgcccaggactgtgcccactcctcctaactcaactctgctcaaccccctcctgccttgtctgcagggaactgactatttcggcagaagaaaccaaatgcactcctaaaaatgctaacgatttccaaagtactaattaattgcaaatcttgctgtgatatacctcaccttataccacagatggggctgggagaaattccatgtaaaccggtccttttagaagcacaattgtcttaaatgtcctctatccagccggggaacagactgtggtgaactctgggggattcagagtgctttggaaaaacattccccccagttatgctggaaatgtgggctttatgtcagcacctgtggtgctgagagttagtgtcacggagatcttgtgaaagtgcaggttgctctaacagggctgggtggggctgagcctgttagccgcgttgctaacaagctcctgggtgaggcgttggtgggaaaggacccacgtggccaggggcaaggccagaccggaggtgctggggctgagtagagacatctctttttagataatctatgagggatactaaccttttatgggaacaaactggtttttttaaaaaaaaatttcttcccatttgtaaccctctttctagtttgtgtttttttcctttttgagatggagtcccgctctgttacccaggctggagggcagtggtgcgatctgagctcactggaaactccacctcctgggttcaagcgattctcttacctcagcctcccgagtagctgggattacagacgccagccaccacctctggctaatttttttttgtatttttagtagagatggggtttcaccatgttggccaggctggtctcaaactcctgatctcaggtgatctgtccgcctctgcctctcaaagtgctgggattacaggcatgagctactgcactcggacttttctagttttttaatatacctcagttttaagtatataagtagtcaaaaagcagccatcttttcctctatggtttttgctcttggtgtaccgctttaaggtaattttcttctagcactatgcatactcctgcaatttcactttttcagtttaactgggatgcatctggactttgttttcctatatgctgtctagtcccacccctccatctaaccagacttaccctacgctttgtatccgagctgtgtcctcctttatgaggggaaaactggttaaaaacagagaggaggaaattgatgagctagaactaaaattttcccccaaaatacttcactgatattcccattcccatgtattcaatcacttcaaccactgatttaaaatgcctcttgtaaataccttagtattttggggagtttctgggaattctgtcggacaggactgctttatttatggtagctttagagtatgttactatctacctcttatcttcacttaccatttatcttttccagtgttttcttacctattcttaaactttcattctcctaaaaaaatgtcagtgtttggaccagtt

SEQ ID NO: 21423 - DNA, 2300 bp, Homo sapien
tgctacctgccacctccctccctccaagcccacatgctccgcgtgcctccctggtccctctggatcctactctcagtctcaccctctctgcagggagctgtggcccagcctggctatggttcagtgagagccagcaaccagaatgaaggggtaagaggaaggggctgggaacaaatgaagaagccactgggtgcaggctacagagagctggggaaagacaaagaggaaagcaagatgggggagtggagggattggggtgagaggaagagatggggctgggcgaggtggctcacacctgtaatcccagcactttgggaggccaaggcacgtggatcacctgaggtcaggagttcaagaccagcctggtcaacatggtgaaaccctgtcttcactaaaaatacaaaaatcagccggtcatagtggcatgcgcctgtaattgcagccacttgggaggcggaggcaggagaatcacttgaacctgggagatggaggttgcagtgagccgagatcgcatcactgcactccagcctgagcaacagagtgagaccctgtctcaaaaaaaaaaaaaaaaaaaaaaggaggaagagacgggcctgggcctggggaggaggcagatgggaaggggaggtgggagaaacacattaggagaaaggaagccaagccccaaagaatgggagaggcctggcctgtgtccatggccgaggccaacgtctccaaactcaccgtccccaaactcaccatccctttccctcgacagtgcacgaatcccccaccatctggctcaggtggaggctccagcaactctggggtgagtggagaggggcaacccaggagttgtgcaccaggaggaaatggagaagttctgctccccttagactgggcatcatggaatatggcctgggtggagagggagggaggaggggcccgtcttggtgctctgtctttaatcccagccctgctcccttcctgcccctcagggaggcagcggctcacagtcgggcagcagtggcagtggcagcaatggtgacaacaacaatggcagcagcagtggtggcagcagcagtggcagcagcagtggcggcagcagtggcggcagcagtggtggcagcagtggcaacagtggtggcagcagaggtgacagcggcagtgagtcctcctgggtgagtttggcacctctgtggaaggctgagatggggtgaggccctagtggtccctgccgggagagggctccaagtttctctgaaagctgccgctgcccgaggatgggcggcctcgctgatagtcgtcaccctgaggctccctcagcctcctgttccccacccatgctgtgcccctgatgcgcgcactatcgtttctgccagagccaccccactgcttctgactctgtatccctattttccactctgtgatggtggggacgttatcccgcctgtctaagctcttgcagtcaagtccacttggcaagtctcaggagaccgtggggtggcggagaaagagggggacatgggagaatatgacacttgtctgggaagctcccaggagaatgggggcaggactgtgatccgggagacctacggacgctgacagagcgacggtgcagacgacattcacacatggggcccctgcacgatgggtgtgagggcaggaaggggcgctgtgaccccgcagctgccaccccagggccccgggcctcactgactccagagccggcagtctctccagcctcctggtcaatggcctgtccaaccccttggctgacggcctctcccatcccgtgtcttggagtcgagctggagagggagccacatctggcttcctcgggggtcgggaaaagtgtcagacaggaggaggtgcgtggacacaataagccgaataacctgagctgctctcatgcgccgctccccgtatgatcctcctctcccccatctagggcagttctgggaatggtgaccaaggcagctacggccgctcccaggtgagggctctagggtcccttccacttgctgccccctggtggcaggatcgcggctactgcgcggccgggctccaggggttcccacccccggcctgcggtgggcagcagctcaggttctccaaatcattgcgtagttccgaataccctcggccacacctggccttctccatgctcggaataacttcctgcagcgaccaacaggctaaagagggggaaggtctggaggttggaaagaggactggaatctgattggggttccaacaaatctgtaacaccgctgggaacgactgggtcccctttaggtcctttaggacagcgtttgaaa

SEQ ID NO: 21424 - DNA, 2300 bp, Homo sapien
agggagactccatctcgaaacaaaacaaacaaacaaacaaaaaacaaagagagtgcaggagctgcagcaagcataatgtaataccactgtttgctcatgcctgtcatcccagcactttgggaggctaaggcaggaggatcgtatgagcccaggggtttgagatcagcctgggcaacacaacaagatctcatctccacaaaaataaaaattaaaaaattagctggaggctaggtgcggtggctcacgcctgtaatcccagcactttgggaggccgaggcaggcagatcacgaggtcaggagttcacgaccagcctggccaacatggtgaaaccctgtctctactaaaaacacaaaaattagcccagcgtgggattacaggcccagcatgcgcctgtaatcccagctacttgggaggctgaggcaggataatcacttgaacctgggaggcggaggttgcagtgagccaagatcgtgccattgcacttcagcctgggcaacagagtaagactctgtctcaaaaagaaaaaaaaaattagctgggtgtgctggtgtgcatctatagtcccagctacttgggagactgagacaggaggatcgcttgagcccaggaggtcgatgctgcagtgagctacaattgtgccagtgtactccagcctgggcaagaccctgtctctagaaaaaaagaaccatctcccagagttgtataattcttaaactgcttgtgcttagtccaatgctgggtacatacagaaccgctgataagctggagctgtaattattattattattattattattattaccaccatcgctattatcatcattaacgagtcagagatggaataacagggaagtaggagctgaggaggacagatggggatagtgtttacaaggtaagaagtgttggatgttataagctggggtgcggatattggggtggagagaagagagagactgactgagagacattgagaaaggctgatggaaactggcccctcctaactgggcgatgaaccccagtgatacgaaacagtgggaggccctgtggcccctgggaatagagaagcagccacacttgctgggcaggggtgaggcggggggaggctcccaggttctgtatcccgagctgggactggggagagggccgtggctctcacggatggctcctgaccttgcgctaccctcttctcgcttgccattgctgccctggcccctggcctgggggatgggtggggtgagctggcccagtcccgcccctcataggcgcttatactcacacgtgcccctctagggctgcgtaaacaggatgggtgcctgggtcagcggctccctcccttggccttccctcccactcgttccctgggggtggctggcgcgcctggctgccctgctccgcgcccagctttctcagccgggagcagcctgaacgctgagacaccctgctgaccactcaaagggctatggccacctccttccccgacaccgagggtccccccgggggctctccccagaatctcagaaactgacacgcagccccgtgtttgccagtctctctctgtgggctggaaggtgtggaggaacaagaaggcagtcacctgtaggtggcaatgcgggaggggagagggagaggagaggctgaggtgctgaaaccgagaaaggccaggccgaggacgggcaatgcctgtcactctggagcccctgagccaggctggctgagcctgggtgggtcctgtcccctggggcttccctgtccttactcctttggtggggtcctgccagtaactcctctcttctaagtctgcccccaccccaccgcctccaggagccaacgacaacctgtctccttagatgcccctgcccccacccagctccccgaatgcctggggttgggaaatgggagcacttttgcatcacctcatccatttctccctccctccctgatgcggctcactctctgtttcgacagagactctcagactcacaataacagctgattaccctattggtggctgggccctgagtcactgcggggagggacctcaggttgcccagccctgtcaccttctcccaacctagagtataaggagtagtgacagggaggtggactctgagaagcccaggcagttgaggacaggagagagaaggctgcagacccagagggagggaggacagggagtcggaaggaggaggacagaggagggcacagagacgcagagcaagggcggcaaggaggagaccctggtgggaggaagacactctggagagagagggggctgggcagagatgaagttccaggggcc

SEQ ID NO: 21425 - DNA, 2300 bp, Homo sapien
agctactcgggaggctgaggcagaagaatcacttgaacccgggaggcggaggttgcagtgagccgagatcatgccactgcatgccagcctgggggatagagtgagactctccctccaaaaacacaaaaagaagatggaacacagttcaaagtgggagaaatcccacctcttgatctctgggtgggttaggattctgacactcatcacccactcttctctgcccagccacctcctggtatgggaaactccatcatttcggccctggaccagggcagaaaaaccacacctgagtttgcccaggaatttggctttgtccctggagtgtgaaaccgggaaacagatttgatgagctcaagcttggagaggtggcacacttagtcaccctctataggcagagcccagagaaggcagaagcttctggatatctgtcctgggatgcctgtctttgggtggagtcaagtgtccaggagctggagaggaaccccgggtcctctgaggggagtgggccttggcgcctttgtttgagcaaagcctgaaaacacgtgcagattctcgccacacctgggcacccacacacatagctctgccacctccagctgctcacaccctgcacattgttcctgcctggccttcccaccagcaatcccacctccacccctctctcagtctctccccttggcaccaaaacccaaatatctttcacccctgcacctactgtacccacccactggctctcgttctggtcttagcctccctcccaactggcttctagatgcatctgctgccccaagcctgcccaccaccacctgcccttccttccgatgcccttttcatgcctgaggccagactctcagctgtttcccctccaacccgagccaatatgtcaacacttggggcttcaggttggggcttaggaggccccatgtcgggagggcaggaaggatgagggcctggccccagcccaggttctggctcacaggctcctgctgccctgggtcttcggcccctccccgtggctgcctcaaccggcttttcaggagacactgcgtcctgttccagctcgtggcaatcagccccctgcccttgcccaagggctgggaggcaggaggtctgggttctgcgacaggaatgggatcctgcctccaaaatctgcggcactccacaagggactctatgctgccctggcgacccaggcgcccttccctccagcaccctgtgagacccagactcgggctcggagtctctttccttggcctgttcgaatccatccatttgtccagtcaataaatatttactgaaccccaggcagtgttcaagaagctaggaatacagcagtgatcaacacgaccaatttacattgctagtaggtgagacaggcaataaaaaataaaggtaatttcagattttttttttctgtgaaaacaaaagggtgatactacagagtataattaatgccatgttatggtcaggagaggttttcttgcgaagttggcatttaagtcaagtacggatgaggaggagccagccacgtgaagatctgggttctgcattccaggcagagagaggagcatgtgcaaaggccctgcagcaggaatgagcttggtgtgtttgtggaacagggagaaggcctgtgtggctggaatggaatgagtgagggcaggggctggcccacaagaacgaggtctgatgactccttcatcccacctagtgttctcccctctccagacggtgcctcccatcattctagcccctcactgcctggggagctggaggcttagatgcctgagaggagtgaggtgttgaagaattgcctgcatcccagggatggagcatggtggaaggtgggtttgcgagagaggaggcctggacagtgggtgaggaatgaaagaggaggtggttggaagggcagacacccatctctggggtggagggcaaggagcaaagatgccagagttcttctccatccatgactcaccctctcttcctcctcctctccattgctcaactccaaatctccctgggaaacacctccttgactgaagaccaactcagtgcctcacaggggtaattgagtcatgaggggtggagaagagggcgagagggagagaggataaatagcagcgtggcttccctggctcctctctgcatccttcccgaccttcccagcaatatgcatcttgcacgtctggtcggctcctgctccctccttctgctactgggggccctgtctggatgggcggccagcgatgaccccattgagaaggtcattgaagggatcaaccgagggctgagcaatgcag

SEQ ID NO: 21426 - DNA, 2300 bp, Homo sapien
tccctctctgggatggtgactccttcctggcacaaacccccactccccctgaaccttggtcacagctgcgtgtcaacctgctgtgcaggtgatggtgcctgcctgtgagtcactgaggtgcaagcaaacccctaccccggggctgcaggggagggagctgtttgtccacttgttctttgtcagacgttcattgaaaacctgctttgtattgttctaagtgctggaggcacagtcgtgaacaaacaaacaagaacaggagccctgtgaggggcttagagcccaagggggagacatcgaacaaataaaccaatcagtagatcatgacaaactacatgaaaagctacaaggaaaagaatgggtgctgcgagaagatataacgtgaagagtttgataagattggcgatcagggccgggcgaggtggttcacgcctgtaatcccaccactttgggaggccgaggcagatggatcacctgaggtcaggagtttgagatcagcctggccaacatggtgaaaccccgtctctactaaaaatacaaaaacaaaaaaaaaattagctaggtgtagtggcgcacgcctgtagtcccagctactcaggaggctgaggcgggagaatcacttgaacccaggaggcggaggttgcggtgagctgagatcgcaccattgcactccagcctaggcaacaagagcgaaactctgtctcaaaaaaaagaaaagaaaagaaaagattagcgatcagatgaaacctgaggaattgacatttattcattcaggtatagtttattgggctaacgcctttttcagacagggtcttgctctgtctcccagctggagtgcagtgacacaatcacagctcactgcagccttgacctcctaggctcaagtgatcctcccacctcagcctccctaataattgggacaacaggcatgcaccaccacacctggctactttttttattttttgtagatacagggttttgccacattgcccatgttggtctcaaactcctggactcaaatgatcctcccacctcagcctcccaaagtgttgggattacaggcatgagccactgcgtccagcccacaaacacctttcaggtgccaaacacttttcttgtcaatgggatacagaagtgacatagatgacgtccctgtcctctcagagcttacagtctggtggacagagacagttggcaagaaaacaaacaatttttagagagacatgtgctctaaggaaaataaaaacatagacagtgtagccctagagaaattttgcacactgaagcataactcagaatggagaagtcagacaaggcttcctggaagatgggcagaaattgggaagggggtgacggctgacagtgacagagaaaggagggaacttagatgcagagtgtagaaagcctctcttaaagggtgggaaaccaagaggcagccaagggaagccctgggtgggccttccaggcatacggaggcagcaagagtcactccactggagaatccaagggacagcatggaacctgtgtgcttcaagagacagagaagaggaaagggctttcaggaacagtgtaaaaggtgggattccaggctgggtgtggtggctcgctcctgtaatcccagcattttggaaggccgaggtgggaggatcgcttgagcccaagggttctagaccagcctgagcaaaagagtgagaccctctctctacaaaaaaataaaaagtaaaaatagcctgcagtggtggctgcacatgtagtcccagctactcaggaggccgaggcgggaggatcgcttgagcccaggagttcaaggctgcagtgagccatgattgcaccactgcactccagcctaggagaaagagtgacaccccgtctcaaaataaataaacaaatgataattttaaaaagtgggattccattccagacggcagtgcgtggccgtggaacggtgatgcatagcgtgctgacgtcccatgcctctacggggatgggatgcgatggtgtcaggcctctggcttgggcgccgcccctcggcgacgtcactgggtactgtgacgtcactgggtgctgtgacatcagggcaattagcccaggacccacagccctggcgctccgcacgcacctcggtaacatcacagcaggtccaggccaatgataaccttataagaggccatgtcgaagcgcgacatcgtcctcaccaatgtcaccgttgtccagttgctgcgacagccgtgcccgggtgagggaggcagcggagggcgcgggggaggggtggaaagggtagtggggagcgtctgcaccctcac

SEQ ID NO: 21427 - DNA, 2300 bp, Homo sapien
aggaggactggactggcccggccctcagtccttaagaggaaagcaggggcctggcccagccacagggaaagggggaatggagggcaacgtccctaagttctgactcctgttcctcatgggggattctccaggaagctgacagggatggcgttccgggtaccaaccccggatgtgtctgtcgtggacctgacctgccgcctcgcccagcctgccccctactcagccatcaaggaggctgtaaaagcagcagccaaggggcccatggctggcatccttgcctacaccgaggatgaggtaggggctgaggagaggagaccctgggaggagccctctgggaagggacatgatttccacttgccagggagctgctctcaatgtgccaagtcagaaactgcagggcaggaagggagatctccctgcctcagggcctttgcacttgctgttcctttagtctggaatgcttcccttgccaggtgaccatacagtctgtccttacttcctccaagtctctggaggaacctccctcttcagcaaggcaccccctcaaaatatgttctttttgtggccatattcctcacctgaaatttcatttcatagtcactgttggccccagtggtgtgtgcactccaagaaaacagggatttaggggctgccttttcacttttgtggctccaacctggcatacagcaggtgactaatacatgcttagtgaacaaaagacaacagctcccatttttttcaatacttgctcagggccaggccatggccagatgccttctctgtgaggagtggatgccatggtcatggtggacccctgtacatccaccttggtgctgtctccctgcattaactcctgcaggtccactttcccacagtcactgggatcttttgttttaatggaatcacattgcatcacccgttttcaggattgaaaacactcctgtggcctttcatgacactagggctaaaaccctcaggtcctcccttcctgcagctccttctacctcagacactgtgctgagggccccagccggtcagatctttctagtcatctagacccaggctcatggccacccctcagagaggccctccatgctggcccattccaaacgcttgcattattcctaggaaagggatgtactggtacagcatgagggtgtttgtgacctgtgccctttggccagaccctgacacagtgccttggtcataccctgcacttggtcataccctccagtccagagactggacacagtagggctacatcaaatattatagatgaatgcatggatgggcgatagagttaagagtcggggcctcagctcctggaggtccttgctctgccggacacacttatctttgaaattctgacttccaggtcgtctctacggacttcctcggtgatacccactcgtccatcttcgatgctaaggccggcattgcgctcaatgacaatttcgtgaagctcatttcatggtaagggggaaggagctggagacttagagggaggggaactaaggggtggtcggaaggaacccccttgaacctcccgacccctcctccacaggtacgacaacgaatatggctacagtcaccgggtggtcgacctcctccgctacatgttcagccgagacaagtgaaacgggaaggtcctttctttccttcccaggggccggggccggaacatgtgcctcccgttccagcatctggctgcccgggggaggaaggacacccggggcgggcgccccacgccgatgggtccatggtgaaataaaaaacagtgctcacggctgcgtcccgtatctctgcgccggtcagggcgggttctgatccgggtttgaggcccgccccacccttactcgatcgcctgcgcccacgggcgaggggtcgcgctcgactccaagccgggttccacttcaggagaccgggaccgcgatggcagcggtagaggccccgcatggccggaagtcactccccaaagcgctgggccggcagcggtgggacccagggccggccacgggctctctgacgtcactgggcgcgacgccccgcgccgggactactgctcccagaaggtcgcgcgcgggcccccgccagtcaggtgggtgccaggccctggccgtggcgaaagagccggcggagccggagacccgctcccggagacgccgcctcgcgatccccgcgcgggcgggaccgggcggccggcatcatgaccctgtttcacttcgggaactgcttcgctcttgcctacttcccctacttcatcacctacaagtgcagcggcctgtgagtgcgggaagggc

SEQ ID NO: 21428 - DNA, 2300 bp, Homo sapien
cacaactctccccccagccccatgctgaccccatggcttgaacgatgttaagaatctggctggacaaattattctagggagcagtttcagaaaagctggttttgctggttgggtaaaaccaaaggccaagcaattggactgtccactgtgtaacaaggggccgcaagtggctgcaagtgggaggatgacctggttagacgggtttcagatagatcccctggctgccatacagaggatggattggagggggacactggggccaggagcctcagaggcaaccagcccgggaagggcccatgtgaggaggcccaggttggggctgtgaggaggaagagccccccaagggccttctcttggattctagctcccctctatcatctgttccctgagggccctggcctctgccactgctcaaagatcatccaaaccttctgtctactcctggcaaaccaggagcctgaggaacaagacatgggacaagtcagtgactggctagcttccagcttgtctacctggctcctgagacagaaccagggcctctgagacccaggtggacacggtattgggagacagttcccaagagagagaaatggaggcagcaacaactttccaaatactgtttacttcactaaaacctggagtgaggcagggaaaaggtacatcaatgtctgagacaccaagcctaggagtgcacattgacaacggcgacatacagggccaaagtgctgagggccagcagccccgttaccactgctcgggccagtagagctgcccaactgcccagcgagcagaggtggacgaaggtcctgcaggaaaatgtcacaataaggaagggagactagataacccaccccactttggacccagccctaaaccccacccaactcactccataacaaaggccttgtagacactgaggaacatcagcaggaggacagctggccggaaggtgtggtacagatcatagcgtgttatcatccagacctgagcagacgcgacgatgtaatggacctagagggaggcagaaagtcggggccaggccttggggaggagtatggccgccagcagaaatgtgtatgtgggagagcacgactgcctaccagactgatgttggagtctatgctcatctggatgtacttccagtcaaactcaatgccccgggctccgacccataggggaatgcagctgaggaaggcaaaggatgggattctccagtactcagacaccttcagcaccaggctttgagcccctgccctccagcacccccgtggaacccaggtgtcccttctcaggggtctgggctccaggctgctgtacgcaccgggacataataagctcagcagtggcccagcccagggcagcaaccatgatcttgtactctcccttgccggcattccgggacatgacaaggtttagacctatcaggtctgccacatccacgctggccttcatgaactcctgcgggtcaggttgaggcttaagtaagcacagggggacagggagccccattcctgaactcccttcccttccctggcccctctcaccccaatgaagtcatagatgccgccttcccaggtgggaaagaaagtggccaagaacagcatctgagaacagaaagcagaaagaggtcacttcaaggtgaggggatcaagataaaccacgtgggatttgtgggaagttcgtgggtaggaagagggcaggacaggttctgggggcccatctggaagaggaaccaccagatggtggcaaaattacaggaatcggggagatagaggataggtccccgggtccccgagggggctggaagtttgagttctgggtgatcacagggcatctgagtcaggtctgaaggtgctgctccttgggcagtgttagcagcacgtacggaatcagtgatcactcttaaccgcaccaaaaaaaacctgttagccaaccacactactgaggttttctcagttttactaagtgctacgcaaaagttgcttctaggtctcttctcaggtcgtgccctctttaaagtccatcctctctaggtatcctgacgcctcccagtgcggagtcccgagggcggtcccaccgtggggcggcgggggcgcggataggcaacgggggcgggtccctgggtctgcagagcctgggggccagaacacgtggcttcccggtggccctcaccttgcagagttggacaaagaggtaggtgactccagcctggacgcatttccagaaggcgttgtactcggacctggagaagcgggaggtgagggtcggcccgggccccgcgccctctccgccccgcgccc

SEQ ID NO: 21429 - DNA, 2300 bp, Homo sapien
ctaatgaacaccaaacaaataaaaagaaaacacagtgtcaggttggagtaggaggtgtaaatacagtggggtaaaggaacagaacacagtgtgcagtattacagaatggactctctgaagaggtgacatttgagctgagacctgaaagaggtgagaaagccagtgcagacatctaaggaagggggcccaggcagaaggaactgtaagtaccaaggtcctgaagcaggaacgaccttggtctgtgcaaagtgcagcagagaggtcagtgcccctggaaacctagcagcaacagaggcaggacaggtgaccagggccagatgttgcaggaaggagtgcagagtttattctgagtgggaagggaaggctttggagggttgtaagcagggggtgacacaagctgtttgacatacatggctcagagctgatgggagcccagtgagcgagtagattcactacaaggacagcatgtggccccacgccacctcttctttggaggtttcttctagcaggctggggatgaccagccgtgtgggtgcggggaggagctctggctgcccaacagctttgagtttcccaggtgacctgccccagtagagaaggacattgccagggcagttatcttatcaggcgcacgctcacctgctcctggagacacgctcaccccataacataccaaggtccccaccattccactggcccagcccctcgctgctgctgcccatggaggtccctacctgagggatgaggagggagtccccaggcctcctggcatctgtcacccaacaccaagatcaagccaagacccttggacacatcctttccccatgttgcaccttggtttccccatctagggtagggacggggaatggttgagagctgtaaagtctgtagctggatatgtgagtccctgtgagcctcagtttccccctctgcacaacaggaatgatagttctgcctgcacagggttttttgcaaagacccgtgaggtcacacgtgcagagcctggcatgtgtgtggtgctgctgcagtgaagtttgggtttttccattggtggtgccatagaagagctaggctctggggtcaagccctggggtcaagcccgggctggaaccctgtccctaattcttagacgttgaaatcttctgcaaagtccctgatgggggctaagaagagaatattgctttacagggctgctgttagatgctaaggaaaccatttgagtgacacacagagcacacccagcccatagtgaatagtcagagttcagtaaacattcagccaccatagagagtgttgtaagcatggcagggcatggtggctcacgcctgtaatcccagcactttgggaggccaaggcgggtggatcacctgaggtcaggagttcgagaccagcctggccaacctggtgaaaccccgtctctactaaaagtacaaaaattagctgggtgtggtggcatgtgcctgtagtcccagctactcaagaggctgaggcaggagaatcacttgaacccgggaggcggaggttgcagcgagctgagattgcaccactgcactccaacctgggtgtcagagtgacactccatctcaaaaaaaaaaagaaaaaaaaaaagagtgtgggagcaccctcctcttccagttgatcaggcacgtgctatttagactgaaagaggacactctgcagccagctgatctggttctcactccattatgtcctagcctgtgatggagccataggagaatgactcaacccctccatgcctcagtttccccatctgtaaagggtcttgtcccctcaaagggttattggaaggttaaataagttagcacatggaagccgtcagcacaatgcccagcgcataatgagcaccttatgtttgctcttcttgttgctgcagcggttcccaggggctccctgatctcagggcaggttgacatggggggatctgggcaggggaggggggggccagcccaggagggaatgcctgaggtgcccaggcctagaggtcaccccaaggagcctgtaatcagctgtggtcgggcggttctgctccaccccaccgccctccctgggtatatcaggactggtccgggcccaggctctgttgggtgggagcacaggcaccgggcaccatggggaaggccgtgagtggggcccaggggtccggggtgcagtggggacaggggttgcagtggaatctgagttctccctccctccatcctgtccattcccaggagaactatgagctctactcggtggagctgggtcctggccctggcggggacatggctgccaagatgagc

SEQ ID NO: 21430 - DNA, 2300 bp, Homo sapien
attaagcggataaagcccacgactttcttgagctgcttgacagctgtaccaaaaaggcacaaacccattgaggatattatgaaacatgaatacagatgattattttattttggtttggttttgttttggctttgagacagggtcacccaggctggagtgcagtggtgccatcatagctcactgaagcctcaacctcccaggctcaactgatcctcctgtttcaaccccccaagtagatgggactacaagcgtgcaccaccacgcctggctaattttttttaatttttaatagagacaaggttttgctgtggtgcccaggtgggtctcaaattcctagcctcaaacattcctcccacctcaaccgcccgaagtgctgggattacaggcatgagccaccacgcccagccattgccttataattttttactgatgtcagatattgttaattttacagtgttggatgctggattttttttaatctctataaatattcttgaattttgttctggaatgcagctaaataatagcttgatcctttcgggccttgcttttaagcatggttggttagtcagcatcagagaagtatttcatctagggcaggggcaggggtctccaaaccccaagccgtgaaccaatacaagtccatggcctgttagaaaccaggctgcacagcaggaggtgagtggcgtatgggtgagcatcactgcctgagctccacctcctgccagatcaggagcggcattagattcttacaggagcgcaaaccctattgtgaactgtgcatacgaaggatctagattgcgcactccttatgagaatctaatgcttaggcggggcatggtggctcacacctgtaatgctagcactttgggaggctgagatgggctgatcacttaaggtcaggagttcaagaccagcctggccaacatggtgaaaccccgtctctactaaaaatacaaaaattagctgggcatggtagcgggcgcctgtaatcccagctactcaggaggctgaggcagtagaatcgcttgaaccccggaggcaaagattgcgctgagccgagatcgggccactgcactccagcctgggtgaaagagggagacttcacctcaaaaaaaaaaacagggaagaaaaaaaaaaagagagagagagacagagaatataatgcctcacgacctgaagtggaacagtttcatcccgaaaccatccactgctcccaccctccatcccccagactgtggaaaaattgtcttccatgaaaccagtccctgatgctcaaaaggttggggactgctggtctagcgcagacctctcacacctgctgtgtcccaaattgacccacccctgctgcttatttttaccacccctacctggtggtgcgtctgtctccccactcaactgtgagctccgtacaatagggaccagggctgttgtggtcaccatggtgtccccagcatcacccagcacagggtcagctccctgagtttatggaatggtaagcacgaatgaatgggaaaacgcatgccagggaaatgttagggtcatgctctctgcccctaccctccactcagacatgagacacctgtttctgaaatcaaagagcagtaagtccaggatctcattgcctggttccagtcctcctaggacgcaagtcccattttgtcaagaaaataaagggggtgagcgtggtggctcacgcctgtaatcccaacattttgggaggccgaggcgggaggatcgcttgagcccaggagttcaagagcccagaagctgagactagcctgggcaacaagtgagatcccatctctattaaaataaaagtgtttagttaaaagaagaaaaagaaaataaatggaagcatcaaggactgttttgcctctttcgggttagctggtagtgagcgggagaacgagggaaggcgggcggggctgcagtctctccacgcccttttcatttccactcaaggagacctacctgggaagagtgagcgctgcaagacccagcctgaccgcgctaagattactatgcagcgcccgagcccgctgtctgcccggcaaccgatgacgtcactgttggcgcgcccgtgacgtcagaggcgggcgccacacttgaagaggctgagggaggcggtgtcgccgccgcggcgctgtcatggagctagcgcaggaagcgcgggaactgggttgctgggcggtcgaagagatgggggtgcccgtggcggcccgggccccggaatcgacgctgcgcaggtgaggaccgctcctggagtgaggacaccccaccctggagattgagtctcc

SEQ ID NO: 21431 - DNA, 2300 bp, Homo sapien
tgtatttttagtagagacggggtttcaccacgttagccaggctggtcttgaactcctgacctcgtgattcacccgccttggcctcccaaagtgctgggattacaggtgtgagccacctcgcctggcctctaagtttttcttgttggtaaacatctgagcaagcaaaaatttaagttttgacaggaaaaaaaaaagacaatcaaatgcaatatttggaccttgttttgatcctgattctactatcgtataaagacatttttgagacaaggaaaactgaacacggtctgggtgttagatgatactaagaaattaatttgatggtattcataatggcatagttaatggtattttttttttcttgacactgagtttcactctatcgcccaggctggagtgcagtgacgcgatctcggctcactgcaacctctgtctcccgggttcaaacaattctcctgcctcagcctcccgagtagctggaaccacaggcgcacgccaccacggccggctaattttcgtatttttagtagagacagggtttcaccatgttggccaggcgggtttcaaacccctgacctcaggtgatccgcccacctcgacctcccagagtgctgggattacaggtgtgagccactgagcccagcgttaatggtattttttaaaaatagttcttatcggccgggccgagatcgcgccactgcactccagcctgggcgacagagcgagactccgtctcaaaaaaaaaaaaatagttcttatctgttaaggagacataatggcgcatttatgactgagttgatgtctggaatttgctttaacatactccagcaaaaaaatataaaaataagaaaagtataaggccatgcgcagtggctcatgcctgtaatcccagcactctgggaggccgaggcgagtggatcacttgagatcagaagtttgctaccagcctggccaacatggtgaaaccccgcctctactaaaaatacaaaaattagccgggtgtggtagtacacacctgtaatcccagctactagggaagctgaggcaggagaatcccttgagtccaggaggtggaggttgcagtgagccgaggtcacactactgcaatccagcctgggcgacagagcgagactccgtctcaaaaaaaaaaaaaaaaaaaagaagaaggtactttgtaacattctccccgcccttgagaatgtactttataagcctatcccaaacctgtaagaactaatgataatcccaccaccctttgctgactcctttttcggactcagcccgcctgcacccaggtgaaataaacagccttgttgctcacacaaagcctgcttggtggtctcttcacacggacgcgcgtgacaaagaagtatagatcaagtgaaatccagaagtgttgaatattggtagcgtttgagatgtacttaagagtgcgttatactattccccttaatgtgcatgtttgaaaatactcagaataaaacacttgtgagggctacgggaaaaaaaaaagggtcagctgtggcccaagaaaggacagggaccaagcccacggacgtgctcctctgagttgcactagtctctgggccttggctcccaccctgaacagctctcatctttaaatgtcttcagctgtcctcctccaggaagccgggtcaggcgcttcctcccgggcgtctccggtcttcctggaaaccacaggtcgggtgtcaacctactccaggataggggccccgaggggccagccaggcctcccagccttgcccaaccctggggttgacacggactttagcgtctttttaaacttccggcgcgggctctgcggtggcacaggagggtcctccaaactttcctgcgatctcaaaggtccagattccacattggggatgggcccaactgactttgcttcgctctcattagccggtggtcctccaggaaagcggggccgcctctccgctgtgctctcataggcccaggttcttgcgttcgtgtgtccttctctcactctgattggcctatattccccctgagggtgtggccaaatctcattggctctcgcgcccgaatgtatgacgtcatgcgccagcgcccgtcgcttttgctggacgtcatcctcgggagcccacccggacgaagggggagagtagacagcagaaccagcggcggcggctaagcagagactgtagtagcggcgacagcgacgacggcagcgatggctggggcggggccagccccgggactcccgggtgcaggaggacccgtggtcccgggtcctggcgctggcatcccgggcaaaagcggcg

SEQ ID NO: 21432 - DNA, 2300 bp, Homo sapien
ttatctttttttttaatgcacacaagtcttcctgagaacaagaagagacacacacacatagaatgtggcaagcagaggtagagatggcgctgtgagcaggaggctcagaggcagagatgagaaccatcagagactgtgcagtgggaagggggacggggagaaaaccaagagacagatggagacggacaaggagatgagataggaacactcaaagacagatggggagggacagagatgtcagaagagaccaggtgacaaagcctcactggagtcaggcccgtggcaacagagacccagctttagatatgccaacctgaagaaagagggcagagagacatggagagacagacaagaggccagcttcaaggatgggaagccaggactcccttcaggcctccgcgctggacggatagagggaccagtgatgctccagggctctgtggcttaccccacactgattccaatcccagtcccactcccactccatgggacccccggtttactttactgtaaaatggaaggaggagcaatgccacccgctctccagaacggcaagtagttaatgatcaagaggctgggctggggactggaagatgccgatatgcaaaagttatttttaatggtaaatattacatacttattaaaatacagcaggatggctgggcacggtggtggctcatgcttctaattacagcactaaggctaaggcaggtggatagcttgaggccaggagtttgagaccagcctggccaacatggcaaaaccccatctctactaaaaatgcaaaaattagcctaggcatggtggctcacgcctgtaatcccagcactttgggagaccgaggcaagtggatcacttgaggtcaggagttcgagaccagcctggccaacatggcaaaaccccatctctactaaaaatgcaaaaaattagccgggcatggtggtgcttgcctgtaatcccagctacttggaaggctgaggcaccagaattgcttgaacccgggaggcagaggttgcagtgagctgagatcgcaccactgcactccagcctgggcgacagagtgagactccatctcgaaaaatattttatatatatataggacacccagttattgaattttacgtgaacaattttatagtttaggtatgtcctaaatatttcatgtatgtatgtatatgttacatgtatagctgtggttttttgttgttttttgctgaattatttgagcaagttacagactttttttttgttgtttctttttttgagatgaagtttcgctcttgttccccaggctggagtgcaatggcatgatcttggctcactgcaacctccatctccctggttcaagcaattctcctgcctcagcctcccgagtagctgggattacaagcacccgccaccacgcctggctaattttttgtatttttagtagagacagggtttcaccatgttggacaggctgatctagaactcctgacctcagatgatccacccgcctcagcctcccaaagtgctgggattacaggcgtgaatcaccgcgcccaaccacaagttacagacattataacatttcatctctgagttcattttctaaatgatatctttcctcctgaataccattatcaaatctaagaaaagaattctatgatatttcatattcagttcatactccagtttccccaattgtcctaaactattacagcgcggaagggcatggggtctggagaaggagagcagtgggaggatgcctgccttaccttcccccttcatcaaatgagagtatgtattgtacttgcctcatagaaggattcaatgaaggggtatggcacagttggtttcacacaatgagccctcatttaatgttggccgttattgctactattgttattgttgaaattgttgatgtcaatattgctatgattggcactcctgggaagcagccccaggacgccctccctactgggcctggtggaggattgggtgggccttcactcctgctccacgcccccgcagttactctgccgattgtgacgtcagctgacgctgggggcgggtgggggaatctggccggaaatccctcttcctgttgcagataagcccagcttagcccagctgaccccagaccctctcccctcactccccccatgtcgcaggatcgagaccctgaggcagacagcccgttcaccaagccccccgccccgcccccatcaccccgtaaacttctcccagcctccgccctgccctcacccagcccgctgttccccaagcctcgctccaagcccacgccacccctgcagcag

SEQ ID NO: 21433 - DNA, 2300 bp, Homo sapien
taaaggatctgtgggccgtggtgaggagcctggactttgtctccagggctcctggggagccatcaagggttttgtttgtttgtttgttttttgagatggagtctcactctgtcactctggctggagtgcagtgatgcaatttcagctcactgcaacctccgactcccaggttcaagcaattctcctgcctcagcctcccaaatagctgggattacaggtgcacaccaccacgcacagctaatttttgtatttttagtaaagatggggttgcaccgtgttggtcaggctggtcttgaactcctgacctcaggtgatccgcctgccttggccacccaaagtgctgggattataggagtgagccaccgtgcctggcccccatcaaggggttttaagcagggaaagggatttggattttaggaagatctcattgcaggggatgaatacatgcatgtaaacaggtaattccacaaataatcacaatgttgatggacacagaatgtgtaagaagaggtccctgacccaattccatctggacactgcaccccagatggtatgtgagaggctttagaggccagatgggggaggaaggaaagcagttctctttcatagctccctctcctagtccctagatgcttccttcatttccacaagaaattcttgcattcagcaaatatttatagaccacttcctgtgtgccaggcactgctttagatacaatggtgaatgaataaggcagacaaaaattcttcctttatgataattcttttctgttgagggaggcaaaaagaggtaaacataatgtaaaagaacagatatagccgggcacggtggctcacgcctgtaatcccagcactttggaaggccaaggcgggcagatcacctgaggtcaaaagttcaagaccagcctgaccaacatggacaaaccgcatctctactaaaaatacaaaattagccaggtgtggtggcgcatgcctgtaatcccagctactggggaggctgaggcagaagaatcgctctagctcgggaggtggaggttgcagtgagccaagatcacaccactgcactccagcctgggcaacaagagcaaaactctgtctgaaaaaaaaaaaaaaaaaaaaaaaaaaaaagccaaattggccaggtagggcagctcacgcctgtaatcccagcattttgggaggccgaggtgggcagatcacctgaggtcaggagttcaagaccaacctgaccaacatggtgaaatcccatctctaccaaaaataccaaaattagccgggagtggtggcgtgcgcttgtaatcgcacctactcgggaggctgaggcaggagaatcgcttgaaccgagtagacgcaggttgcagtgagccaagttcgtgccactgcactccagcctgggcgacagagtgagactccgtctctctctctatatatatattttaagggtagggatttttgtgttttgtgcagcgtgctttctcaacccgtaaagtgcctgatggctggatacggtgggtcacgccggtaatcctaacgctttggaaggccgaggcgggaggatcgcttagagaccaggagttcgagtccagcctgggtaacacagcaagaccccatctctataaaatgcatatatatatccaggagtagcggtgcgcatctgtaatcccagctactcgggaggatgaggcgggagaatcgcttgaacccaggaggcggaggttgcagtgagctgagatcgcgctactgcactccagcctgggccatagagtaagaccctgtctcaaaaatttaaaaaaaagaaaaaaaaaatttaaagaaaagaaatacctgacacagaaaaagcgttcaataaatatttcttgcatgaataaaagtactttcgctgggacatttttctccacacctaccctccagccagccccgggatctataacactctctccgagtgaagacacagaggtgatgagatcgggtaacccacgggcgcccgagccccagccgcgcaagctcacgattgggccagaagtgaggatgaacaagcatttagcccaatagaaagtcgtagttctcttgctgggcgtggcttgaatgacttcagtggcctcctcctgggagggagctgaagccgctcgcaagactcccgtagtccccacctctctcagcttccggctggtagtagttccgcttcctgtccgactgtggtgtctttgctgagggtcacattgagctgcaggttgaatccggggtgcctttaggtgagtgtggagggttctgtaacctgggaccccagtctagcgggctgag

SEQ ID NO: 21434 - DNA, 2300 bp, Homo sapien
tcttgaataaacactttacagatttttgttgttgttgtggagacagagtctcactctgtcacccaggctggagagcaatggcacgacctcagctcactgcaacctctgccttcgaggttcaagcgattagctcctgcctcagcctcctgagtagctgggattacaggcacttgccaccacgactggctaattttgtatttttagtagagatagggtttcaccatgttagtcagcctgacctcaggtgatccccccaccctggcctcccaaagtgctgggattacaggcgtgagccaccacgactggccaaaaaaactattttaaaatctaaagtgggttgactaaaaccaaattaaccattttaatcggaaaacatctcatgtatcttattaccaaaccagtgccttgacgatgggattttcagtgtcatttgccaaattcgcaggcaccgcagtggggagccactgctcccacagcagaggcaatacacggcctagccttggggttgagaagttctggggacggtgtcgggggccctgggccaccatttttgcatggagccagccctgcgctgcgagggcgtggcatcggagagaccgtggcctcgtgggcagcatcggcggcccctggggacacgcgctggctcagtccccacctccgccagggaagcggtctgatgatacccatttcgcagatgggcaaatccacaagccaagtcgtgccgcccagaagaggcagaaccgggatttgaacctaggtttctcattctgcacctgaagaaataaatgtctggtccatgcgtgtgttggggggcgacggggacttttcttcaaccaagcccggtgtgccccctctcattttctagcacgttcttctcccccatctttgcacttatctcagactcccctcacacacctatcctgggtgccatcctttccctcagcccaccgcccatgtagtcagcctcctaagcgccccttccacctgtcccctcatctccccactgctctgcctcggtccagccctggccttggcaggggtccctgcctgggcctccccacgggctcccggcctcacagaggagcagccacctgtgcaaggtcacacagcaggagagacacttctgggattcaggacccacctgtgggtccgaagtggattttttgtttgtttggttttggagacagggcctggctctgtcactcaagctggagtgcaatggcacgatcttggctcactgcaacctctgtccccaggttcagccatcctcccacctcagcctcccaagtagctgggaccacaggcatgagcctggctaattatttttgtattttttatagaaacggggtttcactatgtcacccagtctggtctcaaactactgagctcaagcgatccgcctacctcagtttcccaaagtgctgggattacaggcctgagctaccacgccccgccctgatttggatcttgctcctattcccaggaaggcccatgtcctagcaagagagacaccaggtggtgcgcacgcccctccacctccaactcctccaccgccaacaaagcctgggacccagaggccatgggtcctacacaatctggtatttcaggtctataaatcatgggggtggcagggagcccatcaaagctgttcatccagcctggtctgccggctcagcctcttgtccaccccactgccgtgccccaaaacacacacacacacacacacaccctccctccttcctgggagactagcccaaggaggggcctgggcgtatatagggagccacggtgggtggggctggccagagaggctgcagacagagaaggtgaggagggggccctgggagtctgggtatggcatgaggggtctgaggctcagggaggggcagtgccaagttcaggccagtgactgccccaccggagcccgggtgtcctcttgtgcaaaatgcctccccaccagggctgtgggtacatcagtaccagcctgggccccgcagagagctggagcaacccctcgaagccagggtgtggctcagagatggggggtccggctggccctttacgctcctggcctcatccctgctcatgtgtcccaggatgatggcgtctgcggcagcagcggaggccgagaagggatctccagttgtggtgggcctgctagttgtgggcaatatcattattctggtgagactcgccccagtgctgggagccgagtggttgtgtggtggggaggggacagtcctgagctcggggtgggggatgagggtccagaactgtctctcgggcagactcagtggtca

SEQ ID NO: 21435 - DNA, 2300 bp, Homo sapien
gagaattgcttgaatccgggaggtggcgactgcagtgagccaagatcgtgccactgcactccagcctgggaatcaagaatgaaactccatctcaaaaaataaaataaaataaaatatttttatcaacaactatgctgataaaataacacaaaaagggcagatttctggcttttcctggccttggtaaggaatccaggtgtttaatttgtggctcctgaatgaggaaaacataggcttgggcacccttcaaacatgggttcaaatcctggctagctagaggacttgggccacattgacgcctcagttttccttgagtcctcaatttcttcttcttttttttttttttttttgagacggagtctccctctgttgtccaggctggagtacagtggcgccatcttggctcactgcaacctccccctcctgggttcaagtgattctcctgcctcagcctcccaagtagctggaatcacaggcgcacactactacacctgactaatttttgtattttttgtagagacagggtttcaccatgttggccaggatggtcttgaacccctgaactcaagtgatctgcccgcctttgcctcccaaagtgttgggattataggtttgagccactgcacccagccaatttcttccttttccagtgcaatatcatgttggatttgaggaagactgtatctcttcaaacctggaagtctgagtttgaatccttccagttctgtgacctaccaggtgtgtgacctcatgcaagatattcaacctcttgctttggtctcctcatcactaaaaggccgatctcccttatggagtggtcgtgaggattaaaaaagctttaaaagtgctttgaaaggctgggcacggtggctcaagcctgtaatcccagcactttgggaggccgaggcaggtggatcacaaggtcaggagatcaagaccatcctggctaacacccatctctactaaaaatacaaaaaatcagctgggcgcggtggcaggcgcctgtagtcccagctattcgggaggctgaggcaggagaatagcgtgaacccgggaggcggagcttgcagtgagccgagatcgcgccactgcattccagcctgggcgacagagcaagactctgtctcaaaaaaaaaaaaaaaaaaaaaaagataaaaagaaaaaaaaaaatgtgctttgaggccaggcactcgtggctcatgcctgtgatctcggcactttgagaggcggaggtgggagaatcgctccaatcctgagcccaggagttccagaccagcctgggcaatagagcaagacccccatctccacaaaagataatttaaaaaacttagccgggtgtggtggggcgcacctgtattcccagctactcgggaagctgaggcgggaggatcacttgagcccaggagttggaggttgcagtgagctatgatcactccagcctgggcaacagagcaagaccccatctcaaaatataaaaataaaagtcctttgaacagtgtgaaacctagctcagtgaatggtgctgttactatcattgttattatcaacatttctgttgaggtagtatgtgtaggctaagagcagggaggtcaggagctaggctgccgggttccaatcccagctcccaccacttaccgactgtgtggcctcgggcaagggactttccctttctgggcctgtttactcatccgcagaacggtgatgaccgcagccctgctctcctagagatctcatgagcggatgtctttaaggcactcactcctctaaaagctggcacatcgggagctctatcggcctctgtggacggagcccagggccctcccagcacccggtccaccccgcccacctcaatcatgacgcggtcccagaggcgggtcagctcctggccctggtcggtgtccgcgctgtagaaggtcagcatctgcttggtgatcagggatgggttggacaccatctgaggagaacagggaagaacaagggccggcagggctgggtggggagagaggacgacctccgccccgccgcgccgggaccctcgcccctcccatgcaggtcaggcccctccccaggcctcgccgggctcacgtagtcacggtgggtgtaggacgtgatgcaggaggcgcactcgaagatgtagacgatgagcatgagcaccaggtactggggagacagagggaggacggcccgtcgggcagagcccgtgaagccacaccccgtcagggaagcatcactggggaaatgcaagttttaaaaaagtttggggcagtgtgactagcagcatctataatatgtggtgggtg

SEQ ID NO: 21436 - DNA, 2300 bp, Homo sapien
ctcagtgcaggatggcttgggttgcactgtcaagaatgcaggaagaggctagagaagtgctcagggtgtcatcagcataagggttgcagtgcaaagggccctggagataattctaggaggcggtctctaaggggatatccttaggtggggttccccattcttgggggcttttgttcactgaaaggggagttcccttgcccctcctcccttttaggttccccgaaagcccactgatgctccctgtcaactatatttggcttacacagaatgctgccctttgagcagtctccaactctctcgatcatcaatgagcaaaccagcgggggagctgagtcacaagcacatgatgtggggctggaaagcgagggggccacactcagaggggtgaccatgtaatcgtccagacccctgtacctttcctcatccctggggctagtccctcagggctttccgcactccttccttgtcttgagggactctgtatttctgtgttggaggaagggtgtttccctctgcgtacatacatatcagagggactgatgctttatgtgtcttttatatgggtgtggtggtgtgaggaattggaaagctcagaaatggaaaatagttaacgttcagagtagcagatgaacacagctctcacatttgcattttccctttcgttctgactcatcttcccctctccccaccctgttgcccctccaccagcctcacccattgacacaccctgtctgatctaggaagggttaacatgtgcctgcacccatgtggagggaaggcgtggtaggcctggaaagagagagtgggaggctggtctgaacattcgagggtcctggagccaaaggaagaaacgggagcttagggacagtatttgcatctaggaggggacaaggactcttagatccttcccccttaagagaagcctatgggaggccgggcgcaatcccagcactttgggaggccgaggtgggtggctcacttgacatcaggaattcgagaccagcctggccaacatggcgaaaccctgtcactactaaaagtacaaaaattagccgggcgtggtggcgggcgcctgtaatcccagctactcgggaggctgaggcaggagaatcgcttgaacctgggaggcagaggtcgcagtgagctgagattgcgccactgcactccagtctgggagacagagcgagactgcgtctcaaaaaaaaaaaaaaaaaaaaaaaaaaaagagaagcctatggggaagccgactgtgccttgtcaccagagcagcttaccagtacctgacttgtttatcttccagtcatttactgtgtatctaatatacgccaggcacatatcataaatgctttatccgctgggcgcagtggctcacgcctataatcccagcacttcgggaggccaaggcaggcggatcatttgagcccaagagttcaagaccagcctgggtaacatagtgagacccctgtctctaccaaaaattcaaaattagctaggcatggtggctcaaacctgtagtcccagctactcaacaggctgaggtgggaggatcatgtgagcccaggaagctaaggctgcagtgagccgtgatcgtaccactgggcaacagagcaagaccccgtctcaaaataaacatgtcatcaaaatttgttggataaatgaaaattttgctataggatcagggataagagaataataagaaacagaaaaagaaagttgagcctctaagaccccatcccttccccagattaaagagttctgaagtgtgaaaagaggggaaacctccggggaccttgaccccttgggcaggaagtgaaagaaacccaagtcctgatttcagagaaatgtcatttgtcatcagcccaagaaaaggagatttttctcttcgaagaccaccacacgtccttcctggggttgcccctttcagagcttgatgggaggatctgagtcactcacacacccacccccaggtcattcccaggcagcaaatgaggcttcccagtaccaagtcagggagagggaggaggccagcttctggctcctccaccctattcttgggatccaaatgtttcaatcctttttacttctgcagctgtgtgctctgccgtcatctctaagaaacaaccataccactgaatgctactgtgtacttacaaaccacactcatattcgtcacgtcatttcatcttcacccccacctccaaatgaggtaagcagatattatgcctatttcatgaatgaggttactgaggcccagagaagtgacttgcccaaggtgactcaaatagtaaatggcagagatg

SEQ ID NO: 21437 - DNA, 2300 bp, Homo sapien
tttccctctgcgtacatacatatcagagggactgatgctttatgtgtcttttatatgggtgtggtggtgtgaggaattggaaagctcagaaatggaaaatagttaacgttcagagtagcagatgaacacagctctcacatttgcattttccctttcgttctgactcatcttcccctctccccaccctgttgcccctccaccagcctcacccattgacacaccctgtctgatctaggaagggttaacatgtgcctgcacccatgtggagggaaggcgtggtaggcctggaaagagagagtgggaggctggtctgaacattcgagggtcctggagccaaaggaagaaacgggagcttagggacagtatttgcatctaggaggggacaaggactcttagatccttcccccttaagagaagcctatgggaggccgggcgcaatcccagcactttgggaggccgaggtgggtggctcacttgacatcaggaattcgagaccagcctggccaacatggcgaaaccctgtcactactaaaagtacaaaaattagccgggcgtggtggcgggcgcctgtaatcccagctactcgggaggctgaggcaggagaatcgcttgaacctgggaggcagaggtcgcagtgagctgagattgcgccactgcactccagtctgggagacagagcgagactgcgtctcaaaaaaaaaaaaaaaaaaaaaaaaaaaagagaagcctatggggaagccgactgtgccttgtcaccagagcagcttaccagtacctgacttgtttatcttccagtcatttactgtgtatctaatatacgccaggcacatatcataaatgctttatccgctgggcgcagtggctcacgcctataatcccagcacttcgggaggccaaggcaggcggatcatttgagcccaagagttcaagaccagcctgggtaacatagtgagacccctgtctctaccaaaaattcaaaattagctaggcatggtggctcaaacctgtagtcccagctactcaacaggctgaggtgggaggatcatgtgagcccaggaagctaaggctgcagtgagccgtgatcgtaccactgggcaacagagcaagaccccgtctcaaaataaacatgtcatcaaaatttgttggataaatgaaaattttgctataggatcagggataagagaataataagaaacagaaaaagaaagttgagcctctaagaccccatcccttccccagattaaagagttctgaagtgtgaaaagaggggaaacctccggggaccttgaccccttgggcaggaagtgaaagaaacccaagtcctgatttcagagaaatgtcatttgtcatcagcccaagaaaaggagatttttctcttcgaagaccaccacacgtccttcctggggttgcccctttcagagcttgatgggaggatctgagtcactcacacacccacccccaggtcattcccaggcagcaaatgaggcttcccagtaccaagtcagggagagggaggaggccagcttctggctcctccaccctattcttgggatccaaatgtttcaatcctttttacttctgcagctgtgtgctctgccgtcatctctaagaaacaaccataccactgaatgctactgtgtacttacaaaccacactcatattcgtcacgtcatttcatcttcacccccacctccaaatgaggtaagcagatattatgcctatttcatgaatgaggttactgaggcccagagaagtgacttgcccaaggtgactcaaatagtaaatggcagagatgaaactcaaaggcagggctgattattccaaggtccttgctgccacagatacacttctttgactctaggagttcacaaacgaagtgaggagacaggaggctaggggcagaatgtgtgcattctggaggtagagggggtggtctctcctgcaggcagaaggcagaggcagggttagaaaaccacaccccttcggggggactgtggcagactgatacttgggacatccaatggaggcctgtgaggtcaggggcggggctagctccagggggggccccaggagccccaacagtagttcagagcatgcggtgtcctggaagaagctacaagcggtgagtgatagcctctctccagctgaggccttcttcccatcacaactctttctgtctcctccctgccaacctagagccctctccctgaggtgtccaagtgcagccctccctgccccaagggcccttgctcacagggaacctgcacctaggactctgcctgctgggtgctaagacactg

SEQ ID NO: 21438 - DNA, 2300 bp, Homo sapien
cctcccactgttccttccaggttccctcccccagggccccgcacagctcagccctggggagatggaagagtctgatcaggggcacacaggtgagtcgggcgggggcactcgtgcctcagccccactgtagcccttgatttcctgcctgaatggtacagtgagttggcgctgggattcctggccctgccctcctttgccttctctgtccccacaggcgcacttgcaacctgtgcgggtcatgaggacaaggcaggctgcccacctcgcccgcaccctcccccggcccctcctgctcggtctcggccctatgcgtgctctgtctgtggaaagaggttttcactcaagcatcagatggagacgcactaccgagtccacacaggtatgggcgccctgccctgtgtgaactgtcggctttcttcccaactccgctcctgagtctccacctgtgtgcccggttcccgcgcaatcccctagccccgtggcccgatccacccctaacttggccagctttcgccgccttcttccttccttcaccggcctccccttccgaccgctctaggagagaagcccttctcctgtagcctttgtcctcagcgctcccgggacttctcggccatgaccaagcacctgcggacacacggggccgctccgtaccgctgctccctgtgcggggccggctgtcccagcctggcctccatgcaggcgcacatgcgcggtcactcgcccagccaactcccgcccggatggaccatccgctccaccttcctctactcctcctcgaggccgtctcggccctcgacctctccctgttgtccttcttcctccaccacctgacggggtgtcggtagcgtcttagccaagagtccaattaaagaacgaaaagcgggccggctcggcttctgacctggcaccgctgctacggcggcctagcaaattccgccccagaagcgccccaggaagggcgccgagtgccctctcctggacgatcgcgggtcgcagaagcccaggccagcgagccctacagagtgaggacactgaagtgtgcaggagcgaaggttaacagtaggggagattgtcgatctcatcaccataataaagagtttcctgtgccctcccttcaggactagaaagccgagtttagtctgtgcacacccccgcccacgccccttgtcctgtagcggcccctggtggccctgcgtccgctgtccagcgggatggacacttcttccacccccgaggcgccccgtcctccccaggaggcagccggccccgaggactcggtgtccgggcacaccttgcggcatgccggtcctggactggtgggggctgtgcgaccgcaagtcactcgccccttccactgcaatccacggcgcgcggagtctgatctgggaacgctcggcccgggagagagaggaacgcgtgctccgaccctgctttcggccacccgcctcctctccgggagcacacggaccccgagaccgcggcctctccggcgtcttccctccacaccgtgccaagccgccgccaggtcgcgcctggaacggagactgactatgctttccaccgctccttctccagcccacgcctcctgcagccgcgaactgcatttcccagggcctcgggggtcccggggcccgagcccgcggcaccctgggagtggtagtccacgcgggccgccggcctagccaagaacaatgggaggagcctggggctaggaccacacctcccggagacccggcaacccgctttccgggtcctggccgggaaccccgccgtcccggccctcgcgccctggctgccggcggaagaagcgaggcgtccggactacatttcccggaggcccccgcggttcgcccctctgcggccgcgacgcgggggtctgtgctccccaggtgcggtccgagggcgccggccggccgcggactccctctcccgtggtgccctgcgcgtggccggcccggcccccggtctcccgcggcggcgctggttgttgtcgtgcgccgcggccgccccgccccgcccccgctctctcccctccccccggccctgcgcacgggccgcccctccccccgcctccccggcccctctcacggtgccaagatggcggcggcggcgggcggcggcagttgccccgggcctggctccgcgcggggccgcttcccgggccggccgcggggcgccggcgggggcgggggccgcggcggacggggcaacggggccgaaagagtgcgggtagctctgcggcgcggcggtggcgcgacggggccgggcggagccgagcccggggaggacacggccct

SEQ ID NO: 21439 - DNA, 2300 bp, Homo sapien
cctactgcctctcagtgtctcctcatctgttttcccagaggcctttaggccaagcccctgactgttcagacttccctggcatccacctcccccaccaatgcagccacctcactttgccaccccctcttccaggaaattgtgaaccccgatggttttgatgttctccgccgagtctatgtggacttcgagggcatcaacttcaagcggaagttcttgacggggcttgaacccgatgccatcaacgtgctcattggtaagctgcctgctctccgccctgtcctcctaccctgtcctgcctgcctctcctgacctccgctttgcaccacaggttccatccgcattgactccctgggtactctgtctgatctctcggactgcgagggacggctcttccccattggctaccagtgagcggtcggggtgatccatggggccaggggactccatagctggatcccatttcccaagcatcctaaccgtcttatcccacatgccaggtgctcccgtctgtactggagcacagtggatgctcggaggcgctgctggtatcggtgccgaattctggagtatcggccatgggggccgagggaagagccagctcacctggaggctgcagaggagaaccagaccattgtgcacagccccgccccttcctcaggtgtggctttggctctgtcttcttcctgaataccgctctccctaaacaaacctacagatctctgttccccgctcccttttggaaagtccaggaggcttgcttttgcttcagttgctgtaatgtaacggcagctcgcttactgccatgccttgtgtgccaggggctgtgcccggcttttcatgggaagtgaggtggggagagcggcacgctgcctacttgaggtggggtactggcttttggacgactgcagggagtagagtgcttacagctccctaacttggggcactgtgctcatggagcgctctccagtgtcgccatactacaccttgaaggggacagtggctgaacacagtaacatgctagggaagctggaattggaactgcatctgctcagctcccaaaccggcccccttacagccacactggctgtgggatgtggctgagagctggatggcacagggcaaagaatgggcttggagatgggggagaggttattgtgggcagagcaggaggcagaagagatttggatggtaggaagggctttattccaggttggagcatgacaagaagtggacagaggaggagggtacacccatcccgtctggaaaccagggagttttgggtggaggagggagatcagtttgcagaggttgggtggagccaggtaatggagagcctccgggccggggcgggcgggagcgtctgatgtggcttggatgcaccaggcaagtaagaaagtggtaggactggccgtgctggagggagggcagttccccatggcgtgcaaagcctgcagcagaggcagagaggagatggcaaggagcgagtggggagaggccctgaaggccccctggcccaggtgtgtgcaggttttgccaactccacggtgggtttagcctgggtggtcactggaaactggggcctgttgtgactgggtcagggtcggggacctgggaggcatagtggctcaggatgagagcatgtgggcaggctttgacacagagcccctaccaccccaatgccatttctcgcctcttcagagcccccaggtggtgaggaccccccactggacacagatgttcttgtccctggagctcctgagcgccactcgcccattcagaacctggaccctccactgcggccagattcaggcagcgcccctcctccagccccccgttctttttcgggggctcgaatcaaagtgcccaactactcgccatcccggaggcccttggggggtgtctcctttggccccctgccctcccctggtgagcaccgggcatgtgggggttgggggtggagccgcggaggtgggagctgctggtaacaccaaccctccccccacaggaagtccatcttcactgacccaccacatccccacagtgggagacccggacttcccagctccccccagacgttcccgtcgtcccagccctttggctcccaggccgcctccatcacggtgggcctcccctcctctaaaaacctcccctcagctcagggtgccccctcctacctcagtcgtcacagccctcacacctacctcaggggagctggctccccctggcccggccccatctccaccaccccctgaagacctgggcccagacttcgaggacatggaggtggtgtcaggactgag

SEQ ID NO: 21440 - DNA, 2300 bp, Homo sapien
tccttgaagctggcggtggagtggtggagttttctgttggtccctgagggcagtggctgggggagtggctgcggccaggtaagctggtggtcgagcagcctgaggctgggattttgtggtggcccaatcctgtccagatgtttggattttctcatgacacacagctcagttgctgagctgggaagcagagtgacgtggattgagagtgcttaactcagaggctgcttatgtctcagagatgacatgagaatatggcagtggccttaggaggtccctgtcctcagggatcagaccacattttggtgcgggacacagacatgttagcaagggcaggttagagtgggcactgagaaaccgagcagtgagagcacctgccagggtcctgtggtcagtcctgctgtgtttgggaaactggaagtgagggttgggggacacagggaagaagttgacagaggtggactctggggcactgaggcctggagaagacgggagtcacacggcaggagtgttgctttagagtctcccttggggcaggggaggtggggcagggtggcctggagaggtgacatcgggagagtgtggccatgtgggttttgcctctcctaaagcctgttccactcaagcttttgtgcccccaacccccagtggtcagtccccagcccacacctgcttgagcagcagcagcgtttggtgcagcggatccctcccgccttgaagcattgtcttcccggcttccaaggctgctcctgctctcacctctggtcctgcctccttgctcacagctgtcaggctagatgtgtcccgggaccctggccttgacttctgtgtatgctcactcccaggggctcccttccagcttggtggctgtcctcccgtctgtgttctgattgtctccacattgctctctccagcctagaccctgtccctgaactgtggcctcctccatcctgtcctgctgcctgcccaccatctccaccagcaggttgcagggggaggtttctaagaggcctctcaaagtcagcctgtcccaaactgagccctccacctgcacgccaaacccattcttcttttgccttcgctgtctcagtccacagcagttttatccttccaggtgttcaagcccagcgttgtcccgacccccatcccccttcttcacatccacatctactacgtcagcatatcccgtctgccctgtttaatctattaaccctcgagaaatcccctaaatagctcataacatacagtgtacttggctctgtgcatgtgagcctatataataatatatttgtagctgggcacagtggctcacgcctgtaatcccagcactttgggaggccgaggcgggcggatcacctgaggtcagcctggccaacatggtgaaacaccatctgtactgaaaatacaaaaattagccgggcgtggtggtgggcgcctgtaatctcagctactcgggagactgaggcaggagaattgcctgaatctgagaggcacaggttgcagtgagccgagatcacaccattgcattccagcctgggagacagaacgagactttgtctcaaaaaatgataattttatgtttgtaacagttacagaaatttgctgcatctaaaaaaaatagatgtgcaaaatacaattctccagtattttaaattttgtgtgagaaacagaataatgacaggtagatgggatgtatggtacactgggtttgagtgagccataggcgtgtcctgaagagccaaaaggccccaagcctctgtggaatgcttttgtacccaagaagtcctgcagaagaggagccgcaggctccttaggggaagaaatgtccattctgcagggctcactgggtaactggagcagaaggagggccattagaccctagtatctgtgtctgcgcctaggggtggagagagtggtgtctgctgggagcacagcggggctcaggggcttttgagtccgggaagggtgatcttcactccaacctgcttcttgggaccaggtgaggcttcgagctctgaggaagagcctccatccccagatgataaagagaaccaggccccaaaacggactggcccacatctgcgcttcgagatcagcagtgaggatgggttcagcgttgaggcagagagcttggagggtgagtggggggagtgcagtggcaggagggagagtgtccataaaacaccatcctgactcagctctggctctgctgtctccccaggggcgtggagaactctgatcgagaaagtgcaagaggcccgagggcatgcccgactcagacatctctcctttagtggtaagga

SEQ ID NO: 21441 - DNA, 2300 bp, Homo sapien
tgtccctgaactgtggcctcctccatcctgtcctgctgcctgcccaccatctccaccagcaggttgcagggggaggtttctaagaggcctctcaaagtcagcctgtcccaaactgagccctccacctgcacgccaaacccattcttcttttgccttcgctgtctcagtccacagcagttttatccttccaggtgttcaagcccagcgttgtcccgacccccatcccccttcttcacatccacatctactacgtcagcatatcccgtctgccctgtttaatctattaaccctcgagaaatcccctaaatagctcataacatacagtgtacttggctctgtgcatgtgagcctatataataatatatttgtagctgggcacagtggctcacgcctgtaatcccagcactttgggaggccgaggcgggcggatcacctgaggtcagcctggccaacatggtgaaacaccatctgtactgaaaatacaaaaattagccgggcgtggtggtgggcgcctgtaatctcagctactcgggagactgaggcaggagaattgcctgaatctgagaggcacaggttgcagtgagccgagatcacaccattgcattccagcctgggagacagaacgagactttgtctcaaaaaatgataattttatgtttgtaacagttacagaaatttgctgcatctaaaaaaaatagatgtgcaaaatacaattctccagtattttaaattttgtgtgagaaacagaataatgacaggtagatgggatgtatggtacactgggtttgagtgagccataggcgtgtcctgaagagccaaaaggccccaagcctctgtggaatgcttttgtacccaagaagtcctgcagaagaggagccgcaggctccttaggggaagaaatgtccattctgcagggctcactgggtaactggagcagaaggagggccattagaccctagtatctgtgtctgcgcctaggggtggagagagtggtgtctgctgggagcacagcggggctcaggggcttttgagtccgggaagggtgatcttcactccaacctgcttcttgggaccaggtgaggcttcgagctctgaggaagagcctccatccccagatgataaagagaaccaggccccaaaacggactggcccacatctgcgcttcgagatcagcagtgaggatgggttcagcgttgaggcagagagcttggagggtgagtggggggagtgcagtggcaggagggagagtgtccataaaacaccatcctgactcagctctggctctgctgtctccccaggggcgtggagaactctgatcgagaaagtgcaagaggcccgagggcatgcccgactcagacatctctcctttagtggtaaggagtgggccccacagggggcagggagctggatgtctccccgagggcaccatgggccctccacatgacaggtgtgtcctcaacatctcccctcaggaatgagtggggcgagactcctgggcatccaccatgatgctgtcatcttcctggccgagcagctccccggagcccagcgttgccagcactataagttccgttaccaccagcagggagagggccaggaggagccgcccctgaatccccatggggctgctcgggcagaggtctatctccggtgagaggtctggggtgtgatgcctgggtcagggcgcccctatgagagctcttgagggtgggagttaactgtagaggttggaaactgaggcctggggaggagacactaggtcacttgaagagttatttctagagttagccaggctccgtggctcatgcctgtaatcccgccactttgggaggccgaggcaggaggatcgcatgagcccaggagttggagaccagcgtaggcaacatggcaaaaccccatctctaaaataaaaatttaaaaaagttatttctagagctgacatcagaaaaatgaaccccacccatttccctgttagctctgtcttcaacagtatattcctccttcccctgctgccacctgcaggaagtgcacctttgacatgttcaacttcctggcctcccagcaccgggtgctccctgagggggccacctgtgatgaggaagaggatgaggtgcagctcaggtcaaccaggtatggagtgtgagctggggggcgggtggtggtctggaagggtcttagagagtgagcaggggtgagagaggtcattctgagcaccagcctgggtgacactgctgtccctcaccagacgtgccaccagcctggagctgcccatggccatgcgttttcgtcaccttaagaag

SEQ ID NO: 21442 - DNA, 2300 bp, Homo sapien
tacaggcgtgagccaccactcccggctgactgttttttttttttttttttttttttttttttgagacggagttttgctcttcttccgcaggctggagtgcaaaggcgcagtcttggctcagtgcaacctctgcctcccaggttcaagcaattctcctttctcagcctcccaagtagctgggattataggcacctgccaccatgcctggctaatttttgtatttttagtagagatggggtttcaccacgttggccagcctggtctcgaactccggacctcaggtaatccacccatctcggcctcccaaagtgtggggattacaggcgtgaaccactgcgcccggtcattcccaagactcttataccctaagagtagttctgagctccatctggagaccagtacctaagtcccaatccccaaaccagcctgaacccctaatccacgaccagcctggattgccacccctgatactggccactgagttcccctgatactggccactgaggtcgtgtcttagaactctagttatttcagcaccctcctgcctcatcccagagcagagaggcaggcctgcaggatctctgcaccactcctcagggttctaacagaactctcaacgctcctattcccaggtcacccccgaggttccatactggccaccatccccgagagaggaaccatcggtgttcccctgatcactggcatggccgcttctgaggccctggcccccttacccttcacccccaacagggacagatgttcctggcaggacctctcctcaaagcccccttcactctcctgccccatccttcccaggctcccgggctccataatgtaatctgttcagcatggagaccttcttctaccgcccctgtcttaataaagctgcgtgtttcacttcggcatcaacttgcttttgctgtggtttggcatttccctccacccacacatgtgacgaaaaggggaaacaagactgggtcctggccacaacttcagctgaggaacttggcacggccagcttgggacccaggaccctaacggtactggtagggtggggacacctttgtgctgaaaaccttagcacctccatctgaggcttattcaagggggagagacctggttgtggcaggtgggaggagccctagccccaaggagattaggattcaaaggtgaggtgaggtgctgggaggtggtctccagccagtatggggctgactcctccgtgcctgccgaattgtgatgggagttagtaatgccttacacttaaacactgagtttactgtatgtgaggtgctgttttcagcactttagtttgtttttgttttttttaaggagtttcattcctgttgcccaggctggagtgcaatggcacgatctcagctcactgcagcctccacttcccaggttcaagcaattctgcctcagcctcccaagtagctgggatttacaggcatgcgctaccacgcccggctaattttgtatttttaatagagacagggtttcaccatgtaggccaggctggttttgaactactgacctcaggtgatccacccacctgggcctcccaaagtgttgggattacaggcatgagccactgcgcccggcggccagttttttttgtttttagagatgaggtcttgctgtgttgcccaggctggtctgtaattcatggctcaagcaatcctcctaccttggcctccctagtagcagggactacagacgtgagccactgcacttggcaaagtgctttgctgttttttttttttttttttttttttgtaaagatggggtttcattttgttgtccaggctgatctctcgaactcctgggctcaagtgatcctcctgtcttggcctcccaaagtgttgggattacaggcatgagccaccacacccagcccctgctttacttctaatgacggttctaattctccacaataaccctatgagacaggtgctatcattgtcttattttagggatggaaaagggagggtgggtgggtgaggacacggcagaggtgggatatgcattcttgcaatctagatccgcagccctgttagtcccctagtggccttgtgggcttctctgataaccggctcagttgggggatgagggctcgggggtagattcccggcttccgaagaggcgtgagaattctgttcccccacatcaccgcgtcctttcttctgcccgatttccccggaaagtgtagcagaggcgctgtgtttggaagtcccgctatcacggccccccagatggggcctggacgatgcctcctgacggccttgttgcttctggcc

SEQ ID NO: 21443 - DNA, 2300 bp, Homo sapien
cccaccccaggtcatgtgagtgacgtggaggtgcaggagcactatgatagcttcttcgaggtgagggttggtaggggcagatggggtttcttgtgggagctcagctgagttcctccccgtcttccacaggaggtgttcacagaactgcaggagaagtatggggagattgaagagatgaatgtgtgcgacaaccttggggaccacctcgtgggcaacgtctatgtcaaggtgcttgctgccccccacttagggcccagaagtggaggcgtttcaatgcctgatggtggccactgtaggctctcagcttgaatttcatcactaaatccagtccagccccagagcgggtagtgagtcccctgaagatctctgagttctcctgctgaccctgactgacatttcctgcagttccggagggaggaggatggagagcgggccgtggctgaactcagtaaccgctggttcaacgggcaggctgtgcacggtgagctgtctcctgtcactgacttccgggagtcatgctgtcgccagtatgagatggggtatggtagttcaagggtgggatgggcacttggaatcccagactttgaatgcgtggtaggggctgtcagtgacaatggcttcctccatctctctaccctctatgcagggaatgtacccgaggtggcttctgcaacttcatgcatctgcggcccatttcccagaacctccagaggcagctctatgggcggggacccaggcgcaggtacctcaggaccagcctgctatgtctcctcatgtcctaaggcccctatatcctcagatgagcctaaccctaagccccagtaaccacgttcccaagaatcttttttttttttttttttttttgagatggagcctcactctgttgcccaggctggagtgcattggcaccatcttggttcatggcaacttccgcctcccgggttcaagcaattctctgcctcagcctcccaaatagctgggattacaggcacctgccaccatgcccggctaatttttgtgtttttagtagagatggggtttcaccatcttggccaggctggtctgaactcctaacctcgtgatccacctgcctcaccctcccaaagtgctgggattacaggcgtgagccaccactcccggctgactgttttttttttttttttttttttttttttttgagacggagttttgctcttcttccgcaggctggagtgcaaaggcgcagtcttggctcagtgcaacctctgcctcccaggttcaagcaattctcctttctcagcctcccaagtagctgggattataggcacctgccaccatgcctggctaatttttgtatttttagtagagatggggtttcaccacgttggccagcctggtctcgaactccggacctcaggtaatccacccatctcggcctcccaaagtgtggggattacaggcgtgaaccactgcgcccggtcattcccaagactcttataccctaagagtagttctgagctccatctggagaccagtacctaagtcccaatccccaaaccagcctgaacccctaatccacgaccagcctggattgccacccctgatactggccactgagttcccctgatactggccactgaggtcgtgtcttagaactctagttatttcagcaccctcctgcctcatcccagagcagagaggcaggcctgcaggatctctgcaccactcctcagggttctaacagaactctcaacgctcctattcccaggtcacccccgaggttccatactggccaccatccccgagagaggaaccatcggtgttcccctgatcactggcatggccgcttctgaggccctggcccccttacccttcacccccaacagggacagatgttcctggcaggacctctcctcaaagcccccttcactctcctgccccatccttcccaggctcccgggctccataatgtaatctgttcagcatggagaccttcttctaccgcccctgtcttaataaagctgcgtgtttcacttcggcatcaacttgcttttgctgtggtttggcatttccctccacccacacatgtgacgaaaaggggaaacaagactgggtcctggccacaacttcagctgaggaacttggcacggccagcttgggacccaggaccctaacggtactggtagggtggggacacctttgtgctgaaaaccttagcacctccatctgaggcttattcaagggggagagacctggttgtggcaggtgggaggagccctagccccaaggagattaggattcaaaggtgaggtgaggtgctg

SEQ ID NO: 21444 - DNA, 2300 bp, Homo sapien
gcctggccaagatggtgaaaccccatctctactaaaaacacaaaaattagccgggcatggtggcaggtgcctgtaatcccagctatttgggaggctgaggcagagaattgcttgaacccgggaggcggaagttgccatgaaccaagatggtgccaatgcactccagcctgggcaacagagtgaggctccatctcaaaaaaaaaaaaaaaaaaaaaagattcttgggaacgtggttactggggcttagggttaggctcatctgaggatataggggccttaggacatgaggagacatagcaggctggtcctgaggtacctgcgcctgggtccccgcccatagagctgcctctggaggttctgggaaatgggccgcagatgcatgaagttgcagaagccacctcgggtacattccctgcatagagggtagagagatggaggaagccattgtcactgacagcccctaccacgcattcaaagtctgggattccaagtgcccatcccacccttgaactaccataccccatctcatactggcgacagcatgactcccggaagtcagtgacaggagacagctcaccgtgcacagcctgcccgttgaaccagcggttactgagttcagccacggcccgctctccatcctcctccctccggaactgcaggaaatgtcagtcagggtcagcaggagaactcagagatcttcaggggactcactacccgctctggggctggactggatttagtgatgaaattcaagctgagagcctacagtggccaccatcaggcattgaaacgcctccacttctgggccctaagtggggggcagcaagcaccttgacatagacgttgcccacgaggtggtccccaaggttgtcgcacacattcatctcttcaatctccccatacttctcctgcagttctgtgaacacctcctgtggaagacggggaggaactcagctgagctcccacaagaaaccccatctgcccctaccaaccctcacctcgaagaagctatcatagtgctcctgcacctccacgtcactcacatgacctggggtgggggcgggcagggtggaatcagagtgtagcctactgggggctgttcaccttgcccccaggcctggtcccttactcacagtgtgatccgtctgcagtttgggctgtgttctgtggattccggtacaggttgagcagcactatggtctgcacagaatttaaaaggggcggggcctgagctcagagggcagggctgcatgaacagagagtgaggcatgaaggttgggggtggaaccttacaccccagcctaagcatcatgagtgcatcggcgatcctttgcccctaagaaaccagaaaagggatggaggggactggcaaggatgaacagcgggatggaagggactggcaaagatgaacagccgccgtgtgtagcctgtacgcatgggggcgcgaccaagttcccgggaaaacggcacgaagaccggtgggaggagcctgcagaaaggtccaatgagaaaaaaagccgggcggtggggagggactcaggaacccggaataggcgggacatggtgacgacggccccagaaggggaagggccagggagccgttaacccccgaggctccgtgccgggtctcacctggctgaatgtcggcttgttgtgaagccgggagcaccggtccccgtgccggcagaccccgatcttaaagtaaaaagagcagttaaccctggaaaaggtgcaaagacaaaggtgaaccgagggccggggaagctgggcaccccagaaacaccgccccaccacccaggaccccagtaccccggccccgaccccccgagagtccactcccagcgcccgttctcacttgtccttctcagtcccgaatatcgaagctaaatattcagccatttttacccaagccctccaggtctggctgctcttacgtcacttccgttgcttaggagcactgggaagtgtagttcgttgccctctccaggcgcttaccaagcgctcggaaacgccccagggcgcttgcgcgtgggaggcgcgcgccctccccatagactccccggtaggagttcttttaacagcgcatgcgtgcagtgttgcctcgcccaaagaagactacaatctccagggaaacctggggcgtctcgcgcaaacgtccataactgaaagtagctaaggcaccccagccggaggaagtgagctctcctggtgagttgggggtcgtttcgcccaccctagtaaatataaagagctctttaatccagccagcttactagtgggggtggggatgccctgctttc

SEQ ID NO: 21445 - DNA, 2300 bp, Homo sapien
ggaggtgagcactatcacccagaagaggaagcccacagctgagcgccagacatctgtcatgggaaacagaagctggaagggttggcctccggctgctctccagacttccctagaccagccttcccttctcacccagagccccaacattttggatcctccattgtcccttcccaccaagattccccgcttccccctctcccctgccactggcctccctcctctgtgctctagactcacagcctttgatttggctctgttctgtgtaggctgggacaaggaaggcctctcggaagaaccagaagatgttgaccaaccagagaaaaggcaggaaagcaaacccccctagggagaaagaaaaacaaacaaacaaaccccaaaacctcataaggcaatgaagatcttctccaactcccaccgagatctatttggaagaaactctcccacacccaagttcaaatggagatttctgttgtcagggactcaggaatctggctcctctttgggatccaggaatctgattcctcaaccatctctttcacaggacccaagagtccaggccctcaatccccctcctctcttgggatccagaaattgaggccccagcttcctcattcctcaggacccaggccctccccactcaaatccaggagtcggcgttcgcaggtccttcatctcttagacttaagaatccaggccccgaggccctcttccctcgggtgctctagtccagtcccctctcttctcctgggaccctagcgatctgccttacccaggtagtacttccggcacaggttcaatttctcctcattggacactcgctccaggttcatagctgcgctggggccgggtcgtcccaagggtctgcggggcaagacccaagccttgaccctaagtaacagatgcaaggatcacgaacaaccacgcccctattagaacaaatcagagataaatgtaaaggtcggtttgctgaaagcagggcatccccacccccactagtaagctggctggattaaagagctctttatatttactagggtgggcgaaacgacccccaactcaccaggagagctcacttcctccggctggggtgccttagctactttcagttatggacgtttgcgcgagacgccccaggtttccctggagattgtagtcttctttgggcgaggcaacactgcacgcatgcgctgttaaaagaactcctaccggggagtctatggggagggcgcgcgcctcccacgcgcaagcgccctggggcgtttccgagcgcttggtaagcgcctggagagggcaacgaactacacttcccagtgctcctaagcaacggaagtgacgtaagagcagccagacctggagggcttgggtaaaaatggctgaatatttagcttcgatattcgggactgagaaggacaagtgagaacgggcgctgggagtggactctcggggggtcggggccggggtactggggtcctgggtggtggggcggtgtttctggggtgcccagcttccccggccctcggttcacctttgtctttgcaccttttccagggttaactgctctttttactttaagatcggggtctgccggcacggggaccggtgctcccggcttcacaacaagccgacattcagccaggtgagacccggcacggagcctcgggggttaacggctccctggcccttccccttctggggccgtcgtcaccatgtcccgcctattccgggttcctgagtccctccccaccgcccggctttttttctcattggacctttctgcaggctcctcccaccggtcttcgtgccgttttcccgggaacttggtcgcgcccccatgcgtacaggctacacacggcggctgttcatctttgccagtcccttccatcccgctgttcatccttgccagtcccctccatcccttttctggtttcttaggggcaaaggatcgccgatgcactcatgatgcttaggctggggtgtaaggttccacccccaaccttcatgcctcactctctgttcatgcagccctgccctctgagctcaggccccgccccttttaaattctgtgcagaccatagtgctgctcaacctgtaccggaatccacagaacacagcccaaactgcagacggatcacactgtgagtaagggaccaggcctgggggcaaggtgaacagcccccagtaggctacactctgattccaccctgcccgcccccaccccaggtcatgtgagtgacgtggaggtgcaggagcactatgatagcttcttcgaggtgagggttggtaggggcagatggggtttc

SEQ ID NO: 21446 - DNA, 2300 bp, Homo sapien
ggaaggattctctgagaaagctcttgactatttttatttttgcagacaacacttccttcagaaaacgggaaacttccatttgtcacacgtcttggtccagataaatcccaggaagtagcatcgtgatctacacttctgatgagaatactgcagcccacagtaggaaagttatatttttgaattcacgactaccagtacaggataacagcccctagaaatggaagcactaggccgatcctaccactgcactccagcctggctgacagagcaagactctgtctcaaaaaaaaaaaaaaaaaagaaaaaagaaaaagaaatggaagcactattcctttcttagtttctcatctaatagtttcctgagcaggaaagttcctagttcagaagattatgagtagtatgcactgtaaaaaatgtacatcatgtctaaatactaagcctcgtacaaagctctcaacagatgtttttaaatattaataatcatttatgcctcaacctctaaaagatcccaggaagtcagtatcgaaagttagggtcctttattgggggatgtcagcagagaacgtgggacatgaaaacaagtcttaggagtttgagaaggggctcccaggacaggctcctctgctttaaggagcctgtcctgggagaataagcagggccccagtatgtgcagaagttgtcagggggtgcccaggggtatggtgaaggagaggtagtccccaagggcaccccagcggggccggtagatctggaagatggtgatccaggaggtgagcactatcacccagaagaggaagcccacagctgagcgccagacatctgtcatgggaaacagaagctggaagggttggcctccggctgctctccagacttccctagaccagccttcccttctcacccagagccccaacattttggatcctccattgtcccttcccaccaagattccccgcttccccctctcccctgccactggcctccctcctctgtgctctagactcacagcctttgatttggctctgttctgtgtaggctgggacaaggaaggcctctcggaagaaccagaagatgttgaccaaccagagaaaaggcaggaaagcaaacccccctagggagaaagaaaaacaaacaaacaaaccccaaaacctcataaggcaatgaagatcttctccaactcccaccgagatctatttggaagaaactctcccacacccaagttcaaatggagatttctgttgtcagggactcaggaatctggctcctctttgggatccaggaatctgattcctcaaccatctctttcacaggacccaagagtccaggccctcaatccccctcctctcttgggatccagaaattgaggccccagcttcctcattcctcaggacccaggccctccccactcaaatccaggagtcggcgttcgcaggtccttcatctcttagacttaagaatccaggccccgaggccctcttccctcgggtgctctagtccagtcccctctcttctcctgggaccctagcgatctgccttacccaggtagtacttccggcacaggttcaatttctcctcattggacactcgctccaggttcatagctgcgctggggccgggtcgtcccaagggtctgcggggcaagacccaagccttgaccctaagtaacagatgcaaggatcacgaacaaccacgcccctattagaacaaatcagagataaatgtaaaggtcggtttgctgaaagcagggcatccccacccccactagtaagctggctggattaaagagctctttatatttactagggtgggcgaaacgacccccaactcaccaggagagctcacttcctccggctggggtgccttagctactttcagttatggacgtttgcgcgagacgccccaggtttccctggagattgtagtcttctttgggcgaggcaacactgcacgcatgcgctgttaaaagaactcctaccggggagtctatggggagggcgcgcgcctcccacgcgcaagcgccctggggcgtttccgagcgcttggtaagcgcctggagagggcaacgaactacacttcccagtgctcctaagcaacggaagtgacgtaagagcagccagacctggagggcttgggtaaaaatggctgaatatttagcttcgatattcgggactgagaaggacaagtgagaacgggcgctgggagtggactctcggggggtcggggccggggtactggggtcctgggtggtggggcggtgtttctggggtgcccagcttccccggccctcggttcacctttgtctt

SEQ ID NO: 21447 - DNA, 2300 bp, Homo sapien
gagccaaatcaaaggctgtgagtctagagcacagaggagggaggccagtggcaggggagagggggaagcggggaatcttggtgggaagggacaatggaggatccaaaatgttggggctctgggtgagaagggaaggctggtctagggaagtctggagagcagccggaggccaacccttccagcttctgtttcccatgacagatgtctggcgctcagctgtgggcttcctcttctgggtgatagtgctcacctcctggatcaccatcttccagatctaccggccccgctggggtgcccttggggactacctctccttcaccatacccctgggcaccccctgacaacttctgcacatactggggccctgcttattctcccaggacaggctccttaaagcagaggagcctgtcctgggagccccttctcaaactcctaagacttgttttcatgtcccacgttctctgctgacatcccccaataaaggaccctaactttcgatactgacttcctgggatcttttagaggttgaggcataaatgattattaatatttaaaaacatctgttgagagctttgtacgaggcttagtatttagacatgatgtacattttttacagtgcatactactcataatcttctgaactaggaactttcctgctcaggaaactattagatgagaaactaagaaaggaatagtgcttccatttctttttcttttttcttttttttttttttttttgagacagagtcttgctctgtcagccaggctggagtgcagtggtaggatcggcctagtgcttccatttctaggggctgttatcctgtactggtagtcgtgaattcaaaaatataactttcctactgtgggctgcagtattctcatcagaagtgtagatcacgatgctacttcctgggatttatctggaccaagacgtgtgacaaatggaagtttcccgttttctgaaggaagtgttgtctgcaaaaataaaaatagtcaagagctttctcagagaatccttccttgaccatccatcttatttaaaattcaatcaccaccttgatattcctatgtccctttcaggctacactttttttgtgggttttttttttggggggggagaggggtttgttgttgttgtctgtttgtttttctagatggagtcttgctctgtcacccaggctggagtgcagaggtccgatctcggctcactgcaacctccgcctcccgggttcaagcgattctcctgcctcaaactctcgaatagctgggattacaggcgcatgccaccatgcccggctaatttttgtatttttagtaaagactgggtttcaccatgttggccaggctggtctcgaactcctggtcacaggtgatctgcctgcctaggcctcccaaagagctgggatttacaggcgtgagccaccatgccccgcccagatcatattctttctcctattacatttcacttaaaatttacttgtttactgtttatcttccctcctttaaaagataagctccattagcgcagggatttttgtctattctgttcctcaaggtgtctccaatgcctagaagagtgcccgacacactaataaatatttgcaaaatgaatgaagttgtacctgcaaagagattaacagatacctggcacctagcgagtgctcagtgagagggaacccaacgttattttacattagtcttcctcttagggatgaagggaccccaacggttggttaaatccggtaaagagctaacttggtgttgctcaacccttctcacactacaagtcccgggaagcctcgcgatgccctaatcctttgtttcccaccgtgccccgcgcggcgcaggcgctgttactcagggtgagtctgggaagctggaactacacctcccaggaagctagggggtagatggtttgtttccggaagcaaagccccaggtgggtgggacctaaagctgggagactacggaggcagctctcaattggtcaggatgcgagattgacggctgcaataactaataggaacaagctactgccgaaggggcccgcccacagaagggtggtggccacggtccaggctggacacaaccaaaggcggaggacccgtggcccacgaagctcatctttgaactgtccccgccttctcccgccttgacttgtgaccctaggccctttggggcgcctctgacccagctagccagatcccggacccaaaccatgttccctgtgaaggtgaaagtggagaaatcaggtgaggaccctgacgtcgggggcctgtcgggaccatcgggttgacagg

SEQ ID NO: 21448 - DNA, 2300 bp, Homo sapien
gctgggccgcgcccgcaccccgggagcctcctcaggctccctctattaaagccgatctgactccgcccagccagatgtcccgagtgcgccaaggactgtcctctcacccactcctggattctgccctgacctccatcctggacactgccttgataacatagacccttccactgacaccctcgctctcacaccccctccagctttccgaccccacaccgacaactccccggcttccagaccctaccagcactaccctaaccctcagccgacagtctcagccccaccgacccactttcttggcatatagccccacttaagacccctcctctacttccttctgagtcctctacaaagacatccgggtactacatttccatcccttccctattttgacaccaaattatggtgtagacagccctcccccaaccccaggccagtcaggcacaatccccccaccccccaaacgtcctggactgcacagacctcccactccagaccatccaggcctggttcccaagacccgatccttcccctgcaaccagacagtctacaactgccccctccagcccattttctgccgtgaaaccccagccagccacaccagactctggaaccctttttcgactgccccaactcttggacaccaggccaactagaacacccaacaccaaactgtacagactctcccaccccaacctccccagactctgcacggatgtcctaggccccctccccaactctaaccagaccccatccccctaagtccctttgtcttgacccccaagtcttcaaccagatatcctcggcaacccacctcccaccctcctcctcttctccttcaagacccaactgagcacccgctctgattccccacagcctttctccctgccaccactcccttagtctttcccaggcttactctcccaataaatgtgctagagctctgccaactgctttgtgcctgggccaggaaggagggaccggagcagacaccagtgtggagctgggggatgtttactggtgtggggggacctgggaacatcactgtcgttcgtacatctctcgtaggatcttcatgctttctgagtaacgaagctggttccgatgagaggcctccttccacctggggaggcagaggggagactcagcagttgcaaagggccctacgaggggcaagcaggctgggggacgctcacctctggcggatgcgtttccagcgctgcatgttgcgatagatgagtgtggagggtgagggctcgggctcagagggctgcatggacagacaggccaggttgagtggccattcctgagccctaccgcatgtgccccataaccctgggccagcctggcatactcacctcatcgtcaggggtgccctgcatctcaggctgcagtggagatgggatgcgggatctgcaggcatctccgggtggccccgggggtgtgggtggcggcagcttgtacacatcacgactcttgctgttggttacctctgagccctggggacacaagggccccatgccaggcccaagagagtcaaagcagaggggctgggaatccacattcatccctcctgcctttcccagcaacaaatggcatgaggggctcgctaagggactcagacaggaggcatgtatgaagggcagacacctcaaccagccagcgggtcaagtgtgcctgccccagggacccctgtcttctcctatccagcccagagactccatctacacctgtcagcccagggagtcgcgtctgcctgcctcagggaatcctgtctagggggtcacgtctgtgccacctaggaagctctgtccatttctgacagtcctatatgtctgaagggtcctatatgtctgtcctggggacccttgtctaccccgctgggtcagatggcttatagactcccatccattcctgcccagcccctgctcctcaaggcctggtggccacttctgtctgtactaaggacccttgtctagcccctcggctcttgggaacccctgatcttggaggtccacatctaactgtccagggtaaccctgttccctgtctcccaggccaggtggttacgtatgtcttccctagggactctgatccacaccccaacctaagagtgcacatctgtgtgcctagcctgatccaggattcacgtgagggacctgtgtctgtctatcccactagcttaggggcaggatcctttgagcctatccacccactgccctggcaccaggctgctgggctgggacccactacccatcccacctcctcatcctcaggcagcgggggcaggggtgagctgg

SEQ ID NO: 21449 - DNA, 2300 bp, Homo sapien
ccccctgtaatatctgggattgccctctcccccgcagtgatgaggctcccttcccctgcaaggtcaggaacctctgccctcccccggtgtcagcgaatccgaagtcatcgtgccccccagggcactgattccccagctccctcctcagagccccgggtcccttctccgccagccccgccaaactcgccaagatgcccctttccccgtctccagggtcctctgcctactctcccactcgagtcacgggacctcggcagctactggtagccttcccccacttcagagtggccgggaacccttcctcaagtcgcagggccctctcccctcctcttctggagatatcgggccaccgcacacagtctctcaactcttccccgagactaagaacattccttcccctcaggagtcactgcccgcctccttttccccagatttcccggatcaccagcctccttcagagtaagcaagactccccttagagtgacccaggccttccattctctggagagctgagagccccccaccccgccccccacctaagagcgacggggacctcccacccgctgcagtgtgcgggcctcagattcccattgactccggaagcccttcggagctgcggactctccaccccgcccaaggccaacgaacattctctcacatgttcccaccccaggctgccccagacccctggcaatggaagtggtcgagttcacccctccccaggcctggcacctgggcgacgggcagcgccacgctgggtgcgcgcaggtagtagggggcgagcgtggtggggcagagcgcagccagctcggcctccagcagcccctcgccgaagcgctggtcaaagaggcgtccgggcgccgaaagtccgggcaacggggccgaggcgcggcgcagccaagacggctgcacaggcacagggatctccatcctgctcctccgcgttgcagtgcccctgcgtgcgcagccgctcatttatagtgcgccctgtgccggcccctcggagggctgcccagggacactgggaccgtggccagacccggccattaggagagccttatttagaaacccaaacaatgacttggccatttattaagcgcctgctggatgcctggcaaatgctgtcaagaaggtgacatgaagattccccaatttccagaagaggaaactaaggctgaggagggggagccttgcgggtgtggggagcacagcgtggtgattggggcccaggacccaagaggcccacggaagagtttccagtccctttaatccactgcctcccccctggcagctctgaggatgacgcagatggaggtctttaggagcagattcctggagaatgcggtagccccgccaggatgtcaggaggacatagaacaggccctccctacccttatcctcagccagaccttgggcccagtcccccggcaggccgggcctaattctgtgcctctgactcagcctctggtgcgcagaggccagggggcgcgagcatgaacagttcaggctggccccccgggggccgcgcgctggggctggaaatagctcattttgatcccgctacctcggccaggagcccagacctggcaactgatgcaaccagctgctcctgcagcaagaaagaagttagatgaccgttgggacggactgattggcccaactgatggaggaatagcggttagagagagggcagagcgcgccccccccccaacccgccccactgcccctgcaacagaaagaatggtagttagaccggggtcgggacaggacttctgcagcaagaaggcgcttaaaaagcgggacttttaagcgagggtactttagatcacctcctaaccgcaagcccagcctcagatccttcccattggtgcacggtcttgccaattactgctacactcggcaggttctccaatcaaacacgccctgtcgggcaggcagtcgtcccagccaatcctgaaacacctccctccgggtacttctgtttcctctctttcattggtcgccttggaggccgctcgcctccggcgcgggcacagagaggggcggggctgatagggcgttgctaagcgacggagatgcgcgcggggcctgttgggtgaaggagcagagcggccggaagcgcggagggagccgcgggatggaccgcaggtgaggccgatcgctcttccagggactacaggaggctggggaggaccaacggcgagagcagcacagcctaggacgggctggatacggtctggagtcgctagggctccaccgcactggaactacaattcccaacatgctccacagccgttggc

SEQ ID NO: 21450 - DNA, 2300 bp, Homo sapien
aggaactgacagccggtggttctcaaccctggatccagtctaggaggggcttttcaacgttacaggcgcgcggttcccattccagaccaacagaatcagaatatctattagtggggctgggcctccgtgtcttttccgcagcgtcccaggtgattgcgaagtggagttcaggttaagaatcgcggctcgccgggcgtggtggctcacgcctgtaatcccagcactttgggattacaccgaggcgggtggatcacttgaggtcaggtgttcgagaccagccttactaacatggcgaaaccccgtctctactaaaaatataaaaaattagccaggcgcggtggcaggtgcctgtagtcccagctacctgggaggctgaggcatgagaattgctttaacccgggggcagaggttgcagtagccaagattgtgccactgcactccagtctgggccaacagagcgagagactctgtcttaaaaaaaaagaaagaaagaaagaaccgcggctggattatatcaccgagcatttcccatacattcctgggggacacgaaggcaaagggtagatggactacaagccccaggatccactgggctccgcctccgcgagaaagttcaaagacaacgcccaggcgtgtctgggggccatttcaaaatgaagaaattcagatctcaagcctttcttggacacctttagaggcaataattccttggggcccactcagagaggaacataagactcttaggggacccccgggatgctaacggctacggctggagaggccaacggctgtggagcatgttgggaattgtagttccagtgcggtggagccctagcgactccagaccgtatccagcccgtcctaggctgtgctgctctcgccgttggtcctccccagcctcctgtagtccctggaagagcgatcggcctcacctgcggtccatcccgcggctccctccgcgcttccggccgctctgctccttcacccaacaggccccgcgcgcatctccgtcgcttagcaacgccctatcagccccgcccctctctgtgcccgcgccggaggcgagcggcctccaaggcgaccaatgaaagagaggaaacagaagtacccggagggaggtgtttcaggattggctgggacgactgcctgcccgacagggcgtgtttgattggagaacctgccgagtgtagcagtaattggcaagaccgtgcaccaatgggaaggatctgaggctgggcttgcggttaggaggtgatctaaagtaccctcgcttaaaagtcccgctttttaagcgccttcttgctgcagaagtcctgtcccgaccccggtctaactaccattctttctgttgcaggggcagtggggcgggttggggggggggcgcgctctgccctctctctaaccgctattcctccatcagttgggccaatcagtccgtcccaacggtcatctaacttctttcttgctgcaggagcagctggttgcatcagttgccaggtctgggctcctggccgaggtagcgggatcaaaatgagctatttccagccccagcgcgcggcccccggggggccagcctgaactgttcatgctcgcgccccctggcctctgcgcaccagaggctgagtcagaggcacagaattaggcccggcctgccgggggactgggcccaaggtctggctgaggataagggtagggagggcctgttctatgtcctcctgacatcctggcggggctaccgcattctccaggaatctgctcctaaagacctccatctgcgtcatcctcagagctgccaggggggaggcagtggattaaagggactggaaactcttccgtgggcctcttgggtcctgggccccaatcaccacgctgtgctccccacacccgcaaggctccccctcctcagccttagtttcctcttctggaaattggggaatcttcatgtcaccttcttgacagcatttgccaggcatccagcaggcgcttaataaatggccaagtcattgtttgggtttctaaataaggctctcctaatggccgggtctggccacggtcccagtgtccctgggcagccctccgaggggccggcacagggcgcactataaatgagcggctgcgcacgcaggggcactgcaacgcggaggagcaggatggagatccctgtgcctgtgcagccgtcttggctgcgccgcgcctcggccccgttgcccggactttcggcgcccggacgcctctttgaccagcgcttcggcgaggggctgctggaggccgagctggctgcgctctgccccaccacgctc

SEQ ID NO: 21451 - DNA, 2300 bp, Homo sapien
tgtgccccctcaatatatatacctaaatatacctgttatgtacccagaaaaattaaaaaataaaaaaaaaaatcactgcaggggttgatggggaaacactagacagaaggaatatcgtgtgggaaatccctgtgatgagagtgaggtcagcaaatttagtacataagtaactgcacattcacctctccctcagcactccctttcaccagcccttgcttaattattctccatagaatgaatcaccttctaatattttttttttttttcagacagagtcttgctctgtctcccaggctggagtgcagtggcaaaatctcggctgactgcaacctccgcctcctgggttcaagcaattctcctgtctcaggctcctgagtagctgggattacaggcacacgccaccacacctggctaattttaatatttgtatttttagtagagacggggtttcagcatattggccaggctggtctcgaactcctgaccttgtgatcctcccgcctcggcctcccaaagtgctggggttacaggcgtgagccactgtccccagctttttttttttttttttttttttttttttgagacagagtctcacttcaacacctaagctggagtgcagtggcgcgatctcggctcacagcaaactctgccacctgggttcaacccattgtcttgcctcagcctcccaggtagctgggattacaggcacgcccgccgccacacctggctaatttttgtatttttagtagagacggggtttctccatgctggccatgctggtgtcgaactcctgacctcaagtgatctgcccgcctcggcctcccaaagtgttgggattacaggcgtgagccaccacgcctggcctaatattctatattttgtttaatgttaattttgttcattgtcttctcccagtagcttttgagctccaatgtgggcagggtatattttctcctggtttggttgttgatgtatgtacaaattgattagagtttgagtgaatgaatgaatgaatgaatgaatgaacagaccaagaccctctgagatgagaatttgttgagggcatgactaaggagagaccctcctgtgaagggcgttattacagtgttatctgggcatgctcagtattagcaggctccattgggaatggctttatggggggcataagcatgatctggcatttccccctaagcattttcctagaaaaaaaaaatcaaggctggagattggcccgtaataagcagtagaaggggaaacaagaaaatgtccagtgggcaggggaggccaaatcgcagaaagcctcgggttacgtcctaggcaaggtatatgaggcaacgagaaacgtccatgggcggagcgtcctcggcattatgtgagcggggtcgggatcaggactgaaaaggtgagacttgggactgggactttgaaaagctgcttaaggaactgggcactgctctgaggccgtgggagaatccaattaagactatcaggggctggctggcgtggtggctcacgcctgtcatcccagcgctttgaaaggaggctgaggagggagtatctcttgagccccagagatcaagaccatcctgggtaacatagtgagacccccatgtctaaaaaaaattagccaggcgtggtagcgcacgcctgtagtcccagctacatgggaggtatcgcttgagcccaggaggttgaggctgcagtaagccacgattgcaggactgcgctccagcctgggcgacagagtgagaccctgtctcttaaagaaataaaaataaaaaagtcagaagaatggacactgggagtggacgaaaggtagggtccattgcttggtgttggaagtgtcggaagcaaagcataaagaacctgggggcttgtctcaggagggcgatgacagccaatgaaaagcagtcatgggcgtggcgctgtcaaacttcgaggggcgggaccgaggacacagagccggggcggagcccaaggtgaaaccaatgagaagcctccgggtgggcggggcatcggcctaaggccaagggcggagccaatgagaagcagcgccgcgttcccgctgccccccgcccccgtggggcgcgcgccggagccacgggcagccgttaggggcggggtctgcagccgcccgcgcgcggctcgcgccctcccctttgtgtcgccatggcggcggcagcggcgacgagaacggcgagcgaggggtcgagcgcggccggggcctgaggaggctacgcgaccatggtggtaagggtcccacgcggccgtcagcctgtccgtccggatgtcagtctgtc

SEQ ID NO: 21452 - DNA, 2300 bp, Homo sapien
tgctgtcctgcactgacgccgcctccttggggaagggctcatcttgacctcagccagcccaagctaggggttttgcagttcaagagagatcgttaggctgggagtggtagctctcgcctatactcccagcgctttgggaggccgaggtgggaggcgtgcttcagtctaggagttcaagaccagcctgggcaacatagcaatattctttctctacaaaaaattaaatcagtagggcatggtggtgcgtgcctgtggtcccagctcgggaggctgaggcaggaggatcacttgagcccaggggtttgaggctgcagtgacctatgactgcaccactgctctccagtctgggtgacagcaagagactgtgtttaaaaaaaaaaaaagaaaagaaaagaaaaagaggccgggcacggtggctcacgcctgtaatcccagcagtttgggaggccgaggcgtgtggataacgaggtcaggagatcgagaccatcctagctaacatggtgaaaccccgtctctgctaaaaatacaaaaaatagccgggcgtggtggcaggcgcctgtagtcccagctactcgggaggctgaggcaagagaatggcatgaatccaggaggcagagcttgcagtgagctgagatcacgccactgcactccagcctgggcaacagagtgagactcagtctcaaaaaaaaaaaaaaagaaaagaaaaaaaaaaaaaagatcgttagacacccattgagcatagccagggcattgacggaggactaaggaagcctccctcacctctgaggcagaccatcctgggttgggtctggccagtgactgatgcagaactttcttcatcccaggggatgcctaaaggaagggcacacatggggagcagacaccaaggcactgaagtcaaggggctcggcccaggccacttggcgagggagggacagaagaaagagccaagccattctctcagttaataagcattgaatgaaactaggtgcagtgactcatgcctgtaatcccagcactttgggagaccaaggcaggtggattgcttgaggtcaggagtttgagaccagcctgggcaacatagtgaaaccccattatctctcaaaaaaaaaaaaaaaaaaaaaagaaagaaagaaattagctagccaggtgctgtggctcacacctgtaatcccagcactttgggaggctgaggccggcggatcacgaggtcaagagatcgaaaccatcctgcccaacatggtgaaaccctgtctttactaaaaatacaaaaattagccaggcgtggtggcactcgcctgtaatcccagctacttgggaggctgaggcaggagaatcacttgaacctgggagatggaggttgcagtgagccaagatcgtgccactgcactccagcctggcgacagagcaggactccatcttaaaaaaaaaaaaaaaaattagctaggtgtggtgggtggcctgtgcttgtagtcccagctacttgggaggctgaggcaggaggttggcttgagccctggaggtggaggctggagtgagctatgatcttgccactgcacaccagcccgggcaacagagtgagatcctgtctgagaaaaacgccaggtgcagtggctcatgcctgtaatcccagcactttgggaggccgaggcgggcagaagtcaggagattgagaccagcctggccaacatggtgaaaccccgtgtctactaaaaatacaaaaatgagccgggcatggtggcgtgcgcctgtaatcccagctactcggaaggctgaagaaggagaattgcttgaacctgggagatgcaggttgcagtgagccgagatcgcgccactgcacgccagcctgggcgacagagtgagaataaaagcactgaatgaggcctcttttgagctaggttctggggtgaacaacgctgtgaacacaacagtgacaagaacgacccaaggccctgccttacagggcttagtccggtgtgggtagacagccccgtcctcagacagtgacagccccgactggtcagggctgtggggcccaggctgagtggctggggctgtgttggggaaggggatgctactgcgcaggcgctgcgggaggccactggtgctcaagcacctcggattcccgctcatacagccggccggatcatgtggcagtcaggtggcgaccactatctagcccaacggtgagtgcaaagccaccaggactggggtgtgggcccagaactttcccagagctttctgggccctcagatcaccctcagacccttcccccagccctcaggcccctcccaccctgt

SEQ ID NO: 21453 - DNA, 2300 bp, Homo sapien
ctatcttgttccagacacggtgctaggggccgaggaagcatgaaggcaaaatccctgacctcgaggcacttacttgcaagtcaggggcaagagacaataattaaaaccaaagtcagaatcccagcactttggaaggctgaggtgggaggatcgcttgagtccaggagactgagaccagcctgggcaacataggaagaccttgactctacaaatagtaaagaattagcccggcatggtggtgggtgcctgtggtactaggtacttggaaggctgaagcaggaggattgcttgagctggggaggtggaggctgcagtgagccatgatcgtgccactgcattccagcctgggcaacacagcaagaccccgtctcagcaaaacaaaagtcagtacgtaacaagtaagggaaaataaggctgaggaagaggaaaagaagttgccaatgtataggtgggaaaaccatgttgagaaagtgacattagagcaaatacttgaaggaaacatgggagcaggtaaagggctggaggtgggaaggtgccctcgtgttcaaagagtagcagggagggctgagcacggtggctcacacctgtaatcccagcactttgggaggccgatgtgggcagatcacttgaggtcaggagttcgagaccagcctggccaacatggttaaaccctgtctctactaaaagtacaaatattagccgggcatggtggcgggcgcctgtaatcccagctactcgggaggctgaagcaggagaatcacttgaacccaggaggcagaggttgcagtgagctgagatcatgccactgcactccagcctgggcaacagagcaagactctgtttcaaaaaacaaacaaacaaaaactgaggcccagaaaggttacataacttgcccaaggtcacacagtaggtggtgaagcctggattcgagccctgattctaggctcataaccccctcaataaatagtacctaactgatattgctcatttttagatttctagcaacttataagcttttccccacttcccctgctgccccctagaacctccaggtctcctgcctcaatgctgagcagaaccagcacctccgggcctccctcagccgcctgcatcgggtggcacaggtaacccctcctgctggaaccagcacctccgggcctccctctgccgcctgcattgggtggcacaggtaacccctcctgctggaaccagcacctccgggcctccctcagccgcctgcatcgggtggcacaggtaacccctcctgctgggatctggctccactgcccctgctggacacccggggccctgaccgtcgtctctgtcgccatcagtatgcccgggcccagcacgtgcggctcctggtggatgcggagtacacctcactgaaccctgcgctctcgctgctggtggctgccctggctgtgcgctggaacagcccgggtgaaggcgggccctgggtgtggaacacctaccaggcctgtctaaaggtgtgcagtgtgttccaggaggtacaggctggggtccccacaccctgacctaccagaacctgcctgcgtgccctataggacacattcgagcggctggggagggatgcagaggctgcgcacagggccggcctggccttcggagtgaagctggtacgaggtgcatatctggacaaggagagagcggtggcccagctccatgggatggaagaccccactcagcctgactatgaggccaccagtcagaggtaggcccgggccagctggcctctgcaggaaataataacacctagtggttgggtgcagtggctcatacctgtaatcccagtgctttgggaggctgaggctagagattcacttgagagcaggagttggagaccagcctgggcaacacagggagaccccatctctaaaaaattttaaaaatagtcaggtgtggtagcacatgcctgtggttccagccacttaggaggctgaggtgggaggatcacttgaggccaggagttcaaggctgcagtgagccatgactgcaccactgcacttcagcctgggcagcagagcgagaatctgtctcaaaacaaacaaacaaacaaacaaacaaacaaaacaaaacaaaaagaaatccttacagtggcctctaagccccacatgctccctgtcacttccctaactttccctccctctcttcctctccctcactccactacagccacactggcctcctccatgttacccaggggcttggcacatcctgtttccactgcctgggacattcccactgcagacagtggcatggccccatccctcacctcc

SEQ ID NO: 21454 - DNA, 2300 bp, Homo sapien
aactcaggaggcggagcttgcagtgagccaagattgcgccactgcactccagcctgggggacagagcaagactccgtctcaaaaaaaaaaaacttacaatgtgagggccaggtgccgtggctcatgcctgaaatcccaacactttgggaggcccaaggtgagaggactgcttgagtccaggggttcaagaccagcctaggcagcatagtaagactctgtctctaccaaaaaaacaattaaaaattaccctcggtgtgatcacatgcacctgtaatcccagctacttgggaggtggaggtggtgggtggggggattgcttgagcccagaagtttgaggctgcagtgagcagtgatcaccccactgcactccagcctggaagacagagcaagactctgtctcaaaaacaaaacaaaaaaaaccttacaatgtgaacaactatgaatcatcatccatgttaagacctaggactcctaggacctagaagccactgccaggcacagtggctcacacctgtaatcccagcactttgggaggccaaggcaggtggatcatgaggtcaggagttcaagaccagcctggccaagatggtgaaaccgtgactctactaaaaacacaaaagttagccaggcgcggtggcagacgcctgtaatcctagctactcgggaggctgaggcaggataattgcttgaacccgggggcagaggctgtagtgagccgagatcgtgccactgcactccagcctgggcaacagagtaagactctgtctcaaaaaaaaaaaaaaaaaaaaaaaaagacctaggacttcacgcctgtaatcccagcatgttgggaggacaagtagggtggatcacttgaggtcaggagctcaagaccagcctggccaacatggtgaaaccccatatctacaaaaatacaaaaattagccaggtgtggtggtgggtgcctgtagtcccagctactcagggggctaaagcagaagaatcacttgaacccgggagatgggggttgcagtgagccgagatcgcaccactgcactccagcctgggtgacagagcaaggatacgtctaacaaaacaaaacaaaaaaattaagacatatggtttccattttaaaaaaagaaaataggatatagaagtccccatatccctctaccccattacaattcctcccatcccccacaatcaaccacctctctgacttctgtgataatcatgtccttacttttcttgtcctcatagtttgaccacccacgcatgtattcccaacattttactgcagtttcactttccttgcttttatatttattgaaaagtatagaccagccacagtggctcatgcctgtaatcccagcactttggaaggctgaggcgggcagatcacctgaggtcgggagttcaagaccagtctgaccaacatggagaaaccctgtctctactaaaaatacaaaattagtggggcgtggtggcacatgcctgtaatcccagctactctggaagctgaggcaagagaatcgcttgaacccggggggtgaaggttgcagtgagctgagattgtgccattgcactctagcctgggcaacaagagtgaaactgtgtctcaaaaaaaaaaaaaaaaaaaaaaaaaaaagaataatacagcttgccctgtttggtgtctggcttctttcacttgacattgtgagattcagccacacagttgtgtgtatcagtatccattctttttcattactgtatagtattccattgcataactacaccaccatatatgtatccattctccttttgatggacatttgggtagttcagacactgctcctctgaacattctttcctgtacatgtttcctgctgtccatgtttaaggtctctaggatatgtacttagcatggaacagctgggttatataggttatttgtcttttcttttttctttttttggcgacagagtctcactttgtcacccagggtggagtgcagtggcacaatcacagctcactgcacccttgacctcccaggctcaagagatccaccttcctcggcctcctgagtagctaggaccacaggtgtgtgccaccacacacagttaatttttgtattttttgtagagatggggtctcactatgtcgcccagggtagtctcaaactcctcggtcttggcctcccaaagtgttgggattacaaacgtgagaaccgtattttcaaatgtattcaataacactacagcgtttccaattttaagaggaagcaattgccacaaaagtgattaagtagcctgtcctggatcacaaagcccggtgtcctg

SEQ ID NO: 21455 - DNA, 2300 bp, Homo sapien
gggaggcggaggttacagtgagccaacatcgcaccattgcactccagcctgggtgacagagcaagactccctctcaaaaaaaaaaaaaaaaaaaaaaaaatagccagagtggtgatgcgggcctgtagtcccagctactcaggaggctgaggcagaaagaacacttgagcctaggaggtttgaggcttcaatgagccatgatcacaccactgcactccagcctgggcaatagagaaagaccctgtctctacaaacaaattttaaaaaattagctggagtggtggtgtgcacctgtagtcccagctattcaggaggctgaggcaggaggatcacctgagcccaggaagttgaggctgcaatgaaccaagatcatgccactgccctccagcctgggcaacagagcaagattccatctcaaaagaaagaaagataaatcaagatagatagagggagggagagagagagacatggagaaggaaagaagagatgggagagagggcaagaaaaagagggagaagaaagctcatgcagtccttgccaaagggcgcccactttgggctcacactgcacccacactgggggccggtggaattggactctgccttttactcccgcccacaccctgtgcactcccacgtaagacactgtcacacacacgctctccacatgcttattacagatcgcagttcactctaaccttccccactctcacacccacgtacacacatgcatatcttccctctctcccacactctcccagcctgtcacactcactcttgcatcctccccagcagagatccctgacatcatttaggcactgatgtctactaaaaaaggaagggaggccaggtgcggtggctcatgtctgtaatcccagcattttgggaggctgaggcagatggatcacctgaggtcaggagttcgagaccagcgtggccaacatgatgaaaccccgtctctagtaaaaatacaaaaattagccaggcatggtgctatatacctgtagcaccagctacttgggagacagaggtgggagaattacttgaacctgggaggttcaagccatgggaggtggaagttgcagtgagccgagatgccactgcactccagcctgagcaacagagcaagactatctcaagaaaagaaagaaagaaagaaagagacttgccaaggtcatgtatcagggcaaggaagagctgggggcccagctggctgctcccctgctgagctgggagaccaccttgatctgacttctcccatcttcccagcctaagccaggccctggggtcacggaggctggggaggcaccgaggaacgcgcctggcatgtgctgacaggggattttatgctccagctgggccagctgggaggagcctgctgggcagaggccagagctgggggctctggaaggtacctgggggaggttgcactgtgagaatgagctcaagctgggtcagagagcagggctgactctgccagtgcctgcatcagcctcatcgctctcctaggctcctggcctgctggactctgggctgcaggtccttcttgaaaggctgtgagtagtgagacaaggagcaggagtgaggggtggcaggagagaagatagagattgagagagagagagagagagagacagagagagaggaagagacagagacaaaaggagagagaacggcttagacaaggagagaaagatggaaagataaagagactgggcgcagtggctcacgcctgtaatcccaacacttggggaggccaaggtgggaggatggcttgaaggaaagagtctgagatcaacctggccaacatagtgagaccccgtctctaaaaaaaaaaaaaagaaaaaaaaaagaaaaaagaaaaaaaagtttttttaaagagacagagaaagagactcagagattgagactgagagcaagacagagagagatactcacagggaagaggggaagaggaaaacgagaaagggaggagagtaacggaaagagataaaaaagaaaagcaggtggcagagacacacagagagggacccagagaaagccagacagacgcaggtggctggcagcgggcgctgtgggggtcacagtagggggacctgtgatggccctggggacgacgctcagggcttctctcctgctcctggggctgctgactgaaggtgagtgggatcccagccttgtacccagcgccaagtggcccccatttcccacttaccttccctagacaaaccctctgccctttccttgcaccgcgctgtgtcctcaggcctggcgcagttggcgattcctgcctccgttccc

SEQ ID NO: 21456 - DNA, 2300 bp, Homo sapien
cctcctaggctcaagtgttctttctgcctcagcctcctgagtagctgggactacaggcccgcatcaccactctggctatttttttttttttttttttttttttgagagggagtcttgctctgtcacccaggctggagtgcaatggtgcgatgttggctcactgtaacctccgcctcccaggtccaagcgattctcctgcctcagcctcctgagtagctgggaatacaggcattgaccaccacacccagctaatttttgtatttttagtagagacggggtttcgccatgttggccaggcaggtctcgaactcctgacctcaggtaacccacctgccttggccccccaaagtgctgggattacaggtgggagccgctgcaccccgccacttggctaattttttttaaatgtttttgcagagacagagtcttgctatattgcccaggcttgtctggaactcctgggctcaagcaatcctcccatctcggcctcccaaagtactaggattacaggcatgagccaccgcacctggcccttgatttatctttcttttttttcttttttctcttttttctttttttgagatggagtttcactcttgttgcccagactggagtgtaatagtgtgatctcggctcactgcaacctctgcctcccgggttcaggcgattctcctgcctcagcctccctagtagctgggattacaggcatgcgccaccacgcctggctaattttttgtatttttagtaaagacggggtttctccatgttgatcaggctggtctcgaactcctgacctcaggtgatcagcctgactcggcctcccaaagtgctgggattgcaggcgtgagtcattgtgcccagctgatttatctttctatctttctccatctgtttgagactctctcgctctctatattaagttgttaaatctcagtcaatctttatttcactgtgtctctccatctctatatgtctctgttattctgtttctctgtctctgttctcacctctgtcgctcccctcaccccacagtctgtctcacacacaccaggagctccataaatatttgttctcagccacactctgaccacgcctctttctcttatgtgtctctccatctccgagtggctctgctcatcacatccctggattttataaccatatgctggtgggcctgccctccccgcgtgcacatacacttgcctgggataagcttcttctgcctgcttatctcctgcgggaattggaaatgctagttttctccctacctccccaagacccccgccaatatcgttcccaggaacaagatgaggcatctggcctcagcccccagcttcatcctcgatgctggacttccatcttccctcacatgcttgactccttgccctcctcccacctcccctctcccaactgctctctacaccccctgggaaatgggctggatgccgagctgggggagtggctctgtcctgggggccctcgccagatggtgtccctaggtgccagagcgtggagctgtcccttgctggggcctttaataagcacaaaccttccaccctccaccttggctgttttccttctctgcatgctcctgggaccttgggctctccatctttccatgtccgtagccccagagagccaggaaggggaagcggcgtcaagtgcctggaaaaacagccccatgacttgagttcctccctaagactcaggagttccagccccatgtccatcctatttcaaaatccaggcactagataagccacacagaagccgggagtgtaggcccccagatccctcccctctcagaccctggggtctcagtcccttctctccaaggactcgggaatttgggcctctgatcctcctggccacactacccacccccgcacctccccatacacacacacacacacacacacacacacacacacacacacacacacacacatacacacaggacttaggacagatgttcacggtctgatttccaaatcctcctgggcctgtgtgggggtggggagagattggcagatagatccaccgactcttaagacttaagaccagatattctgacccctgtcaccctcttccaagtgcaccatgcacttgagtgcaccttgagtctccagcctctcaaggaaccgggagatcaggccatcagcgtctcagccagcaaaggcctgaaccaccagtcccttataaccctgtaagtccaacccccactcccaaccccactcccccatttagggacacggagtctgagcctaagaacagtggagaatctgaatgtggaccctcca

SEQ ID NO: 21457 - DNA, 2300 bp, Homo sapien
caggagctccataaatatttgttctcagccacactctgaccacgcctctttctcttatgtgtctctccatctccgagtggctctgctcatcacatccctggattttataaccatatgctggtgggcctgccctccccgcgtgcacatacacttgcctgggataagcttcttctgcctgcttatctcctgcgggaattggaaatgctagttttctccctacctccccaagacccccgccaatatcgttcccaggaacaagatgaggcatctggcctcagcccccagcttcatcctcgatgctggacttccatcttccctcacatgcttgactccttgccctcctcccacctcccctctcccaactgctctctacaccccctgggaaatgggctggatgccgagctgggggagtggctctgtcctgggggccctcgccagatggtgtccctaggtgccagagcgtggagctgtcccttgctggggcctttaataagcacaaaccttccaccctccaccttggctgttttccttctctgcatgctcctgggaccttgggctctccatctttccatgtccgtagccccagagagccaggaaggggaagcggcgtcaagtgcctggaaaaacagccccatgacttgagttcctccctaagactcaggagttccagccccatgtccatcctatttcaaaatccaggcactagataagccacacagaagccgggagtgtaggcccccagatccctcccctctcagaccctggggtctcagtcccttctctccaaggactcgggaatttgggcctctgatcctcctggccacactacccacccccgcacctccccatacacacacacacacacacacacacacacacacacacacacacacacacacatacacacaggacttaggacagatgttcacggtctgatttccaaatcctcctgggcctgtgtgggggtggggagagattggcagatagatccaccgactcttaagacttaagaccagatattctgacccctgtcaccctcttccaagtgcaccatgcacttgagtgcaccttgagtctccagcctctcaaggaaccgggagatcaggccatcagcgtctcagccagcaaaggcctgaaccaccagtcccttataaccctgtaagtccaacccccactcccaaccccactcccccatttagggacacggagtctgagcctaagaacagtggagaatctgaatgtggaccctccagttcttacaggtccaggaatgtcagatcagggtcccagccccccagccctccttcaggctgctcggggtccctcccacctgctcggccagctgcgcagcgtgggaacgccccagctgggctgcatggagccgtcaggacaagctgcgcggttcccagcctccctgcctgccccggcccggcaccgccgcctcccagccgtcgccgggcaaccaggccgaggggcccggccggccgagtggggagaggggttgggctgggactgcggggtcctgggaaaggaggggccgagggcctggattcctgggtcttaggacgtgctgtagtttgcagcaataacaagggaacagagggatattttgaggaggggttttgaggctgggggagtcgaggtaggggtcccaactgtcccccaggtatcggtgtgccctcttcccgacacgcaggcccgggggagccccggaccccgcatcccccagggcgcggaaactggcgaggccccaggagctcccatttatagctcagtttccactgagcgcagtccctctaggacctgggctgagcaagtttcttccactctctcccttccctcctcctcaccccttgcctgcccctcaaccccggcagggcgcaggtgtccaacccagccgggaccccctccctcctcgaacccaggtgttccggctcccagaccccaattgagctgggggcgcccacccgccgggggatcccgccctgcgtcccccattcatccgcgtctcagccgcgggagtttctcaacgggaagagggcggagctcccggggggcggacccgggcggggcgagcgggatcgggccctcttggggtctcccagagacccaggccgcggaactggcaggcgtttcagagcgtcagaggctgcggatgagcagacttggaggactccaggccagagactaggctgggcgaagagtcgagcgtgaagggggctccgggccagggtgacaggaggcgtgcttgagaggaagaagttgacgggaaggccagtgcgacggcaaatctcgtgaac

SEQ ID NO: 21458 - DNA, 2300 bp, Homo sapien
ctttgggcccccagatctggcccccgggactccccccttcccatatgctgccttccccacacctagccacccgcgtctccagactcacgtgtgacatctttccaatggaagagtcctgggatctccaacttgccataatggattgttctgatttctgaggagccaggacaagttggcgaccttactcctccaaaactgaacacaaggggagggaaagatcattacatttgtcaggagcatttgtatacagtcagctcagccaaaggagatgccccaagtgggagcaacatggccacccaatatgcccacctattccccggtgtaaaagagattcaagatggcaggtaggccctttgaggagagatggggacagggcagtgggtgttgggagtttggggccgggatggaagttgtttctagccactgaaagaagatatttcaagatgaccatctgcattgagaggaaaggtagcataggatagatgaagatgaagagcataccaggccccaccctggctctccctgaggggaactttgctcggccaatggaaatgcagccaagatggccatatactccctaggaacccaagatggccaccatcttgattttactttccttaaagactcagaaagacttggacccaaggagtggggatacagtgagaattaccactgttggggcaaaatattgggataaaaatatttatgtttaataataaaaaaaagtcaaagaggcaagtgtgtcttagggagtctactggcattatcactctccaccaaggaaggggtcccttagacctgtcccaaggtccctcctctaccctagcctatgaggtggctgtaggagtaaaactgtgagccacctctcagcctcttgctacctgcaaagcactctaggctctttttttttttttcttgagacaagatctggctctatggcccacattggagtgcagtggcatgatctcagcccactgctacctctgcatcctgggctcaagccatccttccacctcagcctcccaagtagctgggactacaggtgcatgccaccacacccagctaatttttgtatttgtttgtagacagggtttcaccatgttggccaggctggtctcaaactcctgacctcaagtgatccgcccacctaggcctcccaatgtgctgggattacaggcatgagccactgtgcccagccatgggctcttttaatatacatcttcacacacacacacacacacacacacacgcacacacacacatgagttgcaaacagaaaagacacacacataggcatgtatgcacagacacacgcatagatgtccacacagttgcacacaagtgacagggctgccccaggggtcctggggaagactgaattctaactctcattagaggagacaaacaagtgagccctgaagtggagcagggaaggggagactatgggtaggaaaatggcaatcccctggtccttacagcaagcgtggagatccagaccctaatcctgaggtgctgcatccacagtgggcatggtgctggtgcctgcttggatgatccttaaagaaaggtcctgggggctttggttcatggatccttgagctaggagttaaaggtccaggcccctgggacccttgggaagcagagcaagaagagtgaactcctgggtctgaaggagaatgggctgggggcttggtctctggtcctgagagagaaggtgcccagacttctggatctgaaagaggaagggactaggtctcaactgctgccttcttgactggggacattttggaggcctgtattcctgagccctcaacagaggaatgtactaggggatgggggtctctgatgcttgcatccttggaaaaggacaaaactgtgagtgtctgggtctaaagagggtgagagtcctgcgggaggactcaaaatccacaacgggcggagcccatagccggactcctggctgggcccttcatggggcgggacgcctggaatctcgaggggcgggggcctggcgcaggctcccgcccggggttcccgagctgctccactctgcgcgaagccgccacgctattgtcctgaccaggaaggcggggccggcgcggggcggggctggcggcgccggcgcagcccgggggcggcgggaggaggaggtggcggcggtggcgctgggagctcctgtcaccgctggggccgggccgggcgggagtgcaggggacgtgagggcgcaagggccgggacatggggcccgccagccccgctgctcgcggtctaagtcgccgcccgggccagccgccgctgcc

SEQ ID NO: 21459 - DNA, 2300 bp, Homo sapien
gaccccatctgtgaatgaggctgtgactggtaagttctctcagctcccggcctccccatcccccttccctaagggactcagacatcgcagctctcagaactttgggacacctgggagtcaggccctcattcttcccttttttttttttttctgagacaggatctcactctgttgccctggcactggagtgcagtggcgctatctggctcactgcagcctcaaccttctgggctcaagtgatcctcccgcctcagcctcccaagtagctgggaccacaggcgatgccaccttgcttggctaattttttaaatttttgtagaaacggggtctggctatgttgcctaggctggtaggccctcattcttgctggaactcagtagcagtctgatttcctaggttctcttgagtccagtagtctatgcacatagtcctacggagccccagggcccaggctcagcctttttagtgccccaggagtccaggccctcaattcctcagtgtcccaggaatccaggtcccgggagcttggtgtcccagaagtactaactctcagtaccttgggagacgccaggccctctagccctggatgtgacgtccccaactctggtaaccagacctgcccctgcccctcctcttacacgcaggccaccctcccttcccagcacactcggagactgtgggttctggacctagcagcctgggctttccagactgggaccccaacacgcatgctgcctacactgacagcccctactcttgccctgcttctgctgccgaaaatttcctgcctcctgacttctacccaccctcggacccagggcagccgtgcccatttccccagggcatggaggtgagatacagagtgggtacaggatgctgaagggcccctaaaaattcgcagttgcactcctgcagtattctgagatgtctggagctcagttacgattcccttttccaggccgggcgtggtggctcacacctgtaatcccagcactttgggaggctgaggcaggcggatcacttgaggtcaggcgtttgagaccagcttggccaacatggtgaaaccaaaaataaaaaaattagctgggtgtagtggcgcacgcctgtaatcctagctactcgggaggctgaggcaggggaattgcttgaacccaggaggtagagattgcagtgagtagagattgcactgctgcactccagcctgggtgacagagcaagactctgtcaccgaaaaaaaaaaatacccttttccaggtgggcaaaactgaggcctaaaggtccaaggtcacttggcatagatgggatacccaggggctctgcatgcagatgtgtgtgtggtggcttgggatggaggaattctcagctgactgggtctccccaccacctgcaccctccaggaccccccagacacccagttctatgtaggatcttctctgccacaggctggaccctggagagtttctgcacccccttcaggacccccacagttccccgctgtggtccctggaccatcgctggaggtggcccgagctcacatgctggctttggggccacagcagctgctggcccaggatgaggagggggacacgtgagtataagggatagggttgtctgcagactcttggcttggtgggggctgttctcacggctgtcccccacctgtcctcaggctccttcacctgtttgcggctcgggggctgcgctgggcggcatatgctgcggctgaggtgctccaggtgtaccggcgtcttgacattcgtgagcataagggcaaggtgaggcttggggcctgaactctcctgggttcaggggaggaaggagcctggggcctggacccctggatcctagagaagaggggaatggggggtgagctcctggggctgaggggggatggggctgggagcctggttttctgacgggagggaaccaggagcccaacctgacttctcctgtggcctgcagacccctctcctggtggcggctgctgccaaccagcccctgattgtggaggatctgttgaacctgggagcagagcccaatgccgctgaccatcagggacgttcggtcttgcacgtggccgctacctacgggctcccaggagttctcttggtatggccagctggcaggcaggggtttgtctggggggtagactggttgcccagattttggcttccagggccaggaggccaggggatacccttacccagcagtctgccttctcttcctcccaggctgtgcttaactctggggtccaggttgacctggaagccagagacttcgagggtaagttgggtgtgggc

SEQ ID NO: 21460 - DNA, 2300 bp, Homo sapien
cagcctggccaacacggtgaaaccccatctctcctaaaaatacaaaaattagccaggcatggtgtccagcacctgtagtgtcagctactcgggaggctgaggcaggagaatcgctttaattcaggaggcggagtttgcagagatcgcaccattgcactccagcctgggcgacagagactccttctcaaaaacaacaacaaaaaaaaaaaaaaaaaaaaaagaaaagaaaaaaaagaaaaagaaaagaaaagaaatccaggccccccggtttctccctcctcttggagcccggtgccctaggctccttcagagcaaagatctggaccccagctccctccttcccggggggactgagtagtccgcctcccaagtccgccgcgcccattcagggactgcgttcgccggagcgcgacccggggactcccaggcctgtgggcgggccctgcccaggactgggcggtgccataacccctagtttaaaaactcgcgggtaccggacccaagatcggggacccggcggcggctccgcgggggaaacagcgaggctggcgcagcgccgaggccgcggccctgggggcccgcaatccacgccacggaatccccgaggtaatgggcgcgggcaggacgcgttcggccccctaagagagtgagggactgaggatcgaaagactcccgaggccctgagggacggagctgaagcgtcagtcctttatcccgagagtgagggccctaggtgtttggaggaggaggggatcgtggatcgtgacagaggggcggctgggatcccagacttctgggtcctgggggtgcaggggcctggggatccaggatcgcagggccccgagggtgcaagggctgggaggcttgggaggctggatctctgggtccttggaggtgctaggggttgctggcaaccgagactcctacccctagaagcagggactaggctgagtgcggggggggggggggggggcgtggttgcttaaaatcggcgtgggtctcggtggggaagggtccggagcctggcctcagggtctacgctggcggtgaccctgcctctgccccgccctgggatttccggatggccacccgtgcggggctgagcaggaattccccttgcgcggggattccacgagcgccacgatcggccgcgcgccccgcctcggagcaggacacctggggcacaggacttggggggaaggggaggatggaagattcccttgcgtgagcgccgtggcgtcagcgcgccgcgtcggggctgtttccgagccacctcctcccgcccccgccccgcgcaatccccacttaacccttcctccgccggaacccaggctcggaagggtgagggttctgtctttctgagtcgtgggaaggagtttgggaactggggctcccaggtcctagagaggaaggaactgagggtccagattcctggggcctgaaaaagagactgtatggatgggcctttttttttttttttttttttttttaatggagtctctctctgtcgcccaggctggagtgcagtagcgcgatctccgcttactgcaacctcaacctccgcctcccgggttcaagtgtttcccctgcctcacctgggatatacagccgcctgccaccacgcccggctaatttttatatttttagtagagacggggtttcaccatgttggccacctgacctcaggtgatccgccccccttggcctctcaaagtgttgggattacaggcgtgagccaccgctcccggcccggggtgaggcctttgacttctcgaggaggggcgctggggactcctgatttccgggtcaggttctagggaaaaaaatgttgggaacctggatgtgagtctagggagtgacgcctggcgccggccccccaccaacccgctgacttcaaaacttggatatctgggggtggaatttttttacggaagtggggtggttgctgcagaggggtgccctcctcccccttcctcactttccgcgacggtggtggaaagttgggtcagagggaaagtgcggagcaaaaggaaggaaacggcggaggcggatgccccaccccaaatcttctaatggctttggaggagtcaggcggcatctatgtgccagtttttccgcgcgggagggcgaggagggtgcccaaacccactccccgcgcgccacccccgcggcatttaggtgacttaaggacccttgatgacttccccctctcctctcccgcacagtgagcaggggtgagcgcagccactgcccaacgcaaaccgtgaagaagcttctggaagagcagaggcgccgccagc

SEQ ID NO: 21461 - DNA, 2300 bp, Homo sapien
ctttcgatcctcagtccctcactctcttagggggccgaacgcgtcctgcccgcgcccattacctcggggattccgtggcgtggattgcgggcccccagggccgcggcctcggcgctgcgccagcctcgctgtttcccccgcggagccgccgccgggtccccgatcttgggtccggtacccgcgagtttttaaactaggggttatggcaccgcccagtcctgggcagggcccgcccacaggcctgggagtccccgggtcgcgctccggcgaacgcagtccctgaatgggcgcggcggacttgggaggcggactactcagtccccccgggaaggagggagctggggtccagatctttgctctgaaggagcctagggcaccgggctccaagaggagggagaaaccggggggcctggatttcttttcttttctttttcttttttttcttttcttttttttttttttttttttttgttgttgtttttgagaaggagtctctgtcgcccaggctggagtgcaatggtgcgatctctgcaaactccgcctcctgaattaaagcgattctcctgcctcagcctcccgagtagctgacactacaggtgctggacaccatgcctggctaatttttgtatttttaggagagatggggtttcaccgtgttggccaggctggtctcgaactcctggcctcaggtgacccgcctgccttggcctcccaaagtgctgggattacaggcttgagccatggtgcctggctggggcctggatttctgggtctgtgtctaagggggtgctggaggctttgtctcctgggtcctgcccatgggggtaggggtaggagtggggatggagatggggtgggggcagggagaatattactgggtccagagggaggcaggactgggggtctagactcccagaggaagggtctgtgggtaagggtatagggtgtggctcaatttctccctctcccctacatcaccctttttagaggtctggtttcatttactcattcatcatttaaaataatttattgcagcagaggaggcattttgctgtgtattgtgaactaagcaggcaggaattcccagccctggagctggcattccagtgggaggccactctcagtttcacttggtgacctttcacagcactgaccatgttggccctatttctcccctgcttgcttgcttttctattttattttattattacatttttattgttagagagagggtctcattctgtcgcccaggctggagtgcagtggcaaagtggtgagatctcggctcactgcaacctccacttgcctcagtctcccaagtagctgggattacaggagcctgacaccatgcccgggtaatttttgtatttttgtagagacggggtttcaccatattggcttgaactcctgatctcaggtgatccccccaccttggcctcccaaagtgctgggattacaggcatgagccactgcggtggcctctcccctgctttcaagatgccatgctctcaggggtcccctccctctttctccatttccctggcaaagttcctcctcttcccccattcagtgtgtgttgtgataggggcagaatcctgtctgcactcacttccttggtgatctcacccagtcttgtggctttaagtaccatccataagccatcaacccccaaatttacatctccagaccagccttatcccctgaactcctaaatgcagtgaggttattcagcatctccacagggagattgtcaggcatttccaaccctgtatgcccaaacctcgtcactttccccgcaaacccacttccctacctttcatctctgccagcagacactcccatcttctcagcgtttcatgccagaaggcttggctgtctaggatccctctcaaacacacccacattcatttaatcagcaaattttcttggccctacctccaaaatatttccagatctccctagcctgcacacccttgccacctgtcattcccacttggaccaggccagcagcctccctggtctctctgaccctccccctgagttcgttcaccaaaggcagtaacggagacaccccctcaacacacacaggaagcagatggccttgacaccagcagggtgacatccgctattgctacttctctgctcccccacagttcctctggacttctctggaccacagtcctctgccagacccctgccagaccccagtccaccatgatccatctgggtcacatcctcttcctgcttttgctcccaggtgaagccagtggttacaggggatggtaggcagagcgtttgtg

SEQ ID NO: 21462 - DNA, 2300 bp, Homo sapien
gatctcccagaagggaaggggtgcagggagaagaaccccactttcatcacccgtccctgcagacgtcacccaagcacccatctcacaaacgctctgcctaccatcccctgtaaccactggcttcacctgggagcaaaagcaggaagaggatgtgacccagatggatcatggtggactggggtctggcaggggtctggcagaggactgtggtccagagaagtccagaggaactgtgggggagcagagaagtagcaatagcggatgtcaccctgctggtgtcaaggccatctgcttcctgtgtgtgttgagggggtgtctccgttactgcctttggtgaacgaactcagggggagggtcagagagaccagggaggctgctggcctggtccaagtgggaatgacaggtggcaagggtgtgcaggctagggagatctggaaatattttggaggtagggccaagaaaatttgctgattaaatgaatgtgggtgtgtttgagagggatcctagacagccaagccttctggcatgaaacgctgagaagatgggagtgtctgctggcagagatgaaaggtagggaagtgggtttgcggggaaagtgacgaggtttgggcatacagggttggaaatgcctgacaatctccctgtggagatgctgaataacctcactgcatttaggagttcaggggataaggctggtctggagatgtaaatttgggggttgatggcttatggatggtacttaaagccacaagactgggtgagatcaccaaggaagtgagtgcagacaggattctgcccctatcacaacacacactgaatgggggaagaggaggaactttgccagggaaatggagaaagagggaggggacccctgagagcatggcatcttgaaagcaggggagaggccaccgcagtggctcatgcctgtaatcccagcactttgggaggccaaggtggggggatcacctgagatcaggagttcaagccaatatggtgaaaccccgtctctacaaaaatacaaaaattacccgggcatggtgtcaggctcctgtaatcccagctacttgggagactgaggcaagtggaggttgcagtgagccgagatctcaccactttgccactgcactccagcctgggcgacagaatgagaccctctctctaacaataaaaatgtaataataaaataaaatagaaaagcaagcaagcaggggagaaatagggccaacatggtcagtgctgtgaaaggtcaccaagtgaaactgagagtggcctcccactggaatgccagctccagggctgggaattcctgcctgcttagttcacaatacacagcaaaatgcctcctctgctgcaataaattattttaaatgatgaatgagtaaatgaaaccagacctctaaaaagggtgatgtaggggagagggagaaattgagccacaccctatacccttacccacagacccttcctctgggagtctagacccccagtcctgcctccctctggacccagtaatattctccctgcccccaccccatctccatccccactcctacccctacccccatgggcaggacccaggagacaaagcctccagcacccccttagacacagacccagaaatccaggccccagccaggcaccatggctcaagcctgtaatcccagcactttgggaggccaaggcaggcgggtcacctgaggccaggagttcgagaccagcctggccaacacggtgaaaccccatctctcctaaaaatacaaaaattagccaggcatggtgtccagcacctgtagtgtcagctactcgggaggctgaggcaggagaatcgctttaattcaggaggcggagtttgcagagatcgcaccattgcactccagcctgggcgacagagactccttctcaaaaacaacaacaaaaaaaaaaaaaaaaaaaaaagaaaagaaaaaaaagaaaaagaaaagaaaagaaatccaggccccccggtttctccctcctcttggagcccggtgccctaggctccttcagagcaaagatctggaccccagctccctccttcccggggggactgagtagtccgcctcccaagtccgccgcgcccattcagggactgcgttcgccggagcgcgacccggggactcccaggcctgtgggcgggccctgcccaggactgggcggtgccataacccctagtttaaaaactcgcgggtaccggacccaagatcggggacccggcggcggctccgcgggggaaacagcgaggctggcgcagcgccgaggccgcggccctgggggcccgcaat

SEQ ID NO: 21463 - DNA, 2300 bp, Homo sapien
acattatgccagatccttgggctgatgggatggggacatgtgggggttctgagggggccttggatccagaaacagttcatgggagggaggctttgggaactctggggttctttgagaaagaatacgactacaggtgtttcaattgttttattacaatccaaaagttggggcgggggttcctgtgccaccacacaccatccaggatgagagggtcagaagtcaaaggtccaagctgcaggagggtcagcccctgcctggcatgttgatgtagactttgccatcttctggggataggggagagaaagcatgaagcttgaccacccatatctccacttccctggggaccccctgcttcaggggtttcctcaggggttcccccaggcacctcccccagggtttccccagcacctcctccagggcttccccaagggccccctccctgggaccccctccctagggacactatacaccttccaggccccgcccatctccgccctcaccttgggcggggctgcggcgtgggcgtgcgcacaggaacaccgcccccacgatgagcagcgatgccaccgcatcagcagccacgaggcctgccaggagcggcagagagagggacccacatccggaacaagagcctggagagtgggggccggaacagggagacaactcaagctctgcgtcctggggctgtgctttggccacaggcagagaggaagtcccctgcgagggggcgggtcccaggttccttggagttgcgcttggggaatgaaacgggagacagatgcagagaggctggggtgtcccaggaccctcggggctgtgcggcgggcacacggggtgctcctgaacacaggctgggggtcgctgattctgggactcggagaaggacacggatcctctgatttggggacgggaggtgggatggtgacctggagaaccactggggtgttctgggagcctctggccaagcttctggggtggaagtgatacctgaagtgccagggtaaaaggcagggagtgatgatctctctcctggagtcgtctgagctgcagccactgtggaaagagaaagaaggtggatgagggtggagagaaggtccacaaaacagaatgctcagcctggcaccgtggctcacgcctgtcatcccagcactttgggaggccgaggcaggaagatcgcttgagcccaggagttcgagaccagcctgggcaacatagtgagacctcgtctctacaagaaatacaaaaattagctggaagtgttggttcacacctgtaatcccagttactcgggaggctgagctgggaggatcacctgagcccaggaagtcaaggctgccgtgagccgtgattgtgccactgcactccagcctggacaacagagcaagaccccatctcaaaataaacaaaccaaaaaatagggtgtagagaaggaaaggtagtgtcctgagaagtaatctccaggctggagagatggaacaggaccacatgggaaggggactcccagagacatggagagtgacaagaaattggaagtggcagcagagacccagccatgagaaggggacgctaacaggcagcccctccagaactccctgtctcacccccttccgcccccaaggacccaggccctgaagcagaatggatctcccagaagggaaggggtgcagggagaagaaccccactttcatcacccgtccctgcagacgtcacccaagcacccatctcacaaacgctctgcctaccatcccctgtaaccactggcttcacctgggagcaaaagcaggaagaggatgtgacccagatggatcatggtggactggggtctggcaggggtctggcagaggactgtggtccagagaagtccagaggaactgtgggggagcagagaagtagcaatagcggatgtcaccctgctggtgtcaaggccatctgcttcctgtgtgtgttgagggggtgtctccgttactgcctttggtgaacgaactcagggggagggtcagagagaccagggaggctgctggcctggtccaagtgggaatgacaggtggcaagggtgtgcaggctagggagatctggaaatattttggaggtagggccaagaaaatttgctgattaaatgaatgtgggtgtgtttgagagggatcctagacagccaagccttctggcatgaaacgctgagaagatgggagtgtctgctggcagagatgaaaggtagggaagtgggtttgcggggaaagtgacgaggtttgggcatacagggttggaaatgcctgacaatctccctgtggagatgctgaata

SEQ ID NO: 21464 - DNA, 2300 bp, Homo sapien
tttgagatggagtctcattctgtcacccaggctggagtgcaatggtgtggtctcagctcactgcaacctccacctcccaggttcaagcgattctcttgcctgagcctcccgagtagctggaactacaggtgcatgccaccacacccggctaatttttgtatttttagtagagatggggtttcactatgttggccaggctggtctcaatctcctgacctcgtgatccgcccacctttccctcccaaagtgctgggattagaggtgtgagccaccgcgcccggccttaattttttttttttttttaaagtagagataggttctcactatgttgcccaggctggtctcaaactcctgggctcaagagatcctgttacctcggtctcccaaagtgctgggattataggcatgagtcaccatgcctggctgaagctctttttaaaaactatagagtatacaagagaatctagtcatctatccccctctctgtcaatgttcctttttaaccctttagggggtcatgagattctctaagacctctcccctgaagaatgcacgcccagactagtcatcatatatgattttagggtttctgtctgaggcctgcccctgggggccacatagatcctccccctaccccaagtgtgaacactgctgtgtgaagtctgatatattgtctgcaaccagctttgcctattcacctcacttgtggataaagtttctttgtgaagtctaagaatctcaggtttggctctgtgatatccagaagaccgaggggcccttccagttactggtggcagtgaaattttagggcaaagcattacccggatgtatttattccctctgtggatgtgtctagcacctataagtgctaaatgctggggacacagtgacagagtttatatcctagttaagacaaacttaaagcaaatgaacaaataaaataattttgggaggcacagtaaaggaaataaacaggcttttttttttttttttacagtggctggagtgtggggggaagaaactacagaggggaaattgagaaatgcctctctgaggaggtgacgtgagctgagacttgaagggagaggggatctaggggaacagagttttaggcagaggaaacagcacacgcagggaccctgaggctggggcacactgatgaggcagaggagaagggggaacattgaatgtacttgaataaaatccggatctctttcatggctataaggctgaagaagctgccaggggccttgcaggccactgggagaaggctggattttatttggtgggtcccttccactgatggcccccattcctttaggagctccagggtcagaggtcggatgtctacagcgacctcaacacacagaggccgtattacaaatgagcccgaatcatgacagtcagcaacatgatacctggatccagccattcctgaagcccaccctgcacctcattccaactcctaccgcgatacagacccacagagtgccatccctgagagaccagaccgctccccaatactctcctaaaataaacatgaagcacaaaaacattatgccagatccttgggctgatgggatggggacatgtgggggttctgagggggccttggatccagaaacagttcatgggagggaggctttgggaactctggggttctttgagaaagaatacgactacaggtgtttcaattgttttattacaatccaaaagttggggcgggggttcctgtgccaccacacaccatccaggatgagagggtcagaagtcaaaggtccaagctgcaggagggtcagcccctgcctggcatgttgatgtagactttgccatcttctggggataggggagagaaagcatgaagcttgaccacccatatctccacttccctggggaccccctgcttcaggggtttcctcaggggttcccccaggcacctcccccagggtttccccagcacctcctccagggcttccccaagggccccctccctgggaccccctccctagggacactatacaccttccaggccccgcccatctccgccctcaccttgggcggggctgcggcgtgggcgtgcgcacaggaacaccgcccccacgatgagcagcgatgccaccgcatcagcagccacgaggcctgccaggagcggcagagagagggacccacatccggaacaagagcctggagagtgggggccggaacagggagacaactcaagctctgcgtcctggggctgtgctttggccacaggcagagaggaagtcccctgcgagggggcgggtcccaggttccttgga

SEQ ID NO: 21465 - DNA, 2300 bp, Homo sapien
ggcgtgatccaccgcgcttggccctttattattattatcattattttgagacagagtcttgctgtgtcgcccaggctggagtgcagtggcgcgatctcagctcactgtaacctccaccttccaggttcaaggtattgtcttgcctcagccttctgagtagctgggactacaggtgcccaccaccatgcccaggtaattttttgtatttttagtagagaccgggtttcaccatgttggccaggatggtctcgatctcctgacctcgtgatccgcccgcctcagcctcccaaagtgctgggattacaggcataagccaccgtgcccagcctaatttttagtagagatggggtttcaccatgctggccgggctggtcttgaactcaaccaggcattattctaatagacctcacaatatcctcacaaatatcccagcagcctggcctccctgctccagtccctgcctccacagtctgctccccacctgcggccggagggaacctgtgaacccctgagtcaggtcagggccctcctggctcagagccctgctctggtctctgactgccccctcgcccactctgctccaacacattgggtggcctggtgtgcccgggaggacctacagggtctgttccctccatgctcgctctagacacaatgggagaggcttgggtttttaagggaggggactcagccaggcctgaacagtggtgaccgtgggctgagctgggacctgaccctcctccaggctccaaatctcctctcctcccttcccccacaggccactgggcatctgccctgtgaccagaatccagtttccccttttttctcctaagcccaggcccaaggagcggtgggtgtgacgtgtggatgggggaggggggcttcctgcagctgtctcatcctccagcaccctaacctcaggttcctccttccccagccccaggctccagctgggggctagaagtccccgtctccttggggtggcctcccttgggccttgctcccagccacttcctcattcagcaggagagccagccacctgcctctccccaagccgccagccgtgcctctgtgtctgtgccactgccttactctcacctttctcagctttgccgctgttttctccttccccatctttcatctttgtttttccccctgactcttccctagtcaaaaacctgattttgggtcttgggttccatttccaccttgatttgctgtgcagccttaggcaagcgtctctacctctctgaacaatggggatgataagagcatgtgccctagaagggcattgcggggactgaatgatttaacgcttgggacagagtgcctgcatgtcattagtgcccacatgctgctggctcttttaatatcctttaaacagcacaagtttctgatgattaaataatcatcatcatagctgatgcttttaaaaagctgacaagggtcagaccctggtctaggaactttaattcatttaatccccacaactctaaaaagtaggtcccattttactcccaattttacagatgaagaaactgaggttggagctgggtgcggtggctcacacttgcaatcctagcacttcgggaggccaaggtgggtggatcacctgaggtcaggagtttgagaccagctggccaacatggtgaaaccctgtctctactaaaaaaaaaagaaaaaaaaatacaaaaaattagccgggcatggtggcaggcgcctataatcccagctacttgggaggctgaggcaggagaatcacttgaacccgggaggcagaggttgcagtgagccgagaccgtgccattgcactcaaggttgaccagccaggaagaggcagagctggtttcaatcagccagaggaaggtcatgacactgaccctcctgttaaaacgatgtctgacccctgactggggacggaggtgaagtttgtgcttcacgtaccctttgcccttcacgtctagttgctgggggcctgtggcatggcccctgggtgtctgggcctgattctttcttgggttttgtttctgtctctcctcccctgtctcctcctcccttctgccaccacccgcctcagacttcctccttcacttgcctggacgctgcgccacatcccaccggcccttacactgtggtgtccagcagcatccggcttcatggggggacttgaaccctgcagcaggctcctgctcctgcctctcctgctggctgtaagtggtgagttaggggcttccgtggctgcctcccgggtccctgggctcagcttggggcagggcagggagtggggtggaacgagagaa

SEQ ID NO: 21466 - DNA, 2300 bp, Homo sapien
acatgccctcaacccaccaggttttagcatagctgttgtggtagacagttccgtgtgcagtgcagatagccctggttcagcccagctgttctcaaaatgtggtccctgaccaggtgtagtggctcacacctgtaatcacaacactttgggaggcctgggagggaggattgcctgaggccaagagttcaagaccagcctgggcagcatattgagaccctgtctctacaagaaattttaaaaattagctggatatggcgatgcatgcctgtagtctcagttactctggagcctgaggtgggaggattgcttgagcccaggaatttgaggttgcagtcaattatgattgcaccaatgtactgggtgacaaagcaagaccctgtctcaaaaaaaaaagtatggtctttgaaaagtcacattagcatcacctgggtactcgttaaaaatgcaaatgtttgggtcccacctcagacccactgaaccagaaactctgaggttgggacctggagatctatggtgcccccgggtgatcctggtgggctgcactgcaaggacacctggcctggctcctgcaaggcaaggcatccctctctgcttttctttctttctttctttcttttaaagacagagtctcactctgtcacccaggctggagtgcaatggctggatctcagatcactacaatctccacctcccgggttcaagcaattctcttgcctcagcctcccgagtagctgggattacgggcgtccgccaccacacccggctaatttttgtatttttagtagagacggggtttctccatgttggccaggctggtctccaacgcctgatctcaaaagatccgcccgccttggcctcccaacgagccgggattacaggcgtgagccaccgcccccggctgtcagtgtgtcttgaggtctttccctaatcccagatggcacaagttttccctcttgcaggcagagaaaggagccttgggaaggagcccctctggcctgaaagatcaagcctattgctgggcatggccaggtaaggaaactccaaccgtggaaaggacattccagggaggtggtgctgagataaggggggcagaaagagacaggtttggggggccagtggctctggaatgaagcgctacactcaaggctaggaatagttactgaatgcacatacacacataccattctcacagcccaggtgctgcgtcttagagcgtgtgagtgtgtatgtgtgtgtctgtgtgtgcgcgcgcacgcacgtctctatctctgtttctgtctttctctgacttgtccttatctcttgtctctccatcactctctgtgtctcgctgtctctgtgcatttccatgtctcgaatatgtgtgtgtttcaatctgtctctctgcctctttccattttctcctctctatccatcaatctaagcctgcccatctttttgtctgcctttctgtatctccgttcttctctgtctctctgtctcagtctctctgtatccagggattctctttcccagcagcgccagtgcgactccatgggaggtggggccggggcgcgtctttgagagaaggggcgggtgcctacgcctttaagcgcgggtgcgcgcggagcctgcgcctttaagcgccggtgcgcgcgctgccctgggttgccggcgaggaggccgcgggagcgcctggacccggcccgcccagcccggcccccgcccggcccccgcctcggccccggcgggggaggggtctctgagcgcggcccctcccccctgcgcccccgcctgcgctgcggtgcccccatcccgcgtgtcccagtctgtctgaccgtccctccgctcccaggcctcgccccacccggccctggggctgcccggtcgcccccctccccaccgcagccggtcccctccctcccagtcagcctccgccgcagcccaggaagccagccgggacgccgccgccccggaccccgcgccctaacctccacctcgggggcctgcacccccagattgaatcgggaattccggaaacccgagcctggaaccctgatctgggaccagcaccccgagatccggccgtggaaccccaagatctggagcctgaaccccagtatatggggctggaatctcaacatcggtcactgggacctcaatatttggagccggaaccccacaatttggaacacagaccccaatatttggagcagaaccccaagatttgacatctaaaacctcaagcctggagctgaactctgaattctgggcctgggaccttgaaatctgggactggatttccagtactgtaccctgga

SEQ ID NO: 21467 - DNA, 2300 bp, Homo sapien
caaactggacccgtaaaactggaccctagaggcccaatatttaggggtctggaaccccgagtattaaggtctggagactccgttgccacagatttgagccgagtcaggacacagtccctctacagaagccttggggacaggaaaagcatgaccagatgctccctccagagccctgacctctgactcccctggagctaggactctgctccctggggctgcttctagctcaggtaaggctgctgaaacctcaaggtggggacgggctgggaggagcattgtggctgcgggttacggtaccaggtaccctttgacactcttggggtttctccagaaaaaaagacattcccccatgggtctgccttcagctcctgctctgctccaaacactctctggacactggccatccttgcccctctctgaccttccctgcctcagttgatgggacctccaggtctctgacccctgcaacccttacagcctttcgctgtctatccggtccgaccgtctccgccacctctcttgtccaccactcctctctctgggctcctttctccacctgtcctctcaatggccatctctgttccctttttctctctctgatcatctttgtgacacccctgtccacaggtcctctctccagtcgcctctgcctgctgcttctcagtgaccatcgctgacatctgtgtccactgtgcctctctctaatcatcattcaccagctctcttgctccttctccacccctgaatctaagcctaggtctgtgaccgtccccatccatctttgacattgctgtccaccactcttctctccagcagcctctgtccatctctcctctctagcttcctctggccacctttccctttctctggccatctctcccactgctcttgccctcctcccacccctgaccctaactcccagtctgcaactgtctgaccatctctggccacctctcctctctctctcactcactgatgccctctgatcatctctggccacctcttctctctctctcactcattgatgccctcttgatcatctctggccacctcttctctctttctcactcactgatgccctcttgatcatctctgcccacctcttttctctcgctcgctgatgccctctgatcatctctggccacctcttctctctctctcactcactgatgccctctgataatctctggccacctctcctctctcacttgctgatgccctctgatcatctcgaacatctctgctgcctttcctctctccgatgacctctccccgcaccatcctcctgagcagctgtcctgggctcccactgactctgccatgtctgtccttttcctcctctctgaccaccttgctggctttgggccgtttctgaccacgtgtctctgacatggtcatctcccccagatctgagcccaacccatgccctcccttctctttgtccactgctcatcttcctgaccatctgtaaccccttctcttctctggtcatatctgaccacttctgatcattgttgccaccctggctgccccgtctccccatggccagcttttaccatctctgaccacgtctaaagccctctggttttcctgccactcacccagaccagctgtcatttctctgaccatttctttacttttttcttttggagagacagagtcacgctctgttgcccaggctggagtgtggtggcgcaatcatagctcactgcagcctcaaattcttgggctcaaattgatcctcccacctcagtgtcccatgtagctaggaccacaggtgggcgccaccatgcctagctaatttttaaaaatttttgtataatagatacacggtctcactttgttgcccaggctggtcttgaactcctggcctcaagccatcctcctgcctcagcctccccaaatgctgggattacatgtgtgagccaccgcgcctggccttcctctggcttttggtcacatctgacggtctttgaccagcccttctgccctcagcccactgtgaccttctctcctggtctcagaccacccccagcccctgcagaacccctcttctgccctcacgcctcccctcttctccgcaggacacccctgcccgcgatggccatcctcccgttgctcctgtgcctgctgccgctggcccctgcctcatccccaccccagtcagccacacccagcccatgtccccgccgctgccgctgccagacacagtcgctgcccctaagcgtgctgtgcccaggggcaggcctcctgttcgtgccaccctcgctggaccgccgggcagccgagctgcggctggc

SEQ ID NO: 21468 - DNA, 2300 bp, Homo sapien
ataagagtgggccagttccccaaagacaaactgagagactgtaaccagaaaaccattgacaggccctgggcaggaggcaatagtattccctttgaggttttgcagctccttgagtccactggaaagtaaagaaagtccccctaggctgattgacatagttgtcttggagattaagggtcatttgacaggaaaaagatagatgtttaaattccagagtacaagccagcatggtggctcatccctattatcccagctacttgggaggatgaggccggagttcaagaccaatctgggccacatagcaagaccctgtctctaaaaacaaaacaaaaaataaatatttaaaattccagagtgaagcctgggcaacacagcgagactctgtctctacaaaaaacaataaaagaagaattagccgggtgtggtgggatgttcacgtaatcctaaccactggacatgttgaggcgagaggattgcttgatcccaggagatcaaggctgtagtttcaccaatatggtgaaaccccgcctctactaaaaatacaaaaattagcccagtgtgctggcacatacctgtaattccagctactggggaggctgaggtagggagaatcacttgaacctagaggcagaagtttcaccatgtggatcaggctggtgtcgatctcccgacctcaggtggtccgcccgcctcggcctccaaaagtgctggaattacaggtgtgagccaccgttctaggacatgtatttttgatagatacatacacctgccaggcaggattcacagtggtttgtgattctcccctgactccaagactccaagcctaatccccgcccctgaccagcttctcctctctgaaggggaatggaccccccagctggttgccggcccaagtgtgcagagccgcggttgcgcgctgggtggaggggtcccccaagctccggtgctggtggggcccgaggatgctgtgtccttgcgggcctccctagcgctacgaggacacctccaggcggcccgcggggacaacaacggcattgcggcctaccacctaaagctcctgggaggacaacggggttgcagtctagtcgactgttcagggtgtcccggactccgggctttaacagtcggtaaggacccaaacaccgctgtccactgccccgactcccacccgcagagggcgcgaccaacccagctcctagagccacacgctgcctctgggggcttggcgcccacactctctctgcttgtcttcccctggcccgagaagcctgtccaaccggccgagagccatttccctacggggtctcgtccctctgcacgtgcccagggctgggaccccagacacagacctgccccggacgagggaacgcacggagcttcccaagatggtttgaatcagtaactgacggcaaaagcacgcttgtgcccggcgtctctcccagtgccccgtgcccttgggacccaaagtccgaaccggtagccgggcgcggtggctcacgcctggaatcccaacactttgggaggctgagaatcgtttgagcccaggagttcgagccattctgggcaacatagggagacccatctctgcaaataataataataataaataaataaataaataaataaataaataaataaatagcgggcgcggttgcgcgcgtctgtggttccagctactaggggagttgaggtgggaggatcgcttgggcccaggagttcgaggctgcagtgagccaagatcgcgccactgcactccagcctgggcgacagcgagaccccgtcacacacaaaaaaacccctagcttcctcttctcccagaatgcaggagttaggtgaggaccctctgttccctccaacccaagacctaggagtccgaacacataacgccctccaggcggtgccaggatccccagaactgctgtcccctcaagaacacacgtcccctacgtgggaggccgcgaccagcgactccgcccacttctcccagccggctgttacgtaactgcaacgacagccagtcagacgcggcagcgccggatggcgggaggcgggagttggaggccaagggaagcgctgggcggaagtggctgtggctttgccctttggcctttgctggctgtgtggcggctccgcggttcgcaggtcgttcgctgagcgtctctgcttagccgcggtcatgagccggcacagccggctgcagaggcaggttctgagcctgtaccgcgatctgctgcgcgccgggcgtgggaagccgggcgccgaggcgcgagtgcgggcagagttccggcagcatgcgggcc

SEQ ID NO: 21469 - DNA, 2300 bp, Homo sapien
gtaaccacacaccctcggcccgtgtccccccactcagacttctgagctgtgctggggcaggggactctgtacccaccctcactcattaggcagccacatctcccaaacaggcattcacctccctgtccctggcttgggaagcccccctttgacccagagggtgggggttgtggactcctgccctgcccagccctggtgcccactccctagccccacgaggacggaccactgtactacccgactgtcagcaccatcagcctgggctcccacaccgtgctggacttctacgagccgcggcggccagaggacgatgaccctacagaacaggtgggcccccagacactgccccagctgcttgtaggcacttcaacctcgcacatcctccaagatgacctggtcccacatgccttcggggtactcctggcactctcccagataccttcccttgtcccctcatggggtgtacccacttcctcccagacacccaacccatctgcttacagggtgtctgtcccacatgccatgattttcacaggctccccgatgccccaacctgctgaatggatacccctgactccccagcagacactgatatccttagataccccaccgccattaactcggggggcctcacctcctcccagatgctctatctgcccctgctcagggtgccccagacgtcctgctactccaggaatgtgatttggggtgcaggacacccccagattctccttgaccccttgacacaatttctctgagtgatgcatttctagcaccccagtgttcacagaaacgcccctgaacacgccgacccactccttgaggcttgccctcgagccctgcatgctcctggatgctctgacactccctcagctgtgcggttgtcctctaatgtcctgatgtccttgggaacccccactgcctctaacctctgcctcactctctcctcacctggtcctggcttcagccatgctctctcagcccagctctgcctgtatttcctggggactgcctattcctgggtcccagccccagcctcagcccctttgagatcccagctgcagctcccaccggccgctgaccctttgacgcccccatctgccacctagatcctgccccctcccgagggacggcagagccctcgccctccctttccagcagccccagcccaggccccagcaattttcactcctgaaccaccaaagcctccatcattgtgagcacacttgctcttcagcttttgcccctggggactagctgatccccggaggctaccgacctctcgcccacccccaccccccgacttcttgagccctgctgaccctcaacccgccctgcagcctcggcctccgccccggcccaccacctcgctactgctggaaccgcgcagcctgctggtgctccgcggccccgcctacacgcgtcttctccacggcatcgccgccgcccgcgtagacgcgctggacgccgcctcctcgccgcccaatgcggcagcctgcccgtcggcgcggccgggagcctgcctggtgcgcggcacccgggtctcgctgaccatccgccgcgtgccccgcgtgctgcgcgccggcctcctgctgggcaagtgaccgccagggccgggacccctcggattcccaggttcctgcccctttggggctgctgtgactccgcgacctaggaaccgtgggcaaagggggctcccctgggttatttattttcccaataattttgtgtgagctacagaagaccccataccaaataaacaaaaaaatctttccttggttttatatttttattttttaggggccagatgcttggtttcctgaggggagcggcatctagggtcttaaatgaatggggtaggccctggaggtccgatttctgggttcccagtggggcagaatccagggctcttgaggaggtggcgcaggggttctatctggaaccctcttggatggcgtggagtgatgctgggagatttagctactggcctgctagggaggaaggagttaagtgactcttctgtcacctgagctgggcatcaaatggccgggtccaggttcctcttggaaggggcggagccagacctgtcctgggcctctcctgcagcctcaggcccgggtgactccagcggaggagctctgggacacccttgtctagggaagaggtcttactggctgccctcacctgactttgtgtccccaggcccccagccatggccctgtccctgcctctgggccctagacttggctcagagcccctcaaccacccaccgggagcacctagagaggcggacattgttg

SEQ ID NO: 21470 - DNA, 2300 bp, Homo sapien
gctatttcagcccaggaattctataatatgtagatttttcaatgccaagaacgcaaaggtctggaatgggctatctcagcaaaaaagtctgtgttctgtagctaattttttcctggactcaagatcagtgggttactccaacacagggaagatctgtgctctgtaacttaggcactggggctgcaaagggcaggaactctgagctttgaaaattcttctttccccaaaccttaagaacagaatgcagactgggccatctcagcgtagatggtctgtatttggtaaccttattgtgctctgggtctatgctgggctattttagcacaggaaagagtttactgggctatctcagcacagaaatctgaatacaaaattctttactccccagtctcaatgatctgaactgggctatctcagcctatgtttataaccccctattctctaagctagcaggattgggctatctcagtagagggagtatgagctctgtaacttccttgttccttctgtcggggtcttcactgcagccttgggggctctcatacagaggatggacattggggaggaatatgggaagagtgggaaaacagaccagtagggcactgaggtcacctgtcgaagcaaatactcctcctcttctttggagatgaagtcagggacatagtagattacaggtggtgcctaggatagaaagaccccctgaaggtgtggcccttcaacccacacagaggacatatcatcacagagcaacccctatgcctggagacaggctcaggatgtcctcagacaggtcagggtctaaagtcaagggaccagtgccattccagaatggactctgacagtaagaatgaatttggtggaagggggcagtcccaacccaagaactcaggaatcagcctgcctccttcaccctctgcaccctgagttctgacaacctgctccactctgaacggttccagggctgggactctggcgtcctgctcctccatcaacaccaactccttgcacccaatcctgtagggaggggaggacatactgaagtcactaggcctcccgccctaacaccatgatgcagcattccaccccatcacaggccaggcctcacctcagccctcttctgaaacgcacttggtctctaaaatctgagtcttcagcatcttacaagccacacagagagcccctacgttccatgcccggacacaatgagccccaagaataatcccccattactctgtccactaagggcccatccaactacacatatgccttctcaatcctcccacagagaacattctctggccccacacacagggagcctttctcaaaagctctacacatagcccccagggctgcactccagagcccctttaaacaccttgagaccccgcttcagacctgcaactgtgagcccggctatcaacactcagcgacccccgccccccaccgaatcccattctgtgcactcctgtgaccccaatctgagcctcctcagacatgtccaccctcagcctcctcggatccccccatttggacgcccctcggatttcccctcctgagcgccccttcactccagcaccctgagatctttagctctgaggctgactcccaaatcttcttccctccctgaaccattcagatccccgactccgagccttttaggactccaagctctgagcctcctcggactcctactctgggctcccccggatccccactttcagccctattgacatccatctctacccccagcactccccaaaactgaccgtccaccagcgtcccctccaatttccaaattcaacatccccatccccctcccagccatttccgccccacattacagacgcagagtccgcaggccaatgggagctcccagaggcttcaagggcccgccttccacccaatcggcgctctcactcagtattcgcccgcccccttcatgctcgcctaaggataggccgcgcctcctggcctctgagccattggcaggagggcgtgggcggggcatcgtcgtctggcactggccactcagaacttaggaactgaacctggccattggcggagtggaccccgatgggtgggacgggggcggcagccgtgacagccgcgggaagacatgagaggctgctagaaggacttcccgcggccagcgccatcacctgcccacgccgcagggaggtgagactgaaggaagcacttcctttcccgtcttctcccagcaagggaaacccccaatgacccgacacagagaggccatagaaacgtctttattgaagaggacaggagtcatgctgagtttg

SEQ ID NO: 21471 - DNA, 2300 bp, Homo sapien
agccagagaggtagaggcagaatccagaaaggcctgatagcaaacactgggggaaaggctgggggtgatgggtgcagatgtccccgctgcctgcctaagggcgtgaccctgtcatcctcctttccaggttgctgttctgctgctggttcccctggatgctgagggcggagatgcagtcttagaggccctggacacctgacaaagagacagagtccccactagcatctcctgacacccgaggagccctgagtcaccctgagatagagattcccagtaacacatccagagtagagacccctgttagccagccctcgatcattgaggccccattattaacagatactcccataataacccccaaatacagaccccatgtcacccagaaagagattccctgagtagcaccttcaggctagtccctatccccaacccctcagagcagattcccagattaacagatttccatatcaccccaaatgatggtgaccctctccacataatgcattacaacagaacattcttgaatcacccaaccctggatcagaaacctccccattaacaaacactgccccttaagtcctcttgaaataaacataggtcacacccccaaagcaaaagagtaacagacattcatgtcattgttccccatttaacatcagtcctctcaagatgtcgtgaccccatggtcaccctgaagcccttagattccaacccctcaatcagagacttccttcattaacaaagacccttgttcttatccctcaagaagaaacccaccataaccagcccactgtcacccctaatttacagacaccaaaacagtcctggaagtgctaattacaggaccccccaagtcttcctaccctctgcaccctcaagaaacccccagtgccttgtatgaagcccaccccacatggcccacagctcctgtgctggccagactcccagaaaattctctattttttaagtaacgacttccccctttgggggaccccaaaatttggaggccccattctaggactctggggatcccaaaccctagagtacacacgtcccaaactcccctgtgccctcaagtcctacagcccctagaagaccccaatgccgtaactcctaggacccccaaatcatggaatcccaaatccccagggaatcccaaatttgaaaatccaatcccaagtccccaggaaacccaatcatgaggtccttgtgcctggtatggaggagactgcagtcaggatatgcattccaggctcccagacacctcaagccctattcacaggcaccaggaaaccccacacaggaattcccatccctggaaactggagaatttcaatgccccgagtccatgggtttcaagacaccaaattccaagagccccagccctaagggaaccccaaatcctaaagcctccatctctaataaatggaaggccccaaggccctgaggggatctcaaatcctggaaccccgatttcaatctacgttctagtcactggcctcaaaggaccccacagcacctgggccagaccaacagctcgagggagaacctgaaggcccagggggtccagggcggacctggggccccgaccaccaaggacagctcacgactgccccttcactgcatgtccccaaactcagcatgactcctgtcctcttcaataaagacgtttctatggcctctctgtgtcgggtcattgggggtttcccttgctgggagaagacgggaaaggaagtgcttccttcagtctcacctccctgcggcgtgggcaggtgatggcgctggccgcgggaagtccttctagcagcctctcatgtcttcccgcggctgtcacggctgccgcccccgtcccacccatcggggtccactccgccaatggccaggttcagttcctaagttctgagtggccagtgccagacgacgatgccccgcccacgccctcctgccaatggctcagaggccaggaggcgcggcctatccttaggcgagcatgaagggggcgggcgaatactgagtgagagcgccgattgggtggaaggcgggcccttgaagcctctgggagctcccattggcctgcggactctgcgtctgtaatgtggggcggaaatggctgggagggggatggggatgttgaatttggaaattggaggggacgctggtggacggtcagttttggggagtgctgggggtagagatggatgtcaatagggctgaaagtggggatccgggggagcccagagtaggagtccgaggaggctcagagcttggagtcctaaaaggctcggagtcggggatctgaa

SEQ ID NO: 21472 - DNA, 2300 bp, Homo sapien
gtgaggccaggctgcgaggggaaggaggacggtgatctgaggagatagcgggaggttggaggcgtgggagagggggctcagggactaccactctagggagggtcggggctgccaagggagaggggggctccgaggtgggggcggggctctgcgtcggaggctctgggacctgcaagttaagagatgagccccgaggtgggaggagggctggggtcccacaggcgctcacccggaacccctcctcttgcccacttccagtggtgaactccacgtgcagtgacttcaaccacggctcagccctgcacatcgctgcttccagcctgtgcctgggcgccgccaaatgtttgctggagcacggcgccaaccctgcgctgagggtactgccacccttgcccagaacccgttaccctcctgctcccttcctcccccacttccctccagcaggtctctgcgtttcccgtgactccccaaatactacaaatgccgtctgtacattcagcaaatgcaataacagctgaaatatgcctagtgttcattacatgtcaggtgaagtctattataagccttgttttacaatggggaaactgaggcagagattaagggatctgcccagggtcatccagcctatcccatggcagtgcataacagcatttcaaggtcatgaggaaagttgggctaggccttctgtgaatgagagggttggtcctctcctaagccctcaatatgatctttgacctctgacctatgcattaccaggctccatccacaatgctaattaccctgcagccgtccaggcacatgtatgttggggtaacatggcctgtgcccctgagaccctgcctctccccattttccactggcccagagtttgactcctgactctataccacaggagcccactctcactctctctaattttttttttttttttttgagacagagactggctctgtcatccaggctggagtgcagtggtgcaatctcggctcactgcaacctctgcctaccaggttcaaacgattctcctgcctcagcctcccgagtaggtagaattataggcatgcgccaccacacccggctaatttttgtatttttagtagagatggagtttcaccatgttggccaggctggtctcgagctcctgacctcaggtgatctgcccacctcggcctcacaaattgctaggattataagcataagccactgcacccagcccacaggagcccattctcaatgttcatctcccacatgtcctcattacaggcttggggtctccagagattgcctccctgagggcgtgacctacagcactgaagtgtggccctcatccctactgcctacacccccaggcccaccctcaattacttgacacacccccagccctgggtctcaggggtgggtttccctggggatgtggtctgcacctttctgccctgccccttctttttttttttttttgagacggagtctcgctctgtcacccaggctggagtgcagtagcatgatcttggctcactgcaacctctgcttcccggattcaagcgattctcctgcctcagcctcccgagtagctgggattacaggcacacgccaccacacccggctaatttttgtatttttagtacagacgaggtttcaccatgttggccaggctggtcttgaactcctgacctcaagcatctgcctgcctcggcctcacaacgtactgggattacaggcgtgagccaccttaccccgccttgccctgacccttcttattcccaggttggcccaggatatgacctagtcttacccctgcatcacccagactggtggtctctaggggcagggcctccatgggggtgtgacctgtgccactgagtccctgccttcttttcccattggcccccagaatcgaaaaggacaggtgccggcggaggtggtcccagatcctatggacatgtccctggacaaggcagaggcggcactggtggccaaggagctgcggacgcttctggaagaggcagtgccactatcttgcgccctccccaaggtcacgctacccaactatgacaacgtcccaggcaatctcatgcttagcgcactgggcttgcgcctgggagaccgcgtgctgctggatggccagaaggtcaggggctgggatgtgtgtttgcatggtgggtgggggtgggactcagccccttaatcccttggagctgcgtcctcgggcagagtgcagtccctgccctttgtctacttgccgccctaactatccacccagtacttgattttatctcagttgttccgtgggtgtctccttt

SEQ ID NO: 21473 - DNA, 2300 bp, Homo sapien
gccttccgagttcaagcgattctcctgcctcagcctcctgagtagctgggattacaggcactcaccaccacgcccagttaatttttgtatttttagtagagatggagtttcaccatgttggtcaggctggtctcgaactgctgacctcatgatctgccagccttggcctcccaaagtgctgggattccaggcgtgagccaccatgcccagccaagaccctatctctaaaaaaaaaaaaaaaaaaaaaaaaaaaaagagtaggagatggagaagggcgggtgccgatttagacagtgtggtttgggaaggcctctctgaggagatgacatttgagcaaagatttataaagctttgtgaagatgtgtgggaagtctatcctgagtgagaagaacagcaagtgccaagaccctgagacaagaatttgcttggcacgtgggagggacagagggagcccagtgtgggaaatgagggaaggggaataagtgaggggagagggctgagaactgaggggctggatgtgcagagccctgagggccgtggggaagactttggtctgtactctggatgggttgggagctggaggagggttctaagccaagaagggctatgatgtgactgcagttctaaaaggagcatgccggctgattcctggagacaccttctatgtggcacttccctgggctgtgtataatctgatcattcatgtagtcgttcattcaccacgcactgagttcctgccacgtgccagggccctgtgctgggtgctgacgtcacagagagcagtactccttagagtcgagtgggaagagacagaagtgcctctaggcaccaccctggctgggcacaggttgattcctgctcatggatacattttattttattttcatttttatttatttatttactttttttgagatggagtctcactctctgtcacccaggctggagtgcagcggcgccatctcagctcactgcagcctttgcctcctgagttcaagtgattctcctgcctcagcctcccgagcagctgggattaccggcgcccaccaccacgcctggctaatttttgtatttttggtagagtcagggtttcaccacgttggaccaggctggtctcgaactcctgacctgaggtgatccgcccgccccggcctccaaaagtgctgggattacaggcgtgagccaccgcgcacagcctctatttttattttttatatttccagagtcagggtcttgctctgttgcccaggctggcgtgtagtggcacaatcatggctcactgcagccttgaactcctgggctcaagcaatcctcctgtctcaatctccttgagtagcaccaatgcgcaccaccacacctggctaattttaaaactttttgtaaagacaggggtcttgctatgttgcccaggctggtcttgaacttatgggctcaagcaatcctcctgcctcagcctcccaacgcattgggattacagatgtgaaccactgtgcccagtcatggatacatttgatgtggactgcatggtatttgaaacaattgagagagttttattaaaaaccaggacttctggctttatttatttttgctctggagattcagccaaacttcactcatactctcacagggcaacagtgggtgaggtcagtagcagtccccctggacatgcagactccaaggtactgcactctctgtcaggcttttgtttcagggggtggagtttgctgctatatgggaattgcctgatcttccaacttttcaagacacactgggcatcgagatttttatgtgaacccacctgagtttgaaacctcatgctggccacacagaaaatgcctgtgggttgactgtggcccatgtgccaccagcttgagaccctgcattagaggctctaaaaggcaaagacctacagctcccctactgaggctggaaggagggggtcagttgcgtggggtgaccttggacctcttgccaccccagctttcaccttcttcgatcccaatgacccggcgtgccaggagatcctgtttgaccctcagaccaccatccccgagctgtttgccattgtgcgccagtgggtgccccaagtccagcacaagatagacgtcatcggcaatgaggtgagaacactggggaaaccagggggagaggggatgcggttccccacatgtgtgggtgaccctccctgctcccctggtactcacagattctgcgccgaggctgccatgtgaacgatcgtgacgggctgaccgacatgacactgctccactatgcgtgcaaagctggggcccacggagtcg

SEQ ID NO: 21474 - DNA, 2300 bp, Homo sapien
gcagacatgagcgatgagtgctataaagacaacaaaaatttggtttgggcctgggggagggccctccaaggccatgttttagcagaaacctgggtgatcagaaggggctggcctggagcgctacaggctcaggttccagaggacgaacaacccctgcagtgagggcctgctgtctgggatgtgtcaggtctgggaggcggtgttgctatggagaaaaccatagtagggaagggaggaaggggtgcagttttagagcagagaaggtgaaaagacaccaacaagtaagatcctaaaacagggcagagagggagccacgtagggatttggaggaagagcattccgggcatcacaaagagccgttgcaggccaggcacggtggctcacgcctgtcgtcccagcactttgggaagctgaggcaggcagataacctaaggtcaggagtttgagaccagcctggccaacatggcgaaaccccgtccctactaaaaatacaaaaattagctgggtgtggtggcacaggcctgtaatcccagctactcgggaggctgaggcaggagaatcacttgaacctggaagacagaggttgcagtgagcagagatcatgccactccactccagcctggggaacagtgagactgccatctcaaaaaaaaaaaaaaaaaagagccagtgcaaaggtcctggggtagggagaagcaaggaggccagtgtggctggggtggagtgaacaaaagagggtgagaggaggtgagtgcagagatgatggggcaggttcacataggcccttgtgggccatggctgagagccttggcttctacctggagtgaggtgcagcaggcagacccctctgagggaaagagggctccaaagtgacaggtgttcatgggtccctgtggctgcatgttggaggaggacggggacagcaggtaagaggctgctgccgtagtgctggtggcagaagaagaaggatggaccaagatgagggcccagggtagcggtggggagagtgagatcctggaaatcttttggagatggagctactggacctgtgcattagaaggatgaggtgttcaaggctgtcacccagccccatccaggctgggatgatttgaggcagagcaggctacagctccaggtgggaagccaagccatgacaatggagccaggaccctgggctggcttcaggaggcctccgtggggaagatacaggttctgagagagttggaggggtcaatcggcagatctgtttcccagacactgctacaggcatgtagcatggtgattaagaatcaaagctgggcatggtgactcgtgcctgtaatctcagcgctttgggtggcaggggcaggaggatcccttgaggtcaggagttcaagaccagcctgggcaacatggcaaaaccctgtctcaaaaaaaattctccagacatggtggcatgcacgtgtggtctcggctactcgggaggttgaggtgggaggatggcttgagcccagaagtttgacgctgcagtgagccaagatcacaacactgcacagtagcctgggtgacagagtgagaccctgtctaggaaataataaaaataaaaatcagactttacagactgtctggtttcaaatgttcgctccatcacctactcatgtacttttgggcaagctgcttaacctctgggccccagtgtgtgagcctcgcattatgatggtaaggatgagatgatcatgataggagtctctaggaaatcacccctctgaggcacccattatgaatggtgagcttggagaaggggtccggtctagggtcctagagagagggtcccctagagggtccccatcgtcaccacgccccaagaccactgccctcaccggcctggtttgcaggcgtgggggaaggggatggagaagatctgtgtccgctctctcagccctctcttttgccgttgtatctgctcatctcgctcctttccgtagccatctcttcctctcccagtgcccggaggctctcccctttcagtcgccgcctctggcccctccatcaatgcgagcgcctcccggtccctcctcctggtccctcctcccccgccgccggtaggggggcagcaggcgcatgcgcagtcgcgcccctccctctccgcccccaccccctgtcggcgtctgggcctcgtccccttctctctgtctcccttgcctcccccatcacgtcccctgacaccgacaccccattgctcccacagtctccccagtctccactttggtccccagcgctgtctgcccgaggtaagatggggagggggcggcccgcggaga

SEQ ID NO: 21475 - DNA, 2300 bp, Homo sapien
atgtttcattcttacttgatgtgatttcaaacagcaaagtttgtgatcatctctgactttagacaaccaaagtttcctactaagaaagcagtagacactcaaaggatgggaattctgccactttacatctgcagtatgtccaagagaaatattttttcctggctgggtgcagtggctcacgcctgtaatccaagcactttgggaggccgaggcaggaggactgcttgtgcccaggagtttgagactagactggacaacatagggtgatcccatctctctctttaaaaacaaaatttttttttttgagacggagtctcactcttgttgcccacgctggattgcagtggcctcatcttggctcactgcaacctctgccttctggattcatgcgattctcctgcctcagcccacggagtagctggaattacacgcatgagccaccacgcccatctaatttttgtatttttagtagacacggggtttcaccatgttggccaggctggtctcgaactcctgacctcaggtgatctgcccgcctcggcctcccaaagtgctgggattacaggcgtgagccaccaagcctggcaaaaaaaaaaaaaaaaaaaaaaaaaaaaaaaaatttaaattatccaggcatggtggcgcgtgcctctggtcccagctacttggtagggtgaggtgggaggatcacttgagcccgggaggtcgaggttgcagtgagctgtgatcgttccactgcattccagcctgggcgacaaagcgatcttgtctcaaaaaaaaaaaaaaaaaaaagcaaagaaatgttttttcctagtaattcttccaccaactggcttatgtcagccagataaataaggagacagatcttttacagtcgaagctaattctgactttcccaagtatgacgaaagaggtaaggatgacattttttaaacctaagcaacaagaagaatgaagcacgctactaagataagacagactggaaggttttggggagacacgatcgcaagctcagtttcggatgctctgagtttcagatggctcaaatgcgtggggagggcaagtgggcatctgcaggctctctaacagcctgcaccgacttcacttcttacatccctttcactcttcggctcgcttcgctcgctatctgtagtcaatcgtctactcctgtttcccacgcctgcacctttgtatgtgcaatggacactgccaggaaggccatctcctcatggtttaaccccacttcctaacaccctcaagcaagaccagaagccccgcacagcagcactaatgctcgggccccacccctctcagggtcccgcctccctcaagccccgccccgcgctgcgctcacttgtagaagctcacagggcggttgtctgcacccaggcggcccgcagtgttggagcagttcggcgccctgcagtacttgggcatggctatccagcccccgctgagttttgccgggtcagcggctgcactttggttctcgcggagcgccgcctaaccccgccccacccgcgctcgccgcctgcctcacgtgacgtccgtggagtctcgtcacgtaccggggagagagctgagagcgcctgcctactaggcgcccctccacagtgccacagtcccgccctcgtcacgtgacgaatgggccatagcgagtactgtgcacctgcgcaaagccggcccttcgtcaccccgactttcatcacgtgttggggggaagggcggcgtcacggcgtttctgagcctgcgccaaccaaatcaactggctagtcaatctcttacggctccaccctacgcctacatccgggcaaccgttggggcgcacatagttcctctaggtggcggcaaaaaccgaggtgaggcggccgtggccttagcctcgtaaaaattaaaacctgtatgtttcagcgaataatgaaaacgcagtctggatgaaagaccccatgacgcttaatcaggcatccagtacactggctgtggccccgccccgccaggcactcgctccgcctcttcgcccccattggttctaagcgccgcccggcatccctgcgattggctaggccgggcccgtcgcgtccaataggcggtggcgccggctttcccgcggctgttcgctgttccagtgggtcgtggcggtggcggcagcggcggttaggggatgtaacggtcgcccgcctccggcgtgacgatggcggccgtagggtccggaggctatgcgcggaacgatgcaggggagaagctgccctctgtcatggcgggagttccggcgcggaggggccagtcctccccgccccccg

SEQ ID NO: 21476 - DNA, 2300 bp, Homo sapien
actacagcctggatgacagagtaagaccccatctcaaaaaaaaaaaaaaagaaaagaaaaagcgaagttcataacctgccaggaagaacaggactaaagtttaagctcaggctgcctgggtccaaccataccatcagcagcagtctgtgctcttagccactttgctataacgcctctctgaatttgctattgttatatgtagtttaatagctcaaagggcactttcaggaacatataagataaaggctatgaagtatagggtgctgggtgacagatgaaggtggctgtttgctttagaatggggttcgagaaggcctttcaagatagcgacattcaggctgagacttgaaggatgggaaggagccagacaggcagattgcagcaaaaagcccaggctgaggactcaccaatcacaaaggccaggaggcagaaaagaatatggagcctcaggaaaaccaaaagcaggccagtgtgactgaaccttggtgacagagagcacatgggaggtacagccagagccctgtagccaggagtgggcggtataatcacagtgcaggagaaagtcatggggcaggaacaagctccaccagcagctaccaggtatcctccctttatctggactccgtgccaagaagatcacaattaaaatttcatttccctccaatgcaatagtataatttatttatttatttattttgagacagagtctcactctgtcgcccaggctggagtgcagtggcatgacctcagctcactgcaacctccgcctcccaggttcaagcgatttctcccgcctcagcctcctgagtagctgggattacaggcgcgcgctagcatgccgggctaatttttctactttttgtagagacgggtttcaccatgttggccaggctggtcttgaactgatctcaggtgaacagcccaccttggcctcccaaagtgctgggattacagacgtgagctaccgcgccctaccagtagtatggttcttatcatctccattttataaaaacagattttgtgcctacacagctggaaaacaatttttttaattgccgctgtgctaatggaattccttctacctactgtgaaatcatttctttccatttttctgtctcaggatttagggaactgttctgtacgccctcctccccaggcagcactgcagagattttataaataacttctcacgtctttctcatagttttgagtgacaatatggattaagaatcccaccttggtgaggaaaaaggatagagatcgcagaaggtgagagaaggcggggtagaagcgaggaagagttggggcaggtaacactctggaccgaaccctcgaagggaccttaatgactcagcgggggccagggcagtgaggctgcagtgagctatgatcgtgacgtctaaaggcgatagaacgggggttaaaatatagcaggactaggctgtgatttacagaagcaaaatgcatttccacgggtgggaaccagcgaggaacccccgaattgctccaacgctgagggtggagccgggaaagcagcgaggagaaagtgggaggggccgtggctaaaggggcgggggttaggggacgaggcatggcagggaacaacctgaggggactggccgggggctgatgtcggggccacagttctcaggacgggactaggggaaacctaggaagcctggaactggggtagacatggcgagcagcttctcacccggttctgcaccgtctcctcggaggccgtcgagagtcgcgtccgccgccgtaggcagattggtggggcggggggcggggaggactggcccctccgcgccggaactcccgccatgacagagggcagcttctcccctgcatcgttccgcgcatagcctccggaccctacggccgccatcgtcacgccggaggcgggcgaccgttacatcccctaaccgccgctgccgccaccgccacgacccactggaacagcgaacagccgcgggaaagccggcgccaccgcctattggacgcgacgggcccggcctagccaatcgcagggatgccgggcggcgcttagaaccaatgggggcgaagaggcggagcgagtgcctggcggggcggggccacagccagtgtactggatgcctgattaagcgtcatggggtctttcatccagactgcgttttcattattcgctgaaacatacaggttttaatttttacgaggctaaggccacggccgcctcacctcggtttttgccgccacctagaggaactatgtgcgccccaacggttgcccggatgtaggcgtagggtggagccgta

SEQ ID NO: 21477 - DNA, 2300 bp, Homo sapien
ctgagacctgtgcccttggtccttcctcagtgcaccgcgctgcccagcaccttctcaggcctggttaaacaaggatgcttgcgagagggtggggagggtgaccccagctgtgtttcctttatttacagagcccttccccaagtggggcgtctaagtgggttccattttgagtggcagcagggtatggtgggaagaatcagaggcatgaactcccctcctggtttgcccacaccagccacgggtcactcaggacaaggggggaccttctcagagcctctggtctaggacagttatgggttcaggttctgcctcaggctgactgtgtgaccttgggcaagcatcatctcttgaaatgcacacagacagcttgtctcatagacttgttctctggaggagttcagtttgcacatgttcagtgcttagcacagggcctggctactgttgttactgctgcggtggttgttaatttcttcacgtgtcgaatgggagcgggagctcctgccctgccagagtcccatgtgctgtgcatgcagcacgggggagggaggggcccaggcctcatcataaggaagaagcaggcagctggagtgacatgtgggtccctttcctggcaggtccatgtggacccctcaggcaccttcctggccaccagctgctctgacaaaagcatctcagtgattgacttttactcgggcgagtgcattgccaagatgtttggccattcaggtgggtgtgcctctctgcttgggatgcctccccacccgcccacaccctctgactccgaaggcaagtgcagcctctctgctttgtttgcagaaattattaccagcatgaagttcacctatgactgtcatcacttgatcacagtatctggagacaggtgggacatggacctttgggagagttgtggctcagataccatgagcactgcactcagcctgcctgtgtagagagcatttctaaactgcccagtttggattgtgggagtcttggtgtcacacccagccctgagttcaaataccagctctaagctgggcatgatggctcacgcctgtaaccccagcactttgggacgctgaggcgggtggatcacttgagctcaggagttcgagaccagcctgggcaacatagcaaaaccctatctctacaaaaaattagccgggtgtggtcatgtacacctctagtcccagctactcaggagggggaagatggcttgaacctggtaggtagaggttgcagggagcacagatcatgccagtgcattccagccttggtgacagagcaagaccccgtctcaaaaaaaaaacaaaacactaaaaaaacatatcccagctctgccatttattttcttgtcaccttgagcaggttatttcccctgagcctcagtttgctcccctgtaaaagacaccaccgtttacatttaccttaaaaatggtgtgatgaggccgggcgcagtggctcacgcctgtgatcccagcactttgggaggcctaggtggatggatcatctgaggtcaggagttcaagaccagcctggtcaacatggagaaactgtgtctctactaaaaatacaaaaattagctgtgcgtggtggcaggcgcctgtagtcccagctacttgggaggctgaggcatgagaatgacctgaacctgggaggtagaagttgcagtgagctgagatcgcgtcactgcaccctagcctgggtgacagagcaagactctctcaaaaaaaaaaaaaaaagaaaattgtatggtgagaaatgaatgagatgatatacatacattctttagcacatgggtggtactcaaggaagtcccttttgtcactccctttgatttaccccagttcttccccacagcccccttcctcaggtcttgaggcctccagaacaggccctggtttgctgggatgccccagacctgggcccagggtgtggatgtggcaagtccagcacccctgcactaagcggataggggtgtgttttccaggagcatctggagaatggggtccaggctgtggtgtgggtggcttcagggtcagccacggcagcggctcccatgcttactcttcctctgccttgtgtgtctctctttgacctccgcagctgcgtgttcatctggcacctgggcccggagatcaccaactgcatgaagcagcacttgctggagattgaccaccggcagcagcagcagcacacaaatgacaagaagcggagtggccaccccaggtcctggcagcccctgcctgtccaccagagggatgagtccctgccagggccccatggagtgatgctggggacac

SEQ ID NO: 21478 - DNA, 2300 bp, Homo sapien
cgccgccacctgtgccgctgttgtggcaagggctttcatgacgccttcgatctcaagcgccacatgaggactcacactggtgagcagtggcagggacagggaaaagttgctgggccccaggtggggatggaaggaaatggagagaggtgctgggctgtggagtgtccatggtttgtgtatgtggggtatggagaatcaagacatgatgtctctcggaccccagtgggtgggtgtaaggtggcaccaaaataggggcctgtcacggaatgcagagtgcagacggatgccggttatacgattcaggctccagatcgaaaggcaagggaaggcctccctctccatcccccaggggagggagcatcctggtgagggagagtggagacacaggtgtctggcccatgtctgcactgggtgacggtagcagatggtgggtcatgggcggaagagtctgaagagcttggaataggtaccagaaatgctcaacactggaaagcagggtgggggcgctttagtccagagcccattgccctctctgtccagccctcccctctgcgcccatctgtgcagggatccggcccttccgctgcagtgcttgcgggaaagcgtttacgcagcgctgctccctggaagctcaccttgctaaggtgcatggacagccggccagctacgcttaccgtgagcgccgcgagaagctgcacgtgtgcgaggactgcggcttcaccagctcccggcccgacacctacgcacagcaccgcgccctgcaccgcgcagcctgatacggtgtgccagcgtcctccccacgaggcaaataaacacagaaaactcacgcatggaatctggtgtttattacactcgggggagagaggaggtcactcggtccagcggtggccgcagtgtggggctgtgcacacgtagtaaaggcgcatggcgtcctggcagaaatgatgcatggttaggaaggatttggacccagcagcgccttaccccaaaagaacaggcaagagaacttcaccaataggtaagggcccggcagagttccaagaagcgcagggtcacccacattgatatccccgcccccagaaaggaccaaacaagccccagatacttagaaagccctcgcgccacttacctcggcccgcgcactgtgtgactggaagaacacagcctccttgtggccgcacctgagagggtaggggctcggtcaccggaggcttcacacccttccctcctcccttcgcccagtgaggagacgagcctcactttacctccccagtaccagctgaacgctcacttttggcacgggtggtcctcggtccgcggcaacgtggggtcctgggacacgtcggcgataatctgggtcagttcgctgcagggacgcgggggtgcaaaattacgctcagacccagcctccagagccaacacccccgcccccagctcagggcccgccactcactccacttcgtgcgtgatcttgttgacatagatgcagctgttgtcggcctcctgctggtaatcacagttccggcactacgagagggcgagtgtgggggaaagggggtcacggaaggattccagacaagattgggaggagagggcagggtgatcccggaggatatgacgacaggactctctttggggatgggcaggacatgagagtcaggatcacttgaggtgcagcggagggcgaacagggagtccgatcacagaggcagggggcagggcggggccacgctgggaacaggtggacctgccggggaagaccccggcgctcaccgcgtagagcagaatgcggttctccttgtcttccttggggtacagcatgttgttactgtggggagggggaggtgccaggggttagttctggagccattcctcgcccgccttctaacatcacccgctccctccgcctcaccattcctggcagaagcgaatacccacgaagcccggctcgtaagtcccgtcgggctccatggcgacgcgcagcccgcgcagccctcccagccttccgcgcttgctccgccgcgctacaggtcgcgggaggggccaggcctaggtgcttcgccaaaagagggcggagctgcgcacacgtgctggctccccgccgcctcgggctcggctctctccgcgcagaggtttcatggcttgcttcaatcttttgatatcttagagtaattgcttccaatttttgggcatcgccgcctcagtttacagaatagtatggatctggtgccagagccgggaaaacgatgcgcatcgtaaaccgcaaaacactgagcatccaggacagaagccaaggcgct

SEQ ID NO: 21479 - DNA, 2300 bp, Homo sapien
ttgccctctctgtccagccctcccctctgcgcccatctgtgcagggatccggcccttccgctgcagtgcttgcgggaaagcgtttacgcagcgctgctccctggaagctcaccttgctaaggtgcatggacagccggccagctacgcttaccgtgagcgccgcgagaagctgcacgtgtgcgaggactgcggcttcaccagctcccggcccgacacctacgcacagcaccgcgccctgcaccgcgcagcctgatacggtgtgccagcgtcctccccacgaggcaaataaacacagaaaactcacgcatggaatctggtgtttattacactcgggggagagaggaggtcactcggtccagcggtggccgcagtgtggggctgtgcacacgtagtaaaggcgcatggcgtcctggcagaaatgatgcatggttaggaaggatttggacccagcagcgccttaccccaaaagaacaggcaagagaacttcaccaataggtaagggcccggcagagttccaagaagcgcagggtcacccacattgatatccccgcccccagaaaggaccaaacaagccccagatacttagaaagccctcgcgccacttacctcggcccgcgcactgtgtgactggaagaacacagcctccttgtggccgcacctgagagggtaggggctcggtcaccggaggcttcacacccttccctcctcccttcgcccagtgaggagacgagcctcactttacctccccagtaccagctgaacgctcacttttggcacgggtggtcctcggtccgcggcaacgtggggtcctgggacacgtcggcgataatctgggtcagttcgctgcagggacgcgggggtgcaaaattacgctcagacccagcctccagagccaacacccccgcccccagctcagggcccgccactcactccacttcgtgcgtgatcttgttgacatagatgcagctgttgtcggcctcctgctggtaatcacagttccggcactacgagagggcgagtgtgggggaaagggggtcacggaaggattccagacaagattgggaggagagggcagggtgatcccggaggatatgacgacaggactctctttggggatgggcaggacatgagagtcaggatcacttgaggtgcagcggagggcgaacagggagtccgatcacagaggcagggggcagggcggggccacgctgggaacaggtggacctgccggggaagaccccggcgctcaccgcgtagagcagaatgcggttctccttgtcttccttggggtacagcatgttgttactgtggggagggggaggtgccaggggttagttctggagccattcctcgcccgccttctaacatcacccgctccctccgcctcaccattcctggcagaagcgaatacccacgaagcccggctcgtaagtcccgtcgggctccatggcgacgcgcagcccgcgcagccctcccagccttccgcgcttgctccgccgcgctacaggtcgcgggaggggccaggcctaggtgcttcgccaaaagagggcggagctgcgcacacgtgctggctccccgccgcctcgggctcggctctctccgcgcagaggtttcatggcttgcttcaatcttttgatatcttagagtaattgcttccaatttttgggcatcgccgcctcagtttacagaatagtatggatctggtgccagagccgggaaaacgatgcgcatcgtaaaccgcaaaacactgagcatccaggacagaagccaaggcgcttggcttggttgaaggccagtgcgcatgcgcgagtttacccttcgcggactgggcgagctcttgccactcctacctccgggcttcagtcttcgccgcctgttctggtcctttcccgggccgctattggaagaaccgtgaactatggaaggcccctctggattggctgggctggcccaagagtaaggagagccctcttcctggcggtggggaagggacggcggcgattggcggacgctcctggcaggagagcgcggattggtcaggcacggagcaggaggcggggctgatagcccagcagcagcagcggcggcggcggctgcggagcgggtgtgaggcggctggaccgcgctgcaggcatccgcagggcgcggcaagatggaggtgacgggggtgtcggcacccacggtgaccgttttcatcagcagctccctcaacaccttccgctccgagaagcgatacagccgcagcctcaccatcgctgagttcaaggtgtggccatgggggcggggtccggaggggcggg

SEQ ID NO: 21480 - DNA, 2300 bp, Homo sapien
cttgaacccaggagacagaggttgcagtgagctgagatcacaccactgcattccggcctggggaacaagggcaaaactctgtctcgaacaaaacaaaacaaaaaacgattcacggactatcctccctgtcccaggcactattccaagtactggggacacagtagtgaattatagtgatcaaaatttccaccctcagggcactcgaatccagggagacagagagtaaataaaccagatgagagaaatccagagtgtgtcagaggagaattacttgtaaacacaaaaatctaaaataaagcaaagaaggggaaaggaatgaggtaaacgttaacactgaggccggtgaagacttcactagaatactgacactttaaattaagacaggaaggaagggtgaggcacgcaggcatatgacaaaagaaccattcaggcccaggatccagaggccgagctcacctggactgtgcaaggagcaatgtggctgctacagactgagtgaggtcgggagggaataaggacagaaaggggctgggcttggtggctcacgcctgtaatcccagcactttagtaggccaaggtgagctgatcacttgaggtcaggagttccagaccagcctggccaacatggcaaaaacccatctctactaaaaatacaaaaattagctgggtgggcacctgtaatcccagctactcgggaggctggggcacaaggatcacttgaacccaggaggtgaaggctgcagtgagcccgatagtgccactgcactccattccaggttgggtgacagagtgagactctgtctcaaaaaaagacagaaaggatgtactgagtggatgcacaaagagatcctgtgttctggtttctcccaagctgtccagcctggtcgctcactgtgacctacctcacattctaggcctctgtacaccctgctccctcctttccacctctttctcttaagtcaccctttcctcatccctcagctcagacatcccttcctccaggaagccctctctgattctcccaggtggagtcaggcacctcttcttggtggctccagtcccctgggatttcctgatcccagcccagaccactctaggctgtccctgtctaatgatgggtctgtctctcgtcaggctgcactggaggctccacgaaggcaggacctatctcgggtatgactgagggcaaagcccagcaagtgtctgttgaataaccaaatgaaaggtggggtgggggagtgtcccagatagagagtcctcacgtggatgcggcagccgtcatctacagggtaggagcccaggagcgcatcctcttgatccagcttgctgtagaacttgtcgtcaactccatacagctccagttccatgcaggaagcagggctgcccaccagcaactccagtttacactgtgaggaggaggcagggtgagaagaaggaggccacggaggccccgccccttgcatcaatgaccatcgccacgtcccttttcctccaaaagaccccccagtcaggacgcacggggccgcaatccagcccctcgcctcttgcccccgccctctggaccgtcggatttttcgctggacccggccctcatctctgcactctcgagttctctccggacccgccccgccgcgaccgggtccccagcctccgcagcctgggatcacctccgggcccgcccagtcactccccggcccctcccagcctcccccttccgggaaccccccaatttcttcgccccgcccctccggaccccgcccccatggccacaccttgaactcagcgatggtgaggctgcggctgtatcgcttctcggagcggaaggtgttgagggagctgctgatgaaaacggtcaccgtgggtgccgacacccccgtcacctccatcttgccgcgccctgcggatgcctgcagcgcggtccagccgcctcacacccgctccgcagccgccgccgccgctgctgctgctgggctatcagccccgcctcctgctccgtgcctgaccaatccgcgctctcctgccaggagcgtccgccaatcgccgccgtcccttccccaccgccaggaagagggctctccttactcttgggccagcccagccaatccagaggggccttccatagttcacggttcttccaatagcggcccgggaaaggaccagaacaggcggcgaagactgaagcccggaggtaggagtggcaagagctcgcccagtccgcgaagggtaaactcgcgcatgcgcactggccttcaaccaagccaagcgccttggcttctgtcctggatgctcagtgttttgcg

SEQ ID NO: 21481 - DNA, 2300 bp, Homo sapien
ctgaggaatacagctggcctcgaggctgagggaacagcatgagcacagacacagagctaatgggggcatttacaaagcatttatcaccaatttatttatttatttattggagacggagtttcactcttgttgcccaggctggagtgcaatggtgcaatcttggctcactgaaacctctgcctactgggttcaagcgattctcctgtctcagcctcccgagtagctgggattacaggtatgcaccaccacatccggctaattttgtattttttagtagagacagggtttctccatgttagtcagactggtctcgaactcccgacctcaggtgatctgcccgcctcagcatcccaaagtcctggggttattggcatgagccactgtgcccagtatttatttgagacagagtctcgctctgtcacccagattgtagtgcagtggcatgatctcggctcactgcaacccccgcctcctgggctctggtgatccccccacctcagtctctagagtagctgggactaggcgcatgccaccacattcagctaatttctgtattatttgtagagacaaggtctcactatattgcccaggctggagtcaaactcctgggctcaagagatcctcctgcctcagcctcccaaaatgcagggaatacaggcatgaaccacttcacccagccaccacttaagttttttttttaataatcagtattgctgcagatatcatttaattttgatagggggcctagtggtatggagcaacccatgttcccattttacagatgagaaaatcgctgctcaggaatatcaagccactcttttggggttgtgcagttattacagggcacagccaggattcaactcaagcctagccagcctgcagggtaggggataagagccagccagcctgcctgggggccagatttagctccccccgatgagtcctgaaaaagtactggactcccgtggctcatgcctgtaatcctagcactttggcaggccgaggcaggtggatcacctaagatcaggagtttgagaccagcctggccaacatggtgaaaccccgtctctactaaaaatacaaaaattagctgggtgtggtggtgcatgcctgtaatcccagctactcgggaggctgaggcaggagaatcgcttgaacctgggaggcagagactgcagtgagctgagatggcgccactgcaccccagcctgggcaacagagcaagacgctgtctcaaaacaaaaaaaaaaaaaaagaaaagaaaagaaaagaaaccaggctatgtaaaaatattattgtaaaaaattaaattaaatcaaaaaaaggccggtagcccatacctgtaatcccagtacctcacagtactttgggaggctgaggcaggaggacggcttgaggcccggagttcaagagcagcctgggcaacatagcgagacctccgtctctattatgtaaaaacaataatattttttaagtaaataaagaaaccaggccgtggccaaaggaatcttcctgtgtctggggccttctttagaggctagcatactgaggacactctttgggccagtccaggaaggaatgattctggtggcccctgactggggcgggggcgtggtaaggttcgcctgggaggcggcgcaggcgctgcctgcggtttgactgccatccgggctgctgcaggcactgggaaaggcaatccagcctcaatcctcgccacagacacgggcgactgtcccccagcgtgtgagtcaaaccatactccaggcctccaggaggtgtttgtcgcgacaacacctgcagagggcccgtgcggagtcccttagtgagcggaccgaaaaccgccaccctggaaggatattggcatgccctagggtgaaaattcacactacgacactcggggggtgggtcccctccgagttctcgtccgcgggtgcctccacccagacctgaggggtgtcgggaagacccccgcctaccgagtcagggcgggattaagacctccggcgctggaaacgcgtagggcggggcccagacctggatccagctagccgggcggtgtggggtgcgcatgcgcaatgtccgcttcggctctaggaccgcgcgggcgacagcagggccgcggtgcagtgtccgacccgagagttgcggcctgagtcaccggccccgccctccggagccggacgctgcgggaggcccgggagcggcagtggaaccgactcccagaactccggacgtgtgcggcggtaagcgcccggcccgtaccccctccgcaccccgcaactccgactttggcggccccc

SEQ ID NO: 21482 - DNA, 2300 bp, Homo sapien
ggagtcaaactcctgggctcaagagatcctcctgcctcagcctcccaaaatgcagggaatacaggcatgaaccacttcacccagccaccacttaagttttttttttaataatcagtattgctgcagatatcatttaattttgatagggggcctagtggtatggagcaacccatgttcccattttacagatgagaaaatcgctgctcaggaatatcaagccactcttttggggttgtgcagttattacagggcacagccaggattcaactcaagcctagccagcctgcagggtaggggataagagccagccagcctgcctgggggccagatttagctccccccgatgagtcctgaaaaagtactggactcccgtggctcatgcctgtaatcctagcactttggcaggccgaggcaggtggatcacctaagatcaggagtttgagaccagcctggccaacatggtgaaaccccgtctctactaaaaatacaaaaattagctgggtgtggtggtgcatgcctgtaatcccagctactcgggaggctgaggcaggagaatcgcttgaacctgggaggcagagactgcagtgagctgagatggcgccactgcaccccagcctgggcaacagagcaagacgctgtctcaaaacaaaaaaaaaaaaaaagaaaagaaaagaaaagaaaccaggctatgtaaaaatattattgtaaaaaattaaattaaatcaaaaaaaggccggtagcccatacctgtaatcccagtacctcacagtactttgggaggctgaggcaggaggacggcttgaggcccggagttcaagagcagcctgggcaacatagcgagacctccgtctctattatgtaaaaacaataatattttttaagtaaataaagaaaccaggccgtggccaaaggaatcttcctgtgtctggggccttctttagaggctagcatactgaggacactctttgggccagtccaggaaggaatgattctggtggcccctgactggggcgggggcgtggtaaggttcgcctgggaggcggcgcaggcgctgcctgcggtttgactgccatccgggctgctgcaggcactgggaaaggcaatccagcctcaatcctcgccacagacacgggcgactgtcccccagcgtgtgagtcaaaccatactccaggcctccaggaggtgtttgtcgcgacaacacctgcagagggcccgtgcggagtcccttagtgagcggaccgaaaaccgccaccctggaaggatattggcatgccctagggtgaaaattcacactacgacactcggggggtgggtcccctccgagttctcgtccgcgggtgcctccacccagacctgaggggtgtcgggaagacccccgcctaccgagtcagggcgggattaagacctccggcgctggaaacgcgtagggcggggcccagacctggatccagctagccgggcggtgtggggtgcgcatgcgcaatgtccgcttcggctctaggaccgcgcgggcgacagcagggccgcggtgcagtgtccgacccgagagttgcggcctgagtcaccggccccgccctccggagccggacgctgcgggaggcccgggagcggcagtggaaccgactcccagaactccggacgtgtgcggcggtaagcgcccggcccgtaccccctccgcaccccgcaactccgactttggcggcccccagacccggcgaaaccgtgaagtctcggcctcaggagccccccagatccatggtctcagattcgaaccctcagacctgttcgatctccttttatgccgtcccggggacccttctccaccctctgtctcatgatccaaaatacaggcccataggtttcagagataccctgtgaattcttccttggggtgtcctgaaccgcgatcgtagatctgtgcccccagttccagcggggaaccccattgtccgggaacccagagctcacagccacgatcttagacccgagcccacagagccagaggtgacactggaatcctgccgctgggaatacctaaattctcaagcccacatttgggatttcctaaaccccgccctggggccctttaggccgtggatgtttgctccgcgcccatgacctgccaaggacctctacattcaggctgggctctggatctcacattctagcgcccagacatgtcgggaacgccttacgccaacttggggtccccaccaagagaacccccaccagatctgcaccctccccttcacgcgtgcacccagtccaggctccctcaagccccacgggtgccttttaga

SEQ ID NO: 21483 - DNA, 2300 bp, Homo sapien
gggagcctgaggcaggagaatggcgtgaacctgggaggcggagcttgcagtgagccgagatggcgccactgcactccagcctgggtgactgagcaagactccgtctcaaaaaagaaaaaagaaaattaagacagtcaaaaccatagtattaacttgtttgttttgttttgttttgagatggagtctcgctctcttgcccgggctggagtgtaatggcgtaatctctgctcagtgcaacctccgcctcccaggttcaagtgattctcctgcctcagcctccggagtatctgggattacaggcacccaccaccacgcctggctaatttttgtatttttagtagagacggggtttcaccatgctggccaggctggtctcgaactcctgacccaggtgatccacccacctcggcctcccaaagtgttggaattactggcgtgagccacagtgcctggcccccatggtattaactttgtgttagagaatctgtgaatacttggtattttaagaatttgtaatatttaaggtaaactggcctattcaaataacaggtcaatcttgtaattccattgtaaaatgtggaattcagctggtgactaagacttacttgaaatctgtttatgtacagtttatgaattttttattcataaaagttatttaagaattgaagaaagagtcatctgtttatctggtaagtcagcttttttttttttttttttctgagacagaatctcgttctgtcacccaagctggagtgcagtggtgcaatcttggctcactgcagcctccgtgcctcttgggttcaaacgatttttgtgcctcagcctcacaagcagctgggattgtaggcgcccatgaccacacctggttaattttagtatttttagtagagacagggttttgtcatgttgaccaggctggtctcaaactcccagcctcaagtgatccacctgccttggcctcccaaagtgccgggattacaggtgtgagccaccacgcccagccctacttgtggctcttaaatggaaaaacctaacattaaatttacaagcatagtttgaaagtgttaggggaatttaataatcataaaagccctctttaaaagagaccgtggctggaagcggtggctcaggcctgtaattccagcactttggaaggccaaagtgggcggatcacctgaggttgggagcttgagaccagcctggccaacatggtgtaaccccatctctactaaaaaatacaaaaatgagctgggtgtggtggcgggtgcctgtaatcccagctgctcaggaggctgaggtacaagaattgcctaaacccaggaggcagaaggtttcagtgagccgagatcacaccactgcactccaacgtgtacaacagagcaagactctgtctaaaaatataaattaaataaataaataaaagagattgttaaaaccttttacaagctgggtatagtggctcatgcctctaattctagcactttgggtgatagaggtaggaacattacttggaggagttggagaccaccctgggcaacatagcaagacactgcctcaaaaacaaacaaacaaacattgtctgctggctgggtgcgtggctcacgatgaggccggcaaatttcttgagctcaggagttcgacaccagcctgggcaacatggtgaaacccagcctctacaaaaaatacgaaaattagttcgagcatggtggtgggcgcctgtagtcccagccactcaggaggctgaggcaggaggatcgctgaacccaggaggtcgaggctgcagtgagctatgaccgcaccactgcactccagcctgtgcaacagagcaaaaccctgtctaaaaaaaaaagaaaaaaaagaaaagaaaaagaaaaccttgtagactaggccaggatctttcctggttgctaaaaccattaggacaactgtgctgcaccccgttgactgccagaattagagagctataaatagatatgatgtgtttcttagggtaacataaaataccgttttactcccaaagactttagcttgtgtttcctaaaaacaaggtcatttaatgtctcaacaaatctctgagaaagatcctgccttagccctcacgttacagatacggaaacaggctcggaggtgcaatctctggctgtgtagacagaacagggagttggaacacggccttatgcgtttcctcactctcacataccagcgggcagggagagatccggggaggagttgcacttgcccccggcggaaatctccaaaaatctgcaaaaatgtattccctggtaccgctttgggctccg

SEQ ID NO: 21484 - DNA, 2300 bp, Homo sapien
ggagtctcactcctgttgcccaggctggagtgcagtggggcaatctcggctctcagctacctctgcctcctgaaccatttttcaataaaaggaaccagcattcttttgagaactggctgatttcagggctgaggcaggaaaaatctgaaataaccatggaacatgctgtggtaccagaaaatgtggaagtatataaaagagaatgtgggtgtgttgagagaacccaggagccaagcttaacgagttttcaagggccaaagcctgaacgattcgagcaatgaaataaacaatgaaagtagtgactacagcccatagaataaaataaatacccacgaactcatcgtgatataaagaaatcattgaatgaacaagtgaatggaagagggctagggacagttcttccttattgaagaattccaattaataaatggtgaaggaataagggacacagaaaatcaacattagacaagtgacagagtaataactggtgcagacaaggtccagtgatggatgccaaaatcggagtgggaggaggaaaagcagcacatttgcctagtgtgaaagtatttcgccataagatatttatcaattacggatggaaacttcacaggggagaaacaagacaggccctatcttaccaagtgatcaaactgaacagcacctatcttttttttttttttttctgttgcccaggctggagtgcagtggcgtgatcttggctccctgcaacctccgcctcccgggttcaagcgattctcctgtctcagcctcctgagtagctgggactacaggcacccgccaccacgcccagctaatttttatattttcagtagagacggggtttcaccatattggccaggctggtctcgaactgctgaccttgtgattcgcccgccttggcctcccaaagtgtgaacagcacctatcttaccaagtgatcaaactgaacagcaccagtaataagccatgttgatgtctgatatgtgatatacagagaagaacataacatcacttctgtgatattcttgctaaaatgcagaatctcactgtgagaaaacattagacaaacgtaaagtgagagacaatctacaaaaaaatactcattaagaggatcagctggctgggtgcagtggctcatgcctgtaatcccagcactttggaaggttgaggtgggcaggtcacttgagctcaggagtttgagaccagcctggccaacatagtgaaaccctgtatctactgaaaatacaaaaattatccaggtgtggtagcgtgcacctgtaatcctagctactcaggaggctgagacaggagaattacttgaatctgggaggcggaggttttagtagagatggggttttaccatgttggccaggctggtcttgaactcctggcttcaagtgatcttcccaccttggcctcccaaagtgctgagattacaggcatgggccactgtgcccagccaataaaatggttttttttttggtttgttttttgagatagacgttcacttttgtcgctcaggctggagtgcaatggcatgatctcggtttactgcaatctccacctcatgggttcaagagattctcctgcctcagcctcccgagtggctggaattacaggcacccacaaccatgctcagctaagttttttgtttgtttgtttgtttgttttttgagatggagtctcgctctgtcgcccaggctggagtgcagtggtgtgatcttggctcactgcaagctctgcctcctgggttcacgccattctcctgcctcagcctcctgagtagctgggactataggcgtctgccaccgcacccagctaattttttgtatttttagtagagacagggtttcaccatggtctcgatctcctgacctcgtgatccgcccgcctcagcctcccaaagtgcagggattacaggtgtgagccaccacgtctggccaatttttgtatttttagtagagacggggcttcaccgtgttggccagggtggtcttgaactcctgacctcaggtgatccacccacctcagcctgccaaagtgctgggattacaggcatgagccaccatacctggccaagaaaataagtttttcttttttctttttttttttttttttgagacagagtctcgctctgttgcccaggctggagtgcagtggcgcgatctcggctcactgcaagctccgcctcccgggttcacgccatactcctgcctcagcctcccgagtagctggaactacaggcgcctaccaccacacccggctaatttttttgtatttttagtagagatgtggtttca

SEQ ID NO: 21485 - DNA, 2300 bp, Homo sapien
tggtcacagaacaccaggcatctgcctaaatccagtgtcactcagaaggctgaggtcactcctgtccagggccagaatctgtcctaacttcaaaggttctgcatgggtcaagcactagagtcactggcacacttggtgctgcacatacagtcagtgtcacacaaacataaccacacatccactcttttatttttttgagacagggtctcgctctgtcacctagactggaatgcagtggttcaaacacggctcactgcagccttgacctctcaagctcgagatcctcccacctcagcttcccgggtagctgggaccacaggtgtgggccaccacactcagataatttttaattttttgtttgtttgtttttgagacgaagtctcgctcttgtcccccaggctggagtgcgatggcgcgatctcggctcactgcaacctctgcctcctgggttcaagcgattctcctgcctcagccccctgagcagctgggattacaggcacctgccaccacgcccagctaatttttgtatttttagtagagacagggttttatcgtgttggccaggctggtctagaactcctgacctcaggtgatccacccgcctcggcctcccaaagtgctgggattacaggtgtgagccaccgtgccagccattaattttttttttttttttttgtacaggccaggctggtctcgaactcctgggctcaagtgatcctcccacctcggcctcccaaagggctgatgtgagccaccacacccggccctacatccactcctgagacacaggacacaatcacagacacctctatacctttccagtcacaatatctttccagtcacaatcacacacccgctaagacacacccagtcacacaatctactctccactgtgatacagttactcccgtatagtcacaagccccacacaccaacacccacaaatgcctcatatagtcacagtcacacacccactcaggggacacacgccatcactggtactttacggcacccagtcacaactgaactttcactgtggacatacacacagtcacactcacacaagcaacccacacaagcagtggcaccccactcccgcatacacagcaccacacacatacacacaaacacacacaccaagggatacaggaatacacaagcggcgtcaccacacagtcacaggcacaggcaattgcacacggccacagtgtcacacaaccaaaaccacgcacacaccttggagacatgaatcacaaccgcacacccgcagtggtcacacagtcacaactgtactcacaccccaggaacagggcgaacaggccacatatacaacggggacacacgcagtatcacccccggtcacaaggaccctgcaccccgatactctctatcacacatggttacacaaaaaccaccagacaccctggagacaggcggttacacgtgcacagttgcagacacccacacccagccacacagccacaaagacacattcagaacggcgcatccgcagccagctcccgcctgcgcgcacagattcgaggctccggacacgccccggccccgcccaggactcccagacccctcaccttctgcctcccctggtcgcgtccgggtccttgcggagctaactagctcgccacgacgtcaagaacgacgtaacgtcaggccgctgtgggctctgggaattgtagtccagagctagatcggccacggacagaatggcgttctcttatctctgagtcggggcctggctcgttttgacatttttgcgcccacgagtcttcggagagggcgtcgccactccagaccttccagcaagcttgaagtcatctgacgctaaaggactacttacctcaagagctccatcgtcacagaaggaggcggccaagttcgcggggggaggggaggagacagagagtcgaccagtaaagcctcaagggaaatgtagtccaaggcctgagaagcgacgttgctggtaatagaaggtaattcagtaccagcctgggcctggccgcggtgaccgaggcgggccgcgtcgcggagacttctgggagtgcttcctcgctctccgagtgcgcaagcgcagcgcaccgagtggacattttggtctttgtccgcgggtcagtacggcccctgggtccacgtggcgcgaaagtaggaggtgggatctgggcgtctcgggtcggtcggaccggggaggttaaaggggaggattcctgatctttaggggcgcggcgcgagggcagggagtgggtgtaagagcttctggcctacgtgcggggcggagatgggggcct

SEQ ID NO: 21486 - DNA, 2300 bp, Homo sapien
ggctcttgcagcttgtctctttccatagtaagtctaggatcagttcccctagttccaaaagagaaaagcctgtccatacttttattaggatcacattattactattattgagacggaatctcgctcttgtccaggctggagtgcagtggcgagatctgggctcactgcaacctccgcctcccaggttcaagcgattttcctgcctcagcctccgcggtagctcagattacaggcgcccgccaccacgcccggctaatttttgtatttttttattttatttttttttagtagagacagggtttcaccatgttggccaggctcctctcgaactcctgatctcaggtaatccacccatctcggcctcccaaagtgctaggattacaggcatgagccaccgcacccgaccaagatcacagtaaattaatacattcacttaagtttgcgcacacttcttaatgtcacatggtatatttatttgttcacatttgttatgccccttagtagtattttaaagttctttcctaatagttctgaacctttaagtttcttccacaatactttatctttttactgctattgtaaatattagttttcttcaactatgtattctaactgatatttgtaaattagaaggctatttatttatagatattaacttggtacccaattactttatttaactttttgtaatttaaaactatgtcaatgacgacagcgggggcggggtgatttccttagaaaacgcatctttggagacgtcagtagcattctccattacttcacaaaatccatacaacctgagaacgcctcgactcattaaggaattaagacacctaggatttagtccagactcatagataaacactgcaacaattaagctttcttcaaaaaatgaggataactgtgcctaacctaaaaccgttgactccctcatcctgggcgccgttatatgggattgcttctcaaagcgtacaatgctgtttagtctagggctttgcttaacagccctatttaagtaccccaaagatggggatttgaatagtctgaagtaggcaccccgaaactaaagttccttcgaaacactctcgtttaattaaaaaaaaaagtcacggtgatttgcatgccactccaattaaaaagaaatgcttttatataaaaactcgttttaaaattattcaccacttagcttttccaccccttcaattttcaagtaaaaaagacgctccaggaagatggcaccgttataattatcagcactttcgacaagggaagtgcagctcaaacgttatacctcaatgctggtctcctacatctccctcttaggcacaatcacacacaatcccgcacccagtttcacattcactcaacaatcccaaacatcaggtcaaactttgaggacaaactcggtcacactcgctcaaacccgcctcagaggcccccatctccgccccgcacgtaggccagaagctcttacacccactccctgccctcgcgccgcgcccctaaagatcaggaatcctcccctttaacctccccggtccgaccgacccgagacgcccagatcccacctcctactttcgcgccacgtggacccaggggccgtactgacccgcggacaaagaccaaaatgtccactcggtgcgctgcgcttgcgcactcggagagcgaggaagcactcccagaagtctccgcgacgcggcccgcctcggtcaccgcggccaggcccaggctggtactgaattaccttctattaccagcaacgtcgcttctcaggccttggactacatttcccttgaggctttactggtcgactctctgtctcctcccctccccccgcgaacttggccgcctccttctgtgacgatggagctcttgaggtaagtagtcctttagcgtcagatgacttcaagcttgctggaaggtctggagtggcgacgccctctccgaagactcgtgggcgcaaaaatgtcaaaacgagccaggccccgactcagagataagagaacgccattctgtccgtggccgatctagctctggactacaattcccagagcccacagcggcctgacgttacgtcgttcttgacgtcgtggcgagctagttagctccgcaaggacccggacgcgaccaggggaggcagaaggtgaggggtctgggagtcctgggcggggccggggcgtgtccggagcctcgaatctgtgcgcgcaggcgggagctggctgcggatgcgccgttctgaatgtgtctttgtggctgtgtggctgggtgtgggtgtctgcaactgtgcacgtgtaaccgcc

SEQ ID NO: 21487 - DNA, 2300 bp, Homo sapien
ctgagccaagagaatcgcttgaacctggggggcagaggttgcagggagcagagattgggccactgcactctagactgggcaagagagagagactccatctcaaaaaaaaaaaaaaaaaaaaaaaaagacagggactggctgtccaccaagctggaatgctgtcgccaggatctctgctcactgcagccttgacctcctaggctcaagtgatcctcccacctcagcctcccaagcagctaggactacgggagatctcactatgtcgcccaagctggtctctaactcctggactctagccatcctcctgccttggctcacaggtgtgagccaccaagcccggcctgaggctttatatttaaaatgtgttgggtccccatctccccacacctcaacgccttttctttctcagtctgtactggctcttgcagcttgtctctttccatagtaagtctaggatcagttcccctagttccaaaagagaaaagcctgtccatacttttattaggatcacattattactattattgagacggaatctcgctcttgtccaggctggagtgcagtggcgagatctgggctcactgcaacctccgcctcccaggttcaagcgattttcctgcctcagcctccgcggtagctcagattacaggcgcccgccaccacgcccggctaatttttgtatttttttattttatttttttttagtagagacagggtttcaccatgttggccaggctcctctcgaactcctgatctcaggtaatccacccatctcggcctcccaaagtgctaggattacaggcatgagccaccgcacccgaccaagatcacagtaaattaatacattcacttaagtttgcgcacacttcttaatgtcacatggtatatttatttgttcacatttgttatgccccttagtagtattttaaagttctttcctaatagttctgaacctttaagtttcttccacaatactttatctttttactgctattgtaaatattagttttcttcaactatgtattctaactgatatttgtaaattagaaggctatttatttatagatattaacttggtacccaattactttatttaactttttgtaatttaaaactatgtcaatgacgacagcgggggcggggtgatttccttagaaaacgcatctttggagacgtcagtagcattctccattacttcacaaaatccatacaacctgagaacgcctcgactcattaaggaattaagacacctaggatttagtccagactcatagataaacactgcaacaattaagctttcttcaaaaaatgaggataactgtgcctaacctaaaaccgttgactccctcatcctgggcgccgttatatgggattgcttctcaaagcgtacaatgctgtttagtctagggctttgcttaacagccctatttaagtaccccaaagatggggatttgaatagtctgaagtaggcaccccgaaactaaagttccttcgaaacactctcgtttaattaaaaaaaaaagtcacggtgatttgcatgccactccaattaaaaagaaatgcttttatataaaaactcgttttaaaattattcaccacttagcttttccaccccttcaattttcaagtaaaaaagacgctccaggaagatggcaccgttataattatcagcactttcgacaagggaagtgcagctcaaacgttatacctcaatgctggtctcctacatctccctcttaggcacaatcacacacaatcccgcacccagtttcacattcactcaacaatcccaaacatcaggtcaaactttgaggacaaactcggtcacactcgctcaaacccgcctcagaggcccccatctccgccccgcacgtaggccagaagctcttacacccactccctgccctcgcgccgcgcccctaaagatcaggaatcctcccctttaacctccccggtccgaccgacccgagacgcccagatcccacctcctactttcgcgccacgtggacccaggggccgtactgacccgcggacaaagaccaaaatgtccactcggtgcgctgcgcttgcgcactcggagagcgaggaagcactcccagaagtctccgcgacgcggcccgcctcggtcaccgcggccaggcccaggctggtactgaattaccttctattaccagcaacgtcgcttctcaggccttggactacatttcccttgaggctttactggtcgactctctgtctcctcccctccccccgcgaacttggccgcctccttctgtgacgatggagctcttgaggtaagt

SEQ ID NO: 21488 - DNA, 2300 bp, Homo sapien
tttgcaagaacaaaaacattctttttcataactacagtacagtgatcaaaatcgggaagtttaacattgatacattagtattatttaatccaaagtccatattcaaatttggtcagtcatcccaataatgtctgctattgattaaaaaaattcttttgggccacgtgcagtggctcacaactgtaatcccagccctttgggaggccaaggcaggtggatcacctgtggtcgggagtttgggagttcagcctaacacagagaaactccgtctctactgaaaataaaaaattagtggggcatggtggcgcatgcctatagtcccagctgctccggaggctgagacaggagaatcacttggacctgggaggtggaggttgcagtgagccgagatcgcaccactgcgctccagcctgggcaacaagagtaaaactccatctcaaaaaaaaaaaaattttttttttggctgggcgcagtggctcacacctgtaatcccagcactttgggaggcagaggtgggcggatcacctgaggtcaggggttcaagaccagcctggccaatgtggtgaaaccctgtctctactaaaattacaaaaattagctgggtgtagtggcgcatgcctgtaatcccagctactcgggaggctgaggcaggagaatggcttgaacccgggaggcagaggttgcagtgagcagagatcacgtcactgcactcccagcctgggcaacagaacgagtctctgtcacaaaaaaaaaaaaaaagatttttttttttcttttggagtgcagtggctattcataggcatgatcatgtatttgcagcctggaagtcctgggctcgagtgatcttcctgtctcagcctcctgagaagctggtactgcatgtgcacaccaccacacctggcttaaaaatgttttttgaactaatggatgaacctgtattccaggttgttgcttttcttttttatgacaaggtctcactctgtcaggccatcttgaactcctgggctcaagtcatcctcccacctcagcctcttaagtagctgagactacaggcgcacaccattgcgcccagctaattttgtatttttataaggacggtgtgtcactgtgttgcccagcctggtcttgaactcctgcactcaaaacgattcacccacttccggcctcccgaagtgttgggattataggtgtgagccactgcacctgggccaggacatctctaatatgaaataggacacggcacggtggcttacatctgtaatcccagcactttgggaggctgaggtgggtggatcacctaaggtcaggagttcgagaccagcctggccaacatggtgaaactctgtctctactaaaaatacaaaattagccaggtgtggtggtacacacccataatcccagctactcaggaggctgaggcaggagaattgcttgaacccaggaggcggtggttgcagtgggctgagattgcacaattgcactctagcctgggcaacaggagtgaaactgtctcaaaaaaaaaaaaaaaaaaagaaagaatttcactctcagtataatgcaaagagggtaaataggacttcaggaaaatgtttgagtttttattcttgagtactgtcagaacaacttcttcacattgtgcccatgtgctttagttctgatgggaacgtgttaaagtcagacatgggtgttgaattcatccacgaataagggctgtagttaaaatcctctcaggaccctgagtgggagtgtggtgctagagaaaaacagcaatcactcacacaaggtgtgaacagctctcctgtgtaagtaaaattctgaaaggtaattctccctttctcccatttctggatgtgtgtagactttaaatggtttaatgagcatggctttgaagtttaggattctaatggccctagtccctttgcccacatgattgtgtgtgctttagtcactaaggcagaaggtcattactttgttctgtgcatctttggaagttgcaccctcattcttcagaaggccaggagaccccagggctcagcctgagttctaggatggtactttggacccagcattaacattgtaatactgtgtcattttcccaatagttaatatgatcctctgttgaagcaagaagacaaactgtatggtggagaaagaagtgggaaggatctgcgcgggtgagtaaatgacaggcaggccacagtttttcagtcagcattgagtcctctgaagtgcttcaaaggatgttttcttccaggctgtagacatatagagtattgcttggtatgagatttttagattcc

SEQ ID NO: 21489 - DNA, 2300 bp, Homo sapien
cctttagcatatgctgctttaatttggcatctgtccatcccatgaaagtcattaacatcgcccacaccacacttgcctggacagccaggtcctgtctcccaagactctgcactctactctcctttatccctaatcagtcatgtcccacctcttcctcctcaaggtagacacaaaacatcttctatatccttatccccagctttcaaccaactatcttattacaccctggaaatgtctacattgcggaaattatagccatgttgttttcgctcataaactgtaaatttcttttttctttgctttatctttttttttcagactgagcatcgccctgttacccaggctaaagtgcagtgggaagatctcggctcactgcaacctctgcctcctaggttcaagagattctcctgcctcagcctcccaagtagctgggtgtggggaaaagcaagagagatcagattgttactgtgtctgtgtagaaagaagtagacataggagactccattttgttatgtactaagaaaaattcttctgccttgagattctgtgaccttacccccaaccctgtgctctctgaaacatgtgctgtgtcaactcagagttaaatggattaagggcggtgcaagatgtgctttgttaaacagatgcttgaaggcagcatgctccttaagagtcatcaccactccctaatctcaagtacccagggacacaaaaactgtggaaggccgcagggacctctgcctaggaaagccaggtattgtccaaggtttctccccatgtgatagtctgaaatatggcctcgtgggaagggaaagacctgaccgtcccccagcccgacacccgtaaagggtctgtgctgaggaggattagtaaaagaggaaggaatgcctcttgcagttgagacaagaggaaggcatctgtctcctgcccgtccctgggcaatggaatgtctcggtataaaacccgattgtatgctccatctactgagatagggaaaaaccgccttagggctggaggtgggacctgcgggcagcaatactgctttgtaaagcattgagatgtttatgtgtatgcatatctaaaagcacagcacttaatcctttacattgtctatgatgcaaagacctttgttcacgtgtttgtctgctgaccctctccccacaattgtcttgtgaccctgacacatccccctctttgagaaacacccacaggtgtgtaggggcaacccacccctacactgggataaactaaactaaactaaactaaactaaaactaaactactaaactaaactaaactaaactaaactaaaactaaactactaaactaaactaaactgctaaactaaggggtttggagggctcctggattattgaacacgtaaaggttcctggagggtggtgcagccagagacggcatggaagctctgcacccctcccccatatcttgccctatgcatctcttccttctggctgttaatctgtatccttgtcaatatcctttataataaatgggtaaacataaataaagtgtttctcagagttctgtgaaccactctagcaaaatactcaaacttgaggggtcatggcaaccttgatttatagccagtaggtcagaagcacaggtcacatcctgggacctgcaattggcatctgaagcgggggcagtattttgggactaagcccttaaccgatgggttctgctgctatctccaggtacagttggaattgcactgaactgtagcacacccagttggtgtccgctgaagaactgtttagtgtgggagaaaaaaactccacacattggtgagtggtgtgtgtaaatgtagaaagaaaaacaccctggttgcttcctacctttcactaaaactgctcatgacacaccatcatgctctcactacttcggcaatacagacactccctctgtaactattcacatacagtcaataacataagcaagagttacacacagtcaagaaaagccattcacgtggttacaagtggccacacacctaatgctgctgtcacaatcatgcatgctgctgtcacaatcatgcacgtcaaacagctggctagggctagcgccacacacacacacacgcacacacggagacgtgcgcgcacacccacttgtgcagagacacgcgcacgcagacacgtgcgcacagagacgcacacagacacacgtgtgcacacaggcaaacaggcacgcgcagagacgcacacagacacgcgtgtgcaccacaggcaaacagacacgtgcagagacgcacacacaggcacacgtgtgcacacacagaga

SEQ ID NO: 21490 - DNA, 2300 bp, Homo sapien
tctggtctttgaccctagttcctgacacagagttctcaaatcccttgggatttcctggctgataggagcatagtatgttctaatgaggtgacttcttggtgggctcctggatggcctcagaatgtgatatgagggttggaactttcagccccaccccttgacctctggggaggggacagcagctgaaggttgagttgactgacaatggccaatgatgttatcaatcatgcctatgtaatgaagcctccatgaaaacccaaaaggattgggttcagagagcttccagattgctgaacacgtggggattcctggaggatgatgtgctggggtgagggcattgaagcccaatgccacttcccacatatgttgccctaggtacctcttcatcgaaaacctttgtaatatcctttttatttattttcatttttttattttttgagacacactctctctctgttgtctgggttggagtgcagtggcacgatctcggctcactgcaacctctgcctcccgggttcaagcgattctcctgcctcagcctcctgagtacctgggaatacaggcgcccaccaccatgcccggctaacttttgcatttttagtagagagcaggctggtctcaaactcctcacctcaggtgatccacccacctcagcctcccaaagtgctgggattacaggcgtgagtcactgcgtccggccctttttattaaaataaataaataaataaaattttttttgagacagggtctcgctctgttgcccaggctggagtgcaatggtgagatctgggctgaccacaacctcaacctcctaggctcaatcctcccaccttggtctccctagtactaggactacaggcgtgcaccaccacaccaagctaagttttgtattttaataaagacagggttttgctatgttgccgaggctggtctcaaactcctgggctcaagtgatctgcccacctcagcctccgaaagtgctgggattacagacgggcaacaccatgcccagctgtaatatcctttatactaaatggactaatgttaagtaaatggtttccctgagatctgtgagccatcctagaagattaatcacacctgaggagaggatgtggaaaccccaaatttatagctggtcagaagtacaggtcaccacctggctcttgagatggacatctgaagtggaaggatcttgtgggactggtcccttagcctgtgggatctgacgctatctccaggtaggtggtgtcagaactgaactgaactgtagtcctacagttggtgtctaatggggaactgcttggtgtgtggagaaaaaacccacacatctggtgtcagaaatgttctttattgagtgttgagtggtgtgagagtaggagagacctcgtctaggaaaagggagaattttatctttgcaaaatgtcactgtttgccctcattattcaaaaaaaaaaaacaaccctttagcatatgctgctttaatttggcatctgtccatcccatgaaagtcattaacatcgcccacaccacacttgcctggacagccaggtcctgtctcccaagactctgcactctactctcctttatccctaatcagtcatgtcccacctcttcctcctcaaggtagacacaaaacatcttctatatccttatccccagctttcaaccaactatcttattacaccctggaaatgtctacattgcggaaattatagccatgttgttttcgctcataaactgtaaatttcttttttctttgctttatctttttttttcagactgagcatcgccctgttacccaggctaaagtgcagtgggaagatctcggctcactgcaacctctgcctcctaggttcaagagattctcctgcctcagcctcccaagtagctgggtgtggggaaaagcaagagagatcagattgttactgtgtctgtgtagaaagaagtagacataggagactccattttgttatgtactaagaaaaattcttctgccttgagattctgtgaccttacccccaaccctgtgctctctgaaacatgtgctgtgtcaactcagagttaaatggattaagggcggtgcaagatgtgctttgttaaacagatgcttgaaggcagcatgctccttaagagtcatcaccactccctaatctcaagtacccagggacacaaaaactgtggaaggccgcagggacctctgcctaggaaagccaggtattgtccaaggtttctccccatgtgatagtctgaaatatggcctcgtgggaagggaaagacctgaccgtcccccagcccgacac

SEQ ID NO: 21491 - DNA, 2300 bp, Homo sapien
ggtgtgtgtgtgtgtgtgttgggggggtgcgtctgtgtgtgtgtctgtgtgtgtgcgcgcgcagtgcctgtctgtgtgccgacttctgtctctctctcacgtctctctctctctctctctctctctctctctctctctgtctcccttctcgctctttccgtggccctctctttctgtctctgtccgtctgtgtgtgcgtgcgcctcgggacacatgtgccctgtgcgccggagggtgggtttcttgcacgtcggcctttcttctggtcagcctctccccgcgtctctgcctgggtcgtgtggccggttggcagtcgtcgtcccggcggttccagtttgggggtctgtgaaggcctgggcaacgtgggcatcggcgtcggacccgcaggggttttcatcccctccccatccggagcagcctctttgctaggctggatccagacgagcgctccccaaccaaggacaacggcctcccaggcgctcatcgtccacccgcaggagggtgcccgcagagcttcaagaaggtggttgtcacgcctgtcgccctctgccctcatcgagaaatgtagccacagctcgacgcagggacggagaaggaagccggcaaggggatggggcaagcatgtctgtctctcaaaggctggccttcctggccgagtcacccgtttgacactcctccccggatgccggtggtggtggcatggcccccccgtatcctgcctgggctctggcctctgctctgacctccctcttgctgtgtctgccccgtctctgagaagcctggcggcttcttagtgtggctcagtgtcttccacaaagaagacttccctgtccatcagggagaaacctcgtggcggtccgcgtcatgattgtttccctctccacacctctttctggatgattgggcagctgtggtgatcctggagctctgggcttccatacctgtgtgggacagggaagctctctcggtctccatggcccaagtgatggctgcacgctcggtccaggaagaggcggaggcaagcccaccgctcctgacattggccttctaggaaaggcggtgttgcatcccacctgcacttcctctctgattcttgagggccaaccgcttcctccgctcctggggaaagtgccttctagcaccgaatcttttggctgccacggatgtcagggagccaacgggactgggttttggctgggtgcaggggaggttgcgtcaggggtacctagccggcggcgggctgggggtggggtgtactttgtccaaacctctcggctcctctggcgggcctccctgaacgtggcgtggactcgcgcacaggccctgtctcgcaggttttcaggtgcgcttggcttttcctccgctttgtggggcaggtctccagtggccccccgggcgcacgcctggacatcactgtccgtctcgtcgtcgccccctacggcctcaaagacacacgctgcctgcatgtgctcttgggggacgacagtgccacatgtggacacactggctccagctcggactcgcctctgtctctctttgcccgtgtcgccggaagccgcctcgggttgccggagccctcgggccttggagatgaaggcaggcccctgctcctgccaggaaggagggaggcagtgggctcatgggtcggtgcctttgcagccgacagcacgccttgcggccctggggatcttcctgtgccccggcgagaccctttccgcctcactgcattggaaccccattcccgatcacccgctgggatccatcatcggaccccaagaggagtccgcgcagcccagccggcaccccgaagctcctccttcagtgggaaccgaagcagaagagcgatcaaggaggtcctcaccacaggactcatgggtccgaccatgggtctcccgcaggcccctctggcagtcctctccccacccgccgcctcgggctgcgccttcgccgccgccgccgcaacctccagcaccgccgccccaggccccgcagccgccgcgtcgccgccattttttaaagggtccgcagcctgactctgcggagtaagggggggtggagcgggggagtcggcctcgccagcgcgcatgcgcgaggcccgagccgccgcttgggtcacagtgaaagccaccgttgcccggggatgggtccctgacacttggggaagtaggagccctgtgtgatcgtgcgtctgagtctgggctgagaccagtcctggccagggcagttaccaggacggtctccggaggccgggattcgcggagggtccagcagcaggaagaaaccccaggaggaagaaacct

SEQ ID NO: 21492 - DNA, 2300 bp, Homo sapien
tcaggattcttaaaatagtttagtatcggtcgggtgcggtggctcacgcctgtaatcccagcactttgagaggccaaggcaggtggatcacctgaggtcaggagttcaagaccagcctggccaacatggtgaaaccccatctctactaaaaatacaaaaattagctgggcgtggtggtgctcacctgtaatcccagctactcgggaggctgaggcaggagaatctcttgaacccaggaggcagaggttgcagtgagccgagatcgcgccactgcactccagcctgggtgacagaatgagactccctctcaaaaaaaaaattttttttttaggtattgatcattttaggtattaaacatttataacctgacctcaagttatctgcctgcctcgacctcccaaagtgctgggattataggcataagccaccaattctggcctctttttctctccaattctgaagcttcaccacaaagcagtcagaaaccagggacagtaagccaggaaatgaggaaaagaactgaaaaggcagaagccatccatattttatttcctcctctgccatcttaccacactccttccccttcccccacagcatggctgaactaagggagagcagaaccctcatctgtaaaaaatgcttaaggtttctttttctttccctccctccctcccttcccttctgtggggaaaagagagatcagactgttactgtgtctatgtagaaagaagtagacataagagattccattttgttctgtactaagaaaaattcttctgccttgagatgctgttaatctgtaaccctagccccaaccctgtgctcacagagacatgtgctgtgttgactcaaggttcaatggatttagggctatgctttgttaaaaaagtgcttgaagataatatgcttgttaaaagtcatcaccattctctaatctcaagtacccagggacacaatacactgcggaaggccgcagggacctctgtctaggaaagccaggtattgtccaagatttctccccatgtgatagcctgagatatggcctcatgggaagggtaagacctgactgtcccccagcccgacatcccccagcccgacacccgaaaagggtctgtgctgaggaggattagtaaaagaggaaggcctctttgcagttgaggtaagaggaaggcatctgtctcctgctcgtccctgggcaatagaatgtcttggtgtaaaacccgattgtatgttctacttactgagataggagaaaacatccttagggctggaggtgagacacgctggcggcaatactgctctttaatgcaccgagatgtttgtataagtgcacatcaaggcacagcacctttccttaaacttatttatgacacagagacctttgttcacgttttcctgctgaccctctccccactattaccctattggcctgccacatccccctctccgagatggtagagataatgatcaataaatactgagggaactcagagaccagtgtccctgtaggtcctccgtgtgctgagcgccggtcccttgggctcacttttctttctctatactttgtctctgtgtctctttcttttctcagtctctcgttccacctgacgagaaatacccacaggtgtggaggggcaggccaccccttcaataatttactagcctgttcgctgacaacaagactggtggtgcagaaggttgggtcttggtgttcaccgggtggcaggcatgggccaggtgggagggtctccagcgcctggtgcaaatctccaagaaagtgcaggaaacagcaccaagggtgattgtaaattttgatttggcgcggcaggtagccattccagcgcaaaaatgcgcaggaaagcttttgctgtgcttgtaggcaggtaggccccaagcacttcttattggctaatgtggagggaacctgcacatccattggctgaaatctccgtctatttgaggctgactgagcgcgttcctttcttctgtgttgcctggaaacggactgtctgcctagtaacatctgatcacgtttcccattggccgccgtttccggaagcccgccctcccatttccggaagcctggcgcaaggttggtctgcaggtggcctccaggtgcaaagtgggaagtgtgagtcctcagtcttgggctattcggccacgtgcctgccggacatgggacgctggagggtcagcagcgtggagtcctggccttttgcgtccacgggtgggaaattggccattgccacggcgggaactgggactcaggctgccccccggccgtttctcatccgtccacc

SEQ ID NO: 21493 - DNA, 2300 bp, Homo sapien
ctgcaggtggaccatagatggaaagaactattttgctatcttctgagatttagcattttttgaaagattattagctgggcatggtggtgcccaactatagtcccaactgcttgggaatctgaggtgggaggattgcttgagcccgggaggtcgaggctgctgtgagccaagatcatgccactgtagtccagcctgggtaacagagtgagaccgtgtttttgaaaaaacaaaacaaaacaaaacctactgttagttattcctcttttttttagtgaattgctgatgatcagatttctcctggtgaagtagaaatccttgcttcagagacaaatacctgagttgaaagagaaactggcttttaggctgggtgtggtggctcacgcctgtaatcccaacattttaggaggctgaggcgggtggatcaattgaggtcaggagttcgagaccagcctgggcaacatggtgaaaccctgtctctactataaatataaaaattagccgggcgtagtggcaggcgcctgtaatcccagctacttggaagactgaggcaggagaaacgcttgaaccctggaggcagaggttacagtgagccatggtcatgccactgcagttcagcctgggtgacagaacaaggctctgtctgcaaaaacaaacaaaaaaaacaaaaccaaaaaaagaaaaaagaaacgggctttttagttagagaaatgtagattcaaaacaaatgttggcaacttaactgatttgacccctgggcattagtttcctgagctattaaaaggagagcactacattgcagaacagtaccgaggacaactgacaatgtgtatgaagtacccaacacatagaggttctcaatgaatattgttgaccaactgcaggaatcatgaatcccttctgtccccagcttggatactaaaaggaaagtggggccgggcacggtggctcacgcctgtaatcccagccctttgggaggccgaggcgggcggatcacctgaggtcaggagttcaagacaagcctggtcaacatggcgaaaccccgtctctactaaaaatataaaaatataaaaattagctgggcgtggtggcatgtacctgtactcaggaggctgaggcaggataatcacttgaacccgggagatggaggttgcagtgagctgagatcgtgccattgcactccagcctgggtgacagagtgaaattccatctaaaaaaaaattaatcaataaaagagaaggagtggtgaaggatgtcatggtatgggaggccctgattggaaaactggagtggcgagctttcctggctggggaaggcaagggtagcctcacattggcagaagctgccaggttcaatctgtgtggtcttttagttgctgtgtttaggtagttcaggcaggattctaggggcaggattcagggcccttctcagtcctgaaaagttgtcctagagtgaggaggagctgctcagaacaaatctgagtaatccagtgtctggaccagatccacattgctagagggcgacctggtcagaaatcctcttgcagaagtagctaggcttctacaccaagttcatcatttgtcacctatttcttcagagcttgtatttctttcttttttgctcttgttgcccaggctggagtgtaatggcgcaatctcagctcaccgcaacctccgcctcctgggttcaagcgattctcctgcctcagcctcccgagtagctgggattacaagcatgtgccaccacgcccagctaattctgtatttttagtagaggcagggtttctgcatgttggtcaggctggtctcgaactcccgacctcaggtgctccaactgccttggcctcccaaagtgctgagattacaggcgagagccaccgtgcccggccagagcttgtttctctttagactccctatacttttccccagttatatgtgggtataggatagggatgggcatagtggtgggtggtactttggaaaagccaatggaagtagtttgggagaaggaatggaagagaaaaaagttttcatatttatgatgtacatcattttgggagctctgtggcgcagcttatttcatggtttctttttcttctttcagctctggcttatcaggactccatagttctccaacagagaaatcttgaaaaggactgaccagtttttgcagttctaaaaccatggcccatgtaagttaatgtttctctgtccttttcgaaatactgtcaatttctgtatcatgtatatagattcattctttattctgaaacttcctgcttaccagagcttcatccaagaacc

SEQ ID NO: 21494 - DNA, 2300 bp, Homo sapien
tgtaaagacgcaggggaattggtcactagcaggcaaggcagacatcaagcactgtaagaaatcagagactgacttcaaagaaaactcagcgtttactgataaattgtgttatattaccccatcaatggctagccttcatgccatgaaaatgcatccatgttaatgatgtcactgtcttacctaactgcaggtgacagctgccatgacatagaaatgacattgaacttaaggaaaacactatactgttgcaaaatccttgttaaaaccaaacatcttaaatgcatttgaagcagcgtgtctaagccacgtaaaatcaaacccttgatagttattagctggccttcttctataaagaaagctttcttttttctttgtgcttatttaatggggtacaatcaattatagacataattggtggcacagggaaaataattatttcaagtagtttttaaacactagctgtataactaagagggacatataaaaacagggattggcaaactttttctttaaagggcctgatagtaaatacagtcaatcttcattcacagattctgaatttgtgaattcatctacttgctaaaacttttttataaacccagagtcaatatttgcagcacctttgtggtcatttgtggacatccgaagagcggtgaacctttttgagtcccttaacaggcatgttctcagccaaagtcaaacaaagtgaccctctatcttcttatttcagctctcatactgtaaacaggtaccctttttgcagtccatttagtaccttggcttctcatatttttgttttttgctggtgattttgctgtttcaaagggaccccaaatgtagtagtactaaagtgctgttgatgttcctatgaatgagaaagcggtcatgtgtcttacagaaaaaatacatgtgttagataagcttcattcaggcatgagttatggagctgttggccatgagttcaatgttaatgaatcaataatatatattaaagtgtttaaatagaaacacaataaggccaggcgcggtggctcatgcctataatcccagcacttttgggaggccaaggcgggtggatcacctgaggtcaggagtttgagaccagcctggtcaacatggtgaaactccgtttctacaaaatacaaaaatcagctgggcatggtgacatgcatctgtattcccagctactctgggggctgaggcaggagaattgctggaacccgggaggcggaggaggttgcagtgagccaagatcccaccactgcactccagcctgggtgacagagcaagaccctatctcaaaaaaaaaaaaaaaaaagaaaaaaagaaaataaacacaataaaataagcttatgcattcatcggttgactaaaatgtgaccagatgcttacaggaaactaaccctgtatttcccctagaagcagtggaatggtattcactaattccgtgtttgtagcaagtttatagaccataactactgtgaatagtgagaactgactgtattttaggctgcgtgggccatctggtctgtgtaactactcgagtctgtccttgtagctcaaatatagcaatagacagtacacaatcaaacacggctatgttccaataaaacttttatttatggacactgaaatttgacatgtatgattttcatatttcacaaaatattgttctccttttcattgtttttaccatttaaaaatacagaaatggaaaatataggaactggcttccccgaatctccggagtcacacggtctcaaatcccaacagccacacccagtgaaagaatcccacccaggagcgcgccagggacagactcgcagcgccgtcctcgctcacagggctccctagttggcactatagagaggcggtcgcgggcgcccctctttaacgcgccagccatctgtccccgctcccctccaggccctgccgcgccgtccccaggcgctaagggactcgaagcgcagcctcgctgggacggacctagctccggctccgggttcacgcagagcaggggctgcaccagcgagcggacccttgagactggccgcgcctgcgcactccgtgagcgcgcccggccctcccagcagcctccgcgcgcagcccgttaggccccggggattgtggcgtgacccggcagcggcttcctccgttcgggcatcgctgtgcctcgggttcgcgccccgagtgagcagtcctggcccggagcgtcggtcctggtaatctgtaggaaaagcgctgcggcccagggggtaaagagaggtaagcggggccactgcagtatcgcagaggggcgg

SEQ ID NO: 21495 - DNA, 2300 bp, Homo sapien
tgaaaaggagaacaatattttgtgaaatatgaaaatcatacatgtcaaatttcagtgtccataaataaaagttttattggaacatagccgtgtttgattgtgtactgtctattgctatatttgagctacaaggacagactcgagtagttacacagaccagatggcccacgcagcctaaaatacagtcagttctcactattcacagtagttatggtctataaacttgctacaaacacggaattagtgaataccattccactgcttctaggggaaatacagggttagtttcctgtaagcatctggtcacattttagtcaaccgatgaatgcataagcttattttattgtgtttattttctttttttcttttttttttttttttttgagatagggtcttgctctgtcacccaggctggagtgcagtggtgggatcttggctcactgcaacctcctccgcctcccgggttccagcaattctcctgcctcagcccccagagtagctgggaatacagatgcatgtcaccatgcccagctgatttttgtattttgtagaaacggagtttcaccatgttgaccaggctggtctcaaactcctgacctcaggtgatccacccgccttggcctcccaaaagtgctgggattataggcatgagccaccgcgcctggccttattgtgtttctatttaaacactttaatatatattattgattcattaacattgaactcatggccaacagctccataactcatgcctgaatgaagcttatctaacacatgtattttttctgtaagacacatgaccgctttctcattcataggaacatcaacagcactttagtactactacatttggggtccctttgaaacagcaaaatcaccagcaaaaaacaaaaatatgagaagccaaggtactaaatggactgcaaaaagggtacctgtttacagtatgagagctgaaataagaagatagagggtcactttgtttgactttggctgagaacatgcctgttaagggactcaaaaaggttcaccgctcttcggatgtccacaaatgaccacaaaggtgctgcaaatattgactctgggtttataaaaaagttttagcaagtagatgaattcacaaattcagaatctgtgaatgaagattgactgtatttactatcaggccctttaaagaaaaagtttgccaatccctgtttttatatgtccctcttagttatacagctagtgtttaaaaactacttgaaataattattttccctgtgccaccaattatgtctataattgattgtaccccattaaataagcacaaagaaaaaagaaagctttctttatagaagaaggccagctaataactatcaagggtttgattttacgtggcttagacacgctgcttcaaatgcatttaagatgtttggttttaacaaggattttgcaacagtatagtgttttccttaagttcaatgtcatttctatgtcatggcagctgtcacctgcagttaggtaagacagtgacatcattaacatggatgcattttcatggcatgaaggctagccattgatggggtaatataacacaatttatcagtaaacgctgagttttctttgaagtcagtctctgatttcttacagtgcttgatgtctgccttgcctgctagtgaccaattcccctgcgtctttacagagccttgttactcactcagtgtaaagacagtgggggaaacaaggtttcccaaagtatccttatgtgcaaaagtgtttcttactactttggaaatactaagctgagtttaatgtttattctttttctaccaacagacacaaaaaggacaagcacatgccttagaatattcaatacaattttctacagcgatatggttaaatactcttctgtcttcactacttttttgtttttactttacttggaaattttaattctctaggaataacggggcaggagtctaaaataatactttgtgggagtgaagtatatatttttttccaagtaaaaaaaaaaaatcaggccaggcgtgatggcttaggccaggcgtgatgactcatgcctgtagtcccacatactcggaaggccaaggcaggaggatagcttgagcctgtgagatcgagattacagtgagctatggatcggccactgcactccgggctgggcgacagagcgagaccctgtctcaaaattaaaaaaaggaaaaaaaaaaaaaaaaaagtctgcgctccccggggcccaaggagaggacccaggagaggagtctggctccttttgcctcagacgagtccagggcgcc

SEQ ID NO: 21496 - DNA, 2300 bp, Homo sapien
ggtaactgtctctcccaacagtaggtatttcttagatgctactcatcaagttgagaaagttttctttcttatttcgtgagacttttttttttttttttttacattaatgagggctgaatttaaaagagaggagcagatcccctgatgtaagaattcagcatgggaggctgccctctggggcaaagatgaggagtgttgagaatgcaacaagcatggtatggagctgttgaagtgggaatgtttcatgccatcctgcttggaaggtacagcatttgaagacatccctttaaccagaggaaggccaggaggagagaccagaaaggagggcttaaaatgaggaatatagaagaaggaactctgtttccagatctttctggattatttttgactctttagtatctagcacaatgcctggctattatatatcataggctatttggttgataaaagaatactaagagcttaatatgtagtagtaataataataatatcagcgtgcatttaggttttaaagaagagacacttgtattcctttggtattcatctggggaaatgcagtgagtgagtgcctatgggtagaggaagccattagataattgataacatggtgctactttctgggtggtcagttttatatgaaataattgatgaattgtttaatgatcaagaagcttggtgcatagagaataatagtgctctttatagtttgtataattttaagtttattaagttcttgtagctaataagcaaaacaccaaaattttcttaaacatttaaacattgatcactaattcagttcttccccttaaacaatgtagtcttcctttagtattttagtataacttattcttttgggcactttaaacatcttaaagtgaagatgtttataaagaatacacacaaggctgggtgtggtgtctcacgcttataatcccagcactttggaaggtcaggattttgagaccagcctggccaacatggtgaaacccgtctctactaaaaatacaaaaattaggcgggcgtggtggcgggagcctgtagtcccagctacttaggaggctgaggcaggagaatggcgtgaacctgggaggcggagcttgcagtgagccaagatcgcgccattgcactccagcctgggcgacagagcaagactccgtctcaaaaaaacaaacaaacaaacaaaaaaaaaacagaaacagaaaactggtttgacccaggtatatccaaacttaaaatgtgtataatctctgagcaattatacttttaggaattaattgtgaagaactcatatacaggtaaaatgacatatgcacaaggatatttattacagcattgtttgttacagtgaaaaactagaaaaagcctaaatgatgattggccacagattggttaaataaataaagttatggccaggcgcggtggctcatacctgtaatcttagcacattgggaggtggagtcgggcggatcatgaggtcaggagatcgagaccatcctggctaacagagtgaaaccccatcactactaaaaatacaaaaaattagccgggcgtggtggcacatgcctgtagtcccagctacttgggaggctgaggcagaagaatcgcttgaacccaggacgcggaggttgcagtgagccaagattgcaccactgcactccagcctgggggacagagtgagactctgtctcaaaaagaaaagaaaaaaaaaattaagttatatccatttaatggactgcaatgtagctattaaaccagttatgtaacacaatatgtgctaattgggacttcattccaagatatgtaaagtaaaaatagcaacgtgtataagtagtgtgtataatatgagttaaaaaaatctatatgtatgtatgtgtgtgtatataaacatatattctccaagccatattgagttgccctaatccatcctgctccagttacagcctggtatctttgaagctagggatgatagagacatttgcccattctcctcactgataccccacaagcatttctgaagcatgaacagaaggaaaatgatcattctgggccaggagctgtgaggaaagtggggtcttatctatcttcttttgcctctcccagctctacccttctccaaaagaagagccaagagaaggtccttttctacaaatatcagagccatggctcaggtgagatactgtttccttttgctcagatagagtgatttttacttctagtaactgtaaacatttgctttcctcatgatgatgctttttgatgttagaaaaacaacacctttcaaaaagtttggttatgagcaa

SEQ ID NO: 21497 - DNA, 2300 bp, Homo sapien
gggggctgacccccccccacctccctcccggacggggcggctggccgggcagaggggctcctcaattcccagtaggggtggccaggcagaggcgcccctcgcctcccggacggggcggctggccgggcgggggactgacccccccacctccctcccgaacggggcggctggccgggcggggggctgacccccccacctccctcccggacggggcggctggcctggcgggggtgacccccacctccctcccggatggggtggctgccgggcggagacgctcctcacttcccagacggggtggctgccggacggaggggctcctcacttctcagacggggcggctgccgggcggaggggctcctcacttctcagacggggcggttgccaggcagagggtctcacttctcagacggggcggccgggcagagacgctcctcacctcccagacggggtcgcggccaggcagaggcgttcctcacatcccagacggggcggcggggcagaggcgctccccacatcccagacgatgggcggcctggcagagacgctcctcactttccagactgggcagccaggcagaggggctcctcacatcccagacgatgggcggccaggcagagaagctcctcacttcccagatggggtggcggcggggcagaggctgcaatctcggctctttggggggccaaagcaggcggctgggaggaggttgtagcgagccgagatcacgccactgcactccagcctgggcaccattgagcactgagtgaacaagactccgtctgcaatcccggcacctcgggaggccgaggctggcggaccactcgcggttaggagctggagaccagcccggccaacacagcgaaaccctgtgtttggtggagaccaaaaaaatacgaaaaccagtcaggcgtggcggcgcgcgcctgcaatcgcaggcactcggcaggctgaggcaggagaatcaggcagggaggttgcagtgagccgagagggcagcagtacagtccagctttggctcggcatcagagggagaccgtggaaagagagggagagggagaccgtggggagagcatatatccttattattaaactatgcatgactgtgtatacaatacctttataggtcaaaagcagtcaaatactggccatgagatacacttagtccaagtacacaaataattgcagaaggagaaagtgaaactcctcttacttcctgccccactcatttatcacaaagcacacagaagtcagaataacacctgccctttgcaatttcagactcctctctttctgcctctccaaacctgtcccacgtttggcgattcctttcccttcgacctccccccatcaggtcgcaggttcctggtctacaccccttctgcgtccccaaccacttctgagtctcacaacctctggtcccataacccctctgcactaaggagcaataaacaaaattcacgcccgaacaaagaggccaaaacagcaacccaggatgtttgcgcctgcgcactctgggcgcacagtactcaggccggcagcccagcaccggcttatctgtgagagcaattaagatgactttcggagggtccaaccgccttcccagctccgaactacatctcccagaaggctcagttgtgcgattatctttccatgcagacttgtcctctttctgaggctgtccagcgcctgggggcagtaggacgggtccgggaactaagcccatctcaaacacgtcggagtggctttctttgggggccaaggcccgagcctgaggcgggactccatgaggcctctggggcgcgagcggtttgactagggggggcgatcctttcggcggggctgacgcaaggcgcggacaggaattctgacgatcgggaaccatcttgtccggccttgatacgtctctgactacgcttcccagaggtctcctcggcaagactgtacttctcgcggtaattcagcttccaactcacgcgctggcgggaccctcagggctttaccagcaactaccccagtgccggggagggttctgctgcttcgaaagctggtaaggcctgaggtgagaaacccgggagagggcggggccgggggccaagcctcggctttgtgcggcggtggaggtgagattgaaagcgtgcgcttgcgtctgtgtggaggtgtgtggtgaatgatcgcgcgattgtgacaggctgcccttgtgatgagtgtgtttccaacgctcacaccgtgtgcagcacggcctcggagactgtggctgctggtgtgtgtgtgagagggagcaggaccacgtgcggcat

SEQ ID NO: 21498 - DNA, 2300 bp, Homo sapien
actcttaacgagcatgctgccttcaagcatctgtttaacaaagcacatcttgcaccgcccttaatccatttaaccctgagtggacacagcacatgtttcagagagcacagggttgggggtaaggtcacagatcaacaggatcccaaggcagaagaatttttcttagtacagaacaaaatgaaaagactcccatatctacgtctttctacacagacacggcaaccatccgatttctcaatcttttccccacctttcccgcctttctattccacaacaccgccattgtcatcatggcccgttctcaatgagctgttgggtacacctcccagatggggtcgtggccaggcagaggggctcctcacttcccagtaggggcggccgggcagaggcgcccctcacctcccggacggagaggctggccgggcggggggctgacccccccccacctccctcccggacggggcggctggccgggcagaggggctcctcaattcccagtaggggtggccaggcagaggcgcccctcgcctcccggacggggcggctggccgggcgggggactgacccccccacctccctcccgaacggggcggctggccgggcggggggctgacccccccacctccctcccggacggggcggctggcctggcgggggtgacccccacctccctcccggatggggtggctgccgggcggagacgctcctcacttcccagacggggtggctgccggacggaggggctcctcacttctcagacggggcggctgccgggcggaggggctcctcacttctcagacggggcggttgccaggcagagggtctcacttctcagacggggcggccgggcagagacgctcctcacctcccagacggggtcgcggccaggcagaggcgttcctcacatcccagacggggcggcggggcagaggcgctccccacatcccagacgatgggcggcctggcagagacgctcctcactttccagactgggcagccaggcagaggggctcctcacatcccagacgatgggcggccaggcagagaagctcctcacttcccagatggggtggcggcggggcagaggctgcaatctcggctctttggggggccaaagcaggcggctgggaggaggttgtagcgagccgagatcacgccactgcactccagcctgggcaccattgagcactgagtgaacaagactccgtctgcaatcccggcacctcgggaggccgaggctggcggaccactcgcggttaggagctggagaccagcccggccaacacagcgaaaccctgtgtttggtggagaccaaaaaaatacgaaaaccagtcaggcgtggcggcgcgcgcctgcaatcgcaggcactcggcaggctgaggcaggagaatcaggcagggaggttgcagtgagccgagagggcagcagtacagtccagctttggctcggcatcagagggagaccgtggaaagagagggagagggagaccgtggggagagcatatatccttattattaaactatgcatgactgtgtatacaatacctttataggtcaaaagcagtcaaatactggccatgagatacacttagtccaagtacacaaataattgcagaaggagaaagtgaaactcctcttacttcctgccccactcatttatcacaaagcacacagaagtcagaataacacctgccctttgcaatttcagactcctctctttctgcctctccaaacctgtcccacgtttggcgattcctttcccttcgacctccccccatcaggtcgcaggttcctggtctacaccccttctgcgtccccaaccacttctgagtctcacaacctctggtcccataacccctctgcactaaggagcaataaacaaaattcacgcccgaacaaagaggccaaaacagcaacccaggatgtttgcgcctgcgcactctgggcgcacagtactcaggccggcagcccagcaccggcttatctgtgagagcaattaagatgactttcggagggtccaaccgccttcccagctccgaactacatctcccagaaggctcagttgtgcgattatctttccatgcagacttgtcctctttctgaggctgtccagcgcctgggggcagtaggacgggtccgggaactaagcccatctcaaacacgtcggagtggctttctttgggggccaaggcccgagcctgaggcgggactccatgaggcctctggggcgcgagcggtttgactagggggggcgatcctttcggcggggctgacgcaaggcgcggacaggaattctgacga

SEQ ID NO: 21499 - DNA, 2300 bp, Homo sapien
aagctagaacacgtagagtttgggttttttgtttgttttctgtttgtttttctttaagcagagcaaacaagatcaggacttttatagcaataaagaagggaatggatattgggttagccacatatgtggcaaaacaattaacagtatctacaatttaatatattctcaaatagctttcaattatgtaggaagttaaaatatcacttaaaacatgagatacatttcaatatgtgcatatacaaatatgtgtatgtatatttatgtatatgcatatatatctacatatgtatataggtaaaaccaaactaagcatacatgataaactgaaccatttgctatattaataagacaaaattaggaagatttttccaaagagtaacagaagattccaggttacttgataagtccttttaggcatttgctaagaaaaaaaaaatcagccgggcgcagtggctcatgcctgtaatcccagcactttgggaggccgaggtggacggttcacaaggttaggagttcaagacaagccaggccaacatagtgaagccccgtctctactaaaaatacaacaacaaaaaaattacccgggcgtggtggccggcacctgtaatcctagctactcggtaggctgaggaaggagaatcgcttgaacctgggaggcggaggttgcagtgagccgagatcgcgccactgcacaccagcccgggcgacagtgcgagactccatctcaaaaaaaaaaaaaatcaggtcctggaaaaataaagcatttcaggaacaaagagaaaacttcaaggcaccttaaacatggcttttagatatcacaaccgttatttcctctcctctggggaacctctcttggaggacagaaatgagaagggagacaatacacctcccctagggcccaaatgacaaggccagagcttactctgcgttcccctcccccgccatgggagggctatcagaggaaactggggcttccaactcaaaactcagtgtcatagaaaaatcccctttactatcacggggccgagctgtcttctgctctcacatatgactatgtgtgacatttggtcaaagacacacaaacacagtctcaactccacgcacacccaatgcttcacagtcacacacccaccactgtacacaaagtcacaagcacccaccctccatactcccacacaaggacacagagtcacaactacataagtacaaagctccctatatctgcacacaaacgaacatatggtcacagagttacaatcacacacccaccgcgggcacacagtcacagctaacccacaccctcacacagcgttacacagtcacacaataacagtcctaacacagggactcacgggacacccgcagagtcctccccacatccgtacacaaggtgtcacacacaatcacaatcacacacacactgtgctaggacatacattcacaaaaacacaatttcacaaccgcccttctcggcgcgttccgcctgaacagacttaatactcagtctcaacctccgcaccggattccagacgcttcacctccaacctcctcctgatcctgtagtctccgagccgacccgctcagaggccagcacctgggtcgcgtgcagctctcccccgagccgcgggagtcgcgaggggaggggccgagggcgcggcgccttctgggaaatgtagttcagcgccacgcccgcgatgagcaagatggcgcccggcttgagcccagccaaagggattaccctcattcccgaaccgtgtctgagagtctcctggggttcctggcttagtatcgcaccgtggctgttacataaagtcagcacagcgtgtttaagctgatgttacaccactacccaatcccagggatagagtaaactaagactaaggccttacacccctgccccggccagggagacagtcccacaagctctggcggaggaaaagttcgcgcgaaaagctgactcaaaccgctgaaccttctgggaaatgtagtctaccctcaaaagagtggcacggaggacgggccaagatctctcgattccgtccggttctgagtcggggcctggcccagcccaggagacctctgggagcgctgcccgcggaaggagtgcgcaggcgcggaatctccgacttgccatggtcgtctttgtctgccggtgagttgggtttcggccctgtgggacttgggtttctggacactgaaacgggccagggacgctggaggggaggatttgcagtgcctgcgacggggctgggagtatggaggggaggaatcgccttctatgatgtgcggtgatccgagct

SEQ ID NO: 21500 - DNA, 2300 bp, Homo sapien
actgtaaagcggaaaaatgagtaactattaacccctttgaaatgcagtgtgaacatataactgaattttaaatttttttcacttttcctaagctaattaacacaggattacctttaattttaattaacttacatttaaatacaaaagcaatataaatgtttttctattaaacacaactttattgttttggtaggactataattcaccctaaacactgaaaatttagcatccaaattgagacatgcaataacaataaaacatataccagattttgaaaacttggtataaagatatgagtgtaaagtatttcagtgtattcatatcattacatgttgaaataatattttggatatattggtttaaataaaatacattaccaaaattaacttcagctgtttctttttctttttaaaatgtgtttaaagccgggcgcagtggctcacgcctgtaatcccagcactttgggaggatgaggtgggtggatcacctgaggtcaggagttcgataccagcccagccaacatgatgaaaccccttctctactaaaaattcaaaaattagccgggcatggtggcgggcgcctgtaatcccagctacttgggaggctgaggcaggagactcacttgaacctgggaggcagaggttgcagtgaactgagatcgcaccattgcgctccagcctgggcaataacagtgaaactctgtctcaaaaaaaaaaaaaaaagtgtctaatggaaatttttaaattacctaagtggctttatattatatttgcattagactgtgctgctttagactcagacaccactgtatcaggctgcctctcacaatctacaccaatgtcacactgccaaatctcaaagaagatttggttgtcaccacttaaatcccctcatgaatgttctggaaaaactccctgcccttgttgacatagcctctctgcataaaactcctatcatattcccactcctaaatgtctccaaagccaactttgtcacttactgattaatacctaccatctcctatcttgctttgtttgcaaatcaagtctgtaaataagatcaaaggtatctagtgtgccattctacttaatcactcgtctcctccttaacaaattacattctaaaaaaaagttttaacttctcctccaggagttgtatttctataccataaaaatcctttggaaaaaaagaagcacatgggagaattgaatgatttacctaatgcatatgtgaatattcaatgaaagggaaatgggcatttggaaaggcaatggaggacaaggggacccatctctacggtcctgttgttaattgggaagagaaaaccaagggaccaggtaaatgaacaaaaaaaaaaactaaccttgagttggccattagtaccaatgctgtcttccacttcagggggccttcacttgcagaactacataaccaagagggagaaaggactcatgacatcctggactggttaaataagaacacagtgttcaccaccagaaaagcccatcacacacaacaaacacacccagatcgaagagggaaactagaatactgtcgactcctccccacatccgagaaaaaggtacgaccaatgcctagcagtttctagggaacacagctcaggaaatactgtagttctttaatgtataaatggcctccaaactcatgcaaggggagttatcccaggaatgaatactacacctatgccctccccttcacgtcttcccaggaaacttcatttatctatcttatctatctatctatctatctatctattatctatcatttatctatcttctatatatcatctatgtaatctatctatatgcgtgtgtgtgtgtgtataagacctcacgaagagattccatcacagacatcacagagtcggaaaaatgacgctttacccaaaacaaactcctacaggctcacggaaaaaaacgaacaaacaaacaaacaaaaaaaaacaaaaaaacacttctaccccgttcacacttatagttggtcacaacagtgctgtcacacgatcacgtcaccgtagaccagggtcacacgatagaccccgcccctactcaccgtcctgagtccgatcaaacagcacccacggcacacactagggtctccgtctctcacacacacacaccacaatgacgtcgtaaacaatagcactaaccaccatcgtccgcagctcccgcgtacagaggcctcaggctcccggctccacgtggaccgacctcgcccggcagcgcggggccacctcaccgcgagctcctcccgcagcccggcccgggtcacctcgactc

SEQ ID NO: 21501 - DNA, 2300 bp, Homo sapien
tggagtcctcatttcaacatattggatttagtttgtatgatgtttccaggtaatgcaaccctgtcatctagaaattataattttacctcctagtttccaatgcttgtgatattttagttattagaaactgtcataattctgcaagcaaaatgaaatacaccagacacacagagttcttcagtcattaacatcacttacatagtgatccattttcagttatcatggaatgtacacacaaaaccatgataaataacaattagcacagacacattcagtttcctgtgatcttacctactccacaaagccacaatcctatggatcctacatgacattcacaaccctgttgagcccatcttataattccatacaaacatagcaaagcaaactcagaaactacttactccagttacacaatctcacacacacaaatcacaactaatcattctaaaaggcttatcagcttcttggaaagttaaatgtaaacttaccaattacccagcaacttttcttctaaatatttgcccaggagaaatggaaacgtgccagctttattcgtaatgtataaaacctgtaaatatgccaaatgttcaacaacagaaaaatgactacacaaattgtggtatatttgcacaatggagtgctgttcagaaaaagaaaaatgaactacacatgaaatctcacacacattagggtaaactaaaggagaaatatggaattccggaactgacagttacagtgacacaaatcagaactatggctgtctctgctttgaaactgactggaaaggacaccagcaaactccggtggtgctggtgttgtaaaccaaaaataaaatcctaagcacacccagaccatcttgaatggacccctcctcttggccagggcattcctaacctgaaaaactagtaaagccatgatggaaaggcgggggtgggcgggtcggacatgcttcattataccctcctccattttggaattactgatagaaaagaccccaagtctgaaaagaaacatttacaatctattctctgtgaagcgtgctacctggagacattcctaagtcttacgtcaataactctttcaacccattgccaatcaaataatctttgaatctacctatgacctggaaggccagccaccttccagctgtcccgcctttccggagggaatcaatgtacattttacatgtatttgattggtgtctcatgtttccctaaaaggtataaaaccacatatatcccgtccaccctgggcacaggttctcaagatctcctgagggctgggccaccggccattggtcactcatatttagctcagaataagtctcttcaaatactttagagtctgagtcttttcgtcaacagtgtaaaacacgccctaaggcagacacacacacactgaaccgccgctacctgccagattccatctggggcctttctcatggtgcaaaacggacaaaaactccaagtcaccctcaggtttacgaccacgggtcacatcctgaggcccccacacttagaagccagagtggagcaaaacctcgcccgactcaggctccgagttctcccctcgaccctccccagcctaaaggctgtacccgcttcaggccttcccagcccggccctccagttccttcttcggcctccctcagcctggggtccgggtttcctcctcggctgagcagccgggtccgcgactcccttcaccctccccggcccgggcttccggttctttccagaggtgaggcaggggccacctagaattccgcggccccccacctcccccaagaccaccctcgccccagcttcctgttccccattctgtcctcccaacctgggttcccgattactgcctcgacttcaccttgccgtcagggaccaccagccgcctcttccgcgcctaggggacgcgcagcggcagcctctgctgatggcaagggtctgcgcacccggaaactccagggtctggggcgtggtgcggcccctgcggccagcgggctccgcttgagcttcagggctctttcgttgttggactacgtttcccacaggcctcagggccgcggatgaacttcgacctttgcttccttttccggtgttgtggttattgagttaagcctggcgagtcgaggtgacccgggccgggctgcgggaggagctcgcggtgaggtggccccgcgctgccgggcgaggtcggtccacgtggagccgggagcctgaggcctctgtacgcgggagctgcggacgatggtggttagtgctattgtttacgacgtcattgtggtgtgtgtgtgtgagagacgg

SEQ ID NO: 21502 - DNA, 2300 bp, Homo sapien
cttaggaaaaattcatagtaatctcttttgtatgcagagtgccttatggtttacaaagcaattttccagcttttatttcagttttgtgagaaacaggtagaaagacactaatttattaactgcactgcagacactgaatatactttgtctcatttcataaagacttattccctccatttacagatgaaatgggttgagcagaaatgcctgtcttcattttacatcagaagagaatgaggttcagtaacattaagggatatacacaactaaaaacagtgcaggtggggattgtagctagatctgtgagcacagggctctggaacactgactgctctgcagccctgttactccacatgaggatgaacctggggctctctgctggtcaagaggcagctcatttctctatcaaacgtcacaaaaacttcccactcatccatgagcccctgtaagcctttaaactggtagtaacgggagggcagggagtggaaactgataggcctgagtctttaattctttcctccatgtttagtgttgggtttgttgtttctccccactacaaactcagagaggcaaggacgatgcactttggccacagcaacctgattgacttatgtgctattctggtcagacttcatcttccaagagctgtcaccaggcctccccttagctcaatgacccatctctttccccactttctgtttaatcaggcttatacttgctgcttcttttatgttttattgacttctatgagatcaattaagtgctccttattctactttcccctgcactggattaaaaataagatattgtattgctttactatcggaagttactcttaaccttgcatctttgacttaatgactaattggtatctccttcttgagcaataaaaaagaccttagaatgctgtaggtacattctttctttttttttttttttgagacagagtctccctctgttacccagggtggagtgcagtggggcaatctcggttcactgcaaccaccacctcctgggttcaagcgattatcttgccttagcctcctgagtagttgggatcacaggtgagcgccaccacacccagctgatttttgtatttttagtgaaaatggggtttcagcatgttggccaggctggtctccaactcctgacctcaagtgatctgcccatcttggcctcccaaagtgctgggattacaggtgtgaactaccgcatccggcctctttctatttttgtctggtgcttttgatctaatttgttttgaaattccgtaaaaagtaatcatcattacttagtaaacagaatccccaacatatttaccaatttccttgctcatcatttaaaattttatctcattctgtctttctgggtttttctttttgctgattcacatcctttagaaattcttccagtgagtctatgaaaaaaaccttatctttgtctgaaaatgtctttattttgccccactcttaattgctacttttcctctatcagtttgaaggtattattctcctgtcttctgacatcttgtgcccaatcatctttccttttaggtagcatgtcttttctgtttttcttttctttccttccctcccttccttcttttcaagatttctgttttgcattatcactgtgatgtgtctaggtgttagatccactttcattatcctacttgacactcattttgattcctcatcttaaaattgagtttaattttgaaaagttgtaaaccactttttcttctgatgcttctcctcctttttctccttttatgacatttattagatgtgtcttgggcccttttattttcttccatgtctcagtttctcatctgtatttcactttttatctctgtgctgcattataggtaatctcttcagatatatctttaagttcattaattttgagctgtgcttgttatgttctctatacttaagatcttttttatttctagaaattttctctggttattttttaaatctactgattctttttaagtattatgctttcattatgagtttttttccatttaaaacatttcatattctttcatattgtcatattatatgcagttcttgtaggtgccaactttattatttatttactctgctgaccctcctgtgatggttatttcctcgttgtttgtaatgtttgtttttgagctcatctcggtggggcagaggtatgctttgtttttgtttttgtttttaagggtttttcatgtgccctggattaagacagcattcaaaaccatgttacatttacttttggctgagttgcaggggtttcagtggagctga

SEQ ID NO: 21503 - DNA, 2300 bp, Homo sapien
tggggggagttcaggaccagcctgatcaacatggagaaaccccgtctctactaaaaatacaaaactagccaggcatggtggcgcatgcctgtaatcccagctactcgggaggctgagggaggagaatcgcttgaacccagaaggcggaggtttcagtgagccaagatcgcaccattgcactccagcctgggcaacaaaagtgaaactccgtctcaaaagaaaaaaaaaaaaaaacacgtgatgcggccaaacctcatgcaagaactagctggtaccatataaatctcctaaggtatcccctcggaaaaacttcctgcccttcttaacagctctctctgcacatactctgcaataatattctaactcctaaggtcctctaaaacaaaaaaagttactataaccattcaaacgatctcctatcttgctgtttttccactcatgtctctgaagaaaatctaaactatctaatgtgtaattctacctaagcaattggtctcctccgtaacaaatcaccgtgtgaaggcagactatttctatgtcatgagaatgcttaaacaaaaagagcacacaggagaagtgaacatactgtcaaggtgttatatgaaaattaactctaggaagggcatctgatgaggtactggaaagaaggagatctgtcttcataatgtcatcagtaactgggaagagaaggactagagaccaggtaaatagataagtcactatttggtgagcatttcaaatgaagttattccacatcctgaaaaacaaaaatgcatttcataaaacaaagaaaaaaatcaaaatgacctccagctttgctttaaaatgtgcaactacaatgcttttcttctctcagagctcttctcttggaatacagcaaaatgtggaaagaaagggaatcacaatatactcagcctttcttggagcccagacaggctaaataagaacacattcttcaccaccggcaagcttccataacccatgctgaatatgaccagatggaagtatgagaaagactggaatattgttgactcttcccttcataaagaaaagtcaggttcaccaaagcctgggactgaaatgtttctgtattcacaataatttcctttagacagctatgaaaatgctgtggatctgcaatattcaacttgcccccacagagcttccaaaagggatcttttggctaggcacggtggctcacgcctgtaatcccagcactttgggaagccgaggcgggtggatcacctgaggtcaggagttcgagaccagtctgaccaacatggtgaaaccccgtctctactaaaaatacaaaaatgagccgggcatggtggtgcatgcctgtaatcccagctactcgggaggctgaggcaggagaattgcttgaacccggaaggcggaggttgcaatgagccgagattgcgccactgcactccagcctgggcaacaagagcaaaactccatctcacacacacacacaaaatctttggagaaacgaatcctactcctggggcctcaatatcatatcttcccagaaccttgccttgggagcaattccagctctaacatctccatatcaaacacgaggctgtgcatatcagaacacagccttgtccatgtgaaacacaaggctgtgctttttcagttggaaacttcattctggatctcaaatatccaactttcttttcgatagccatttgactgcacactgtgcaacgtggttataaggtgaaatgactgaggcagtgaaagaaatcccagtataacaaactccaagaaaccacgtaacttaaaattggccccagaggttggcgaggctgcatgccactgtgtattatgcattatgaaagcgacaggggccatgctttagaacagaaggtctcagagtcttcacagacacagatcgagccatacggggaccttgtccacgtattcctgagccccagaactgcagaaatcaaactctacaaaagctgcaccaggccagttttgatcacagtctccagtgggtcacaacagcgctgtcacaggatcactgataacagcatgacacattcatagtcaccgctcagcgccgtcacacaaacggccccgcccccactcagtcccgcgggcccaatcggggacagtcagggctgtcccgggctgtgcacctgctgtgcacacacaccccctgctgtgcacaccccccgcccccccgggaccatcacaggcgcgcccactcacaccaccacacacggacgcagccacagaacggcacacacaaacacaatcacacagtctccctccccagcaggtgactt

SEQ ID NO: 21504 - DNA, 2300 bp, Homo sapien
taacaaatcaccgtgtgaaggcagactatttctatgtcatgagaatgcttaaacaaaaagagcacacaggagaagtgaacatactgtcaaggtgttatatgaaaattaactctaggaagggcatctgatgaggtactggaaagaaggagatctgtcttcataatgtcatcagtaactgggaagagaaggactagagaccaggtaaatagataagtcactatttggtgagcatttcaaatgaagttattccacatcctgaaaaacaaaaatgcatttcataaaacaaagaaaaaaatcaaaatgacctccagctttgctttaaaatgtgcaactacaatgcttttcttctctcagagctcttctcttggaatacagcaaaatgtggaaagaaagggaatcacaatatactcagcctttcttggagcccagacaggctaaataagaacacattcttcaccaccggcaagcttccataacccatgctgaatatgaccagatggaagtatgagaaagactggaatattgttgactcttcccttcataaagaaaagtcaggttcaccaaagcctgggactgaaatgtttctgtattcacaataatttcctttagacagctatgaaaatgctgtggatctgcaatattcaacttgcccccacagagcttccaaaagggatcttttggctaggcacggtggctcacgcctgtaatcccagcactttgggaagccgaggcgggtggatcacctgaggtcaggagttcgagaccagtctgaccaacatggtgaaaccccgtctctactaaaaatacaaaaatgagccgggcatggtggtgcatgcctgtaatcccagctactcgggaggctgaggcaggagaattgcttgaacccggaaggcggaggttgcaatgagccgagattgcgccactgcactccagcctgggcaacaagagcaaaactccatctcacacacacacacaaaatctttggagaaacgaatcctactcctggggcctcaatatcatatcttcccagaaccttgccttgggagcaattccagctctaacatctccatatcaaacacgaggctgtgcatatcagaacacagccttgtccatgtgaaacacaaggctgtgctttttcagttggaaacttcattctggatctcaaatatccaactttcttttcgatagccatttgactgcacactgtgcaacgtggttataaggtgaaatgactgaggcagtgaaagaaatcccagtataacaaactccaagaaaccacgtaacttaaaattggccccagaggttggcgaggctgcatgccactgtgtattatgcattatgaaagcgacaggggccatgctttagaacagaaggtctcagagtcttcacagacacagatcgagccatacggggaccttgtccacgtattcctgagccccagaactgcagaaatcaaactctacaaaagctgcaccaggccagttttgatcacagtctccagtgggtcacaacagcgctgtcacaggatcactgataacagcatgacacattcatagtcaccgctcagcgccgtcacacaaacggccccgcccccactcagtcccgcgggcccaatcggggacagtcagggctgtcccgggctgtgcacctgctgtgcacacacaccccctgctgtgcacaccccccgcccccccgggaccatcacaggcgcgcccactcacaccaccacacacggacgcagccacagaacggcacacacaaacacaatcacacagtctccctccccagcaggtgacttgcacacaggcctggggcttctgcctccacaaaccctctccgcgtcccatgaacccaggtcccctgccgtgagctcttctcgcatccagacccgggtcacctcaactcaccacatggaaaacgaacaccaggtcaacggaaaagggagccggggtcctggcagaagcgtagtgccagccgcaatagggcggccgtgggtgcaaacggaggggagcgccggcagctagcaccgcgcggcgactaacgggccgccccggagactcctgggagctcaggcccacgcgcgagtgcgcaggcgcagacgactcaccctgggccgggggtgaggcttggtgggtgccaggggtgctgaggaggccaaggagggcactgggagctccgttccgggagagctgtctaaggacgcggaaccgggtggggaggccagggaggtaaccaagagtccgagccgggcctggaaattctgaggaggaaaccgggaccgcggtatccagacgctccga

SEQ ID NO: 21505 - DNA, 2300 bp, Homo sapien
aacccagtctcttggtaaagtatacaggattctggggaacctgttttagcttgaagagagggaacactgtgtttttccctctgcagctctgccttccatctacctctaaccacaggtttactgtgtatttccaaacggttcttcttggactttttgccaatttacactgatagtagtggatgagaataccttcccaagccctgatgaagacagttgacaacttttaaatctttgcctatctggtctatgttgtagttgagaataatcttttttttttttttttttgagacagagtttcactcttgttgcccaggctggagtgcaatggtacaatcttgactgaccgcaacctccacctcccgggttcaagcgattctcctgcctcagcctcctgagtagctgggattacaggcatgcaccaccatgcccggctaattttgtatttttagtagagatggggtttctccatgttggtcaggctggtctcgaattctcgatctcaggtgatctgcccaccttggcctcccaaaatgctgggattacaggcatcagtcactgcaccaggcccgcaaaataactattttaattactacagtgagactggacttattaaaaatctatcaaatactttttattatcttagcaagcctaagggagtaggaaacctcactcatatacaagtgttgaaagtggtagttatgccaggcacagtggctcacacctgtaatcccagtactttggcaggccgagggggcggggggaggggatcacttgaggtcaggagttcaagaccagcctgggcaacatggtgaaaccccatctctactaaaaatacaaaaactagccgagcgtggtggcacaagcctgtagtcccagctactcaggaagctggggcaggagaatcacttgaacttcagaggtagaggtggcagtgagcagagatcatgccactacactccagcctgggcaaaagagcaagaccttgtcttaaaacaaacaaaaaacaacaacaaaagtggtagttatggtaaaaaaaaaaaaaaaaaaaaaatttcctgcatgtccccaatggaatgctattcatttcaacatactggttttagttaatatggtgtttccaggaaatgaatctgggaattatgaaaatcatctcttcccctctgatactgttatctctattttatttgctaaattgctacttagttacagttttggaggcaggcttaatggctactattcagataatcaagtcttacataaccaactagccatggtcataacagagttcctcaatcattcaaatatttaggtcactaaggccacaaaaccaccagaagtaacagtaggttacaaacacatgcagagtcacagtcaatcaaacatccttcagagaaccaccaacctacaggccccacttgtcattcacaacctcagacagcagctaacacgactccaggcagtcacaaccacacctacaaatcacttgcaattctccacactcaaaggcagtctcaaatgcgactcacacctaatctaaaaatagacacacgcagaggaaacctcgcgcagcaacactactccgttcacttttcacacacaatcggccacaacatcccaaagagaggcaagcacctaaaatgcagcaggttgggcgcaggaggccacccctattcagcgcgcgcccgcgcgcgcgaacacacagcgcccgctccgcgcggggacccgccgccagcgatggcgcttccgcgggatcagaacgggcaaaatcccccttcgcggagctcgctccgggtcaccctcaaggtcacgcccatggaccacgcccgaggcccggctcgtacagatcggagcgtctggataccgcggtcccggtttcctcctcagaatttccaggcccggctcggactcttggttacctccctggcctccccacccggttccgcgtccttagacagctctcccggaacggagctcccagtgccctccttggcctcctcagcacccctggcacccaccaagcctcacccccggcccagggtgagtcgtctgcgcctgcgcactcgcgcgtgggcctgagctcccaggagtctccggggcggcccgttagtcgccgcgcggtgctagctgccggcgctcccctccgtttgcacccacggccgccctattgcggctggcactacgcttctgccaggaccccggctcccttttccgttgacctggtgttcgttttccatgtggtgagttgaggtgacccgggtctggatgcgagaagagctcacggcaggggacctgggttcatg

SEQ ID NO: 21506 - DNA, 2300 bp, Homo sapien
tgtattgtatatttgaaacgtgctgaaggtacatgtttttttgttaccacaaaaaaaagaaaacagttaactatgtaaggtgatgaataggttagttagctgactgtggtgattatttcacaatgtaaatgtatatcaaatcatcaggttgtatcctttaaatatataaattttaattgtcaattttccctcaataaagtgggaaataaagtgtttctcaaaaaatactcagtgtttctcaaaaacaaatattgagaaatttaactgtggatgctataattaatatttatttacattggtgctgtatgctaagaaatagaaaaaagtatttattaaatatgtaaacactttaaaaaattttcttgtgttgtaaatactttacatgagatctaccctcttaatggaattttaggtgtacaatgcagtattgtccagtgtgggcacagggttatacaacagatcttttttgttgttgttgagacagggtctcactctgttacccatgctggagtgcagtggagtgatcacagctcactgcagcctggacctctcaggctcaagcaatcttcccacctcagcctcccaagtagctgggaccacaggtacacaccactacacccagctacatttctatttttatttttttttagtagagacaaggtctcactatgttgtccaggctggtctcaaactccaggactcaagtaatcctcccatctcagcctcccaaagtgctgggattacagatgtgagccaccactccaggccagattttttaataataaaagtagtctcaaaaaataaacctggccaggcacggtggctcacacctctaatcccagcactttgggaggacgaggtgggcaaatcacttgaggccaggagttcaagaccagcctgaccaacgtggtgaaaccccgtctctactaaaaatacaaaaaaaattagccgatgtggtggcatgtgcctgtaatcccagctacttgggaggctgaggcagagaattgcttgaacccgggagtcagaggccgcagtgagccgagattgcgccaccgtactccagcctgggtgacagagcaagactccatctcaaaaaaaacaaaaacaaaacaaaacaaaaaaaaacacaaaaaactggctgggcgtggtggcttacgcctgtaatcccagcactttgggaggccaaggcgggaggatcacctgaggtcaggagttcaagaccagcctggccaacatggtgaaaccccatctctactaaaaatacaaaaattagccagatgcggtggttcacgcctgtaatcccagctattcaggaggctgaggcaggagaatcgcttgaacctgggaagtggaggttgcagtgagccaagatcgcaccattgcactccagcccgggggacagagcgagactccatctcaaaacaaaacaaaaaaccaatatccattttcaagtataagaaatacatattctctgctgggtgtggtggctcacacctgtaatcccagcactttgggaggccgaggtgggcggatcacctgaggtcaggagttcaagaccagcctggctaagtggtgaaaccccgtttctactaaaaatacaaaaaattaaccaggcatggtggcacgtgcctgtaatcccagctacttgggaggctgaagcaggagaatcgcttgaacccagtaggcgggggttgcagtgagctgagattgtgtgattgcactccagcttgggcaacaagagcgaaactctgtctaaaaagaaaaagaaatagatattctctttttattgtataataaaatattattctaaaatgaagtatttattcttttgtttccatgtaggtacatggaaaacttggggatttcacaataatttcttggacaataatgaggctacagacataaatgcaggtataaataaatacagtttttaagagtacagtagaagtactggtaacaaagtcagctaatttctgaaagtacatgtttattccccaaacctactactctagaaacttctagaacacacagaaatacataatcacgcattctgttagatttcagaatgtgacgttatcacacttctagtagtctctcagaatctctcctgtccagtggtaagagaataagtaaaaaaggcaaatgtctcggaattagtatgaaaatagctttgaccttatagacttcctgatagggtctcaggtaccctctgtggtccttggaccacccattgagtactgctgctatatagtaatgaaaattaagaaactactactatttgtaatattacaaatgaacct

SEQ ID NO: 21507 - DNA, 2300 bp, Homo sapien
aaggtttgttgaatccacaatgcaagacccatggatagggagggccagctgtacgtcatatatttcactctactttctctctcactgacagtttcaagtgcaaaccatctcacatacatgaatgagaatcagacacaagcagaatcacttgttctcaaacaagcaccatttcctcatattacacttggtgatggagttactggtctctcagcaaggttaaaaatccttaccatggatctgtcccttctggcagataacatgtgccagcttccactcctctaagtcggctctggactctcacacacaaacatacacagtcacctcacaccgctcctatgcatacatctaaggttcaggacgccctggtccagagatctgtcattcatccatctcagaccttcctggtcgcaaccagcttcttcccttctcaggggccgccacagtcacactagtcctctaatcatgggtggacccagcgcaaaaagcctcacacagaatgtcacaagatccctgtgcacgtggctgcgctcctgcaaacgtggcaatcacacgggtccaggtggcctctcacatttaagccacatcacgtatcacccccacaggggccactgcgggagtggcggcgctcgccgcatgagccccacgcgggcatatagaacagccattctcaaaaagcctcaaaaccgtttcaccacccagcgcggtggctcacacctgtcatccaatactttggccactgagacgggaggatcgcttgagcccaggagttcgagaccaccagcctgggcaacatagcgagaccctgtctttaccaaaaaaataaaaataaaataaatcgttttggcctgacccggtggctcacgcctgctatcccagcactttgggaggtggatgcgggaggagctgaggaggtggagactgcagtgagctaggatcgcgccaccgcagtcagcctgggcaacagggcatgaagaccctgtctcaaaaagaggccgggcgcggtggctcacgcctgtaatccagcactttgggaggccgaggcgggcgaatcacgaggtcaggagatcgagaccatcctggctaacacgatgaaaccccgtctctactaaaaatacaaaaaattagccgggcgaggtggcgggcgcctgtagtcccagctactcgggaggctgaggcaggagaatggcgtgaacccgggaggcggagcttgcagtgagccgagattgcgccactgcactccagcctgggcgacagcgagactccgtctcaaaaaaaaaaaaagaaaaaaaaaaagttgagtgaaatatatgacgtacagttttttgttgttgttgttgtttgttttttcttgcccgggcaacagggcaagaagactctgtctctaaataaataaataaatggagtcaaatatatgacatacagttttgtttgtttgtttgagaaggagttgctctgtcgcccaggctggagtgcaatggcgcgacctcggctcaccgcaacctctgcctcccgggttcaagcgattctcctgcctcagcctcccgagtagctgggattacaggcatgcgccatcacgcccggctaattttgtatttttagtagagacggggtttctccatgttggtcaggctggtctcggtgatccgcccgccttggcgtgagccaccgcgcccggccaaaaaaaaaatttttttttaaatcgtttcacatacaaatctcacgcgctacaccctcaccgtcagttcatatccaccttctcctccggagtcaccttcggacacgcgcacaacaaaacacctttctcaccacaactccacaaagggaagccgggttagtccgcgcccgccgaaaattatcttcagccacagcccgcggaggccgccttgaggggttcggggcagccactgtgcctattccgaaatccgtcctcagcggaacccgaagtccagaatccgaaaacgaacattaacaggttggcgtcactccagcctcgggtgaaactgcgcaagtgcatcccggagcccggcggaacacacccgctccaccccaggcgctctcccctcggactgcatttcccagaggacactgctgtccacagctacttccggtaggagcctcgcaggaatggtctccgggtagaggcaggtaaggatgtcccgggccggtggagaaggaagagctgggcgtgtggcttcgcttggaatccgaatcagagcttggaccagagccttccctgagaatgctgaaggtaagaaatcctggctcaccagtgccgcggaagggaatgtctatagttttag

SEQ ID NO: 21508 - DNA, 2300 bp, Homo sapien
gggaatcaggcagtctcatacactgatggtgggaaaacaaaccggcacaacccttatggtgggaaatttgacaacatgtacaaaaactacctacacatttcccttgtgacccagccattccactgttaggaatctgccctgaagatacaactccacctattaaaaaatacagccattagaatggatgatgtttaccgctacttgctgacaaagaaaaatgttcacttgtgttaaatgagaaagacaggtctcagaacagcaacaatgttctagacgattctgttttttaatactcagtatatgtagaggagattaaagggatttatcgtgagatgctcatagggggcaactgttatttcagatttcttttttaaaatttttaattgacaagtaataattgtatatatttgtacaacaattgtatgtattgtatgtacaattgtatattgatgtatatatttgtacaataattgtataatttatatggtacaatgtgatatttgtatgcatcaatacatgatggaatgatcaaatcaggctggttagcatatccgttacctcaaatatttaccatttctttgtggtaagaacatataaaatcctatcttttagctattttgaaatatacaatacagtaactatagtcactgtgttggacaaaagaacagcagaatgtattcttcctatctaaacaaaactttgtacctgttaaccagcatttcccctttccccatccaccacatccccaccccccaacctttggtaaccaccctcctactctctacttctaagagttcaactttttagattccacatgtaagtgagatcatacagtatttgtctctctgtgtctggcttatttcacttaacataatatcctctaggtatacccatgttgttgcaaatgacagaatttcatgtttaaggctgaatagtattccactgtgtatatatcctccatttaaaaaatccattcatccattgatggacacttagcttgtttccatatcttagttattgtgaataatgctacagttaacatgggagtgcagacatctttgacatactgatgtcaattccttgtggggttgctggctcatatggtaattctattttttgttttttgaggaagctctacactgtttcccaaaatggctgtagtaatttacagtgctcgcaacagtgttccttttctctacatcctcaccaacactaacctttcatctttgtttgtaatagcaggtgtctaacaggtgcacggtaatatctcactgtggtttttttgggggggatggagtctcgcgctgtcgcccaggctggagtgcagtgatgcaatctcggctcactgcaatctccacctcctgggttcaagcgattctcctgcctcagcctcccaagtatctgggacgacaggtgcgtaccaccatgcctggttaattttttgtatttttattagagacggggtttcaccatcttagccaggatggtctcgatctcctgacctcatgatctgcccagctcggcctcccaaagtgctgggattacaggcgtgagccaccgcgctcggcccctcatcgtggctttaatttgcatttatctgatgattagagatgtttagcatttttcgtatatgtgctggccatttgtatgtcttcttttgagaaatgtatacaagtcctttgcccatttttaatagggttatttgtattctttttttttttttgagacagagtctcactctgtcacctaggctggagtgctggagtgcagtgggcgatctcggctcactgcaagctccgcctcccaggttcacaccattctcctgcctcagcctcctgagtagctgggactacaggcacccaccactacgcctggcgaattttttgtattttttagtagagatggggtttcacctaaccccaaggatggtctcaatctcctgacctcatgatccacccaccttggcctcccagagtgctgagattacaggcgtgagccaccgcacccggccagttatttgtattcttgttattaagaagtgtgagttccttttacattttgaatattagccccttatccaatatatgatttgcaagtattttctcctaatctttgggttgtctcttcatcctattgtttcctttgctatgtggaataggattctctgttttcttaattttaatgctcagtgtgtatttcttttataattagaaactctataaggctaatccttccctccttaaaactggaagaattatagaaggagctatgggcacactgacacagaggcatgatggtga

SEQ ID NO: 21509 - DNA, 2300 bp, Homo sapien
aggaattgcaaagggaagttagtagttaaataagttaccacatatccatgtaatataatactaagatagacaaatgcaaagttgtagaaaatagttaaggaatattttcaagatactgtatcagagaaatcactttacaaaacaggttgaacaatacaattatatcaatatggtcatttaaaaagtctagaaagttaaacacctgtttcagttatttattgctatataaccacctcaaaagtttatggcttaaaacaaaaaacaattagcttattatttggggggcttggcaatttgggcttggcttgcctgagtggttcttctgctgatcatattcatgtgacagctgtcagctgttggcctggtggaggctggatggttcaagatggtctccctgaaatttctggccgttgttgctcactggacctctctctccaagtgatctttaatgcgcaagcaagttgctcttagccttcagtcatggtggtctcagggcaggaaaaggggaagagaaaaagctgcaagacttcctgaagctttgtctcagaagtctcacaatatcacttccaccacattctattggtcaaagcacctcacaaggccctgcctaatagtaacctaaccactgactagcatttcaggaggagaaaaaatactcccttgctgaaaaacaaaatcaaagagaacaaaaatagaaaatacaacaaaacttccttgaccttggttttcagatatgctcagcaatggttccctttcctcagggctcttagagaacctcaaggcaagggagaaggggtaaggaatcatgagacatcagacctttcttggaacccagattggctaaattggaaaaaattattgccaccacacgagctctcatcatctaccataaacatactcagatggaagtaaaagggagatgggagtactgctaacccttcttagtattcaagggaaaggccagggtcactgatatccaggactggggactttctcaaaattcacgttaagtctcctgcggagacagctctgggaatgatgtggatcacatggaacctgacctctgagagttcccaagggagagcctctgaggaaggaatcctactcctaggttctccccacgacgtcttcccagaactctgcttaagggacacttacaactcgaaaagcctcgttccgaaaacaggtctgtcctttttctgtttgcagattttattccaccactcgattatcccttccctttttgatggccatttcactgcagctggggtctatacagctataaagcgggagaaaaaaggaagctgggaactcagagatgcagagcccaagaaacaatcgagtctaaaactgccgcttaggtgggcactccgccaggatcccctgtgtcaaacaccaggctgagaactggggacaggtgtgccctgagaagacaacgcgggccatgcttcattgcaagatgactctgcttaacataggcatggatcatagtcctcacaggcacattggggagatcttcgacagacccctcagtcccaacattaaacacagcactgcagaaatgaagctttacccgttacacacacaacaccacagacctaaaaggctcttccatcacacggccacagcagcactgtcatgatggaaggtctcaaaccctacagtgtcacacacccgacagccgaccacggccacccaaaggtcccgcatccgagcagggacaggaacacaatcacgcacctgtcgcagcctcctcgccgcgcacaccgccgccttgtcctggcatcaaacacacacgcacaggtgcatacacaggcccgagctacggccctgcacaccctgtctgcgtcccgggagctcggggcttcctcaccgtgagcgccgccctcatcccagccacgcactatgagaatttggaaggggaaccagagatcaaagttcgaaaaccgcccgggcgcctgtgggaaatgtagtccaaggccggaaacgcccggatgtggagaaggcgcgcgtagccggtggacagcaggaacgcgccgcggagacacctgggaggcatcgtccgcgtgggagtgcgcatgcgcagacgcccggccggcaaccgaaggtgaggctggtgggtcccgcgggcgcggagaaggcgggtgacggtgtgacccgtaaggaaggctgaggagggaggcgggagcctgggctggggaaagcaagaagggaagaggagcaacctgggacgaggagttggctggaggaaagtgcgagtccgggcctcagagaaggctgggagggaagcaggaaccaga

SEQ ID NO: 21510 - DNA, 2300 bp, Homo sapien
ccttgtcctggcatcaaacacacacgcacaggtgcatacacaggcccgagctacggccctgcacaccctgtctgcgtcccgggagctcggggcttcctcaccgtgagcgccgccctcatcccagccacgcactatgagaatttggaaggggaaccagagatcaaagttcgaaaaccgcccgggcgcctgtgggaaatgtagtccaaggccggaaacgcccggatgtggagaaggcgcgcgtagccggtggacagcaggaacgcgccgcggagacacctgggaggcatcgtccgcgtgggagtgcgcatgcgcagacgcccggccggcaaccgaaggtgaggctggtgggtcccgcgggcgcggagaaggcgggtgacggtgtgacccgtaaggaaggctgaggagggaggcgggagcctgggctggggaaagcaagaagggaagaggagcaacctgggacgaggagttggctggaggaaagtgcgagtccgggcctcagagaaggctgggagggaagcaggaaccagagcgcgggcccgggagcacctgaagaagggaaccggttgcccgaggcggggggtgagctccccagtggcaggaatttcgtctgattttcgtcccctggctcctggagcacggcctggcacacaacaggcgctccgtgtgtgtgtgtgtggcttttcgtacctgtcctgtgtgttgtggtaggggaatgtgttattctgtgtgacgttgtggaaccggttgtttatgaaagtgatagggtccctgcgtgtcttaagttttaatttaaattagatgcgagtcgatttgtgtttgagcctgtgtccgactctggagaggcgacagtgagggcattgtgagtgaaaggttgttactttttgtagaagttctgtgaaattgtgcacgacgtgggggcctatgggattatgactatgtagtgggtgatacagctatgaatatgcctaattttaaaagtatttggtgtacacgacctatgatgactgtgaatgtggcacactgtgtgacttaggtggagtgcttgagaaaccgagtgttgactaaagtatgcattgtttagattgatttatgagtattgggcattttatatatgcctgtagaatttgactctggtaattagacaagtaaaataagtagtgattttttttttttaatggagaggaagaggcaaaataattttcagagggtaagattgggcccatgcgggccgggcgcggtggctcacgcctgtaatcccagcactttggaaggctgaggcgggccgatcacgacgtcaggagatcgagaacatcctggttaacatggtgaaaccccgtctctactaaaaatacaaaaaattaaccgggcgtggtggcgggcgcctgtagtcccagctacttgggaggctgagtcaggagaatggcgtgaacccgggaggcggagcttgcagtgagccgagatcgtgccactgcaatccagcctgggtggcagagcaagactccgtctcaaaaaaaaaaaaaagattgggcccatgcgcggtggctcacgcctgcaatcccagcactttgggaggctggggcggacagatcacctgaggtcaggagtttgaccagcatggtgaaaccccgtctctactaaaaaatataaaaattagctgggcatgatggcgcatgcctgtagccccagctactcgggagctgaggcaggggaatcgcttgaactcggaggtggaagttgcagtgagccaagatcgcgccactgcactccagcctgggcgacagaacgagactccgtcccttcccttccaaaaaagatcatttattgggaaacctggtattgactgatgactgatatgcttaaatgaatagaataccactgggaccacacagaaaaaaactttatctcataactgccactctcaaaattcctatttgagagtgtgtgtgtgtgtgtgtgtgtgtgtgtgtgtgtgtgtatttatttttttttttgctggatgaatttcttctgctggaagcctgaaatgtgaaaggatacatgattagtttcttctctaattccccaacctttattttgtctcctctttactccctataggcagtctttagctctcatggattgggagctgggaaaggaatgagaagacagaagtcagagacaagaagaggctaacatgactgataccactataatttagtgtaagtcatctcttaccttccaagagaacctgctgcttggaacctccagatacacttcccttctcatgggcatagcctcttctccagctgctgccccagtgc

SEQ ID NO: 21511 - DNA, 2300 bp, Homo sapien
aggacttgctttatgcatctgggtgctcctgtattgggtgcatatatatttaggatagttagctcttcttgttgaattgatccctttaccattatgtaatggccttctttgtctcttttgatcttcgttggtttaaagtctgttttatcagagactaggattgcaacccctgcctttttttgttttccatttgcttggtagatcttcctccatccttttattttgagcctatgtgtgtctctgcacgtgagatgggtttcctgaatacagcacactgatgggtcttgactctatccaatttgccagtctgtgtcttttaattggagcatttagcctatttacatttaaggttaatattgttatgtgtgaatttgatcctgtcattatgatgatagctggttattttgcttgttagttgatgcagtttcttcctagtctcgatggtctttacattttggcatgattttgcagcggctggtactggttgttcctttccacgtttagtgcttccttcaggagctcttttagggcaggcctggtggtgacaaaaatctctcagcatttgcttgtctgtaaagtattgtatttctccttcacttatgaagcttagtttggctggatatgaaattctgggttgaaaattcttttctttaagaatgttgaatattggcccccactgtcttctggcttgtagagtttctggcgagagatccgctgttagtctgatgggcttccctttgtgggtaacccgacctttctctctggctgcccttaacattttttccttcatttcaacttcggtgaatctgacaattatgtgtcttggagttgctcttctcgaggagtatctttgtggcattctctgtatttcctgaatctgaatgttggcctgccttgctagattggggaagttctcctggataatatcctgcagagtgttttccaacttggttccattctccctgtcactttcaggtacaccaatcagacgtagatttggtcttttcaaatagtcccatatttcttggaggctttgttcgtttctttttattcttttttctctaaacttcccttcttgcttcatttcattcatttgatcttccatcattgataccctttcttccagttgatcgcatcggctcctgaggcttctgcattcttcatgtagttctcgagccttggctttcagctccatcagctcctttaagcacttctctgtgttggttattctagttatacattcatctaaatttttttcaaagttttcaacttctttgcctttggtttgaatttcttcctgtagctcagagtagtttgatcatctgaagccttcttctctcaactcgtcaaagtcattctccgtccagctttgttctgttgctggtgaggaactgtgttcctttggaggaggagaggtgctctgctttttagagtttccagtttttctgctctgttttttccccatctttgtggttttatctacttttggtctttgatgatggtgatgtacagatgggtttttggtgtggatgtcctttctgtttgttagttttccttctaacagacaggaccctcagctgcaggtctgttggagtttgctagaggtccactccagaccttgtttgcctgggtatcagcagcagtgtctgcagaactgcggattttcgtgatccgcaaatgctgctgtctgatcggtcctctggaagttttgtctcagaggagtacccggccgtgtgaggtgtcagtctgcccctactggggggggtgcctcccagttaggctgctcgggggtcaggggtcagggacccacttgaggaggcagtctgcccgttctcagatctccagctgcatgctgggagaaccactgctctcttcaaagctgtcagacagggacatttaagtctgcagaggttactgctgtctttttgtttgtctgtgccctgcccccagaggtggagcctacagaggcaggcaggtctccttgagctgtggtgggctccacccagttcgagcttcccggctgctttgtttacctaagtgagcctggacaatggagggcacgtctaccccagcctcactgccgccttgcagtttgatctcagactgctgtgctagcaatcagcgagactccgtgggcataggaccctccgagccaggtgcggaatataatctcctggtgccccgtttcctaagcccgtcagaaaagcgcagtatttgggtaggagtgacccgattttccaggtgccatctgtcacccctttccttgaccaggaaagggaacatcgtgaccccttgcgctt

SEQ ID NO: 21512 - DNA, 2300 bp, Homo sapien
tacagattgtgagctaagaattgtctttgcatttgaaacgtttgaaaacatttacaagaaaaaatattcctgacacactaaaacttcatgaaatttaaatgttagtgtccataactaagttttattgaaacacatctttgctcatttatttacatattatctatggttgctttcatgctaaaatagcagaagacattccctgactgctgcttgaaacagtcatatctcataaagaagaaaggaaatgaatatttatactcttacaatttttcttattttcttcataccttcctaaagaccttagtgttatttttaccttaagcctgaagaatttcctttaggccccaccaccccttccccttcccccactccagagatagagatctcactttgttgcccaggctgatctcaaactcctggcttcaagcagtcttcctgcctcagccccacaaagtgcccggattacagaagtaagccaccacgcccagcctattagcatttttgatggtgcagtcctgctggtgatgttgcccaggctgatctcaaactcctagcttcaagcagtcttcctgcctcagccctccaaagtgcccagattacaaaagtaagccaccacacccagcctattagtatttttgatggtgcattcctgctggtgatgaattctctaggttttatctgaaaatatctttatgttgccttcattttgaatatatagttttgctgcgtgtagaattcttggctgtgtagcagtttaattaggatttggctaagtgtggttttctttggtgtttatccttttagggttaattaaactccttgaatatgtaaattaaaagttcttgccaagtttggagttaggccattatttccataaaatttatttatgccctttctttttctctccccattctgggactctaattatatccatgttggatttttgaatatgacctatggatctttgtgagtctgttcatttttcatgattcttttttctttctgttcagattacttactttctcttgattgatttacacagatactgattctctatttctgtgctcctatcgagcttctctagttaattttttatttcagttatttctttgaatacatttagaacagctactttgaagccttttttttttttttttttttttggcaaaatctgacatcagggcccactaggagttagtttctgtgattgtctttttgtgactacaggttttattccccccactcctttttgttttgttttgtttgcatgtttagtaatttttgctagaaaactggacatcataaatagtattgtaatctgaattctgttatatctgttatgttcttctgagaattattattatttttagtaggcaattagcttgcttgtaatcaaacatcaaactttgtcttcctgctcagtgtaaagcagctgatatatcctcttagttcttcaagcttctagctgctgccttttaccctaacctcctgaaagcagataggttctctcttgtgttcatctgcttttctctcaatcaaggaattggtgagtgtttagatttgggggctcacgtcctgcatttctctttttcaagttttaccctctacacttcctgctgctttgtcagttcaagctctgacaccttaatcccgtaagccttaaattttattcttcttgggctatgagcaggttgtggaataccatcagtcaagaagcagaagccttagaatcttattaggtgcacttttatttttcaagattcttttctgttgtatttctgcctgctttttgctaagccctcggtgatctctccaacacatgcatattttatcaaccaggagtttggcagagtttatgctcagattttcattttcatccgttctgtagttccctcacttccagaattaacctaaatttccagctctcactttttgtgtgtgtgtgtgtgtgtgacacagtctctctctgtcacccagactggagtgcagtggcacaatctcggctcactacaacctccatctcccgggttcaagcgattgtactgcctcagcctcccaagtagcaggattacaggcacccaccaccacacccagctaatttttgtatttttagtagagacagggtcttgccatgttagctgggctggttttgaactcctgacctcagatgagccaccacgcccagcctcaagctctcgtttctgtcctcccgtcacctttgaggaagtaagtggtggttttatgccatgagagctgtggggtttcaggtaccatgatgcaaaaacagccacaaaattagc

SEQ ID NO: 21513 - DNA, 2300 bp, Homo sapien
taaacctggaaggcaagctaattaattaaaagaatgtgtgcacaagtgtgttattaggaataagtaaggtatatatagggcagtaagtatcaggcctgactgaggcaaaaactacctgttataaacaggtgagatctgtcaggtatgtggacaaccctgaaaacttgtgagaatataaaaaatgaatctagacaatatagttttgtttacaggagaaattccttgtatatgttagaattgaagttcttggactcaatgaagaaatagatttttgagcatagctttaacattgcttcatcagatatagatgattgcaaggtaagtaaagttagaaatagctatacttttataagagaaatgaaggttaaagttactctgatttaggaccagattgttcaatctaccatttgaaattggtattctgatctaccatatgaaaaactggaataaaggaatgttactgcattggggaaggatgtaagccagtcttaaacctggaaaagtgagtcagtaactgaaaagaggactaggcatgagagctttgttattgaacaattctgaaagaagtgatttagcagcagtctgaatatagcaattgaatatattctgatcttttttaaagttgctatcggaagtattttcctaattttccattcataagagaaaataatacataattatgtagaggattagagcatagactgtagaaaatgaattgataatttaaaagctaaattaatcaatgttgactacatagaaagaggaggtgggttgaacagctggaagtgttttaccacagtcatctagggatgtgtgtataaaagtattggtgatcagccgggcacagtggctcatacctgtaatcccagcattttgggaggccaaggtgggcagatcatgaggtcaggagttcgagaccaacctggccagcatggtgaaaccccgtctctactaaaaatacaaaaaattagctaggcgtggtggcacatgcctgtaatcccagctattcaggaggctgaggcaggagaatcgcttgaacccaggaggcagaggttgcagtgagccgagatcacgccactgcactccagcctgggtgacaaagcgagactttgtctcaaaaaaaaataataataattattataggtgatctgtgtcctccagaagtaatctttcctctagtattttcgctaaacaaagatttctgctaatttttcttgtccatcctacttacattttaatgcttttgataggttcacttcattttttctgaacacttatctaaccatcaacccccttctaccattctttgacttcttggttggtttcactttctctaagaagttttagtgcaaaatgcaaaaggtattaatgtttattgtttacatcttcatccttttccactctgaagcagtttttgtttaggttcccctccccgcacccctgccaggccagtggtcatttgttctgagtctctttttgcgccatgtgctagaccctagtaaaatttctttgcataggaaatgtgtgaagattcacaaattgttatcaattatattcttttctagaagaaaactggaaagctgaagactttttagtgaaattcaaggaacaccaagagaagtattctagatcagttgtaagcatcaaccacaaaaaactggtgaaggagaagagtaaaatatatgaaaagacatttactctaggcaaaaaccctgtgaattcaaaaaatctacctcctgaatatgatactcatggaaggattttgaaaaatgtttcagaattaatcatcagtaatctaaatcctgcaagaaagagacttagtgagtataatggatatgggaaatcactcctgagtactaaacaagagactactcatcctgaagtcaaatcccataatcaaagtgccagagctttcagtcataatgaagttcttatgcagtatcagaaaacggaaactccagcacagtcatttggatataatgactgtgagaaatcattccttcaaaggggaggcctgattacacatagtagaccttacaaaggagaaaacccatctgtatataataaaaaaagaagagcaaccaatattgaaaaaaaacatacatgcaatgaatgtgggaaatctttctgcaggaaatcagtattgattctgcatcagggaattcactcagaagaaaaaccctatcaatgtcatcaatgtggaaatgcatttagaaggaaatcatatctcattgatcatcagagaactcacacaggagagaaaccctttgtttgcaatgaatgtggtaagtccttccgcc

SEQ ID NO: 21514 - DNA, 2300 bp, Homo sapien
atgccacatagaatatgcactaatctctgcagcaattgagttgttagggtaaaggctcttgtttttgccttctttctctcacggccaagaaaattaaggaacagggacacaaaggatgaggtcggagcggaagtttaataagcaaaagaagaaagctctccccagcggagggacccaaaagagggttgccaactaggaggctgaatctgggggggtttattaactgggaaggggaggaacgtgggctgtcttgaagaaagcactacccagcttggccctgggaccttagcccgggaccaatcccaggctgaagtgaaagtttggcccaggaccaatcaggggctgaagtgaaagtttggcccgggaccaatcaggggctgaagtgaaagtttggcccgggaccaatcaggagctgaagtgaaagtttggcccgggaccaattaggggctgaagtgaaagtttggcccgggaccaatcaggagctgaagtgaaagtttgggccgggaccaatcaggagctgaagtgaaagtttggcccgggaccaatcaggggctgaagtgaaagcttggcccgggaccaatgagggggtgaagttatgattcaaagaggccgcgctcacagtctaaagcatgtccaaaaaaggaaagtggccgccggaacctgttagtccaagctgcaccgtttcgtaagcccccaccatttcacagaccctggtcagagggaaacattccacccgggtttgggctgtgcgaaacatccttcccaaccgcctgacttccttatcacatcctgctgggcaaaagcccaagaaacatccttatcaactttctcccaggcaacaagccataccgcccagacccctcctgcccaggcctgtaattaccccagcctggaagcggcagtgggctctggcatttagttggtccccgccatagagccgccaactctctctctttctttaaccctcgccttcccttcaaaatctaacagagcccaccgtgtacatgcccacaaaagaagcgactatttcgtggaagcccgctggtcacacaaaggacaaaggcgtttctatgttgggcctcggtcccttatcagtgcagctgaggaatgtcttcaggacaacccccctgtggagttttccttatgtatgcctgcagcctgatttttcaggctgtttctctgtttaaaggacttttaccaaggtcccaccctaactgcctaaagagttttttctctcaaggggacacacaaagtcccaatcgcacacatgcctccgcatatccacttacccactgcctcacagccaatcacactctcctctctcacatacaccaaggggccacacaagttgcacttgcacagccacagacctgcaactcacgcacacaaggtactgcacagacacgcaaagtcacacacccaccccgggacacgcagtccaaccacacagtcaccggttcttcacatccgcacgcacaacgagggtcgtccaggacacacacacccactccgggcgcgcacagtcacaagcgcccacctgatcacccagagtcagcaccacacagccacagtcacagaccacggagacccacggcagccatcgcgatcacacacgcaaactcctctcctcagccctccacacacaaaaggaccggagccggattcctcaccctcagcattctctggttccgctcggggccagcctagccaagttcctcaggactccaaggcgcggcggcagctaaatcggcacagcaaacggtcccgccacctggctaagaggaagccaaaatctcgcgagacgtggcgtcggcctgcgggatcctctgggaaatgtagtccagagcccgactgcgggcttccctatgcctctcatttccaagcctggcttgtttccttttaccgctcctctccaacgaggatcgcagagccctcatgccgagcggctcgctatggggccggctcgcccgctagagtggtcaggcctgattatccctggcagctctgttatctggggtaagacacaggaaaacgtgcttccggttctcggcggaagtagccccgaacggtagaaccgatgggaaatgtagtccagggcagaaaagcggtcaacccagccacgatgcgagccaaaggattcttggctccaagcctggtcctggctgttagtttggaactcatgcacccagatgctaactcgccctcagaatgcagaggggatgaaacactgaccggacaattcaatctgtatatgggtgagtccagggctcagtctgcattgcgcggaaaatgaaggtgaa

SEQ ID NO: 21515 - DNA, 2300 bp, Homo sapien
gccgagatcacgccactgcactccagcctgggcgacagagcaagactccgtctcaaaaaaaaataaataaataaaaatctagaacatggatgtccccttgctttagcagacctagctgatcacacaaggtcctgtattgttaggctgcatcacaggccgcaaagacccaggtatctatccagttgttagaaaccatcctgagagttagataccacttttctgttggaaatacagaccatttcctgaagccgtatggttgaggtaaaacaggccttttgcagtcttatattttgagtaaggccaaaactgcctagtgttacaaaaccagacaaaaagcccaggtacccagtcttgcaggatagaaatgtgtgactaaaatgaagcatcgatctgagaagactacaaatgagcgggaaagattggacaggagcatgctatacattatttagattaatgttgatatttaaggagccaggatattggtttgtttttgaggggtgcccatctactttatgtaagaagctataaactacacttctttcagtttctgcttaatccttgctcaaacaaggaataatttcttattccaaagtagacattggtacatcttttactaggtacataatttgggatgaagtctgataaagctccttagaagtacttacagtacaccctcacaagggtgtaccatctacccatggtttaaacagaaattaaaattctaccttcgtggaaaaatttgccaagttttaatggattcagtgctcattaaaaacttttagcctgtcttgatctttaacataattattggtgtgaaacaatggcttctgtggaaaattaaagttttagtggtttgctatttgtgaaatacaggctttttcatgtatcatattagcatataagctggcttaatcattagtactgatcttcaagttactaagacaccagatatttgttactttgtaatttgagtttttaaaaaaattccgaaattggcttttcgatgtgtgaaaaggactacttattagatgcttgtttttaaatttacattcaattaattaaagctagactctttatattcttaggcttggtatactatttgtatgttttgtagtaagtgtataaaaataatacctttgactttgtataaaaaaaatctttcttgctttaaaagccatgttggatttgcattctagaccgtaataaatataactactttaacataaaaatctatttatgttgtttatcagatattaggggtttttttccctctcctgtcaacctccaaataaaatcgatgctccagaatgatgccctcttatcataattttacaaatacctggctccaaggttactacctgatacaaaaatacaatgctggtctcccaaacaggcaactcacattgacactcacacagcttccactcacacctgcgatcacaaggcagcatcttcgggccctcgtcggccacgatccgctcccagagagcattcgcgcacaatcttatcccatccacgattttgattccttttctcccacttcttcaaccctatccgggacgagaccatcaggtcccacctccaccttcaccttcattttccgcgcaatgcagactgagccctggactcacccatatacagattgaattgtccggtcagtgtttcatcccctctgcattctgagggcgagttagcatctgggtgcatgagttccaaactaacagccaggaccaggcttggagccaagaatcctttggctcgcatcgtggctgggttgaccgcttttctgccctggactacatttcccatcggttctaccgttcggggctacttccgccgagaaccggaagcacgttttcctgtgtcttaccccagataacagagctgccagggataatcaggcctgaccactctagcgggcgagccggccccatagcgagccgctcggcatgagggctctgcgatcctcgttggagaggagcggtaaaaggaaacaagccaggcttggaaatgagaggcatagggaagcccgcagtcgggctctggactacatttcccagaggatcccgcaggccgacgccacgtctcgcgagattttggcttcctcttagccaggtggcgggaccgtttgctgtgccgatttagctgccgccgcgccttggagtcctgaggaacttggctaggctggccccgagcggaaccagagaatgctgagggtgaggaatccggctccggtccttttgtgtgtggagggctgaggagaggagtttgcgtgtgtgatcgcgatggctgccgtgggt

SEQ ID NO: 21516 - DNA, 2300 bp, Homo sapien
aaaatgcctgcaaacactgactttactgacaactcttaaattacagaaaatcaagttcatgctgcctctccgatctgtcctacggaattgctagttacaaacgtgcacattgtcctaggttcggttttgcaaagatggagcccttcagcgaaagcatttgtttgatttcatgcattaatgtttcctctatccatttcctttttacttatttatttaaagacggagtttcccttactgcaacctccgcctcccgggttcaagtgattctcctgcctcagcctcccaaataggtaggattacaggcatgcgccgccatgccccgctaatttttgtttttgtttttttctttttttttttcttttgagacggagtttcactcttgttgcccaggctggagtgcaatggcgcgcgcgatcttggctcaccgcaacctccgtctcccgggttcaagcgattcttctgcctcagcctcccgagtagctggattacaggcatgcgccaccaccccggctaattttgtatttttagtagagacggggtttctccatgttggtctggctcgtcttgaactcctgacctcagatgatccacccgactcggcctcccaaagtgctgggattacaggcgtgagccaccgcgcccggccaatttttgtatttttagtagagacggggtttcaccacgttgcccaggatagtctcgaactcctgagctcaggcaatccagccgcctcggccgcccaaagtgctgcgattacaggcgtgagccaccgcgcccggcctattttattttattttaagacggagtctcactctgtcgcccaggctggagcgcaggggcgggatctcggctcactgcaacctccgcctctccggctcactgcaacctccggctcactgcaacctccaactctccaactctccaactctccaactctccaactctccaactctccggttcacgcgattcttgtgcctccgcctcccgactaggtgggattacaggcgcccgccagcacgcctggctaatttttgtatttttagtacagacgggggtttcatcatgttggcggccggactgttctctaactcctgacctcaagtaatcggcccgcctcggcctcccaaagtgctggaactacaggcgtgagccaccgcgcccggccccatttcctttattttattttactatgttcagacggagtttcgctcttgctgtccaagctggaatgcagtggcgcgatctcggctcaccgcaacctctacctcccaggttcaagcgattctcctgcatcaacctccggagtagctgggattacaggcgcacgccaccacgcccgactacatttcctttattttatttttatactttactagcctgtttgttgatcacaagactggcggtgcacaaggttgggtctcggtgttcaccgggcggtgggcgtgggcgaggtgggagggtctccagcgcctggtgctaatctccaagaaagtgcaggaaacagcaccaaacgtgattgcaaagttttggtttggcgcggcgggtaggcgttccagcgcagaaatgcgcaggaaagtttctgctgtgcttgtaggaaggtcggccacaagcacttcttttgttttttgaaaccgagtttcgctctgtcgcccaggcaggagtgcagtggcgtgatatccgctcactgcaagctccgcctcccgggttcacgccattctgcggcctcagcttcccgagtagctgggactataggcgcccgccaccacgtctggttaatttttcgtatttttagtagagacggggtttcaccgtgttagccaggatggtctcgatcttctgacctcgtgatccgcccgcctcggcctcccaaagtgctgggattacaggcgtgagccgccgcgctcggccggccccaaacacttcttattggctaatctggagcaaacctgcatatccattggctgaaagctccgtctattttagggtgactgagagcgtctcttccttctgtgttgcctggaaacggactgttcgcctagtaacatctgatcacgtttcccattggtcaccgtttccggaagcccgctctcccgtttccggaatccccgcaggcgctgggtctgcagatggcgtccaggtacacagtggcgagtgtgattccgcagtcttgggctgtttggccaagcgcccgccggacatggtacgccgaagggtcatcggcgtggagtcctcgctttcagcgtccgcggctgggaaatcggccatcgctacggcgggaactgggactcgggctgcgtccc

SEQ ID NO: 21517 - DNA, 2300 bp, Homo sapien
ccctgattggtaacatctcacatgtattgtcacaactcactgctggggaacaaataaatcccatataaatttactgggaaagaacccttcgcagtgtgcacctggtttcccctggactttgccccatgcgcttttttctttactgattttcttttgtatcacttcactgtgagcctcccagtgaatcatcagagcttgggcgtgtagtggttggtcttggggtcccctgccagtagtaccaggaaaatgatgttgatggctggatgggcatacctttccttctgtaaggcctttactatggggttttcggttaatccagttaggagtttaacaactaatcaagacagaaaatttgtacaatttgattgcatttatatacatttcacagcaagattaaaacttttttttctttttttgagatggagtttcgctcttgtcgcccagactggagtgcagtggtgtgatcttggttcactgcaacctctgcctcctgggttcaagcgattctcctgcctcagcctccagagtagctgggattacaggcatgcaccaccacacctagctaatttttgtattattagtagagacagggttttaccatgttagccaagctggtctcgaactcctgacctcaggtgatccaccctcctcagcctcccaaagtgctgggattacaggcgtgagccaccgcgtccagctgagagattaaaactattaaagagccaagatattattaataccctaaagatcagctggagctggagctgggtatcagaaatgatcacacaggttatgtgcagtgactcatgcctgtaatgccagtactttgtgaggcctacttgggaggatcacttgagcccaggagttcgagaccagcctggccaacatggcgagaccctgtctctataaaaattagctgagtgtgatggcacacacctgtagtcccagctattctggaggctgaggtgggaggatcacttgagccagggaggcagaggttgcagagagcctagatcgtgccactgtactccagcctgggtgacaaagccagaccctgtctcaaaaaaaacaacaaacaaacaaacaaaaagagaaatgatcacatagaatgggcatttgttcttgagataccaacacttgtgtggagttatactgaacttacacattttatgcacttcaagtattttctgtttcacaataaaaaaagaaacaactattttagttacctgataagtttgaaagtactgaaaaaaattactcctctgtcagaaagtttagatgtagattgaaatgatgtacatctaaaagagaagcaaatgaaaactggcaagtgtgtacttcagcaaaaagaatggcatgaatggaatttacaaaacagtactaatgttactataaacattaattgaaaccaaacactttaagggcgattggaggatgggaataaggtattaggaagagttctcatggattcccagacagggtacccctatagggctgggcatgtagctgtgtcccatggatcgtttccccttcgttctatcccaggctggtacttgtgggacaagaggtgtccacccagccgggccgaggctcgggcagagacgggacagactcgccactcgcttggcacagtcttgtaggactttcccgccatgccacataggtcagaggcccacgcagcgagctcctactgaaaaccatcgcaccatccccccggggcatttctgcagtgttccaggctctggactacatttcccagggccgtcgggaccaaggttacttccagcctaagatggcctgggcttactgtcctgttcccagggctgggagccttttgcagaggtagggcagcctgcatgcctccgctgaagcttcctaaacgcggcctggaattctggaagctctcggcagcagatgtgagcggtgtgtgggcgatggtctttgcccagcgaggggatggggctcaaatgcagggtccgttaatggtgaccgcggtgtccggggcagttaaagacggcccaggctccggactacatttcccagagtgcaccgttccccgggcaacttcctgtcagccctctgtccctttagggttaatagaaagatcgcggaaccttccaccatcaagggaccgcagggccgggtgagtgattccgagacacagaagccgaatgactccggagggcccgaggccggggctgaggggagtgaggtgctaatgtctttggagttggtggctttgccggcgagggagcgtgggggcgagcgatcgcgatgggagcagtggatgcgagagtgaa

SEQ ID NO: 21518 - DNA, 2300 bp, Homo sapien
tctgccctaccccatgacttctgggaaaaggaaaagggctgaaggttgaactcatcaccaatcgctgctgatttaattaatcatgcctacataatgaagccttcatagaaacacaaagggctgagttcaaacagcttatttcccggactaccccacaggcgttttcttttttctgttttttaggagacattggtggggtaaacatacaaaaatgtgattgcctcactcaaccaagagccttagccataattaaaagatgttcagatggagctgtacaggaatgtgatgctggagaactagagcaacagagccacattaggtatagatcgcttgcctgtatagtccaaattttgttgtttttgttttttgggtctttttgtttgtttgtttgttgtattttgttttgttttaaggagcggagagtttaataggcaagaaggaagggagaagacagaaggaagaagttcccccatacagagatgggggttgggggggtggtggctccaaagccgaaagaggaggtccccttgttttttgggggttttttgagacggagtctcactctgtcatccaggctggagtgcagtggtgcgatctcagttcactgcaacctctgtctgccgggttcaagccattctcctgcgtcagcctccaaagtagctgggattacaggtgcacaccaccacgcccagctaattttgtatttttagtagagacggggtttcaccatattggccaggctggtcttgaactcctgggctcaagtgatccacccacttcagtctcccaaagtgctgggattacaggcgtgagccaccgcactcatgcttggtttttttgttttgttttgtttgtagagagtatgctgttcaggctggtctcaaactcctgagctcaagtgatcctcctgcctcagccttccaaagtgctgagatcacaggcatgaaccaccatgcccggcccttcctgccattgttaaaagcttcaggattatattttacatcagcatttcctgttgtcatacacttcctgccatcatatttcggcaacctctaccacctcccaaagtttctagcttaaaaaattattgatttcctcctagctcccctttctgtcagttttttaattttatatttgttttcaaatgagtcctcacattgattttaaaaatttaacaagagtatagtgaaaaggaagttcccctttcactatttatcttccccatatgcatctattatgacgggtttcttttttaaactacttggagtactcataactgattttgtactctagttcagaagaaatgtctgaatgttaaatgtttacataaaaaatgctattttattatatcagtaatggagcttcccccctttaaaactgctgcaccaggaagatacaaccttgttatcacaatttaaagagaaaatgagacttggaggttcagattcctccacagtcatagtatcagctacccacgcagtgacccacattcaggtgattacacacactcatacacagatccatacacgatcttgccccccccacctccacacactcaatatgacctccccacgcccaaagctgcacacatcttgacctcacttctctcacacacacaccaatctgacccgcacgcggtttctttcactcaactacccagacacccctcatcccaccagcacaagcaggcccaccgcggtctcacacacactcgagccttcctttgcccagtctcacatgcatgactgggatcgcggatttgtccccttccgactccccatgctggttcggtcccagacgctcaggtgccacattggggtgcgctctcccggctcctccacacgctacgcagctgcccgcctcaagagcgtctgcgtgcttccagcgttaagtggaattccaagcagcctccggggcacagttagtctggtcactgcggccagactgccgcctcaggacccagagaacgcagcacactttagttgggcccatctatccccggcgaggcttggactacgtttcccaggagaccctgcggtccagtatgtctcccgaggaggggcggaagcccgggagccgccctctgaggctgggcggggtgaaagaaagcttgccccagaggacttaaacaggcaagaaggacttggttaaagactattgcaatagtcaacttccaatacaacagcagctggagatttatagctaacgggctgggtgaaggagttaaaggatgctaaattactaagaggaagttaagtatcaagagtggggggattgttactaaactggcttagctggat

SEQ ID NO: 21519 - DNA, 2300 bp, Homo sapien
ccttgttttttgggggttttttgagacggagtctcactctgtcatccaggctggagtgcagtggtgcgatctcagttcactgcaacctctgtctgccgggttcaagccattctcctgcgtcagcctccaaagtagctgggattacaggtgcacaccaccacgcccagctaattttgtatttttagtagagacggggtttcaccatattggccaggctggtcttgaactcctgggctcaagtgatccacccacttcagtctcccaaagtgctgggattacaggcgtgagccaccgcactcatgcttggtttttttgttttgttttgtttgtagagagtatgctgttcaggctggtctcaaactcctgagctcaagtgatcctcctgcctcagccttccaaagtgctgagatcacaggcatgaaccaccatgcccggcccttcctgccattgttaaaagcttcaggattatattttacatcagcatttcctgttgtcatacacttcctgccatcatatttcggcaacctctaccacctcccaaagtttctagcttaaaaaattattgatttcctcctagctcccctttctgtcagttttttaattttatatttgttttcaaatgagtcctcacattgattttaaaaatttaacaagagtatagtgaaaaggaagttcccctttcactatttatcttccccatatgcatctattatgacgggtttcttttttaaactacttggagtactcataactgattttgtactctagttcagaagaaatgtctgaatgttaaatgtttacataaaaaatgctattttattatatcagtaatggagcttcccccctttaaaactgctgcaccaggaagatacaaccttgttatcacaatttaaagagaaaatgagacttggaggttcagattcctccacagtcatagtatcagctacccacgcagtgacccacattcaggtgattacacacactcatacacagatccatacacgatcttgccccccccacctccacacactcaatatgacctccccacgcccaaagctgcacacatcttgacctcacttctctcacacacacaccaatctgacccgcacgcggtttctttcactcaactacccagacacccctcatcccaccagcacaagcaggcccaccgcggtctcacacacactcgagccttcctttgcccagtctcacatgcatgactgggatcgcggatttgtccccttccgactccccatgctggttcggtcccagacgctcaggtgccacattggggtgcgctctcccggctcctccacacgctacgcagctgcccgcctcaagagcgtctgcgtgcttccagcgttaagtggaattccaagcagcctccggggcacagttagtctggtcactgcggccagactgccgcctcaggacccagagaacgcagcacactttagttgggcccatctatccccggcgaggcttggactacgtttcccaggagaccctgcggtccagtatgtctcccgaggaggggcggaagcccgggagccgccctctgaggctgggcggggtgaaagaaagcttgccccagaggacttaaacaggcaagaaggacttggttaaagactattgcaatagtcaacttccaatacaacagcagctggagatttatagctaacgggctgggtgaaggagttaaaggatgctaaattactaagaggaagttaagtatcaagagtggggggattgttactaaactggcttagctggattcttgctgaagtgctgttcgcaggctatggaggaggcctggccaagcaaaaagggctcagaggagcctgactaaagcttggtctagggactccttgtcaggtgagactcccggaaggctccgatgggcagctcacctcaaagagatagttttgttggtgccagagtccgcgccaggggaatcgggatggctgggctgtagctttcggcaacctgtcgctttctggactacacttcccagaagcctctaggcccagggcactctcccgcgataactagattgtctcttgaggagtgggcgggatcttcccgcggatttgggcaagcggccttggggctttgtgagatagctagggtcgacttgtgtggattctagtagaacggagctgaccctatccgaacaggcgtaagtgaggcggctcggagcctggcgcgacaggaactcccgacctgtgtgggctgcgtggggaacaggctaaggagcgattgtgaggagtgtgtacggttgtgactgggggcgtgtgtct

SEQ ID NO: 21520 - DNA, 2300 bp, Homo sapien
ataaactcagctttttaaaaattagaacttatcataaaatcatcttacaggaaatgatgaaatagtccaaatagtaggaaaacaatcaataaaggactgagatccagattacataaataactcatacgaatcaataagagctattccaagagaaaaatgagtaaagatttgaactgacatgtcacaaaagatgactaaaaaccaataaacatatggaatatgttcaattttattattaatcacggaaacccaaattcaaacctgtgggggtgggcgggtataagtacagatatatattcaaatgaggatttaaaagtctggcatgtctgatttgtatatcatagtttttgcaaacatcaaaaatgtatttcccaagaccatttgatgacatgggagaatatttctgacacttctttttgcaaaaatgtagaacatcaaatggtaaatgaaataaaatttggtttttgacaaataatgaaaatacattaaaatattaaccctagttatctgagtggctaaattttattttttcttggtaatgctgtgtttttgagatctctaaattaatcatccttttatttttaaatcagaataaatatttgagaagaaaattcagcaagcataagtggagcaaccatccttttctgtgatgggaaaattatagggacctataattaaatgacattcctttaagcaagaattttcagaagaaaaagaggaaaccccaacacaccttggatactgcttgtagaagttcatcatgcattctttcctcctcttctgggtgacacctggagaaaggtaaaattgggagagggaagagtaactgtgagacaccaggtttttcttggtacccagattagtcaagtaagagttcttccccagccccattacccaccacacatgaggaatggagatcagaggagaatggggcattctgtccaattccagtggctcaggggaaaggttgtgttcactgctgtccagggttggaatctgaccagacctcagagaggtttcctagagacagagttctggagtcacaatcgcatagttgacaggaccccatactcatacacagaatgccacatacatttagggacagtcacacttaaggcgacatgcacgtctcacctgcccacaaggagccacacacggcaacacagttacaatcacatacacaccataggaaacacacaattacagctgcacaatcgtaggcaccccacactgtcgcagagtcacaatcacacatcaccacgggaacacacagccacaacccccacagtgacaggtatcccatatccgcacataagccgcagtgttattatctcccagacaatttcacaacctcccctctttttttgggggggtggggtggggtggggacagagtcttgccctgtcgccaggctggagtgcagtggtgcgatctcggctcactgcaacctccgcctcccgggttcaagtgattctcctgcctcagcctgcgagtagctgggattacaggcgcgcgccaccatgcctagctaatttttgtatttttagtagagatggggtttcaccatgttggccaggatggtctcgatctcttgacctcgtgatcctcctgcctcggcctcccaaacacaacctccacctttcaggccgctccgcccgcaggggcccaaggcgccagctccccatcggtcttcggtatcctcacctaagccctttccagtcatcccggatgggaacttgcagacctgagccagttctcctggggaccaaaatatctcacctcccagatctaagggtcccgccaggagtgacgaaacgttcgaattcctgcgagaaaagtggcaggccaccaggccctctgggaaatgtagtccagagcgggacccacgccgattcctgtcagctcctcgcctgggcccacccgaaacggctgctccctcaactctcaacatccagccgagcctcggagttgcgggtcgccgtagcgctgcgcaatggagatgagcctcccggggaacccggcccaagcctcaccctcacacaggaaagcagatgtgttctggccggaagttgagtggggccgcggggcctgctgggaggtgttgtcctcggaaacgtcgctggcgcggagggatggttcggcgctttaggcgtctgtcacagacctatctgcgggtcgccttcacccagcatctcagaaactgcgcgcgggatgaacattcgggtgtttccggcaggtgacgctgccgagtccccgcagcagggggcgagcaagggactcgcggttgacgggacacggat

SEQ ID NO: 21521 - DNA, 2300 bp, Homo sapien
tggttgaggcaatctctcttgcgctctggtgacccatcaggagcagagcatgccctggcaacaaatgtccttttggcctgagaccctgaaagaacacatgcggcgcagatcttaactcgtcacgcagcctatccactcagccaagccccacctagatcagctgaacacagtcaatgcgcaagcctgtgaacaggagagtaaggacttgctgttgtatggcattgagttcaggggtggtttttagacataattattatcatggcaatagctaactaacatacataaaagcagcaagtcataagataataatgaacctgaaaagttcgccaaggaatagtggaaaattacaaagggccaagggctactagggtaaaaaagacagcaaagaagactacagaggagtggccaacaaggagggaggatcagtagaaaacaaataagtgtttttcaagccgttaccaactgtgccaaatgctacagaaaagccagctcaagacaagaactactagacatattacaatcacgcacacttcgccacgttcacactcgctacagccttaatcataatcacacacatatcacacatttcatcataatcccgcgcaaccaaatatcacaatcaccccatcagattattcgtgccgtcacactcacacacacaaccacacacccacactaactcccatcacagttttttgtcccatcaactgcaaccactcaccattagcgtaccctgagcactccccactgccgctactcgggacactctgggccttagaggatccgtgtcccgtcaaccgcgagtcccttgctcgccccctgctgcggggactcggcagcgtcacctgccggaaacacccgaatgttcatcccgcgcgcagtttctgagatgctgggtgaaggcgacccgcagataggtctgtgacagacgcctaaagcgccgaaccatccctccgcgccagcgacgtttccgaggacaacacctcccagcaggccccgcggccccactcaacttccggccagaacacatctgctttcctgtgtgagggtgaggcttgggccgggttccccgggaggctcatctccattgcgcagcgctacggcgacccgcaactccgaggctcggctggatgttgagagttgagggagcagccgtttcgggtgggcccaggcgaggagctgacaggaatcggcgtgggtcccgctctggactacatttcccagagggcctggtggcctgccacttttctcgcaggaattcgaacgtttcgtcactcctggcgggacccttagatctgggaggtgagatattttggtccccaggagaactggctcaggtctgcaagttcccatccgggatgactggaaagggcttaggtgaggataccgaagaccgatggggagctggcgccttgggcccctgcgggcggagcggcctgaaaggtggaggttgtgtttgggaggccgaggcaggaggatcacgaggtcaagagatcgagaccatcctggccaacatggtgaaaccccatctctactaaaaatacaaaaattagctaggcatggtggcgcgcgcctgtaatcccagctactcgcaggctgaggcaggagaatcacttgaacccgggaggcggaggttgcagtgagccgagatcgcaccactgcactccagcctggcgacagggcaagactctgtccccaccccaccccacccccccaaaaaaagaggggaggttgtgaaattgtctgggagataataacactgcggcttatgtgcggatatgggatacctgtcactgtgggggttgtggctgtgtgttcccgtggtgatgtgtgattgtgactctgcgacagtgtggggtgcctacgattgtgcagctgtaattgtgtgtttcctatggtgtgtatgtgattgtaactgtgttgccgtgtgtggctccttgtgggcaggtgagacgtgcatgtcgccttaagtgtgactgtccctaaatgtatgtggcattctgtgtatgagtatggggtcctgtcaactatgcgattgtgactccagaactctgtctctaggaaacctctctgaggtctggtcagattccaaccctggacagcagtgaacacaacctttcccctgagccactggaattggacagaatgccccattctcctctgatctccattcctcatgtgtggtgggtaatggggctggggaagaactcttacttgactaatctgggtaccaagaaaaacctggtgtctcacagttactcttccctctcccaattttacctttctccaggtgtcaccca

SEQ ID NO: 21522 - DNA, 2300 bp, Homo sapien
atgtataaagaaggatgtagggacttgagcatctgtggattctggtatccatggggggtcttgaaaccaacccctcctggatacgaactgtatatagaataaatgagctactactactaatttggggatttaaaactagaagagaataggctgggcatggtggcttacgcctgtaatcccagcactttgggaggctgaggtcggcaaatcacgaggtcaggagatctaccatggtggctaacatggtgaaaccctgtctctgctaaaaatacaaaaaatcagccgggcgtggtggcgcgtctgtagtcccagctactcgggaggctgaggcaggagaatcgcttgaactcgggaggcggagtttgcagtgagccgagaccgtgccactgcactccagcctgggtgacagagcgagactccgtctcaaaaaaacaaaacaaaacaacaacaacaacaaaaactagaagaaaataatatatgagacaagaataacacagaaattggtggatattttggagttcaagtattttaaagtcttaaggttgagttttgttaagcatgcatattaaaaaaggataatagcagaaaccaacctaggggagaaaaagggataaggtgaatttgcacaataaaaaaagatatatgtgcaactattatatgtcaatcaaaaatgtttaaggcgtaatagaaaataaaacattttttatgagcaatcatgataaatgccactgaactatactcacctattaaaataacagtcaaacaagataaacggatgtaagcccagcaatatgctctttacaagacacagatctgaaacataaagacacaagggggttagaaaatgaaattcttaagaaatacaataaaacttgaaaagcaatattatcagacaaaagagaacccggactaaaaggcattcaccaggataaagaggtatgtttcttaaggtggtagactggaattttagtccaattcctcacaccctctaatagattattattcatactctttgcgaggtaactttgctctccaactgtgggcataattgattttaggcttagccatgtgacttgctctggttgaggcaatctctcttgcgctctggtgacccatcaggagcagagcatgccctggcaacaaatgtccttttggcctgagaccctgaaagaacacatgcggcgcagatcttaactcgtcacgcagcctatccactcagccaagccccacctagatcagctgaacacagtcaatgcgcaagcctgtgaacaggagagtaaggacttgctgttgtatggcattgagttcaggggtggtttttagacataattattatcatggcaatagctaactaacatacataaaagcagcaagtcataagataataatgaacctgaaaagttcgccaaggaatagtggaaaattacaaagggccaagggctactagggtaaaaaagacagcaaagaagactacagaggagtggccaacaaggagggaggatcagtagaaaacaaataagtgtttttcaagccgttaccaactgtgccaaatgctacagaaaagccagctcaagacaagaactactagacatattacaatcacgcacacttcgccacgttcacactcgctacagccttaatcataatcacacacatatcacacatttcatcataatcccgcgcaaccaaatatcacaatcaccccatcagattattcgtgccgtcacactcacacacacaaccacacacccacactaactcccatcacagttttttgtcccatcaactgcaaccactcaccattagcgtaccctgagcactccccactgccgctactcgggacactctgggccttagaggatccgtgtcccgtcaaccgcgagtcccttgctcgccccctgctgcggggactcggcagcgtcacctgccggaaacacccgaatgttcatcccgcgcgcagtttctgagatgctgggtgaaggcgacccgcagataggtctgtgacagacgcctaaagcgccgaaccatccctccgcgccagcgacgtttccgaggacaacacctcccagcaggccccgcggccccactcaacttccggccagaacacatctgctttcctgtgtgagggtgaggcttgggccgggttccccgggaggctcatctccattgcgcagcgctacggcgacccgcaactccgaggctcggctggatgttgagagttgagggagcagccgtttcgggtgggcccaggcgaggagctgacaggaatcggcgtgggtcccgctctggactacatttcc

SEQ ID NO: 21523 - DNA, 2300 bp, Homo sapien
atcccagttacttgggaggctgaggcaggagaatcacttgaacccgggaggcagaggttgcagtgagctgagacggcatcactgcacaccagcctgggcaacaagagcaaaactccgtctcaagaaaaaaaaaaactcttaaactctttatgttttttttttcgcatttctaatgtttttgctttattttgctcttgtatatcagtcttgtgtttcatttatcttttagtactaaactgtggatttttaaattttggtccagtagtttgttttctagtttgtaaactagaaatacttaagaattttttttaatgaaatgttataagtaatgtttcacaagaaagaaacgataatggccaaaaatataagggactactttttaactgaaaagaaaaaaagtcacaattacacatcctagaagttaactgctgttaacaattaactttaaagatattattgcccaagtgcctatgtttctgctatttataactttgttttttttctttttgagacgcagtctcgctctatcgccaggctggaatgcacctccttagtagctgggactacaggtgcacaccaccacgccaggctaatttttgtatttttaggagagacgaggtttcaccatgttggccaggatggtctcgatctcctgaccttgtgatctgcctgcctcggcctcccaaagtgctaggattacaggcgcgagccactgcgcctgacctatttataacttttttttttttttgagatgaagtctcactgtcaccaggctggagtgcagtggtacagtctcggctcactgcaacctccgcctcccagattcaaggtattctcttagcctcctgagtagctgggactacaggtgcgcgccaccacacccaggtaaattttgtatttttagtagagacagggtttcaccatgttggccaggatggtcttgatctcttgacctcgtgatccgcccgccttggcctcccaaagtgctgggattacaggtgtgagccaccgtgcccagcctataacatttttaaatacagtatttattttaaaaaattggtttattttagtagcacttttagtaacacaaaagtgcttttattttagtagcacttttagtaacacaaaagtgctactaaaattggtttattttagtggcacttttccaggtcctaaagtatttctcgaacatacttctgtcattaaatatccttctgcaacttaatcctcaaataatgacgttgcagcccactatattggttttccgttatttccgctgcagacccaactatccctcatccttctccagtcccttcggcatcctgagcctgtgactgcgccccttcagtctctcctaggccacatccccaaacctctaggacaggtcgtttcccagacaccctccaggccagcctgtggcccggcccgagcagaaattagtgacttaaatgttgagatgccagaagacctggactggggcatgaattcccagcccaaacttagccacccggctttatcgggattgtggcccaggtcagtgaagccccaggtccgggccgactcctaattcgtggcgtggccgggagtcgccctctcctgatccaccccagagcgcggctccctgtggagggtaccctgggtggtccgctccctggctttttacagcacttgtgagaggcctttgggcacacacacaaaccccactccctgaccctccgtttggggcgagggcggctgcagccgggttaacttcgcggactctggaagccctggcggcgggcccggccgccccttcccgggtttgcggctacatttttctgaagcctccacggccccacagcctttttctagccgtcagcggccaactattgctgcctgggcctgtgtgtttgcccagttcctgggagggtgctcgggtgcagctgggcagtctggcctcggcttcactggaggcggggaactggacatgactgtgagcgccagtgaccgtggtgcggtccaggccccgggtggcgcacccacctctggactacatttcccagggggccccgcggccaaccttttccggccgaagaaggctagtcacctttccttggcgggtgttggaaagcaaagggctggaacgtcccgggctgcggagctcgctgggttgggatggactcgttcagacctgagtgctaggacgccgaagggggcggtgaggcgtcccggcgaggagctggggtcgtctggagtttaaaagacaggtggctctcggagatgtgcgggctgcatgcccacgcttcaccgctaggggaggt

SEQ ID NO: 21524 - DNA, 2300 bp, Homo sapien
cactgcactcttttccaccatgactataccgttgcagaatccactggaaaggcacaagggttctgatttggctacatcctcaccaacacttattttttcctgtttttttgatgattgacatcctaatgggtatgaagtggtatcttattgtggttttgatttgcatttccttagtaatcagtgatgttgagcatctttcatgtgcttgatggccagttgtatatcttctttgggaaaatgtctatgtaagtcctttgcctattttttagttaggttgtttattgttgagttgtaggaattctttatatattctggatatcgatcacttatcaaatatattatttgaaatattttcgtccattctgcaggttgtcctttgattgcacaaaagttttaaattttgatgaagtccaatttgcttatttttttcttttgttgcccacacttttggtgtcagacagcttttagtttacagttataaatatatcatgtctctcctgcctcatatgtaccactggacaaggtcccttttatgtgctcagattctgttagaggtaaatgtattttgaagtggagaacaaagataattgcaaaattggcatggagaactaaagtaattatgaaagttccagatacaaagagagtgggctcaatatgccagcagttctctaccaatccatcctagaagctttcttttaggattgcctaaataatgcaggggatgggtgcaagacacacaagtgttctagaagcatgtaaacaaggtacagagaagaggataagataaaataagatgagataagaatattaggaaagccttgttcagaagattgcctacagaggcaaaagggacagtttcactttgctgagggaaatagggtggtaagaaccctggtgaggaagaccctcgcttaccctgatacagagagaaggtgtaaaataacttaatgggagaccattaggctgcgatagttcccatggctgggttcctacatagacaaaatgaaacaagcttcacccatcacaagtggccagctgaatattagctgtgtaatgagtggccttccaccaggatagttcaaataatgcaactgcccaaattttcgccaatcaaataatttatctactctacttctacatccaccctataaaagccttccctgcaaatgcctccagtggatcctccaaccactttcagtttggggctgcctgatccatgaatctctgtttgctcaaataaactctttaaaattttaatatgctcaagtttatattttttttccattttaaaaattgagatgggatcttcctatgttgcccaggctagtcttgaactcctgagctcaggcaatctgcccatcttgccctcccaaaatgctgggattacaggcgttggccaccacgcctggccacaaaaagtctgcgtgtatggtagcttcaaaacccatttgtaaataggtgttttcataacaagatgaaaacaagaaaacattgaacttcatataatagaagggttctgcctggatttgcatgtgggccccatcatttgtttgctgttgggccatggtcaggttacttcctccacatagggtttaagcctgtgcatccttcatctacaaaatgggaatattaagaatatctaacaattagaagtggagaaaacatatgtaagggcctttgacaagagcttgtcaaagctcaataattgcccttaataattgttagctatcattcaataatcataatcataaaaatatatgactcaaagaaagattcctacttcatatctggcttctcaaaagaatatcagaaattggacctgtgaaaggaatgacactgagatgtattttcacattgctaagttggttttttctctttgccatttaatttctgcagtccccactctaagcccatggttcaccattttattcttcctcctaaaatttcttcccttctggtaagattatctttgccttaacaagggcccttttcatccacccactcccttacccttcccagaagtggttaatgggcacaaaaatacagttagatggaaagaaaagaacttctagtgttcaatagcacagtagcatgacgatcgttaacaataacttaccatgtatttcaaaatggttagaagaaagatttggaatgttcccaacacaaacaattgataaatgtttgaggttatggatatgcaaattatcctgatttgatcactacatattgtatgcatgtatcaaaatatcacatgtaccctagaaatatgtataattgtcatgtatcaataaaaacaaaaa

SEQ ID NO: 21525 - DNA, 2300 bp, Homo sapien
tctcccatatataattggacataattcttttttatttttatttttatttatttattatactttaagttctagggtacatgtgcacaacgtgcaggtttgttacatatgtatacatgtgccatgttggtgtgctgcacctgttaactcatcatttacattagatatatctcctaatgctacccctccccctacccccactccctgacaggccccagtgtgtgatgttccttaccctgtgtccaagtgttctcattgttcaattcccacctatgagtgagaacatgtggtgtttggttttctgtccttgcgatagtttgctaagaatgatggtttccagctttatccatgtccctataaaggacatgaactcatccttttttatggctgcatagtattccatgatgtatatgtgccacattttcttaatccagtctatcattgatggacatttgggttggttccaagtctttgctatcgtgaatagtgccgcaataaacatacgtgtgcatgtgaattggacataattcttgcctgactttgacccactctaactcagtgcaatttaattatctatatttcacatagctatgcctgatcacacacacaggttcattccctcaagaattctgatcaccaaatttgctattccagtcacattaccggtaagagatcaatgtatttgatatatggtcttgcaagaccaagttttattaatttttttccctctgaaggagtggtgaaattatactctatcttctctgtgctggaagttcacaagtttttgattattcaaaaatcataaaaggccaagaggtcttgaagtaagtaaaaataagttcaggtttaccaacaaactctacagccttaagttactttctgccggccaaggttttctcatcagaaaatgaggacaagtgtttgacctagaatttgggaaatctgactagtgctgtactgtgctaaaattcactcttcttatgtataacgttgttttattattttattagttgatggcctctcaaccgtacccagtaataagagaaactttaccctctaattagaaaataatggatatctacttttggcctgctgtggcagaggaaaaggcagttaccctaggactggttttgaaataatctttctaaaaacaaagaaaaaactacgttaattttggattcttcccgataacacatatatttgatccaatagaaaaatgatgtctaaattacttgtcagataaattgattatcttttccagattattacattactatttaaggaagaaataacttggccatagtattttcactgtcacacacgatcacacacagctcatttgctcttggcacccttacagacactgaaatacaagcacaaagaaagcacgtttatataacacagatcaccagttactcaattacggccacacacaaaaaagcagatatacatacagatacccttcataagcaaaccacaatagagatctgtgtaaaatcgtcttactctgttagacgattctacacagttataaaatcccattactacgcagcttaaagtacaaatcacctcacaccccacagcaggaagaatcacacacaggcagaaacacaaccatacacacccggccacggaaagactctcagtccacctggcatctcccattgtcacacacaccccaagggcctgggagggcacacacagggtcctctgcaaatccgaggttccggcgggtccccgcaccggccccagctcctcccccgcacctgcctggccggcgggtcccaccctctctcctgccaggggtagaccctgggaccactcagctcgctctcgcaggccctgagcgtctgacgcctgcgcactgagcgcgggcgggcgggcactcccagaaacctccggggcgctgcaggcgggacaagcaggttccacaggccgagcccacgagcccctcgaggggtgagcggcccgggcctcctggcgttctggccggctagccaagcgctggactacatttcccagaggcacggcgtccggagcgctggactacatttcccagaggcaccgctcccggagcgtagcttcatttccgttagtttgcgagatttggaggcctcgcgtggggagagggccgcgtctgtggaggagcttggctccgcacctgctgggctggcgaacccgaaattgggcttggaacccgggagccagatcttggaccctgaactgcacctctgtcaaggtaggagtgtccgggatgccggagcggacacgcgcggagaaagcgtcgctggggttactcgtgt

SEQ ID NO: 21526 - DNA, 2300 bp, Homo sapien
attaattactatgccatgtcagcaggcacatgagagctggtttgtggatgctgatgttactagctgatctatccattgtacgcttcccttcagcctttcaactgaaacattccaacagccattaatgattattgtctaaatctgttatttcattagtagttatacatggtggtattttaattttatcctaacttctttatttattagctagaatcattctataaaaaacttttccaaccaggtaaagtagctcatgccagtaatcccaccactttgggaggccgaggcaggtagatcgtgaggtcaggagatcgagaccatcctggccagcatggtgaaaccctgtctctattaaaaatacgaaaattagcctggtgtggtggcgtgcgcctgtaatcccagctactcgggagtctgaggcagagaacggcttgaatccgggaggtggaggttgcggtgagccgagatcgcaccactgcactctagcctgggcgacagagtgagacttttgtctaaaaaaaaaaaaaaaaaagaacttttcctcaccagctgtttggttatcctgtgtaatacagaacttaaaaaaaatttacatataaatctgattaccttaattaccattactgaaagtaaaaattccatactttgaccaaactgtttttcctatactgcttttctgacacatcagacagacttctctccatttatataaacctgtttgctgttccctaaactcatggtgtatttttctatctctacaccttttattcttgtcttttctgggcattgtccccctcaccccatattctgggttacactttgtatcttccaagttaaattcctcaactctacggaatgtcaacttactccctcaagtaaaatgtactttttgttcctttgggccctcagtgtgttccaccataaggcatctacttttcaacaccttaatgaatttgttatgtcttcttttttaaaaaacttcagtctgatttattttccaagtcttttaagttgctagaagattggacacataattatttctgtgttcccagggctagcataagggctcgtcctaaattgatcagaaagcatatcgcaggtcattcatccagttgctaggaaactaaaacacagcttatttcaattgccagttttgaaaaatgagtaattggctgactatagtacagaacaaatagcagaaattcttgatgggatttctgtgttccacaaaatatgtaaaactaaatatttaatatgcatatatataaaatgtttcttcgaaatttctggattatacaggtgtacacagttgtcaaaactttaaatggtaaattaaagattggtgcatttaattgtatgtaaatgttacttacaaaaggttgatacgttttacaccctagttcatgatttgcattttgaagtattaagagaggccaggcgcggtggctcacgcataatcccagcactttgggaggccaaagcgggtggatcacctgaggtcagcagttcaagaccagcctggccaacatggcaaaaccccgtgtctactataaatacaaaaattagccgggcatggtggtgcattcctataatcccagctactcgggaggctgaggtaggagactctcttgaacctgggaggcggaggttgcagtgagccaagatcataccattgtactccagcctggacaacagagcgagactctgtttcggaagaaaaaaaaaatgaagtattaggaagaagtgtggtgtcatctgcaacttactttgaaatgtacaaagaagcaagatggatagataaaagaatggcttagatgtatgataaagcaagtaaagtgttaatgattgatcctaggtggtaggtatacatttcttactgcataattattttaaattgtcggtatgtttgaaaattttcataataaagtattagagaaatgggagtgagtttttaaaaagagaatgtaaatttaaaacaacaagacctgtattccatattcctaaatatagtctctccaaccctctaagctgactgtgcacattgaacaagaatttgcccttacagggatcagtgtccttcagggatgtggctatcgatttcagcagagaggaatggcggcacctggacccttctcagagaaacctgtaccgggatgtgatgctggagacctacagccacctgctctcagtaggtaagcacagtcaccttggtatctgaaaggaggcctcactgagagtgttttcattctcagttggtgaatgctgtccgcatcttaaataggtgatgattttgttcttga

SEQ ID NO: 21527 - DNA, 2300 bp, Homo sapien
catgagttgtgacttgcaatgaatgtgccttgctagtgtcaagatggagctgaacttaaaatggtgtcactctgggtctcctaggtttcatcttccctaacactatgaccacacctgctgtcttcttgatgtttccttgtaaatgtttttaattcctttctttttaaattagaaatttactatgaaaatttcacacaaatactatggaagagaacattataatgagttctgtctacttatcactctgctttaacatttatcaacattttcttttgcaataccatataccccttctcagtggagttttttttttctcagtggagtttttaaagctaatattattccacccataaatatttccacacgaatccctaaaagttaagtcatcttctttttaacagagctgcattactgacaaaatcaacagtaattcttagccccttggtagaaattgtgtgtttactaacggacttccacagatgtttccttagaccgtcctttcggagaagaaagaaaacctgagatcagcagagtctaattctctaaacatatttttaagccgagtcccagagacagacataactggcctgaaggcatccagcatgcccacatcagagtgtaggttcaattccctgaaaacaagtttcccacctgctggaactgaacacattgggtagtaatttcccaccactgttcaggtagaacttcctgtcagaagctgagctgtgaatcatgtttaggagttcaccaagtgaaaggaattgtatctttacaactcctcatccacaccctccaaaaaggggagtaaggaggtttcagaatttccacagaggagaagctaagggtcagagactgcacttaaagcttcattgacatggtaaggcgattgttattaattatattttaacttcaaggtaaataaaaacagtcttctttaggtgcttttagtaacacgttggccatactaaagactattagtgttgttattattgctgcctactatagttgcacttgaggtatttagtgtggagggtaatgggtgattcaaatctctattcaccttcccacccgacccagcccttcagaaggggacgcccggacttctcctccctcctctggtggtatctcccaggagaggattgtattaatactattggacttctaccctatttcccaaggcggtttctcccattaaaagttgtaccactcttcctgcagcctactactcattcagatgtctctcagactttcagggtggtttcactcaagagatgactcccctagtgacctttccaccttttccctgaatggcgtctgtaaaaaatggactgtactatcctgattcctcctatcatctgcctgtggtttctcccaggatccccttcacttggtgatttttccctggctcctctattccctggtaattattatcctcagtgtcctgtattcagaaaggtaacttagcttttctaaatataacatacagcaccagacccacatttccagtaactttctcctccgaaatagaagcctagtcagacaagggtcacactccagcatcctatgtaactatacctgcctcgctctaggaaaccctgccagcggccaattcctctgctctacggaatggatatgctttcaaaatggcggcccacgcgaataaacaccataagggcgcggccatgttctctgccggacagcgccacattacggaacctgtgcgctgtgtctgcgccctgttgactgttcgaggaaactggcttccaagtttattcagagcatgcgccatatcaacagcctacaaaggggaggtgctagaagtcggaccggaagtggaagtggtcttccaaggcttttttgccgctggtgtcaggagtattttcatattccaataccgataaatctttgaggtgattttggttgatcacgattggggtttctgtggagccagtaatagggggtgtcgaggttgcctgtggagttagtgattgcggtttcaggcttcggtgatggggttctgtggcgtccgttgttgattgtgacggatttctcaggtcattgatggagctctttgggatgagtgattgaggtttgggggtcagtgatgggagtctgtggtcagtgacagagcctgtagggtcagttatggtgatcggtgaggactgtaatcagcttgctttctaacctgagttgaaagttcagctttttaattttcagtcttctttaatataaaaattctcaagttttggtgaatctttgtattaaaaattgttcaaatctaagtggttttttctttgatc

SEQ ID NO: 21528 - DNA, 2300 bp, Homo sapien
aagtggaggaacatctgttaagcttttcttatataggggtcttgtctatgtaaagactaaagtaagctgtgcctatgcgtgggtggcctgacattatgacaaaatttattattctattgatttaaagaaaactatccctgacattttagtaagtacatcaaagtataactataatgatcttgaaagcatttattgttatgggtattggacatctggactttctgttgttctaggagtttgtctttgcaggcattacagggctgcttccttcgctgtaaacacattaggaccatgagttgtgacttgcaatgaatgtgccttgctagtgtcaagatggagctgaacttaaaatggtgtcactctgggtctcctaggtttcatcttccctaacactatgaccacacctgctgtcttcttgatgtttccttgtaaatgtttttaattcctttctttttaaattagaaatttactatgaaaatttcacacaaatactatggaagagaacattataatgagttctgtctacttatcactctgctttaacatttatcaacattttcttttgcaataccatataccccttctcagtggagttttttttttctcagtggagtttttaaagctaatattattccacccataaatatttccacacgaatccctaaaagttaagtcatcttctttttaacagagctgcattactgacaaaatcaacagtaattcttagccccttggtagaaattgtgtgtttactaacggacttccacagatgtttccttagaccgtcctttcggagaagaaagaaaacctgagatcagcagagtctaattctctaaacatatttttaagccgagtcccagagacagacataactggcctgaaggcatccagcatgcccacatcagagtgtaggttcaattccctgaaaacaagtttcccacctgctggaactgaacacattgggtagtaatttcccaccactgttcaggtagaacttcctgtcagaagctgagctgtgaatcatgtttaggagttcaccaagtgaaaggaattgtatctttacaactcctcatccacaccctccaaaaaggggagtaaggaggtttcagaatttccacagaggagaagctaagggtcagagactgcacttaaagcttcattgacatggtaaggcgattgttattaattatattttaacttcaaggtaaataaaaacagtcttctttaggtgcttttagtaacacgttggccatactaaagactattagtgttgttattattgctgcctactatagttgcacttgaggtatttagtgtggagggtaatgggtgattcaaatctctattcaccttcccacccgacccagcccttcagaaggggacgcccggacttctcctccctcctctggtggtatctcccaggagaggattgtattaatactattggacttctaccctatttcccaaggcggtttctcccattaaaagttgtaccactcttcctgcagcctactactcattcagatgtctctcagactttcagggtggtttcactcaagagatgactcccctagtgacctttccaccttttccctgaatggcgtctgtaaaaaatggactgtactatcctgattcctcctatcatctgcctgtggtttctcccaggatccccttcacttggtgatttttccctggctcctctattccctggtaattattatcctcagtgtcctgtattcagaaaggtaacttagcttttctaaatataacatacagcaccagacccacatttccagtaactttctcctccgaaatagaagcctagtcagacaagggtcacactccagcatcctatgtaactatacctgcctcgctctaggaaaccctgccagcggccaattcctctgctctacggaatggatatgctttcaaaatggcggcccacgcgaataaacaccataagggcgcggccatgttctctgccggacagcgccacattacggaacctgtgcgctgtgtctgcgccctgttgactgttcgaggaaactggcttccaagtttattcagagcatgcgccatatcaacagcctacaaaggggaggtgctagaagtcggaccggaagtggaagtggtcttccaaggcttttttgccgctggtgtcaggagtattttcatattccaataccgataaatctttgaggtgattttggttgatcacgattggggtttctgtggagccagtaatagggggtgtcgaggttgcctgtggagttagtgattgcggtttcaggcttcggtga

SEQ ID NO: 21529 - DNA, 2300 bp, Homo sapien
ggcattcaccaaccggtcaaatctcattacacatcagaaaactcatacaggagagaaatcttatatatgttccaaatgtggaaaggccttcacccagaggtcagacttgattacacatcagagaatccatactggggagaagccttatgaatgcaatacttgtggaaaagcctttactcagaagtcaaatcttaatatacatcagaaaattcacactggagagagacagtatgaatgccacgaatgtgggaaagccttcaaccagaaatcaatactcattgttcatcagaaaattcatacaggagagaaaccctatgtatgcactgagtgtggaagagctttcatccgcaagtcaaactttattactcatcaaagaattcatactggagagaagccttatgaatgcagtgactgtgggaagtcctttacctccaagtctcagctcctggtgcatcagccagttcacacaggagagaaaccctatgtgtgtgccgagtgtgggaaagcctttagtggcaggtcaaatctcagtaagcaccagaaaactcataccggagaaaagccctacatttgttctgaatgtgggaagacctttcgacagaagtcagagttgattacacatcacagaattcatactggagagaaaccttatgagtgcagtgactgtgggaagtctttcactaaaaaatcacagctccaagtgcatcagcgaattcacactggagagaagccttacgtgtgtgctgagtgtgggaaggcctttagcaacaggtccaatttgaataaacatcagacaacacacactggagacaaaccctacaagtgtggcatctgtgggaaaggcttcgttcagaaatcagtgttcagtgttcatcagagcagccacgcttgagagaaacagtgtgagaaaacccccctgagggttgggtctgattgtacactgttgcacgcatgcagcagaaaaatatgtatattattgtaaatagaaatgaccacatcagaatgtcacacatggctgttctggagagggcctctgagaaggcactgaatgaggcgagggacccttcctacattgtcaccatccccagtaaaccttgggtcattattcatactgacaaggaaccgagtcaatttggtgaataggaaaagccttctcatgaaaactacaatagaatactgttaccaaattcttcataagaaagatcatattatgggaatgataatcctgtttactgtggattaggtatagtgccaacagtttgaatggtaagacaacataatatatatgatagtgatgaatccttctgtgagttgtttgttccagaacacactgtctagtagaattgtgggtattttcttcttttgaatcgaacacagttgtgcatatccaattccccattgagtatttctatcaagcaagagatactgcaataagacaaactccctgtgtattcagacacagacctcagagcgtatgttgagtccccattgtcatagaaaaagacttacagtccccttcattatctgccaggactctctctgagccccacaggttctcagcacattgtgtttgacacccagcacagtgttttttctttttctttctttctttctctttctttctttctttctttctttctttctttctttctttctttctttctttctttctttccttctttctttctttttctttctttctctttctttctttctttctttctttctttctttctttctttctttctttctttctttctttttttgagacagagtcttgctctgtcgggcaagctagagtgcagtggcgctatcttggctcactgcaacctccgtctcccgggctcaagcaattctcctgcctcagcctcctgagtagctgggattgcgtgtgccaccacgcccagctaatttttgtatgtttagtagaaacgggggtttcaccatgctggccaggctggtctcgaactcctgacctcatgatccgcccgcctcggcctcccaaagtcctgggattacggacgtgagccactgcgcccggcccagcacagtgttttgtacactcccaccaccctcaagaaagcctttgaggttaggattttcaggtcatctgggagaacttaaattcttccttctgctattacaattcttctcactcagttgcctgcctcttttttttttttaatttacttgtgactgagttgaagcccagcattttactttccttaatgatctgactttcataagttgataagtcatgaaatcattatcttacattatatgagatatgagataaatca

SEQ ID NO: 21530 - DNA, 2300 bp, Homo sapien
ggcctcccaaagtgctgggattacaggcatgagccactgcgcccggccttattttattttttttttttttgagacaggttctcgctctgtcactcaggttggagtgcggtgatgcaatcgtggctcactggagcccatctccccatctttttgttcttgtctttgctgggcaatgtcccccttaccccatactttgtattactcttcttatcttccaagttaaattcttccgctctatgaaatgtaaacttatttcctcatgtagaatgcactttttcttctttttagccctcagggtgtctcagatagagatctacttttcagcaccttaatgaacttaatgtcttcactttttcaaactttggtcttatttattttctatgtatttcaggttgcgtgaagactagtaacataaataattcatttctgtgtcctcaggagtagcataatgactggtcctaaattgatcagccactgtgtggcaggttgttcatccatgtgctagaagactaaaaggcagcctatttctttctttctttctttttttgagatggagtcttgctctgtatcccgggctggaatgcagtggcatgatctcggctgactgcaacctccgcctcccaggttcaagcgattctcctgcctaagcctcctgagtagctgggattacaggtgctcgccatgcccggctaattttttgtatttttagtagagacagggtttcactatgttggccacactggtcttgaacgtctgacctcgtgatccacctacctcggcgtcccaaagtgatgggattacaggcatgagccaccgggcccagccaagacagcctatttcaatggccagttttgaaaaatgagtgattgactgactgtagaacagaacaaatagctggaattctttgttagatttctgtgttccacaaattatgtaaaactagattttttttttttttttagacagagtctccctctgtcgctcaggctggagtgccgtggcataatctcagctcactgcaaactccacctcccaagttcaagtgattctccctcctcagcctcccaaatagctgggactacaggcacgtgccaccagcctggctaattttttgtatttttaatagagacggcatttcaccatgttggccaggctggtctcgaactccaaacctcaggtgatctacctaccttggcctcccaaagtgcttggattacaagcatgagccaccgtgtccggccccctctgacattcttgcttggattacaggcgtgagccactgcaccccagctaaaactggatatttaatatgtgacctatgtaaaatattatttcttagaaatttcttatcactcaggtgtatacatttgtcacaaggtcaaatggcaaaataaagattgttgcatttatttgtattgtactaaattttaccttatcaggttaacaaatgttacaccctagttaataatttgcattttgtggtgcttaagagaaagtgtagtgatgactgcaatttacattgaaatacataaaaaaaagtaagatggatcaatgtgtgatgaagcaagtagggtaaggtgttaatggtagatctaagtagtagatatataggtttttactgtacaattctttctaattttctgtatgtttaaaatttttcgtaataagctattagggaaatgagtggcaggttctttaaaaaggaagtaaattggccaggcgcggtggctcactcctgtaatcccagcactttgggaagccgaggcgggaagatcacgaggtcaggagatagagaccattctggccaacatggtgaaacccagtctctactaaaaatacaaaatttagccgggtatggtggcacatacctgtaatcccagctactcaggaggctgatgcaggagaattgcttgaacctgggaggtggaggttgcagtgagccaagatcacgccattgcactccagcctgggccaaaagagtgaaattccatctcaaggaaaaaaaacaaaaacaaaaacaaaaacggccagatgcggtggctcaagcttgtaatcccagcactttgggaggtcgaggtgggcggatcacaaggtcacaaggtcaggagattgagaccatcctggccaacatggtgaaaccccgtctctactaaaaatacaaaaattagctgggtgtggtggcacgtgcctgtaatcccagctactcaggaggctgaggcaggagaatcacttgaacccgggaggtggaggttgcagtaagccaagatcgcgccactgcactccagcctggggaacagagc

SEQ ID NO: 21531 - DNA, 2300 bp, Homo sapien
aaggtgggcagatcacctgaggtcaggagttcgagaccagcctggccaacatggaaaaacacctctaaccaaaaatacaaaaattagctgggtgtggtggtgggtgcctgtaatcccaactactcgggaggctgaggcagaagaatcacttgaacctgggaggcggaggtcgcagtgagccaagatcatgccattgcactccagccggggcgacaagagtgaaactccatctcaaaaaaataaaaaaatagatatgactaaatagctcaaaagacattatagcaattcaagcttcaaccaataatttataaaagcaatttgcctaaatgctttccaacagtggatgttgtcacttttttttttgagacagagtcttgctctgtcgcccaggctggagtgcaatgccgtgatctccgctcattgcaacctctgcttccctggttcaagctattctcctgtcttagcctcttgagtagctgggatttcaagtgcccgccaccacgcctggctaatttttgtatttttagtagagacagcgtttcgccatgttggccaggctggtctcgaactcctggcctcaagtgatccattgtgcttggtctgttacttttttaaagcttttatgattctaaggaaaatttctctctaattgttctgacgcgtttttcttttagttaagttggtatctttttgttaattgccatttgcttccttttctctgaattttcataccttttccagtttcttttatttttttttttggccttttttgcttagtgattgcttagagttaacattacaagcaagctatcatcacatattgaaaaaatttcttatatatctttatgtcgaattttatggtttatttaaacatataattaggaaacataatcagaaatacctgtttttttctgttatagcttctgggtttcctgtcatgtgtaataagatccttatcaccccaccacaatgctatacaaatatatagtctgaaaattattttaatatccttaggggttttaaaaaatgcatgtatttaaatgtttagtgctcctggaatttgtctacttaatagtgtgaggtgggttgggcgcggtggctcacgcctgtaatcccagcactttgggaggccgaggcaggcggatcacaaggtcaggagatcaagatcatcccagccaacatggtgaaaccctgactctactaaaaatacaaaaattagctgggcgtggtgtcgcatgcctgtagtcccagctacttgggaggctgaggcagtagaatcacttgaactctggaggtggaggttgcagtgagatgaggttgtgtcactgcactccagcctggccacagagcgagaccccatcttaaaagaaaaaaatattgtgtgaggtggagatctagtttgttttattccagatgcatggccaattgcatgcaccaattggggatatgtatacaatgaatgccgtgtgcacactcaatcgcatatcatttttatttcatatatagatcaacattgtctgatatgtttattatcttacttgttttgatgacatggttttctgtattacgttttaatatagtgcatggtaattgctgatatttattgcgtgattcttgcatggcagggaggcattgagtactttaaaagcataatctcatttaatcttagtaactgtgacacaggcattttcatccttatttctgaaacaaaatctgagtaacttctttatattctcattgttgaaaagtggtacagctgcagttcaaatctgcagtaatgttactctaaatttcatggcttttcccatatttcagcactgttctccacagttctgaaagtgtggttcttgtaccagcagcatcagcatttcctgggcacttattagaaaataaaattcttagggcctaccttagacccatcgaaggggtgaagttgagaattttaaactatgttttaacaagccctccaggtgacttgaatgcatacctacgtttgggaaccactgctctggtttctagcgcagggacctgcaccttggtgtatccaggaagtgtttatgtagtgaatgttgaatgactacgtggacattgtttttctaggttcttgggtgtctctggggagtccctgggccagaccttcctccagactccagcccacctcttcggagcagctctgctgagttcacagatgaccactaaacttcaggcaccctagacaaaaagggttgagatccagtgtggccatgccagctagttggacctcaccccagaaatcctcagccctggctccagaggatcat

SEQ ID NO: 21532 - DNA, 2300 bp, Homo sapien
atatgcagattagtatgtgcaatacatcacattgacagaatgaaggacaaaaatcatatggtcatctcaatagaaacagaaaaagcatttgacaaaattcaacatctctttgcaatcaaaaaaaaaaaaaaacaaaactccctggccgggctcggaggctcacgcctgtaatcccagttctttggagtctcactctgtcaccaggctggagtgcagtggctccatctcagctccctgcaacctccacctcctgggttcaagtgattctactgcctcagcctcccaagtagctggtactacaggcgcacgccaccacacccagctaatttttgtatttttagtagaggcagggtttcaccatgttggctaggatggtctcgatctcttgacctcatgatccacctgcctcggcctcccaatgcgttgggattacaggcatgagccactgcgcccagctgggattgcttttgagcctgggcagtcaaggttgcagtgagccatgattgtgccattacactccagcctgggtgacagagtgagactctgtctcaaaaaaaaaaaaaaaaaaaaagcaagattttcttcaggtgtttttagtcacacgttggccatattaaagactgttattattattattgtgctgttgttgttgttgttgttgttttgagatggagttttgctcttgttgcccaggctagagtgcaatggcatgatctcggctcactgcaacctccgccttctgggttcaagcgattctcctgcctcagccccccaagtagctgggattataggcacacaccaccatgcccagctaattttgtatttttagtagagacggggtttcaccatgttggtcaggctggtctcgaactccccacctaaggtgatgtgcccgcctcggcctcccaaagtgctgggattacaggcatgaaccaccacgaccagccaagactattattatttttattgttgctgcttactatagttgtgcttgagttagctagggtggatgctgatggagattaaggggattaaaatatctatacctcccaaagccttctaccagccgtttcaaaggggatgcttagacttctaacccctcttccatggtatctcctagaagaggattgtactaacccaacttctaccctatttcctaatgtgttttcaactactaaaaattgtacctcccttcctgcaggatactacctactgtgacataactccgtcttgcctagtggtttcacccaggagtgaactcagatcccagtccacccttctcctgagtggtgtctccaaaaaatagattgtaccatcctgatgcctcctcttatctcccttatttctctcaggatccctggcttcctagttcccccatggtttctcctagtaaatcgttgttttctgcagtgtgccgtaaccaaggggtaacttaggtattgtaaatataacagccggaggcggtggctcacgcctataaccccagcattttgggaggccgtggtgggtggatcatttgaggtcaggagttcgagaccagcgtgaccagtagagacgtgaaactgcgtctctactaaaaatacaaaaaaattagctgggtgtggtggcgcttgcctgtaatcccagctactcgggaggcagaggcaggagaatcgcttgaacctgggaggcagaggttgcagtgagccgagatggcgccactgcactccagcctgggcgacagaacaagactctgtctcaaaacaaacaaacaaacaaaaaaaaacataaagctccagatcctatcttcaggaacttcttcttgggtacaagcgtggtcacactggttacagtcttgcattctatgtgaaaatccttgccttactctagtcaacactccaggaggcggactcctccactgtacggaatcgatacgcatcaaagatggcgacccacacaaataaacaccataagggcgcggttatattctctgcccgtgagcgccgattacggaaactgcacgatgtctctaaatatgtgtgtgctccctgttgactgtgggctgaaattggcttccaagttaatttagagcatgcgcaatatcaacagtccataaggggaggtgctagaagtcggaccggaagtggaagtggtccccgaaggctatttcgccgctggcgtcaggactattttcacgttttaatgccgagaggtctctgtgacgattttggttggttgcaattagggattctgtgaagtcagtaatagaggagttgtctgtggaattagtgatggtggtttcggggcatggtgatgggggt

SEQ ID NO: 21533 - DNA, 2300 bp, Homo sapien
tagaaagaccagaaagcatgaagcacattttaaagatgagaaattggatttcatcagaagtaaaaactgctttttgaaagacatcatgaagaaactgagggctgggcacagtgactcacacctgtaataacacagtgagaccccatctccacaaaacacaagaaaattagttgggggtggtggtgcacacctgcagtcccagctactcaggaggatcgactaaacccaggaggtcaaggctgtggtgagctatgttaacaccactgcactccagactaggcaacagagcaagaccctgtctcaaaaaaaaaaaaaaaaaaaaactgagaaggtaagccccaggcagggagagaatatttgcaatttgcaatatgtatatttggcaaaggacttttacccaaacatataaagaattgttacaactcaataataaccaattttaaaataagaaaattttatttatttatttatttattattattttttgagatgcagttttgctcttgttgccctagctggagtgcaacagtgtgatctcagctcacagcaacctctgcctcccgggttcaagtgattctcctgcagggattacaggcatgcaccgccacgcctggccaatttcgtatttttagtagagacggtgtttctccacgttggtcagggtggtctcgaactcccaacctcaggtgatctgcccgcctcagcctcccaaagtgctaggattacaggcgtgagccactgcgcccagccgaatattttcaatagatgtcacaaaagaagataaaagaatggcaaataagtatatgaaagtatgctaagttcattgacatcaggaaatgcaaattaaaaacataatttgatactactgctcattccttagaatagtcaatagatgcctgatgtggggtttgggaggtggggattgacttaacaatgtggggggcagagggcggtgaataaaaatattctatatccgccgggcgcggtggctcacgcttgtaatctcagcactttgggaggccgaggcgagcggatcacgaagtcagaagttcgaggtcgggagttcgagaccagcctgtgagctcgaaccctgtctctactaaaaatacaaaaattagccaggcatggtggcgggcacctgtaataccagctactcggaaggctgaggcaggagaatcgcttgaacccgggaggcggaacttgcagtgagccgagatctcgccactgcagtccagcctgggtgacagctagactccaactcaaaaaaaaaaaaaaaaaaattctatatccagtaacactaaggataaatgcttgaggggatagacaccctattttacatgatatgattcttacgcattgcatgcctgtatcaaaacatctcatgtaccccatatacaactactatgtacccacaaaaatttaactaaaatgcttaaaaattttttaattttaaaaaatattctatatcctgattacgatggtggtgacaagggtttagacatgcgttgaagcttaccgaacagttcacttaaaatgagtgcattttattgtatctaaattattcttcagtaaagttgatttttaaaaaacatgcacacaaatataatttacaaactataacattagctcgtttatggtgtaccattcagtcacttttagtgtattcagagttgtgcaaacatcattatctaattcaagaagctttgcattaccccaaaaatgaaccctttagctattaccaatcactcacagttccccctaatcctgctagtcctaaaaaactctaacttactccttttccgtagatttgactattttaaatatttcctataaatgcagtcatacagtatgtggcttatccacggatgaaggcaaaaatgacgatttagtcagtctagcattctcagagagcgttataacgcctagtacagtccggggtcctgggtgcgttctgcactgagtcggcttggggcaggaagtcatttaagcgacctccttccacttgccccagcgcctcaccccttcctgctctagactacagttcccaaaaatccttgcggctctagtcaacatctggcccgaagctggcgaccttttcctgtttctcagggaactccctggggttggccggtaccatggaggaagattgtcttcagcgtgcagggccagcgtcctacggcagtttcactctgagcctgtgtctggatcacggagacgcggggtagcggttcggagtgcggagcagggatgtccccgagctgtgcagctgcaagaacccgaaaaaacaggcgccatcttct

SEQ ID NO: 21534 - DNA, 2300 bp, Homo sapien
ttgcaatttgcaatatgtatatttggcaaaggacttttacccaaacatataaagaattgttacaactcaataataaccaattttaaaataagaaaattttatttatttatttatttattattattttttgagatgcagttttgctcttgttgccctagctggagtgcaacagtgtgatctcagctcacagcaacctctgcctcccgggttcaagtgattctcctgcagggattacaggcatgcaccgccacgcctggccaatttcgtatttttagtagagacggtgtttctccacgttggtcagggtggtctcgaactcccaacctcaggtgatctgcccgcctcagcctcccaaagtgctaggattacaggcgtgagccactgcgcccagccgaatattttcaatagatgtcacaaaagaagataaaagaatggcaaataagtatatgaaagtatgctaagttcattgacatcaggaaatgcaaattaaaaacataatttgatactactgctcattccttagaatagtcaatagatgcctgatgtggggtttgggaggtggggattgacttaacaatgtggggggcagagggcggtgaataaaaatattctatatccgccgggcgcggtggctcacgcttgtaatctcagcactttgggaggccgaggcgagcggatcacgaagtcagaagttcgaggtcgggagttcgagaccagcctgtgagctcgaaccctgtctctactaaaaatacaaaaattagccaggcatggtggcgggcacctgtaataccagctactcggaaggctgaggcaggagaatcgcttgaacccgggaggcggaacttgcagtgagccgagatctcgccactgcagtccagcctgggtgacagctagactccaactcaaaaaaaaaaaaaaaaaaattctatatccagtaacactaaggataaatgcttgaggggatagacaccctattttacatgatatgattcttacgcattgcatgcctgtatcaaaacatctcatgtaccccatatacaactactatgtacccacaaaaatttaactaaaatgcttaaaaattttttaattttaaaaaatattctatatcctgattacgatggtggtgacaagggtttagacatgcgttgaagcttaccgaacagttcacttaaaatgagtgcattttattgtatctaaattattcttcagtaaagttgatttttaaaaaacatgcacacaaatataatttacaaactataacattagctcgtttatggtgtaccattcagtcacttttagtgtattcagagttgtgcaaacatcattatctaattcaagaagctttgcattaccccaaaaatgaaccctttagctattaccaatcactcacagttccccctaatcctgctagtcctaaaaaactctaacttactccttttccgtagatttgactattttaaatatttcctataaatgcagtcatacagtatgtggcttatccacggatgaaggcaaaaatgacgatttagtcagtctagcattctcagagagcgttataacgcctagtacagtccggggtcctgggtgcgttctgcactgagtcggcttggggcaggaagtcatttaagcgacctccttccacttgccccagcgcctcaccccttcctgctctagactacagttcccaaaaatccttgcggctctagtcaacatctggcccgaagctggcgaccttttcctgtttctcagggaactccctggggttggccggtaccatggaggaagattgtcttcagcgtgcagggccagcgtcctacggcagtttcactctgagcctgtgtctggatcacggagacgcggggtagcggttcggagtgcggagcagggatgtccccgagctgtgcagctgcaagaacccgaaaaaacaggcgccatcttctcggcgcggtcctactccggactgtatttcccagaggcccccgcgagtccagggcagccccttcatttgcctgctggaccctccgcctcaagggtaggggaagtgcgcggtgagcggcctgggtcttgcaggctcggctggggcccgcaggtacgtgcatgggagtttgaagggactgaccaggctggtctggagtgttgggcatgtatgagtgtgtcgggcatgtatgagttggtcgggctgatagagggggtggtggggaggcgggcgcgaggcgtgggcttccgtgtgtgagtgtgaccttatgtgactgtgcctctctgtgtgcgcgggtgtgattgtatatcctcgttgtagt

SEQ ID NO: 21535 - DNA, 2300 bp, Homo sapien
atatctgataagaggaaaattaaaccaaccacagacttaacttaaaggctgagggctcaattaattaattagtgtttggtacctgggacttggttccacaaaataagctcattggaatctgagccactgatcattatactgggtccctttttatacttcattgaacatgtagatttttctggttttttgtttttttctttttttgagagacgggcctctcactctgtcacccaggctggagtgcagtggtgcagtcacagctcactgcaaactcgaccttccaggctcaggtgattgtcccatcacagcctcccgggtagctgggactacagacaatgtgccaccatgcccagctagcttttttttttttttcaatgattttgttttcattttaattgtggtataaaagacaatgtaaaatttaccatcttaatctttgtttttttttttttagacggagtctcactctgttgcccaagctggagtgcagtggcatgatctcagctcactgcagcctctgctttccgggttcaagcgattctcttgcctcagcctcctgagtagctgggattacaggtgggtgccaccatgcctggctaatttttgtgtttttagtagagacggggtttcaccatattggtgaggctggtcttgaactcttgacctcgtgatcacctgccttggcctcccaaagtggtgggattacaggcatgagccactacgcctggccatcttaataattttttttttgagatgagttttgatcttgttgcccaggctgaagtgcaatggtgcgatcttggctcactgcaacctctgcctcccaggttcaagtgatctcctgcctcagcctcccgagtagctgggaatacaggcatgtgccaccaagcccaggtaattttgtatttttagtagagacagggtttctccatgttggtcaggctggtcccgaactcccgacctcaggtgatccacctgccttggcctcccaaagtgctgggattacaggtgtgaaccaccacaccaagctaatcatttttaaatgtacattccagtgttaagtatattcatattgtacaatagatctttagaactttttcatcttgcaaactgaattataactattaagctacaatgtcccatttccctctttccccagcccctggcagccactgttctactttctgtttctatgagtttgactaccttagatacctctgtaagtggaatcatttataatagtatttgtctttttgtgactggcttctttccagtcacaataccccaagatagaaaggggattcactgcagttagtcagtagacacacacaaacccaagtagtaacgggatacaatataataatgaattagttgaatgctttgataaattagtttgacatgttactttttattatcattcagtttaaattttttttttttttttgagaaggagtctcgctcttgtcaccaggctggagtgcaatggtgcgatctcaggtcactgcaacctccgcctcctgggttcaagcgattcccctgtctcagcctcccaagtagctgggactacaggcgcgcaccaccatgtctaactaacttttttttttttttttgtattttagtagagacggggtttcaccatgttgcccaggatggtctcgatctcctgacctcgtaaaatatttttaacttccattgcaatttattctttgaaccaccagttatttataaatacattgcttgaatccctgacttagcataatgtcctcagggttcaaacatgtagcatgtgacaggacttacttttttgtagttgtttatttgttttaatatgctttattttttagggtacttttaggttcacagtaaaattgagcagaaggtacagagatttcccatacacgtctttcccccacacgtatggtctcccccatcatcaacatcctccaccagagtggtacatttattacaactaatgaacccacatggacactcagagtctatagtttacattagggttcactcctggtgttacacatccaggggtttggacaaatgtgtaatgacatttatctccattatgatgtcatccacattaattccattgctctaaaaggcctctgtgccctgactgatcctccctccctgtcaactcctaatctttttattgtctccatagttttgccttttccagaatgttgtaatcatacagtatgtagtctttttgaattggcttctttcacttagcaatgtgcatttaagtttcctaagctgttgatcatgagactgagtccctttttata

SEQ ID NO: 21536 - DNA, 2300 bp, Homo sapien
ttagccgggtgtggtggcgcatgcttgtaatcccagctactcaggaggctaaggcaggagaatcgcttgaacccgggaggcagggtttgcagtaagccaagatcacaccattgcactccagcctggggtacaagagtgaaactccatctcaaaaaaaaaaaaaagtattatttttggtgcaaaagtactttaacatcttaaatgctcatataatggaagatactttaactcttagaaagaatgagttagctccctttctactctaaaggtatcctaatatctttgtacctgaagtggtgtctgattcaaattgttatattaaaaaaggaaaatgctttataataataataataataaaagaaactttatatagtagccctcccttatctgcaggagatgtgttctaagacccgcagaggatgtatgaaaccgtggatagtatgacccaattgctgtcgatcagaacacatttctgtttatgttttccaagcacaaatttaatgttttttttttttaatcttaactaagcacttatcacacgtggctgtattttttagagcttggggttcaacaaacaagactagcagaaatttcttttcctccttacactttcacagctagaagatttgttcttaccatagatcttagcaacctcagcacacgacttattttccttattcagtcaagaattttcacattttcacttaaaggaaacactttagggctcctcttctgcatatctaaattgacagcatcactactcttgcattttagggccatcattaggtacaattagcgtcacttaaacacaagcgctgtgatactgcggcagtcagtctgataaccaagttggctactcaccgactaagggtagcgcatacagcgtgcatctgctgaacaaaggggtgttcatatcccaggcagaataaagcaggacagtgagatatttcatcacgctcctcagaacagcccacaatttaaagcttatgaattgtttctttcgggaatcttgcatttaatattttcagaccacaatttactgtgggtaaccgaaactgtgggaagtagaaccatgaataaagggggactactgtatatgcttctgtatgtgtgtaaatacttacatgaatcgtggagaacataatgggaagatgctcatcatcttgttaactcgttatttcaagagtggaactggagggggaatactgcctttcctttatatttatttgtaatatttcattttcattatgaacatgtgttattttagtatttttaaatattaataaagacaggcaaaaacatgtaattttaattcaaggtgaaatcttcaaggcaatcatatataattaaacagagcaaataaaacattctaaatccttgaagggaaaggggaaaagaaagcacaatgtaaaaaccaagtgaatctaaacgcaacaatatatcataatgcctaagttcgtgggaccaattccaatccagtccaaggaagcagagactggcgagcaacattccctttcaggcccctgcagggtcaagagcatgctcctggaatagactgagaaactagggcaggctaagtgaggtgccaggaataaagacaccgcctgactgacacattctccactctccctacacccgctcctctcaccagcgcttccatcaggctccaattcctccctcttcccaagagcctcagattgaaaccttgcaaggaagacacccattctcaaagtcacaggcttggtaatctgagcggcaaaggtgaatgatctcgtgctccccctaatccccactactcccctcgccactgctgcctagcaccagcccctcctccataatttgaactgtcctcccaggacttggaggcgggtcggcccaagcacttcttactggccaacatggagcaaacctcccctctcttgcacatccattggctaaaagatctgtctacttaagtctgactgccaccttcccttctttctgtgctgcctggataggactgtcagctggtcgcgtttcccattggtcaccgtttccggaagcccgcccccacgtttccgggagcccggcggacgctgggtctgcagatgccatccaggcgcacggcgggtatagtggttccgcaaccttgggatgttcggctgagcgcctgcctaacatgggagcgcctgcctaaccctcctgactggagggtcagcggcggggagtcctggccttcaatcggccatcgccacggcagaaactggggcccgggctgcgtccaggcccttccccgtccgtccacaggtctcatgggcgcc

SEQ ID NO: 21537 - DNA, 2300 bp, Homo sapien
agctaaaaaaaaattacatataattctagtaaaggcaaaagggaacaaaagtcactcagtatatgtgtgtgtgcatgtctgagcaaggagagaggtaaaggaaacttaccagacttttaaaatggataaccttggggagttgagaatataaaataacaagaaatatacatatatttgtctctgcccctagctcctggtctagagctccttaaaacccttgggtactaggaggatcatctgttctaatatctggtctttgaccctagttcctgacagagttctcaaatcccttgggatttcctggctgataggaacatcttatgttctaatgaggggacttcttggtgggctcctggatggccaagggatgtgatatgagggttggaattttcagccccaccccttgacctccggggaggggacagcagcttaaggttgagttgactgacaatggccaatgatgtcatcaatcatgcctatgtaatgaagcctccatgaaaatccaaaaggactgggttcagagagcttccagattgctgaacacgtgggggttcctggaggatgatgtgctggggagagagcattgaagcccaatgccacttcccacatattttgccctaggtatttcttcatcgaaaacctttgtaatatcctttttattgcaaaaaaaggatgcaatatcctttttattactctgttacaccgggtcctcttttggactcctctggctggaaggaaagcgtttctctcataatttttgctccctgaacctatcacacagctctgagacttccttccttccaaagccagaagataaagggggaaaataccccagcaaacctgtggtcatcacgtccattcttcacgtttttaactcccttcacatctgcctgctattatttgtatttctgagtcttcaggtggtttctttttgtattcactctggggtgttaagtagaaatcggtgagagagatgctgaaatgtgcttatctcatcttggccagtaatagaagtctgccttgtatatgttattgtatgtatgtgtatatattaagttgtatatacacatattaaatatatatacatatgttatatttatatacccatacatttgtttcctcatgcaatttgtcccagcagaagtaaaaactcataaagatataagtaaaagaatatttacagaagcattatttttggtggcaaaagtactttaatatcctaaatgctcgtataatggaagataatttaactcttacaaagaatgagttagctctttatctactataaaggtatcctaatatctttatccctgaactgataactgtggcagagatcgcgccactgcactcaagcctgggtgacagagcgagactccctctaaaaaacaaacaaaaaaaatagtttgtgggaccaattccaatccagtccaggggagcacacactggcgaccaacatcccccatcaggccccttctgggtcgagagaatgcgcctggaacagactgggaaactccagcaggcaaagtaaggtgccaggaataaagacactgcctgacacattctccatgttccctacacctactcctctccccaccacgcttccatccagctccaattttgccctttccccagtagcctcagattgaaaccttgcaaggaagaagccgattctcaaagtcacaggcttaggaatccgagcaacaaagaaaaatgagcccctgctcccccaactcccccctactcccctcagcactgctgccctgcacctgccccctcctccataatttgaactgtcctcccagaagctggagagacggcccgcctgtcaggaaagaaaggaccagcatgcggcaaatgcctggggtatgtaggagcagacggcgagattagcgcagggatgtaagaaacaagaccaaagaagactccgcggcagacggcacactaggccttcataggggcgtgcgctggacaggacctcgccagttaccgaaagaattgtctgagaaaggctctgatctgacccgaaaggcccttggttcccacggcaacgcctcagcgtctggcagtaacaggctctgtgcccgggctctctggatctgcaggtcccgcctccgccagcctctcacagcccggaggcacctcccattggcgcctgacgggttggttagggcggcttttcttccggctgtgacaaatccagcctgaggagcgctcctgtgtctttcttagttgtttcttcccgcccacctgcccctcaaagccacaacccacttgcacaccaccgtgtggacacctaaaag

SEQ ID NO: 21538 - DNA, 2300 bp, Homo sapien
cattcaatcaacatctaatctttaactagggcctagggtctggaaagatttctctagagtcttggaaagtttctgaatcttaagacaggctgaggtgaatgtgtaagaatgctattattattcgatcagactttaggatctgagaagaccaaggcagggtcttaatgggttcgttttcgcattccatccctgatactcaggcaccagtttctccatttcttcaacgtttaacttatgcattcatcaaaattatagtaaagggttagtggaaactgttctggttgctaatggaaacctggcctgccacactgtgatcggaactaaagcccactacagaacactgaaaatgcctgcaaaacactgactttactgacaagtcaattaaattacagaaaagcaagttcacctccctgcccgctctgtcctccggaattgctaggtagaaacgtgcacattgtcctaggttcagttttgcaaagacggagtccgtcagagaaagcatttgtttgatttcatgcatttgtgtttcctttgtccatttcctttatatttatttatttgtttatttatttttttgagacggagtttcgatcctctcgcccaggctggagtgcaatatcgcgatctcggctcactgcaacctccccctcccgggttcaaacgattctcctgcctcagcctcccaagtagctacgattacaggcatgtgccaccacgcccggctaatttttgtttttttagtagagacggagtttcaccatgttgcccaggatggtctcgaactccagagctcaggcaatccacccgcctcggcctcccaaagtgctgggattacaggcgtgagccactgcgcccggcctattttattttaagacggagtctcactcggtcgcccaggctggagcgcaggggcgcgatctcggctcactgcaacctccgcctcccgggttcaagcgattcttgtgcctctgactcctgagtagccgggattacaggcgcccgccaccacgcctggctaatttttgtatttttagtacagacggaggtttcgtcatgttggcggccggactggtctcgaactcctgacctcaagtaatccgcccgcctcggcctcccaaagtgctggaactacaggcgtgagccaccgcgcccggccccatttccttttattttattcttttcagacggagtttcggtcttgccgcccaggctggaggggagtggcgcgatctcggctcactgcaatctccacctcccgggttcaaacgattctcctgcatcagcctccggagtagatgggattacaggcgcacgccaccacgcccggctacatttcctttattttattttttataatttactaacctggttttttttttttttttttttttttgagacggagtctcgctctgtcgctcaggctggagtgcattggcgcgatctctgctcactgcaagctcctcctcccgggttcacgccattctcctgcctcagcctctccgagtagctgggactacaggcgcccgccaccacgcccggctaattttttgtattttcagtagagacggggtttcaccgtggtctcgatctcctgacctcgtgatccgcccgcatccgcctcccaaagtgttgggattacaagcttgagccaccgcgcctggcactagcctgttttttgataacaagactggcggtgcacaaagttgggtctctgtgttcaccgggaggtgggcattggccaggtgggacggtctccagcgcctggtgcaaatctccaccaaagtgcaggaaacagcatcaactattactgcaaagttttggtttggcgcagcgggtagacgttccagcgctgaaatgcgcaagaaagtttttgctgcgcatgtaggcgggtcaggcccaagcgcttcttattggctaatgtggagcgaacctgcacatccattgactgaaagctccgtctatttgaggctaaccgagagcgtcccttccttttgtgttgcctggaaacagactgtccgcctactaacatctgatcgcgtttcccattggtcgccgtttccggaagcccgccctcccgtttccggaagcccggcacaggctgggtctgcagatggcgtccgagtgcacagtggccagtgtgattccgcagtcttgggctgttcggccaagcgcccaccggacgtgggacgctggagggtcagcagcgtggagtcctggccttcagcgtccgcggctgggaaatcggccatcgccacggcgggaactaggactggctgcgtcccggcccttccccatccgtc

SEQ ID NO: 21539 - DNA, 2300 bp, Homo sapien
aggctggtctcgaactcctgacctcaggtgatccgcccgcctaggcctcccagagtgctgggattacaggtgggcacctggccaaggggctgatatttcttaagggctttccccaagaaggaagaagccaaacctactcaggcaaatcttgtttatttattcttctaggtccagatttggaacaagtctctctagagattgaacaggtaaggctcacctttcaatagttacaccaagaaaggcctagctgatgacttaagctatggttttgggctgcacgagagtggtcaggtggacagtagggaagtctacatgtaacccaaacggaaaagagaaaaggcccctgagaaatcaggggaaagtgccacagtgtctctttcttgatgatgtcactggcatgtgggttaccttcccactgtgtcccccaaaggacatgaggccacaaactgaagtgcccatgaacagaggagctgtggggacggtggtttgatcgctccgttcaaatgcacaccccggtgcatgtgcatctcttctgatgcagggccccagtgggtaagctctgtgcttctccacacagtggatcaggagtggaaacattctgtctgtttagcgcttgatggtttggtggtgacctcatgtcatggtgattagagccaatgatcctaacagtttaaaattgttgagcttgtgggtaggtatttgggagatagtatgtgtgttacctagtgtttgtcatctgcagtggttttgttactttttgcataaactgcggagaacgtttactaactgcagatgatagagaaatcaccagtcactctaaaatcctcccatttcttggtctagagctgcgcctggaacccgccgcagggaggagacctgaagaccagaggaaacacagcaagtaggccctttaaaccactcacctgtgttgtcttctaatttattctgttttattttgtttccatcattttaaggggttaaaatcatcttgttcagacctcagcatataaaatgacccatctgtagacctcaggctccaaccataccccaagagttgtctggtttttttaaaattactgccaggtttcaactgcagatatccctggaaggaatattccagattccctgagtagtttccaggttaaagtcttataggcttcttctgttttgaggaggagttcctgtcagagaaaaacctgattttggatttttagctttaatgcttgtgaaacgctataaaaaataatattctacccctaacattaaagtactgttagtgagaaattaaaattccttcaggaggattaaactgccatttcagttaccctaattccaaacgttttggttgttagaattttctttaatgttcatgaagaagtgttttatattttccatcaagattgaacctctctctcttttttttttttttagacagagtctcgctctgttgcccaggctggagtgtagtatggcgatctctgctcactgcaagctctgccttccgggttcacaccattctcccacctcagcccctggagtagttgggactacaggctcatgctaccacacctggttaattttgtttttgtgtttttagtagaaacggggtttcaccgtgttggccaggatggtctggatctcctgacctcgtgatctgcccacctcagcctctcaaagtgctgggattacaggcctgagccactgtgcccggctgttttttcatttctattatgatttgttctgtggaatgtcagtgacttagcggtatgtttttcacatttttataaagctgaatagttctgtatgtcagctcagcacccctagtgtcagccatgctactctcctgctgtgcatagatgggggcccgtccacacccgaatctcctgggttcccgctgtcagcacccgaaggtacccaccagatgtgtctgtcgcttccctccatccacctctattgtggttctcatgtttctgcctccctagagaccatttctctccagagcagtgctttccaatagaaatacaatgccagacacatacgtcattttagattttctagtagtcactttagaaaagttaaaaagaaacaggtgaaattaatgttttatttcacctaaaatgttagcattatccaaaatatcacttcaacatcttatcaaaataaaaattattaatgaaatcatttactttttttttttttgagacagggtcttgctttgttgcccaggctggaatgcagtggcaccagcatagctcactgcagtctcaaactcctgggctcaagagatcctcctacctcag

SEQ ID NO: 21540 - DNA, 2300 bp, Homo sapien
ctaccttattttctgtcattgtacctacttctacctgaacacgtattaaatatcttattaaaaatacacaaatattatgtttcctcagtggttttttccccctcacattgggccctcctcttcagtggactacagtgtggtacctgcaggtctcaggccttctgggaggttccagcttttcctggatgctctctctctctggccagctcaggctggagcagtgggtgttggtgccatcctgtggctataggtgataaaccaggttgtgttttgacccctagtcttgaatcctggagttctcacatgcgtggatttaaatgctgtgtctttctaagggcagattgtgcccattttccttctctgcctctcaagggactgtttgctgtgtttattgacttaccattaaaaaaaatcatatacattgatgaattagattgtactccataaattatatatgtttgaaaaataaagaatattttttcaatttttttctgatttttacctatcttttaaattgtatatatttatggggtacaaaatgatgttatgatttttccatacagtgtggaatgtttaagtcaaattatcctatccattacctcaaatacttgactttttttggtgatgagaatggtgtttatcactttcactcatcagctcctgatgtcttccatgctagggacaggaaaggctcaacacttgactttccctcctgttttcttagccactgtcaacccttgaatgtaccctccagggttgcctgtcaccttttacacctagcctgatccttgtgcacccactttcctctcagggactgtccttagggagtgactttatgcacagacttaatgtgctcttcctgcctccttcatccccataagcccccatctcagccccatctgattatttcctccctctctcatttcctgttattctgttggttttctaacctgaagggtaactgcttactccttagttttctgccttaatttctaagtcataggctactttcaggctaaaagttttcctccagccatggttttagtctcattctgtaagtcttggtttttagttttattcatttaaaattaatctttaataacttttttgactcattggtgacagagtaattccctctcttcccaccacaccaccctctgtccccaagattctggaagtttgttcttccccttttgtgatcattgttacttaaaactttgagtttttcaaattagaagtttcttctataaatgtatatagagcttggctgggcgtggtggctcacgcctgtaatcccagcgtttgggaggctgaggcgggtggatcacgaggtcaggagatcgagaccatcctggctaacatggtgaaacccgatctctactaaaaatacaaaaaaattagccaggcgaggtggcaggcgcctgtagtcccagctactcgggaggctgagacaggagaatggcgtgaacctgggaggcggagcttgcagtgagccgagatggcaccactgcactccagcctgggcgacagagtgagactctgtctcaaaaaaaaaaaaaaaaaaaagtgtatagagctaataactccttgctttttttttttttttttttgagagtctcgctcttgttgccaaggctggagtgcaatggcacaatcttggctcactgcaacttctgcctcctgggttcaagtgattctcctgcctcaccctcccaagtagctggattacaggcagtggccaccacgcccatgtggggaaaagcaagagagatcagattgttactgtgtctgtgtagaaagaagtagacataggagactccattttgttatgtactaagaaaaattcttctgccttgagattctgttaatctataaccttacccccaaccccgtgctctctgaaacatgtgctgtgtcaactcagagttaaatggattaagggcggtgcaagatgtgctttgttaaacagatgcttgaaggcagcatgctccttaagagtcatcaccactccctaatctcaagtacccagggacacaaaaactgcagaaggccgcagggacctctgcctaggaaagccaggtattgtccaaggtttctccccatgtgatagtctgaaagatggcctcgtgggaagggaaagacctgaccgtcccccagcccgacacccccagcccgacacccgtaaagggtctgtgctgaggaggattagtaaaagaggaaggaatgcctcttgcagttgagacaagaggaaggcatctgtctcctgcccgtccctgggcaatggaatgtctcggtataaa

SEQ ID NO: 21541 - DNA, 2300 bp, Homo sapien
gaggtagcctcattctacaggtttagatctgaagtattttaactattgcttcttccagtgtattttctggtttgcaggccagtttcttctttaactcatcagtgacacagtggtttgtatggcttttaatttcaaagaatattttttcaatttgcttttttgttttttgctgatttttatctatgctaattttaactagacatgttcccttgatgggcatgactagattttttcttccccactgcgtttataatttagatggattttcacatctcaagccagttaagagtgtggaaaataggactccttaaagcacagataatgacaagtggttcagatttacaagggtaactcaggtgagagtgtatcattgtacttggcacacagcactgagtaactatcacctttcatttaaatgaatgcagctgtaaatgctttcctagatgtcttgttgatgtttgttaatttctgtagagtttcattctgcccctttcactgtttatcacttgatccttatcacttgagagtccccttattacttgacctgctgttacattatgtttgatttattacaaataccccatcagcctgggtctctctttactccctttgtacacctacatctaaacatagtgatttggattatctcaggatcccacatcctcactgtacccccacccccacccctaccatatctttcttaagttttctagtccctgcttttcatttgtgcttcttaaatcccagccccatgcctgactgtggttcccactgagttctgtgacaagcattctacatttatagatattaaatctttggccgggtcatttacctgggctggaatagggctctcggctgatcctccttcctaaacaccctctcaatgggagaggctgatacccaacatgcaaaccttgttttttacttctccaggcaaagggatgttggaagacattctggagggggtagggtgtgaagatttacaaataatctttgaatatctgcttcatgataggtcttggaggtgccttgtgggtgtggctttggagggatggttacgaggaaattgtggatattaaggaagtcaggaaaggaaaagatgactcactgacaattcaacaattgtcctaagggactttctggctgcttgatgccctagaagccaggccctcacttctgtaaatgctggggactgtggatacagaatttaaagggtcaccaaaaaaactcagtaatcaagataaacaatattttaatgtaatatctttaaaaataaaatcaatgcaaaaagaaaacacccctgttgaacaaaacggtcagacttatgcctcctttccaacaccgccccacctccaccccaccctccggaagtttcctccaagccgcacctgtaccccagcctccaataaaaacctcgggaatttcctgatcaagcttcggatccccaccaccaccaggggatcttttgctgttcaccccaagttcagtctgcatcccctaaaatcctagggacacgcgaccagtctcccccatctgcattccgggagtttgccccaaaccaatcctgctctccgcgaaaatagccttggggttccctgtcctggtacaccctcctactctaggggacaaagggccggtgtcgcctccaaactggtggttcccgcagagcatcgtctctccctgagccgcgtctgtcccgacctggcacctgctcagggaagggcgcatcagggcggagacttgcgtagtgagctcagctcacccgcaccttgaaggtcagcgcacactggccacccgcagagcaccgggaccacattttgcagaatccttcggcagtcccgcgatgccttcgcggtcagcagatctcattggtttacagagaaacttgtcaacgtcacttgggcatcttaagagtgggttcgtaaacttggttgtgtgcgctgtgcagatgtcagtcaccctgtgtggtgggcaaagccgacttctccgcctctgtagctccgaaactacaatccccagaggcctctgcggtcacttccgctcccctccctacccttcagtgtgtagcgttgacgtcagaaacacttccggtcggtggcccaggcgcgttaagctggttgggacccgggaaggcctccctcttaaggtctttcccacacctctgcaccttgttacctgactttcggcttcaggatccgcagcgtgcacccgcgttccgtgagtgccctataggcagtcagcatgcccctctgcgtgtccctgtgttacggggacgccggctgggagccgcagagctatct

SEQ ID NO: 21542 - DNA, 2300 bp, Homo sapien
agaggggactgtaatttgaacacagtttgtctccagagtttgtgcttttagccactgagtagttgttaaactttagtgtgcatcagaattacttggaagccttgttcaaacattgctgggctccccccgcaatttctgattcagtagccctaggatggggactgagaatttttatttctaacaagttcccaggggatgctggtgctgcaggttcagggaacacacattgagccagtgcactaagccctgctgcctcttttgggtaatctgtgcccatgtttctgagcatcaggaaaagtgcttaattcctgtgactccatcttacaaatgacgaagtcttttgctagaatcctacggtaaggcttcttgtggcctgttggttaccattcatttttcatatatttatttttcagctggcaagcagatgaattaactcccccaagcttctagctgtgtttctactcagtgggagagatttggagtgaatcatgagggtcaaccacacagtgtctacaatgctccctacatgcatggttcacagacaaaccatgagttgttccggggctggaggaataacggttgtattaaatgtgttaaagtaacactaattgctctgtgatgtagctccttcgtgggagattttcaaggggtgtatgtgtgtatgttctgagaaggggttgtaaaagcaaatcacaacagggactaggcagatacctgaatagcctttttctctccagtgtttaatgatgaacagtttcagacatatggaaaaaaccaggaagccttgtacattgaacactcacatacccatcacctagattctcagtgagtacctccttctcatgaacttttcctgatcctcaatcctacagtgacctctccctcttgagattactctgacccagtgattcacaaccatcacactacttttaggagcctttgaaagtacaaaagccccatcccctggttttacggatttgtggtgggactcaagaatccataatttaaaacaccacccaggtagctctaaaatatagccagagagagatgaggtatgagaaccaaagccctcactcatctgtgctcttctcttgcgattaagtacattgggactggctgggtttggggacagctatcgatataactgagtgtaggtagagtcttaaggccatttcatagtccagccagtgtagaatagtggagctggtaggggacaggaaatgtagggaggattccctgggaagggtacagtgtggaattagttttagagacacaatgtcataccctcaaggagtgatggaggcattctgagaaggggatgcaaaatcaaagagacaaggcatgtacctaaatgaatgacgctggtgaggcagtctccaatagtgtgttgcggctgatagacccccagcatgagtcaccgtcagccaactgtggtcctacagcagtgcaaagcccagggtggtcagatttatggatttttaacataacccatagattgagattttcatatgaaatcttccaacatttaattgatataaacacaagttttaaagcagtatatgggtcaaattaaacccctctatggactgcagattgtacctaaagagaataagtgttgggcagggaagaatcccagtgctagatttccagactcatttggaaatctcaccgaacttccatgccaaggacggttatatattcccatcctccaaagtacagctttctaggtagcagaggttcgtttgaaactttgttgcttgtctaataataataaatcatttttggttatttaaaaatatttgactgctaagtgtttgcagattctgttgtagacaccagggcaatcacagtgatccagccatgcacatggaactgatgtcttagtgggaagtcagaaaatagaaatgaatataatgtattatcttagagttaaggcaacacaataaagcaggagaggggaatgaaacccgcatgagagcatggaattttacatagaacggccagggactgcactgggcattttgtctgagcccttcacagtaatcctaatcctcaccacaagctgtgagataagcactgttatttttagttcgcaggagaaactgacgtgctgagcagctaattcagtgcctgaggttacactagttgtggacagagatgggttccaaatccagatagtatgggttgaatccacgctcttcatcaccacccactttccctccttaggcctgagcaggcacgtggcagcatttggtagaggaaggagtgagccctgctgtaggaactatatatattggtga

SEQ ID NO: 21543 - DNA, 2300 bp, Homo sapien
tgcaccactgcactccagcctgggcaacagagcaagcaagactctgtctcaaaaaaaaaaaaaaaaaaaaaaaagagacccgaaagaatgaaaaacaaaagtatttcattctggaactagacacagaatgaagacattgtgtgaggacctgagctgctgcagctaccttgcaaccacataaagcaacactgccaatacattgaggactgcagagcaggaggaaggattcttgctacaattggtcacctgctaagccaactgaacttcttgctaagtggggaaataaatatctttactgtataagctactttcagttgagcatataactgtataacttcctattaaaagcatcttaattgaaattcccaaattcgtatctctagtaccaacatttcactgagctccacacacatatatctaaatgcctacttgatatcactcttttgaaatccaacaagcatctgcgacttaacatgatacctcaccacccaccccatcctagataactgccacatactcattttcccctatcttagtaaataacactaccatttttccaggggctcaagacatttaggcattatattgaacttctctctttccctatattcacaaccaagcatcagcaacttctgttagttctacactcaaactgtatcccaatctgacaatttctcattgcctcttccagtgatgaccctaattcaaaccaccatcatcataagaccattggtctccaaaatagtttatacataaatgagcctgtcattgacatgtagagacctgggtcaacagtacagatggaggtccccagccagtccccttctgttcccactgccatccttgtcccacatcgtaagaggtcttctattcccacatgtggacactccagcttgcatatctaagctctgtctagccttaccaaattgctctcatttggccacattttgtggataggcagcacattccacctttggaagacagatcaagggaagggtctttggacacagaggagatacaggctctggaagcaggctggagtccatttgaacaggaaatcctggggatttggatacccagagcatggtctgaaagaaggttgtgagatctttgcaggcatgtttctgcctatggactttcaccaggaaggaaactgcttgactagaggagggccaaagtgtggccttttgtatgtttaataatattaaaatgttaaatatattattttgaccaattgagaaataataataataataaaataggccgggtgcgatggctcatgcctgtaaccccagcacttggggaggccgaggcaggtggatcacaagttcaggagatgaagaccatcctggccaacatggtgaaaccccatccctactaaaaatacaaaaattagctgggcgtggtggcaggtgcctgtaatcccagctcctcaggaggctgaggcaagagaatcgcttgaacccgggaggcggaggttgcagtgagcgccgagattgcctcaataaaagataccacagaccccgcccatggcaggagatgggggtgaaggaacagtaagaccaggagacagtcagatacacatcggatcagtggtatcctcacagtaacagaaacggtcacccccaatgtcagccacagtctctttcatccacaatcactttcacattcagctacccacaatcacgggacgtgatttaaaatacagaagctccctgcactgacaaaatccgccgctcctttcgtcggcaagcataaaggtgtgcagcaacagtcacacacgaaccaccacacccaagcattcaaccagtcagccccgcgcgcagcctggccgctttccccaacacagcagctcaaggtcactggagagcctacgaccgcacacagccctctccggtacctgcccccgtggcgcaggcgcgcagtggagggggccgcggggttctctgggagatgtagttcaacgatgacggccgtggcgcaaagcgttctggggctcgtggttcgcggggtccatggggaacgcggtgtcgctggttcagatctcgcagagctcagagtcctgcatgcctcagtcctcgcctcgctcctcctcgcggaggattctgggaggtgacgtcgcgggtctcggtcgcggggcccgtttgcagagcccgcggcgccgggaggtgagtggggccgggccccgggcgggagcgggaagtcaagggcgggctccgggtggcccggccgcgccagggatgggaacccggcaggagtcgctggggaggccgtgtgtgtttcactgtattaccaactat

SEQ ID NO: 21544 - DNA, 2300 bp, Homo sapien
catggcacatgtatacatatgtaacaaacctgcacgttgtgcacatgtaccctaaaacttaaagtataataaaaatatgtatacatatatatataaaataaaagagagggagagaccttgtctctatttaagagagacagaatataaaaattaaaatgaccagggccacaaccaggctgagttgtgtttaggatttgaatctcttcaacagactcagagacctgtgcttcctttgactaaaagattggaaatcatactgtagagcaagtggtgagtctcatgaattgaccctgcatagttttgtgtagatgaaagtacaatttggggaaaggattatcttaaaaacactgagtgatagggattatgacaggttcagttttttcttccctctcccacttcaccctttgacttgtggttcgccccagggagcatgccaaaacttctatgctacaggtttatgctgtatggactgtacaacaccaacagtgaaccctatggactttgagtgataacaatgtatcaatgtagattcatcagttataacaaatataccacactgatgggaggtgttgagaatgggggaggccatccaggttttgggggaaggcatatggaaaatctctgtactttctgcctaattttgttgtgaacctaaaattgctctaaaaaaattagtctttggaaaaaacacctgacaatagggattggtgaaggaaagaatcaaatggaaaaatgaactcatacattaatagtgggaatgttaactaacaatattagtgaggctgaggacaactataccgccaactcccaaaaaattcacttctaggtatgaaccaataaaacctctttcacacattaacagcagtgttatagcgacactgtagtatctaccaacaggagaatgaaaatagattatttataaaacaattaccattgttttataaacaaagctataaatatcaagcacaaataaattgcacaaatatgttgaaggtaaaaagcaagctgtagaagaatatatattatataatacttaaatacatttcaaaatcaggcaaaacagtaatactatatttcaaggatgctaagatgttatcaattattgacacactattatttcatgtgcaagtaagaaatacatcattaaaatacgacactttagcaaccgtaagatgtattctgatatccgaatgttaaaatttacacttcggcattaatgaaatccagaaaatattgtttagggatatatgcactaaaattctaaggaaatatacgggaaggatacttttctaatccattatagtagttacctctgcaggaagagaggaacagagggagtgatgctatgagggagaggttaaaaataatacaaggtggcctattgtaaaaagaaataatacttatgtatgtgttacttacatacaaattatctccaaaaaggtagataagacatgtgatccagcaaaagtaataccacatcccttgttggaagacgttaccttttttttttctttttttccgggacagagtcttgctctgtcccccaggctggagtgcagtggcgcgatctcggctcactgcaagctccgcctcctgggttcacgccattctcctgcctcagcctcccaagtagctgggactacaggcgcccgacaccacgcccggctaatttttgtattcttagtagagacggggtttcagcatgttggccatgctggtctcaaactcttgacctcgtgatccgcctgcctcggcctcctaaagtgatgggattacaggcgtgagccaccgcgcctggcccagacgttacccttttaatccatgaccctgtgcaagcagtgctttataccactttgtcacaatttaacagccgggcgtggctggccaaaaaagcctcccaggcatggaagctgaccaaagactatcacaggctgaatatcaagatagatggtggaggaacatacaggagactgataggcagcacgcggtcacgccatctcaccaacctgatgatggcgtcacagtcacacggcccgtcactatcctgcctgagacacacacagtaacgcacacacaggtcacgcgcgggcccccacaaacaagctattccagccacacagatgcaaacctcatagcaacacgagacagaagacacacacacgctctcgtgagtaggctcggaccgcgcaccggcagacgcacgcgaatacccataagcagccccagacacagaccgtcctacagctcccggtcggcacaggctggcctctatgaagcatgcagccgccctacctggttat

SEQ ID NO: 21545 - DNA, 2300 bp, Homo sapien
cattcattcattcattcattcattcatttattgtagagatgaggttttgctatgttgcccagactggccttgaactagcctcaagcagttctcccacctcggcttcccaaagtggtagaattacaggcgtgagccaccgcgcctagctccagcttttaaatatggagatttgtgtatatgtaagttctaaatttttcactttaaattgtttctgtttttgcatttactaaattctttttcccaagtattttcttcaaatgtattttaatgatttcttttgggattctctcactcttgagctaggggcaattaggattttcttgtaaaatctttggtgctgatttttaaaatttatttactagtttaatgatctgacctcctgaagaaaatacaacttcctgaggaaaaagtctgcagctgaggtagtcccagcaagagtgtgtttcttatgtgctcatgttcttccctgtaattggtgaaactattataccagggccagatttccacatcatgctttctcctcagtcccacttcctcaccaaatgctttatccaggcttatttggatcttcctcccagatgaggggaaatattaaaaacccctggatttcagggtttttttcctctgacactttgccttttgcttcttgaacatgtttattgcaagcatcatgattttcagcaggaagggctttcaggagctgatctcccatcagtaccacagctttctctgagcccttagtgttaatggatgttcatgctcataagttccttttaggacctagaaacaaattcttagatacattgtgaacgagctattggagactttcttttttctcacctagtttctggtagaaattcctgaaacagtaggaaatatggattgctcccttttttccaggctgagtgctatttaagattttttcttatgttcatatacgtttgggcatttctgttttgaactaggaagagtgcattagatttctatattcaaatcacattgcctttaagaagttcaccagtttttttgaaattcattcaatagctttttttttttgagacagggccttgctctgccacccaggctggagtgtagtggtgcaatcacgactcactgcaacctccacctcccgggctcaagcaatcctcctacctcagcctcctgactagctgggactacagatgcacaccaccacacctggctaatttttgtattttttgtacagacggtttcgccacattgcccaggcccgtctcaaaactcctgggctcaagggattttcacgtctcagtctcctaaagtgctgggattacaggcatgagccatgtaatacccagccattctacagctttttaaatacacagtttcagttataattctatttctgaccattaaaaaacaaattgtcatcagggcatgtgttttttcatggttgtctctgagattctatctgtggccccttttccagtacatgtaaactatttgaacaatcagatcccattttcatggctgcagacacatactacaggctgatgacccataaatcttcatttccaatgtggatttctcctgatctcatgaacaatacatccaactgctaaatcagtggctatctccagttgcatgtcccaccataccacagatttcacctatcattctgtcccctgcttctgcttccatctaagccttgctttcattttttcctgcctttggtatcttgtgagatctcaaaccacttaacttggttaaagttttatttttatgtttctttcacactcaatataaattggtacctaaaatctcccctttaactcatggtagatattaaagacatgtgcttgctaatcagtgaatgaacataaatgacaggatgctgctaatatgatgggcttttttaataacctctgattaatatcagaacaaggttcaatatattttgtttacaatcacccaagatggatgacttcagattgagtgggagtgtgttgttacagggaacagtaacattcaaagatgtggctatcgacttcactcaggaggagtggaagagattggatcctgctcagagaaaactgtaccggaatgtgatgctagaaaactataacaacttaatcacagtaggtaagagtaatttactatataattcaaactctggaaagaaagtaccttttttttcctcccagtgtttctgaaatacatggaccttttaaatattagagtgagcttggccttgggatgcttttgctcatgtgaatgtccatgctgcagttttcagagcaaaaggggacagaacccccgaa

SEQ ID NO: 21546 - DNA, 2300 bp, Homo sapien
ccggcgtcctcctccaaagattggggcaccaggaccgcgggcccccactcccacccagcacaaagagtccggcgctcagagctagcggtttcccgaggactcaccaccaagcccgcggacacaggccccgattccacacttaacgctgccaaagtggcagagccggcgcgggctgggacagaggcggcactgaggccggcgctgtcggtggctgagagcgccacaagtctcggtccgttacaccaggggcgacgcttcccagaggcccccgcggctcacccgggcgggactggcttcactgtttgcgcgtcctgagaagcagaccacggtgttccagggctcacagctccgcgcaggggagctcagcctaggttttgcacgagcggcctcccgcgagcccagctctgagagattgggagcgcaacttggtgctgagaagaatcgaatcgttccgctgcttcctgcgccgaactacatttcccagaggccttcgcggccctacttccccgaccccacctgcaaaaaggcacttccttcttacagtcggctggagctgcaggttcgcaaggtccgtgaaggaagcccggctcagtgtgtttagttccgtctttttgggtctctacctgaggctagaatacagcggggtgaaggtggtgagagctccagggccagtgaaggccgggtcagctggagccttaaggtcctgacagcggctagaagagggaggagtgacgtagtgtgactgtatgtgtgaaacttcggccatggaatttggagtggggtttccagggcgagagaccctgtccagtgacatctgaggtcgtgcgaatatgcgaccttttgtgtgaccatggtcgcgttttatattctcgtggctgtttgattctgaccttgcagttttgtcagagacaatgtgcatgtatttgttctttctggacttctcgattgtgagtgtgacagtgttattggatttcatgacccgggatcgtgagcgaaaagtagtgtggccagaccgcctgacttctaaacagacttggccttactagctgtgtcatctcagactaggtacttaacttctctatgcctttcgtgtttttttttttttgtttgttttgttttttttgaggcagagcctcactttgttgcccaggctggagagtgcagcggcgcgatgttggctcactgcagcctcgaactcccgggctcaagcgattctctgcctcggccttccgagtaactgggaccacaatcaagggacactccgcccggctgatttttgtttgtttgttagtagagataaggtctcgctatgttgcccaggctgctctcgaactcctgagctcaagcgatcctcccgcctgggcctcaaaaagtgctaggattacaggcatgagccgcacggggccggtcttaatacctttaataaagagataataggccggacgcggtggctcacgcctgtgatcccagcactttgggtgggcaaagcgcacggatcatttgaggtcacgaggtttttgtttgtttgttttttaagacggagtcttgctctgtcgctcaggctggagtgcagtggcgcgatctcggctcactgcaacctccgcctcctttcgcctcccaggttcaggcaatttttctgcctcagcctcctgagtagctgggacttaaggcgcgtgccaccacgcccggctaatttttttgtatttttagtagagacggggtttcaccatgttggtcaggctggtctcgaactcctgacctcgtgatctgcccaccttggccttccaaagtgctgggattacaggcgtgagccaccgtgccaggctgagggtagcgggtgggagactgccaggagtgtagtgcgcttgcgcagtttaccaccctgcatcccccccaccccgctcccctcccaatttttttcgggtatccagcacaattctaggaattcgcctcccacccattttgagtagacgcgccactagcgcgttcccacgcacaaaccttttccctgcggccaacctgcgattctcaactccccgccctggttgctaagggaggcgcgcagagcgcttgtgcctgcgcacttccacaccagcccgtgtagtgtgacgctgggccccgtccctgtgaccgggccaggctcggagctgcagggaatccggactttcgggctctctggaaggccggggagaggccagtgtgggaggacctggtggggaggaggccgtgttacaaaccctgcgcggagctgcaccgctgctgccagacactgcgacgccgcgaccttttctactccggac

SEQ ID NO: 21547 - DNA, 2300 bp, Homo sapien
cacagatggcctgcgacgagcttccggagacccacacgccactcctcagcccactcccgacctgcagaacagaactggtggaagatctccttcctgccccgaaggctcggggaatctgcactcgggtctcaccgctacccttagttggatggaacccagcccttacgggcccggaaagaagcgcctcagctgcctccgcccccggaggacacaaaggggccgccggcccaactcccgcggggtccgctgggaaacgtagtccggagtagaaaaggtcgcggcgtcgcagtgtctggcagcagcggtgcagctccgcgcagggtttgtaacacggcctcctccccaccaggtcctcccacactggcctctccccggccttccagagagcccgaaagtccggattccctgcagctccgagcctggcccggtcacagggacggggcccagcgtcacactacacgggctggtgtggaagtgcgcaggcacaagcgctctgcgcgcctcccttagcaaccagggcggggagttgagaatcgcaggttggccgcagggaaaaggtttgtgcgtgggaacgcgctagtggcgcgtctactcaaaatgggtgggaggcgaattcctagaattgtgctggatacccgaaaaaaattgggaggggagcggggtgggggggatgcagggtggtaaactgcgcaagcgcactacactcctggcagtctcccacccgctaccctcagcctggcacggtggctcacgcctgtaatcccagcactttggaaggccaaggtgggcagatcacgaggtcaggagttcgagaccagcctgaccaacatggtgaaaccccgtctctactaaaaatacaaaaaaattagccgggcgtggtggcacgcgccttaagtcccagctactcaggaggctgaggcagaaaaattgcctgaacctgggaggcgaaaggaggcggaggttgcagtgagccgagatcgcgccactgcactccagcctgagcgacagagcaagactccgtcttaaaaaacaaacaaacaaaaacctcgtgacctcaaatgatccgtgcgctttgcccacccaaagtgctgggatcacaggcgtgagccaccgcgtccggcctattatctctttattaaaggtattaagaccggccccgtgcggctcatgcctgtaatcctagcactttttgaggcccaggcgggaggatcgcttgagctcaggagttcgagagcagcctgggcaacatagcgagaccttatctctactaacaaacaaacaaaaatcagccgggcggagtgtcccttgattgtggtcccagttactcggaaggccgaggcagagaatcgcttgagcccgggagttcgaggctgcagtgagccaacatcgcgccgctgcactctccagcctgggcaacaaagtgaggctctgcctcaaaaaaaacaaaacaaacaaaaaaaaaaaaacacgaaaggcatagagaagttaagtacctagtctgagatgacacagctagtaaggccaagtctgtttagaagtcaggcggtctggccacactacttttcgctcacgatcccgggtcatgaaatccaataacactgtcacactcacaatcgagaagtccagaaagaacaaatacatgcacattgtctctgacaaaactgcaaggtcagaatcaaacagccacgagaatataaaacgcgaccatggtcacacaaaaggtcgcatattcgcacgacctcagatgtcactggacagggtctctcgccctggaaaccccactccaaattccatggccgaagtttcacacatacagtcacactacgtcactcctccctcttctagccgctgtcaggaccttaaggctccagctgacccggccttcactggccctggagctctcaccaccttcaccccgctgtattctagcctcaggtagagacccaaaaagacggaactaaacacactgagccgggcttccttcacggaccttgcgaacctgcagctccagccgactgtaagaaggaagtgcctttttgcaggtggggtcggggaagtagggccgcgaaggcctctgggaaatgtagttcggcgcaggaagcagcggaacgattcgattcttctcagcaccaagttgcgctcccaatctctcagagctgggctcgcgggaggccgctcgtgcaaaacctaggctgagctcccctgcgcggagctgtgagccctggaacaccgtggtctgcttctcaggacgcgcaaacagtgaagccagtcccgcccgggtgagccgcgggggcctctgg

SEQ ID NO: 21548 - DNA, 2300 bp, Homo sapien
caggcagagagaatagcaagtgcaaggccatgcattaagaatgcatgggtgcagtggccgggtgcggtggctcacgcctgtaatcccagcactttgggaggccaaggcgggcggatcacgaggtcaggagatcgagaccatcctggctaacatggtgaaatcccgtctctactaaaaatacaaaaaattagccaggcgtggtggtgggcgcctgtagtcccagctacttgggaggctgaggcaggagaatggtgtgaacctgggaggcagagcttgcagtgagcctagatcgtgccactgtactccagcctggagacagagcaagactccgtctcaacaaaaaaaaaaaaaaaaaaaatgtactcactggccaggcatggtagctcacgcctgtaatcccagcactttgggaggccgaggcaggtggatcacctgaggtctggagtttcagaccatcctggccaacatggtgaaaccccgtctctactaaaaatacaaaaattagctgggcgtgatggcgcacacctatcgtcccagctactcgggaggctgaggcaggagaatcgtttgaacccaggaggtggatgttgccgtgagccatattgcgccactgcactccagcctggcaacagagtgagactctgtctcaaaaaaaaaaaaaaaaaaaaaaaagaataaataagaatgtactcaccacattacaaggaagctagtgttgctggaactgagtgactgagttaaagacaggatgagaaaaattagatgaagtcagagggacagtcagggaccagattatgcagggccctgcaggtcaagacaaggacttacgcgtttatcttgaataagatgggaatccaatggagagtgttgataagggacatgactggttacccagaaacgtttcagcagaaggaaaattagtacctgcttgttttgaaaagcagacaggtattcaggaaatcgagaaaacaccaacacacctggtacatggctttaagaagcccaacagccattctttcttcctcctggctcttctcttgggaaatagcagtggcctcagatgactgagatggggaaaagaacatgagaaactagacttttcttgcagcatccagaatcaccagtctagactttttaggattctctttcctcctcttgcaaccttccctccaatagagagagcataatggagacctaggaatttgtttgcatacaatttaactgatgcctaaatcatttcccaattccttaggttaacaacagatgttctaggctttacaaatacagactcagaggaatgtaagttttcacataaagacacagaactaacaaataagagcaccaagatcaaataaaagaggacctgaccccacaatcctcctctccaataaatcagtgattctgaaacttggtggcacattgatatgacttgggctggctttaaaagcctctccgtggcacacagtctctcactcaatcccccacataatcagagtctgaaaaactacagtgccaaccaccgtcttacccacgccacagtcagaggccatgggtatggactgcctcacacgggcaccctttcccataccggcaaggctcagccaccagggtatctatcacaagcgacaatctcacaacccagtcacaaagaagccgcgggtatcggcccaacaaggtgcagcgaacagtcgcccgctcccgcctcaactcacagcctcacattccacggtgccattgacttcctcgcacccagtcacacaggacgtggacaggcacacggggtgacagcctcgcactgaacggtaccaacctccactcgcaccggagtcacacagatggcctgcgacgagcttccggagacccacacgccactcctcagcccactcccgacctgcagaacagaactggtggaagatctccttcctgccccgaaggctcggggaatctgcactcgggtctcaccgctacccttagttggatggaacccagcccttacgggcccggaaagaagcgcctcagctgcctccgcccccggaggacacaaaggggccgccggcccaactcccgcggggtccgctgggaaacgtagtccggagtagaaaaggtcgcggcgtcgcagtgtctggcagcagcggtgcagctccgcgcagggtttgtaacacggcctcctccccaccaggtcctcccacactggcctctccccggccttccagagagcccgaaagtccggattccctgcagctccgagcctggcccggtcacagggacggggcccagcgtcacactacacgggctggtgt

SEQ ID NO: 21549 - DNA, 2300 bp, Homo sapien
tcgcaactttaggaactttatttaaagaattcagaaatggggttgggcgcggtggctcacacctgtagtcccagcactttgggaggtcgaggcaggcggatcacctgaggtcgggagttcgagaccagcctgaccaacatggagaaaccccgtctctactaaaaatacaaaattagcctggcgtggtggtgcatgcctgtaatcccagctactcaggaggctgaggcaggagaatcgcttgaacccgggaggcagaggttgcggtgagctgaaattgcaccaatgcactccagcctaggcaacaagagcgaaactccgtctcaaaaaaaaaaaaaaagaagaaatgtcaattgtagcattttaacacagcattgaagttatctactgatgcatagcaaattaccctaaactcagaagcttaaaacaacaaacatgtagtatcttacacactttctgagggtgaggaatataggagctgctatagctgagtgcttgtgactgtgtctctcacgcagttgcagtcaaactattggcaggggctgctgtcatctcaaggtttgactggggctgggagatgtgcttccaagggtgatacacttggttataggaaggccccagctactcccaggctattgggtggagggcttagttccttgctacctgggcctctccataggctgtctcggtatcctcatgacatggcaactaacttctctcaaagtgggggcagcagcctttaagacagaactcaaggtgccatttattatatttaatctcagcagtgacatctatcactgctactgcattctattagtctcacagtccaaccctggtacaatgtgggagggaactacataagagtgtgaatagtaggaggtaggaatcattgggaaacattttgaggtcagttattgtatcagttgctaggatgaccagttggaattaggatttttttaaaaagccattttcataagacaaggcaatcttttctagagatgttccaatacctgtgatatgcggagcactgcgctaggtggtattcaaggcaggcctgtagtgaatgctgttggacccagccaccacccctgagcaatcatatgcagaccgctggcttcttaactgcagacacctacagactcagcctaagactttcccacgaggcaggctcgaagtgctggagctttaacacctctggagtggccctaaaacaattaggaagagagatggtgtagacatatgtaagcttcatcggcctggtggttgtgaaaacttggaagtggtttctacacaatcccccagaggtcccaagctgactgagccctcattgatccagagctaatctgctcacctatgcactgtatattcgttcccatcgctcccgtctcacttctccatcccccacctaccaaataaactgcttgcactcattctttcctcaggtcggcttctcgggcaagcctccttaggtaaaaaccttgctttcaacatttcctttccattatgcgctaagaactctgatctcttcccgctgcggcagccccgccctttccttgcggctccgccctttccgtgaagtcacgcccgtccttaggctgtctctgtctccctaagagcgagtctcttcgctgctctctaactcctagagctggctcagaaagagtttcacattgccataggggagctcctaggagaggctgcacccattgcacgtaagaagcggtaaaaatgtacgcggccatcttaccaggctgccggagacaaagaaagctcagctttgatgtctgggcgccaccatgttggccacaggaggttttggcatctgagatgctgagttaagagcagagacgacatctctgtttagggatccagggacacttccttctccttgtcctaaaatagccttatcttttggtctagcaaagggcttaatcatccgttttacggcacagttttaaacatggccgccccaggtaggagtcaagtgggcgtcgccatcatacctccaattacagctttgagaaacccagaatcctgttcactggaaggttgccgggtggcggctgacagcctcaaagtcgcaattgagtctgcgcaccggccattcaggatgggacgaccttataccgcggtgaggcggcgtggcaggacgaccaatttcagattcagggcgcggatgcagcataaatgggaaggcacggtttgagaaacggtcaaacctgggactagtggaggatagtgagctgccgactacggtggccgactgggtcagctatgggtgcccgtgagggtcaatgacaagg

SEQ ID NO: 21550 - DNA, 2300 bp, Homo sapien
atcccagctactcaggaggctgaggcaggagaatcgcttgaacccgggaggcagaggttgcggtgagctgaaattgcaccaatgcactccagcctaggcaacaagagcgaaactccgtctcaaaaaaaaaaaaaaagaagaaatgtcaattgtagcattttaacacagcattgaagttatctactgatgcatagcaaattaccctaaactcagaagcttaaaacaacaaacatgtagtatcttacacactttctgagggtgaggaatataggagctgctatagctgagtgcttgtgactgtgtctctcacgcagttgcagtcaaactattggcaggggctgctgtcatctcaaggtttgactggggctgggagatgtgcttccaagggtgatacacttggttataggaaggccccagctactcccaggctattgggtggagggcttagttccttgctacctgggcctctccataggctgtctcggtatcctcatgacatggcaactaacttctctcaaagtgggggcagcagcctttaagacagaactcaaggtgccatttattatatttaatctcagcagtgacatctatcactgctactgcattctattagtctcacagtccaaccctggtacaatgtgggagggaactacataagagtgtgaatagtaggaggtaggaatcattgggaaacattttgaggtcagttattgtatcagttgctaggatgaccagttggaattaggatttttttaaaaagccattttcataagacaaggcaatcttttctagagatgttccaatacctgtgatatgcggagcactgcgctaggtggtattcaaggcaggcctgtagtgaatgctgttggacccagccaccacccctgagcaatcatatgcagaccgctggcttcttaactgcagacacctacagactcagcctaagactttcccacgaggcaggctcgaagtgctggagctttaacacctctggagtggccctaaaacaattaggaagagagatggtgtagacatatgtaagcttcatcggcctggtggttgtgaaaacttggaagtggtttctacacaatcccccagaggtcccaagctgactgagccctcattgatccagagctaatctgctcacctatgcactgtatattcgttcccatcgctcccgtctcacttctccatcccccacctaccaaataaactgcttgcactcattctttcctcaggtcggcttctcgggcaagcctccttaggtaaaaaccttgctttcaacatttcctttccattatgcgctaagaactctgatctcttcccgctgcggcagccccgccctttccttgcggctccgccctttccgtgaagtcacgcccgtccttaggctgtctctgtctccctaagagcgagtctcttcgctgctctctaactcctagagctggctcagaaagagtttcacattgccataggggagctcctaggagaggctgcacccattgcacgtaagaagcggtaaaaatgtacgcggccatcttaccaggctgccggagacaaagaaagctcagctttgatgtctgggcgccaccatgttggccacaggaggttttggcatctgagatgctgagttaagagcagagacgacatctctgtttagggatccagggacacttccttctccttgtcctaaaatagccttatcttttggtctagcaaagggcttaatcatccgttttacggcacagttttaaacatggccgccccaggtaggagtcaagtgggcgtcgccatcatacctccaattacagctttgagaaacccagaatcctgttcactggaaggttgccgggtggcggctgacagcctcaaagtcgcaattgagtctgcgcaccggccattcaggatgggacgaccttataccgcggtgaggcggcgtggcaggacgaccaatttcagattcagggcgcggatgcagcataaatgggaaggcacggtttgagaaacggtcaaacctgggactagtggaggatagtgagctgccgactacggtggccgactgggtcagctatgggtgcccgtgagggtcaatgacaagggaactgaagggttaagagattcggcgtctgagcctcgcggggcctcagtggtggcggacagaggtttgcgggagtcagtggcacggtctctgaagaagatggattgggagtgtgtgggaatcaataaatgcgagttctgtgaaatgtcttgattttcagggtgcatggggtcagtaatagtggtcttcatgggtctggggt

SEQ ID NO: 21551 - DNA, 2300 bp, Homo sapien
cgaacataatctgcattgtatggtgaggatgttcttacccactgagacgaggttgctataggtttccagcatcacatcccggtacagggccctctgagcaggactcagccggtgccactcctcttgggtgaagcccacaaccacatctttgaatgacacaggtatctgttgaaacaaaaatgacattgagtcatgtcgaaaaaaaatgtttgtgcagggccaggcatggtggctcatgcctataatcccagcactttgggaggccaaggtgggaggatcaggagttcaagatcagcctggcaaacatggtgaaaccccgtctatactaaaaatacaaaaattcaccaggcatggtggtgcacacttgtaatctcagctacttgggaggctgaggtgggagaatcacttgaatctaagagacggaggttgcagtgagccgagatcgcaccactacactccagcctgggctagagcaggagtccatctcaaaaaaaaaaaaaaaaaattttgtgcaagagatggtgctgatttttataatgtttataagttagagcttattatctatctggaaggccttttatattcttggctttgtgttatatatggtggggaaaaagaaaatcacattggaagctatctaccattgccatccatactttgagtcaacaaacattgaagacccactgtgtgttgctggggtcacagtcatagatgggtcctgacctcaaggagctcactgtctggcacagagagagcaacatgtaaagccatcagggtaaaaatgtcacaagagctgtgatggcaggacatctaggctatggcatacagagaagcgaatggtctgttaaatttttcaggttctggttaggcttcagagcccagggatatggaaagctgactctcctccgcaggaagatggaaaactgcattctatgcaggggagcagtgggaacaaaggccggggggcaaaacggtgattttaggggtggcaagttacttagtaacaagagaaaagtatgcagaggtcggccagcaatgaaatgatggactttagggccgggcacagtggctcacccctgtaatcccagcactttgggaggccgaggtgggtggatcacctgagctcaggtattcgagaccagcctggccaacatggtgaaaccccgtctctactaaaaatagaaaaattagctgggcgtggtggcgggcgcctgtagtcctagctactcaggtggctgaggcaggagaatctctagaacccaggaggcagaggttgcagtgagctgagattgtgccactgcactccagcctggaggacagggtgagactctgactcaaacaaaaaaaaacaaacaaaaaaaagaaatgatggactttaggacaatggaaactccatccaagaagaagtgtatgcagaaagtatattctagaaggcatgaggtgagcttcttgcattctatgtgaagtggtataatgataactctaaataaactgtgaaaagtaagatatatattgtatccctgaagtaaccactaaaatcataatgtgaggtgtgcctgatctaaataaacagaattttgaaaaatgttccattcatccacactagcacaacaaaagagaggaaagaagaaatagaggaacaaaagagtagacgggataaacagaaaacagacactaaaatgacagatacaaatccaaccataccaataatgtaatttaataaagattatatgtaatgtaatttaatataaattgtggggaaaagagagatcagattgttactgtgtctgcgtagaaagaagtagacataggagactccatttcgttctgtactaagaaaaattcttctgccttgagatgctgttaatctataaccccacccccaaccccgtgctctctgaaacatgtgctgggtcaactcagggttaaatggattaagggctgtgcaggatgtgctttgttaaacagatgcttgaaggcagcatgctccttaagagtcatcaccactccctaatctcaagtacccagagacacaacacactacagaaggccgcagggacctctgcctaggaaagccaggtattgtccaaggtttctccccatgtgatagtctgaaatacggcctcgtgggaagggaaagacctgaccatcccccagcccgacacccataaagggtctgtgctgaggaggattagtataagaggaaggaatgcctctttgcagttgagacaagaggaaggcatctgtctcctgcccgtccctgggcaatggaatgtctcggtataaaacccgattgtata

SEQ ID NO: 21552 - DNA, 2300 bp, Homo sapien
tagccttcacattcactcaccgctcagtcactgactcacccggagtaacttccagtcttgcaagctccatccacggtaagtgctgtataccggtatacgatttcttatcttttataccatatttttactgtaccctttctatgtttagacatgtttagatacacaaataccattgagtataattgtttacagtatccaggcaatttggatttgtagcctcgaagtgataggctgtaccatcaggctacatcatctaggtttgtgtatgtacactctataatgttcacataatgatgaagtcacctaaccatgcattactcagaaagtatccacagaattacacaatgcatgaccatatttacattctgctttttaaaaatcttaaattaggctggatgtggtggctcacgcctgtgatcccaacactttgagacaccaaggcaggcagatcacttgagcccaggagtttgagaccagcctgggcaacatcgcaaaaccccatcccaacaaaaaaatacaagaaattagctgggtgtggtgatgcacacctgtggtcccagatactcaggagtctgaggcaggaggattatctgagcctggagaggtggagtctgcagtgaaccataattgcaccacagcactccagactgtgtgacagaatgagaccctgtctcgaaaaaaatcttaaatttatgtatcttaagaatatacattaatatagagtttaaatatcaaataaagagggttttttaaagttgaaacaatgtatcagaggataaaaaaccataaaacatttgtttaaatttaaaggatttgtttaatctgccctattaattgcaattttcacagttaactagtactattttttatttaaataatagtatgtatgtaacagaatagtaaagatgtaacctgtggatgctgttttacagcagcagaaactggaacacatgcagtctcatgattgtcctactcttttgccagatcattgcattgtctgcccaggcacccctcatcccatctctctccatcccttttcttaccttttcatgttccttgtcttttcatgacagcatttatcaatgtctgaaagtagaatgttgttgattgactctctcttcaactagaacataagcaatgagcggcccagcctttgtcccacacactgcagtgtgtcccacttctaagaaagtgtccaacacacagcaggaactcagtcagcatttcttgaatgaattaagtgaagtgatgcatacaggccacattctgagctgctggaggagccagtagttgattaccaaactctagtcctttatcttggtgtcctgatgtcctgactgatacacagtttgtaggcaaatagctggtggggtttagtagtatgggatagaataaagggagatgtaattgggacactctccacattatctgcccccatgaaaagctagttccaggtgttgccatctctgccccacactgggcttgccttagtcctcgttcccgccttttccagacagcagtgctgagaagcaggagcccctgagcttggagacgcaggaagagccctgggaggcccagatcaaagggaggcagtcagctcatggagccgaggaatgttctgctgacacccaccccgagggtatccggtatgtttctgtgcaccagcgacccctccacacctcaccagattggttccccagccccgtgggacccaattccgggtcaattccaatttgattccagtccagaatcaaatcagaagagcaatcccgagtgcccacctcacggtctgaagcacctcctcctacacccggacccaaacacgaggtcggctcaaggaggcactgaggtcacgacagtcagggtcctgcgctgcttgtcgcatgcagtctccttccccgaaccgccgcctgcacggcctccactgttttcctattgggctgcagcctgagagccctgacaatgcggcccacaaaccgggaacgcgaaagtgcacgtaccaggcgcgatcaccaggcgctagcgctgaggggggactcgcgtcacagtaaccgccaccgttgccgggggactggccccagcggcttggcccccaggcgtctgtggcagtgcgtcccctctccgcgggatcgtcgccatggtcctgcgatcctaggagtcgggcaaggccgaacctgcctgaagaaacctcaagcggagattcaaggaagcaccacgtgatccctaaggatcccaaagatgcgtcgggcatgcatgggcggtgtgagggtgcgtctccctgacaggtgtccccgctggga

SEQ ID NO: 21553 - DNA, 2300 bp, Homo sapien
taggaaaacggtggaggccgtgctggctgcggcccggggaagaaggctgcgtgagaccagcagcgcaggaccctgacagtcctgacctcagtgcctccttcagcccacttcgtgtacgggtctgggtggaggaggaggcgcttcagaccttgaggtgggcactcgggactgctctctgatttgattctagattggagggtgtgggcaggaatcaggtcccatggggctggggatccaatctggtgaggagttgaggggtcgctggggtaggaaaacatacctgagaccccagtggagggtgtgagcaggacattccctcgccccatgagctgactggccccctttcgacctgggcctcccagggccctgtcctggtctccaagaccagggccttcggcttctcagcattgctgtccagaaaaggcgggaacaaggacaaagtcaagcccgatgtgaagcagaggtggcaacacctaaaactggcatcccatgggggcagaaaatgtggagagagtgtctcagaggccttctggggtgaatccaagcccaaaagggatatccaggcatgctggcgagggccactgaggatacccccaagaaagcgaagcacaagcaaagcacacctgaaaccataggagggcctgtgccggagtccaagcctcctccagggattcctgccagaggagccaagaggatcctgcaaagtgatccagcacccacaccgggatcacaacccaccaccgggtctacacccagctaacccccagtcccttttgctccgtgaaatccctggcaacgaaaaggtgcagtgctgagaggcagtcccagccaggaacagagcaatgggagacccctcaacaatgagaaaacaccagcagatgagatgaaacatagccttcattagaaggcaaaggccagctacggctggctacctctcattctatgtgaatcatgcagccatctgatgcaatggggagaccaagagtttccttattggggaaagctacgggcacccacggttccaagagcatcacagctacccagtcattaagaaatgtgagtgttgagaaggaaacactcatcacctacgtccccgccaaggtggtcctggacgaactgggaaacatttgctgtgaaggacgttctggaggactgtgagccagaccaaggaaaacctgggccgacgagaatcagggaaggcaagaaaagagggagaacagagtagaggccgcagcccaggcaggatcaatccatcccactcccatgtgcctcggggaaccagggtccaacaggggacctggccagaaaggcgacagtcttcggtccaaaggttctccgaacactcgtgtcttctatcgccagcacagcgccatggtgtggacaggttgtacagtgaagaggaaaaggggatggcgttggaaacagtttctttgacatctgtctgcacctgttctgcaggtgaaggtgcgagacctcctccacacctcagcggattgtatcttcacccccatctgaccttttttctgcacacatcctttaatccagaatgaaatctgaagaggatgaaggagtgcccgcctcaggtcctgaagctgcgactccgccagccaccgaattagaagtgggctcaagggggtactgaggacaggacagctagggtccgtccagccttgggtgtgccgcaggaccatgggcccctggaggaatttgttcttggttgtcgtgtgctggtcttctttctggaagagtgggcggcttgggaggggaggtgatttggacgtttgcgggtcgcagccagccccccacttcaccgaggctttaggaaccaagagcgaaacaaagaacgcttgccccgcaacccaagcccggccaaagagacgggcgcatcagagcgtaggcgaactacagagaaaccgcgcttcactgcacgagccacatttctttcaccgcacaccacacacacactcacacgcacacacagaaagacacacggaaacatccaacagtcgcacagaaacacacacagccaggcagctcctgaggctgcgcggttctgctctctgccaggaaacccctccggaaagagagcgccccggggaacacaggcaggccgtacctcgaaatcccagcggggacacctgtcagggagacgcaccctcacaccgcccatgcatgcccgacgcatctttgggatccttagggatcacgtggtgcttccttgaatctccgcttgaggtttcttcaggcaggttcggccttgcccgactcctaggatcgcaggaccatggcgacgatcccgc

SEQ ID NO: 21554 - DNA, 2300 bp, Homo sapien
tgtttccgtgtgtctttctgtgtgtgcgtgtgagtgtgtgtgtggtgtgcggtgaaagaaatgtggctcgtgcagtgaagcgcggtttctctgtagttcgcctacgctctgatgcgcccgtctctttggccgggcttgggttgcggggcaagcgttctttgtttcgctcttggttcctaaagcctcggtgaagtggggggctggctgcgacccgcaaacgtccaaatcacctcccctcccaagccgcccactcttccagaaagaagaccagcacacgacaaccaagaacaaattcctccaggggcccatggtcctgcggcacacccaaggctggacggaccctagctgtcctgtcctcagtacccccttgagcccacttctaattcggtggctggcggagtcgcagcttcaggacctgaggcgggcactccttcatcctcttcagatttcattctggattaaaggatgtgtgcagaaaaaaggtcagatgggggtgaagatacaatccgctgaggtgtggaggaggtctcgcaccttcacctgcagaacaggtgcagacagatgtcaaagaaactgtttccaacgccatccccttttcctcttcactgtacaacctgtccacaccatggcgctgtgctggcgatagaagacacgagtgttcggagaacctttggaccgaagactgtcgcctttctggccaggtcccctgttggaccctggttccccgaggcacatgggagtgggatggattgatcctgcctgggctgcggcctctactctgttctccctcttttcttgccttccctgattctcgtcggcccaggttttccttggtctggctcacagtcctccagaacgtccttcacagcaaatgtttcccagttcgtccaggaccaccttggcggggacgtaggtgatgagtgtttccttctcaacactcacatttcttaatgactgggtagctgtgatgctcttggaaccgtgggtgcccgtagctttccccaataaggaaactcttggtctccccattgcatcagatggctgcatgattcacatagaatgagaggtagccagccgtagctggcctttgccttctaatgaaggctatgtttcatctcatctgctggtgttttctcattgttgaggggtctcccattgctctgttcctggctgggactgcctctcagcactgcaccttttcgttgccagggatttcacggagcaaaagggactgggggttagctgggtgtagacccggtggtgggttgtgatcccggtgtgggtgctggatcactttgcaggatcctcttggctcctctggcaggaatccctggaggaggcttggactccggcacaggccctcctatggtttcaggtgtgctttgcttgtgcttcgctttcttgggggtatcctcagtggccctcgccagcatgcctggatatcccttttgggcttggattcaccccagaaggcctctgagacactctctccacattttctgcccccatgggatgccagttttaggtgttgccacctctgcttcacatcgggcttgactttgtccttgttcccgccttttctggacagcaatgctgagaagccgaaggccctggtcttggagaccaggacagggccctgggaggcccaggtcgaaagggggccagtcagctcatggggcgagggaatgtcctgctcacaccctccactggggtctcaggtatgttttcctaccccagcgacccctcaactcctcaccagattggatccccagccccatgggacctgattcctgcccacaccctccaatctagaatcaaatcagagagcagtcccgagtgcccacctcaaggtctgaagcgcctcctcctccacccagacccgtacacgaagtgggctgaaggaggcactgaggtcaggactgtcagggtcctgcgctgctggtctcacgcagccttcttccccgggccgcagccagcacggcctccaccgttttcctatgggccctgagagccctgacgttgcggcagcgccagccgggcacgcgaatgcgcatgcgccaggcgcgcgtcaccaggcgcgacggctgagccggggctcgcgtcacagtgacagccaccgttgcctggggacgggccctagcggcttggcggagctggagccctccctggcagtgcgtcggcgctgggctatggccccctcctctccgggggatcgtcgccttggtcccccgaccctaggagtcgggcagggcagaaccaggctaaagaaacgtccagcgtagcttcaaggatgcaccgcg

SEQ ID NO: 21555 - DNA, 2300 bp, Homo sapien
tccatcaaacctctagatctaactgcctgtttacagaaatatgaaggaacggaaaacaaattataagacagtacaaagaagcaattagctaaaagcagtatacagaatattctacgggacagatgatctagtttttctacaaatcaacagcaccaattaaaccaaaacaaaacacaggagggaaactatcatgcattaagtaagtttaacaggtttggccaccaaatgcaatgtgtggactctatctggatccagatttgaacacacctattgtaaaaatatgtctttgaaataattgggaaaatctgaatatgggggtatacaagattatgaaataaccaccacgctgttacaccaacataagaaacaaatttattgttttaaacttattgttagtttttttttttatgttggtataacagcatcatggttattttaaaatataatgtcctttttggtaatatatgcttataagaggataaaatacaattttgaaatactataggaaaaaacggggaaggattgatacaaaggtatttacaaatgtttttaattacagctaggtgttgaacatgttggggttcgtattattctttagcctgcttgaaaacatccacaataaagttaaaattttaaaactcttcaaatttcccccagaaagtacagttatttttcatcaaaaccttagaccaggccaggcgcggtggctcacgcctgtaatcccagcactctgggaggcccaggcgggtggatcacgaggtcaggagatcgagaccatcctggctaacacggtgaaacctcgtctctactaaaaacacaaaaaattagccgggcatggtggcgggcgcctgtagtcccagctactcgggaggcttaggcaggagaatggcgtgaacccggaaggcggagcttgcagtgagccgagaccgcaccaccgcactccagccagggcgacacagcgagaatccgtctcaaaaagcaaacaaacaaacaaaaaaatcttagaccagaaaggactgctgtatcattgggtggaaaggagaggtgtagtgtggctggggagtagagctaaactgatgatcccatccccgcagcatcatttatggggtgcctaaggaccagtcactagcatggctggttcttccttaggaagatgttgctggaggtagaaaacgtttcggaaaggaagaaatttgaggttagaaagaaaacaggaacttcacacaagactttcagaagtgcgatattcttttcctctgggtgcctctcttggaaaacgcagaaccgagaaaagaaataagcatcatagaacatcagagctctcggagcagacgaaacaatttaggataacaccaacctctagaaagggattagtcttccccacagggctgtcaagctagaataggacatctttaacagtggtcttcttcctaagacacttccaggggtaaagcctcaccatcagggaaacttcaaaaagagcctcttactctgcaaagaaactgcagcagctgtaaccgcacgattctcagctggcttaatgatgtccgtgtcacacgaggagtactgcggcccgggaggggccaagcgctaggagcattaacaggcggcaggtgagcccaccccgcggccgcacaagcgcacacgcacacgtccagggcggaggaacactactagtaacacccgcctccttctagcctccctatcccaaagttatggtgccgattttgtccgcggcaggggctccaggggcacactcataaattcggtgcggaggaacacaactagcagcaccacacccccgccactgccagaaccaaagtgacggtgccgacacccctccgcaagcgcaaggccgacttccataagtaattagccagagcaccgtcccgttcctgtcagcaccgagccccagccaggacaccggtattcccagcaccatacaagaactactttttcgatgaagcaacccaaaagctgcgagcggttcccggtgaggccgcccactcacctggccggcgcagacaagctccgtgcgtcaagacataacagcgtaagtgtacgacgttgcgcagcgacgcgggggccttcgggaaatgtagtctacaactggaaaccggccggatcgtgtctgcgcaggcccagcagctaagatcgggtccggcgctccagaacagaacgatccctgaggctcccttgctcgaactgtgggacttaccctactatggtccgagcctaccctatttcattatactcaagtaacgccccagaaattccagagaatctcacacaaagaggtt

SEQ ID NO: 21556 - DNA, 2300 bp, Homo sapien
atgttgctacttattaagataatatacgttaaagtggcaaatagcattttatatttacaacacgggaacattgaatagactgataataacatgttaaactggagtaaaatagatgccctcacgccatgttatacactggtgccaccttaaagagggtaaattagaaatttatattagcagaatttaataatatgagccagatgtttcagtaatcccactcctatgaccctgtctaaggaaaataattatatatgttcactaggatatatgcagacaggtgcagatagactaattttaaaatggaaaaagctagatacaaacataaattagacttcaataaagaacaggttaaataaattctagtgtatccatataatagaaaataaagtagccatcagaaataatatagattgggagtctgcaaacttttcctgcaaagaaccacataataaatatttcaggctttgtgggccagctggaggatcccttgaacccaggagttcgagactgcagtgagctataactgcaccactgcactccagcctgggtgagacagtgagagcctgtctctttaaaacaaacaaatacagtatctgcaaagtgcaataaaatgatgcacaataaaatgaggtatgcctacattatcattaatgttgacgcgaatatcttcaaacaagagggaagaaagtgcatttgtctataaaagggcaacacaacagatcctcgaggtgatggaaatgatctatcttgactatcaatgtcaacatcctggttgtcatattatactacagtcctgcaagatgttgtcattggagaagactaagttgaagataacacacaatgtctctattatttcttacaacctcatatgaatctacaatcatctcaaatttaaaaaaaaatttaaggaagttttaagaatttcattttcaaatatttgctagatgaattaagtttttacccccttcaaatcttgaaggcaaattaatgctccaggttgtactgttcaataggaagactattagccatatatagctgtttacatttagatttattaaaattgaacacaatttaaaaaattcgttcctcagtcaaaccagccacatttcaatttctcaatagccatatgtagctagtggctactatattggagagcacagatataaaaaatggaactcagttttgcagaaattcctattaaaaagcattgttccaaagcgttacacgactgacaccctcactttacaggtgagaaaactgaagccaggagatatcactataatacagcgctgcacacaatcgtgctcattctcaccatattatgctcacacacttctttccccacattcactgccacaggcgaactctcaatgaatcattcactacatttatataatttcatgggaatctattttaaattcatgaccatgcaaagaaaaatcaatttcttacaggttataagatactcagtcgcaggctgaatctgattaaacagacatcagtcaccctcaaagctataatcaaaccattcccaagacccttccgcacacaatactaaatgcgccactaatagcctcaagcataatctgacgcacatcacacaggcatggccactacccactctgcacccacagaggacactcggacacgcgcgcgcacagacccacacacacacgcacacacacacacatggccgcaaagaatgcgtcacacttccgaaccccgttgagcagcaacccggtatcgtggccactgcgtcacggccagagctgtcagagagaaatccagaccttacctgacagccttttgcagctcttctagcccgggatgacattcccctgaaggcaccacggcaagactcaacctctttgtgtgagattctctggaatttctggggcgttacttgagtataatgaaatagggtaggctcggaccatagtagggtaagtcccacagttcgagcaagggagcctcagggatcgttctgttctggagcgccggacccgatcttagctgctgggcctgcgcagacacgatccggccggtttccagttgtagactacatttcccgaaggcccccgcgtcgctgcgcaacgtcgtacacttacgctgttatgtcttgacgcacggagcttgtctgcgccggccaggtgagtgggcggcctcaccgggaaccgctcgcagcttttgggttgcttcatcgaaaaagtagttcttgtatggtgctgggaataccggtgtcctggctggggctcggtgctgacaggaacgggacggtgctctggctaattacttatgga

SEQ ID NO: 21557 - DNA, 2300 bp, Homo sapien
agtcactagcaacctgttgagcacttgaaattgagttattgagcactgaaatgtggctagtccaaattcaaatggtgtttttttgtaaaacacaagattctgaagacttagttattttaaaaaagttaagtatctcaatttttcatattgagtacatattgaaataatattttagatatattggttcaaataaaatacattaaaatgaataacacttttttgtttttaaaattgttataggaaaatttatatatgtagctcacgtatttctattgtcagcgctggcataaacaataaaaagtagacttggtttttttgtgtgtgtttctttaaaagataccaatatagtcaagacctttgcagttttgatcacagaaatatgaaagattacacagctacagctatatgaatgataaaagtgacagctatggatttttaaagttataagttgctatactacatatatgtaatgtgtgtgtgtatagtgtgtaggtatatatatttatatttatacacacactatacatgtattttaaaatattgaaaatccagaattattttatggtaaaaattactaaaattgacttcacatgctgaatgaagagagcctgagtagaccaacaaacaaatgaaaaattaagacggttagaagatacgctttctaaaagaatacatttagaatctaactttaaaaaaaaaaaatcctactctcctgagccagagtggtctcagagagactccgagaacctaattttttacaagtaaaatctttgaagaattggtaattgctaaatttttccaacatactattctacaagactaacctaaaactgattataagaactaggtgaggagggctggcaaaacgaaaatctagacattttccgtatgaagagaaatctggtaattctaatttctatgggaaattatatccaacagtttagaatagaaaatcatttatgtggaataacttggaccagatccatccagctttaattatatatttagattctaggcattctaccttcagaacatcataatgatagtaaaagagatacgattctggcccagtatcatctcaattcatgcttattgtcttttttttttttttttttttagctttctatgtattaagaatggaatgaattttatgtatgtaaaagtgtaacccaacaccttaaaattaccttctcaaaattaataaagacagagttcttataaatgattgcatcagttggacttcggtgatttcaccgtggtcatccattatgaactgtatttgctgttataattgggaagccatgatgttcagtgtattacatcattatattccatttctcaaatggaatatgaaacttgatagcatttgaaaccatttcccaggaaacactagtgcttgatggtatttttagaaagcattctgtggttaaatgagcatattaaaattaataattaagaaaataaaactatagcttctccaaataatgaagtaatgagagtttaattgattttatttaacttaatgtatctgaagcaccttttaccctgtaactttcactcttaatgcttgtgagtatgggatatgaacccattttaacagataagtgctgtaaccaaaacaggtgacagcaaaggtggaaagttcggacctcatgtcaggtggttagttgtgttggaaggtggatgtgaggtatgtttccctggatgtggcatcatgttctaaagtcacctgttctttctgaatattgaactgttgcttttctgcagaaataaaatttctgaatcaacactatactgcaatgaaaatgaacaacctatgactgtgtacaatacagataaatctcaaaagcataatgctgggcaaaagaagccagacataaaagagtgtggggaaaagcaagagagatcagattgttactgtgtctgtgtagaaagaagtagacataggagactccattttgttctgtactaagaaaaattcttctgccttgagattctgttaatctataaccttacccccaaccccgtgctctctgaaacatgtgctgtgtcaactcagagttaaatggattaagggcggtgcaagatgtgctttgttaaacagctgcttgaaggcagcatgctccttgagagtcatcaccactccctaatctcaagtacccagggacacaaacactgcggaaggccgcagggacctctgcctaggaaagccaggtattgtccaaggtttctccccatgtgatagtctgaaatatggcctcgtgggaagggaaagacctgaccgtcccccagcccgacac

SEQ ID NO: 21558 - DNA, 2300 bp, Homo sapien
ggtctggagttcgaaatcagcctggccaacatggtgaaaccccatctctacttaaactataaaaaaaaaaaaaaaaaaaaaaaaatggccaggcgtggtggtgcacgtctttaatcccagctactcgggaggctgaggcagaagaatcgcttgaactggggaggcagaggttgtagtgagctaagattgcaccactgcactccagcctggacaacagagtgagactccgtctcaaaaaaaaaaaaaatttcaaacatgaaagaactaaaaaacatctttaatacatgcatcttaaggaacttattggaaaagaactttagcaaaaattagctgaattctaggaaacaagaatcaaacttaggaaaacaatgacggtaaattttaggacaactgtacagtccaattgcagccacagaatggaagagagattctactccgatgtttgaaccactgaaaaaataatcgatgaacatttaacatatctgttggaacatttctaaaaaatagcaacaagtacaaagaaaaccaataaatccttgataaacaaactcatgtaagaaatgtacttggttttaaagagaaaataattgacgtaattagtacatatactccacatattcacttaaccaaaacttgagatatctggaagagatcaaggagaaagaagaaagttttaaatattttaaatgaagtattacaatgaacatttttattactaaaggtatttttagctacgaaaatgaggctgatctttcaactaaagatcaaagaaacttactatccaagaatgcttggagacattgaatttatccaagagttcatccaggaacaaaggggaaaaaacaaatctcatttgttagaatattccaagaccaggtatggaagaaaataaaatgcctctccctcccgtttcatggtgtcctattcaattttctgacacagtcctacaattccatcatttggaagtaatagcaaccttattcctttccaattttttttcctgcaattattttacttgcctaacaccacagtcctgagggcacacaagggccagatgcagataatcaaaatcccaacactcagtttcatagggacccacaaaccgtctccatggaaaaccagaaccagaagcgctgccctatcagaaggattctggaaataacgctggatgaggcagagccacagtcacagatccgatgtcaggtacgtcacaaacgcagacacaaaccgcaaagaccccagagacccgctacagccagcgtcagagtcaggcaccaccgcgcagccttctctgcggcaccatcctaatcccccgctagagaacggcacacgcgcacgcagcagccccgtgcacggaaacactactccgccagcggccaggcactcggtccaggtacgcgggggcgcggcggccgtcactcagcaaacaccacaggcagcacgcgccgcgccttggtccaggctcgcgatactggggtttcctccatccaactcacgccagggtcacggctacaggcctagatttgaacactccatccccatcgggatcctgtagccaacctccaccctcctccaaacctcccgacccctcggcaggtgcggccccacacttctcccttgctccctgaagggccccagcgttcgccccccgcgcgcttgcgcactcgaggcagaagccgatttccaaaggttccggtgaggcgtcgctgggggcggggcggggctcgcagcctccgcctgtctccgagccgagaaccaaatgaaaaataaaaaggcggaatattgtttttttaaattttggaccgcagtgtccacaggggagcaggcctggattatctttaatggcactggtcagtcacggggcggccattacaggtagaggcctgaggcgagggacactgcggcccctctggctccgtctccccggcccgactatccccgccgagacccggccccacgcgcccctcccggcccggagcagctgcgggacttgcctccgcccccccgcgcgctagcgcattcgcgacggagacaggcgctctcccgtattctggcgccgctgactcccagggctgggctatcctctgagtcgggtgaggctggggctgggagccgggcgccactgtggccgctgcttttctgagggaaaagagcgcggagtgggccaggttttgcaggccgggccaaggtggagaaaaggttcctgtggagcctcaggccggtgtgctttttttcccgggactgagcttctgcagccctgaggcctggaggcccgggcggtagtaactgtgccggaccag

SEQ ID NO: 21559 - DNA, 2300 bp, Homo sapien
actgtatttctctttgacaaaacctaaacattctgtttatttgaacaccacttatatttatgttaatgttctgagtaaatgtaaatgaatactgacaaaataatagtataacatcagagagatttttgtttgtttgttgagacggagtctcgctctgtcaccaggctggaacgcagtggcacaatctcagctcaccacaacctctgactccctggttcaagcaattctcctgcctcagcctcctgtgtagctggtattctactggtattagctgggtgtggaggcacgcgccaccacacccagctaatttttgtattttagtttcaccatgttggccaggattgtcttgatctcctgaccttgtgatcggcccacctcggcctcccaaagtactgagattacagacgtgagccaccacgcccagcctagagaggtttttttaaacaaaacgaatatgtaactgatatcttgtattttaaatttaagagggcatatgaaattgaatgcattctgtgagaggagagtcagagtattgataaatttggacttattaaaattcctggagtaatgacttaaagaacctacaaactattaaagagaaaattggaatagtaatacatcaatccaacataaagaaaggagagaaaaaggaaacatgcaacaaaaagaaaacaaattaaaatgccaggagctaatgcctgtaatcccagcactttgggaggcagaggcgggaggatcgtttgaacccaggagttcaaggccagcctgggcaacatagggagaccctgtttttaaaaagtaataaataaggctccgaagcagggaatgggggcaagatggtttacatctcaaacgcacaagtgttggacaactggagtcagtctccatggagattatctttgataacagatttcttctggggaatagctgagtttgtggttttgtttttcaaaactctgcttcggcaagatttgaaaaaaagaagaagctatggaaactcatctgatttcagatacgatgacgatggaagagggccaccgggaaaccctcctggaagaatgggtccaatcaatcatctgggtggccccagtcctcctccaatggctggtggatgaggaaggtgtctgctctaagaagcaactggacatgcatattcatagcagaaggaaaccatcaagaagtggagtgctgaccatgctgcagcagtagatgaaagtgtgtgtctaaacaaggactgctctgtgtcctcacagatgactgaggtcatgctgggagttccctctgcagggaactggcctgattgacatgcagttccacaaatgcacgtttgtctcattatctttagggtattaaagtattaatatagtttttgttgttgttgttgttgttgtggttttgagacagagtctcactctgtcgccccggcgagtgcagtggtgcgatctcggctcaccacaacctccgcctcccgggttcaagcgattctcctgcctcagcctcccgagtagctgggactacaggcgcacgccgccatgcccagctaattttttgtattttagtaaagacggggtttcaccatgttgcccaggctggtctcgaactcctgagctcgggcaatccgcctgcctcggcctcccaaagtgctaggattacaggcgtgagccattgcccccggcctcctcatctttaaattcacaaaaagattgaatatgaagaaaataaaagcctgtgtatttagcactaaaaaaaaaaaagaaaatataataaaatggcagctttaaatctatcagtggctatattaaatgtaaataaattaaatactccagttaaaagagatagacgttcggggtgtatttaaaagccacagacacacatggtcttccgactgccctattcacatgctcagcccctgacagcactggctctgggactaagcccctcgggcagccctgagcctcccagggctgagcacctcgctttgagcagctccgctaccgcgtcctccagtcgggaggcggctgcgttcctgcgcgaagcacgtcggccgcgaaggcctctgggaaatgtattccgggctaccagcccacaaacgcggcggaaccggttgcggggaggttgcttgaattctctcagctgcgccccctgacctagtagtcgctggcacaagctgcgcccggagacgtgggagcgttctcttgttttccgagtgcgcggactcatcgggtcacagtttatgcttttatgacgcggtgagtccagccactgattcctaacggtttagagtggggaggttacgcttg

SEQ ID NO: 21560 - DNA, 2300 bp, Homo sapien
tgcctataatcccagcactttgggaggccaaggcgggcagatcatctgaggttgggagttcgagaccagcctgaccaacatggtaaaaccctgtctctactaaaaatacaaaattagctgggcatggtgatgcatgcctgtaattccagctactcaggaggctgaggcaggaaaatcgcttgaacctgggaggtggaggttgcagtgagccaagatcgtgccattgcactccagcctgggcaactagagcaaaactccgtctcaaaaagagaaaaaagaaaaagaaaataatatgtggagtcaatttaatccattgatctatgtgtggtatttctgagagattattcaggagattcaggagcaacaaatccaagaactaattaagagaagaaaaagtgatcaataagttcttaaattgtaactttaatagttttttttccttgactatttgtatttttgaatggtgattttttagttttgttccttttcctcttagggtatagacaaatattttttatttttaaattaattttacttatttattttttgagacaaggtcttgctctgttgctcaggccagagtgcggtgacaccatcatacctcactgaagcctgaacttccgggctcaactgatcctcctacctttgtctttggaatagctgggcccacaggcgtgtgccaccacaccaggctaactttcatttttggtagagtttgggaggaggagaggggtgtctcactatgtttcttaggctggttttgaacttctggcctcaactgatcctcctgccttggcctccgaaaatgctgggattaaaggcgtgagccaccgtgcccagcctgtattcatcaatattttattaagccaaagaaacaggaaattcggactattaaatatttgtccgttttagctgttgtaaatatttcccccaaatttacttacctaaaaatttttcttattcgttttttaccatttggaaattttggatgcttctaaataactatgaagatttacaaagtattacatgaaggatcaaaaaaattttttaaatttcttattttatcttcaagaagcctattccagaacaaaaataataaaactatttagcagttatttcttcagatgattttttagtcaaatttttagtcaaatatattcgtgtccaaagatgaagaacataatgtcatgtattgaagaatgtgatggaacttcaaaccctcatataggacgtgagtccatttacttagcgcttgacgagacaagctgggcctgtcgggtggtattaaaagtcccagtcccatgtgttaccaaggaggccggctctacctcaggagccatgagggtttcggcgccccaccctgaggagctcacacccatccagcaggtgatcccttccgaggctacctggatcagtttctactcagactcgcctcctactggccctaagaacgcactaactccaccctaagcctcaggccaggggcccagtagtggccgatctgcgcatgcgcactcgaggcaaggcggccactcccagaagtctccggggctcgagcggtgggtgggaggcgcggtccaagtggtcgctgccgtatttctcgtaggtttttaggattctggactccatttctcaccggtacctgcggtcctgactgttctggcttggactacatattacaaaggcaacggagaaaacttggacccctggctccggttccgggaccttttggttccacctgaagaaggcggcgcaggtcactgcgggagcctctgcagccccagcccgccgcccgcgtggtaccctgcgtggcggtgagagtggggctgcaggaggcgctcagagcgcggaggcccccaggcgggccgggcgagtctcccgcctcctcaggccctagggtgctggagctgcggaggaggggcccgtctctaggagacaggcggggagcgtgagagaccgcgcagcggcgacaggaccggcttgcctgtgtgacgtgggtgcagttgcgggactgtgaggggtgcgtagtcgaccttgtgtgacctgtacatgccgtgtgtgtcctttgtaaagcgtgcttcgctgggctctgtggggtctattgacccttggctccaggttccctgctgcttcctgtgccttcctcagcctagtacgactacaacagagaaatggtcccaatgggaaatcagatactgagtcttagatgaagatttccagtgagaagaaacagataggatgagaagcttagaagagtaattgcccttaagaaaggtatgatagattctgttaaataaaaa

SEQ ID NO: 21561 - DNA, 2300 bp, Homo sapien
aggcatgagccactgctcctggctgatttgcatattcttaatgattaatatagaacatgttttcaagtatttagtagccatgtgtatactttttttttttttttgagaaatgcttattcagttactttgcccatttttgttgggctttttattattgagttgcaagacttctttatatattctagatacaaatcccttattggatacataatttacaaacaatttttctcactctttgggtagcttctcacattcttggtgggttttgaagcacaatgttttacaatttatgtccaatttccttttttgatgttgttgcttgtgattctgatgtcacggttaagaaacaattgctgactataaagtccagaagatttatgcctacatttccttctaaatgttctactgttttaagtcttacacctaggtgtttgatccattttgagttgattttgtatatggtgagaggcagggaactcaattcattcctttctatgtgcatctctaattccagtcttttcaacaaagactactcttcccttccttaaaatgccttggtatccttgttgaaaatagtatgtggagccgggcgcagtagctcatgcctataatcccagcactttgggaggccaaggcgggcagatcatctgaggttgggagttcgagaccagcctgaccaacatggtaaaaccctgtctctactaaaaatacaaaattagctgggcatggtgatgcatgcctgtaattccagctactcaggaggctgaggcaggaaaatcgcttgaacctgggaggtggaggttgcagtgagccaagatcgtgccattgcactccagcctgggcaactagagcaaaactccgtctcaaaaagagaaaaaagaaaaagaaaataatatgtggagtcaatttaatccattgatctatgtgtggtatttctgagagattattcaggagattcaggagcaacaaatccaagaactaattaagagaagaaaaagtgatcaataagttcttaaattgtaactttaatagttttttttccttgactatttgtatttttgaatggtgattttttagttttgttccttttcctcttagggtatagacaaatattttttatttttaaattaattttacttatttattttttgagacaaggtcttgctctgttgctcaggccagagtgcggtgacaccatcatacctcactgaagcctgaacttccgggctcaactgatcctcctacctttgtctttggaatagctgggcccacaggcgtgtgccaccacaccaggctaactttcatttttggtagagtttgggaggaggagaggggtgtctcactatgtttcttaggctggttttgaacttctggcctcaactgatcctcctgccttggcctccgaaaatgctgggattaaaggcgtgagccaccgtgcccagcctgtattcatcaatattttattaagccaaagaaacaggaaattcggactattaaatatttgtccgttttagctgttgtaaatatttcccccaaatttacttacctaaaaatttttcttattcgttttttaccatttggaaattttggatgcttctaaataactatgaagatttacaaagtattacatgaaggatcaaaaaaattttttaaatttcttattttatcttcaagaagcctattccagaacaaaaataataaaactatttagcagttatttcttcagatgattttttagtcaaatttttagtcaaatatattcgtgtccaaagatgaagaacataatgtcatgtattgaagaatgtgatggaacttcaaaccctcatataggacgtgagtccatttacttagcgcttgacgagacaagctgggcctgtcgggtggtattaaaagtcccagtcccatgtgttaccaaggaggccggctctacctcaggagccatgagggtttcggcgccccaccctgaggagctcacacccatccagcaggtgatcccttccgaggctacctggatcagtttctactcagactcgcctcctactggccctaagaacgcactaactccaccctaagcctcaggccaggggcccagtagtggccgatctgcgcatgcgcactcgaggcaaggcggccactcccagaagtctccggggctcgagcggtgggtgggaggcgcggtccaagtggtcgctgccgtatttctcgtaggtttttaggattctggactccatttctcaccggtacctgcggtcctgactgttctggcttggactacatattacaaaggcaacggagaaaac

SEQ ID NO: 21562 - DNA, 2300 bp, Homo sapien
ttttttttttgcagctgttgtaaaagaggttgagttcttgatttgattctcagcttagccgatgttggtatatagcaatgctactgatttgtgtacattaattttgtatcttgaaactttactgaatttatttgtcagatctaggggctttttgggtaagtctttagggttttctaggtatatgattatatcatcggcgaacagcaagtttgacttcctcttaatcaatttggatgcctttttttctttctcttgtctggttgctgtggctaggactagtcactactttaaaatgccaataattcagcaagggccataagttgtaaataggaacgggtaagtcagtgtatagtgaagaccactagagagattcaggtgatgtgccttgggaattcatgtggacgtggcattgattagattctggtcatcattgtaactaagctcatggaatctatatggaagttagtgaatatattctgtaagcttttactgtctaattttttcttcaagtgatgttagataaaaagtgaaactaggccaggcgtggtagctcatgcctgtaatcccaacactttgggaggcctaggagggaggatctcttgagcccaggagtttgagaccagcctaggtaacatagtaagaccctgtctctaaaaaaatttttttaaattagccaggcatggtggtgcacacctttagtcccagccactcaggaggctgaggcagtaggattacttgaacccagaagcctgagtttgcagtgagctatgatcacaccactgtactccagcctgggtgacagagcaagaccccctgccccttaaaaaaaaaaaaaaaaaagagagagagtttagcagtagactggatgacactgtggctaagtggcaaaataaacccaccttttaatatacaaatttgtgtgtgagtgtatgtgtgtgtgtacacatgtattttttaagttaatgtatgaacagtgttaaaatgattatgaaatatattcaaaaaagaaaatcaagatagcaactaaaagaaaagtaatggtaacatatgatcatgttgtaatgtaacagaataaataaactaccagactttctcaatgtattgatgtcctatagcctgtgcctcaatgcttgtctgtctttttaacgatccaatgatattgtacattctgttttctcatcttaattttccgttgacagtatatctgaaatttttaaattttattaaatacgtttccctacttagcatctgatagcttcttggtattctattacatgtatattttgtatttagcaaggcagtttgtgctcaacacagaaccaggcctaaacatttcctcctgtgatgtgttctctctcatgttttgaccaatttcaactgattctgatgccatagaagaggttctagtttgaggccaggcgcggtagcacatgcctgtaatctgactagtttgggaggccaaggcgggtgaatcacctgaggccaggagttcaagaccagccccgccaacatagtgaaaccccgtctctactaaaaatacaaaaaaaattagctaggtgtggtggtacgcacctgtagtcccagctacttgggtggctgagacaggagaatcgcttgaacctgggtggcagaggttgcagcgagccaagatctcaccactgcactccagcctgggcaacagagcgagtctccatctcagaaaaaaaaaaaaaaaaaaaaaaaaaaagaagcttctagtttgaacgataagtcctctctcagccttggaaggtgggaatgaaggcaagtgaatcttctcatggagaaactgagcagcctaatctcaagtctagatcagccttcccaaattggagccttgtccagaaaacctcttgctatcttgtctggatctggctttagtgagccattgacttactctaaaactacctttgtatagctgggtttcctggggtgtgagggagtgcttagattcattgtctgtttttccctaagttatatgttcagttgtgagggattaatttggaaggagaaatagaggagcagaaagattttattaaattaagtcatattgggaacactaacatctcttttcttctctcagctctggattctctggagtttgaatgtttccagtattggaaccccaccaagtaggactgatcaggtcttacaattctaaaaccatgacctgtgtaagttgattaattctgtttccttgcaatatcatgatcataggttatgtggatgttttcattaacctaaggcttcctatttaagaaggcctccttcagttatctgtc

SEQ ID NO: 21563 - DNA, 2300 bp, Homo sapien
gtactgggatgacaggcatgcaccatggcccgaggtctgttttaattttattaattggctgattcattcagacacataattatcaagtaaaatctcactatttccttagcatttcccttcaatttagcttagaaaatctattcctaagttaattttttaaaacatatacaattagccaggtgtggtggcacatgcctgtaatcccagctacttgggaggctgaggcaggagaagcacttgaacccgggaggcaggagaagcacttgaacccgggagacagagattgcagtgagccgagatcgcgccactgcactccagcctgggcaacagagcgagactccatctcaaaaaaaaaaaaaaaggttttctccagatcatttttacatttaattattcagtctgttttgactatacctttaagaattaagtaaatataactttacttctacacactattagtcaatgtacctaacacaatttattgaataaaccagtccattcacaacaacatcaaaagtacgtacatttcccaatgtaaattaatacagccatgatggaaaataatatggagattcatcagaaactaaaaatagaattactatatgttccagcaaccccaccggtgggtgtatagctaaaggaattgaaatcagcatgctgaagagataactgcactaccattcactgcagcattattctgcattggatacggaagcaacctaggtgtccagcatgttataagtggataaagaaaatgttacatattatatatattatgtatataaccttatacacatatatatatgtatatataaaggaatactattcactttttaagaagaggaaaatcggccgggcacagtggctcgcgcctgtaaatgcagcattttgtgaggccaaggtgggtggatcacctgaggtcaggagttcgagaccagccagatcaacatggtgaaaccctgtcactgctaaaaatacaaaaattagccgacgtggtggcgcatgcctataatcccagctacttgggaggctgagacacaagaatcgcttgaacaggggaggcagaggttgcagtgagctgagactgtgccactgcactccagcctgggtgacaagagcgaaactccgtttcaaaaaataataataagtaaatagatttttaaaaaataaataaaaaataaaaataaaacaaggaaaattctgtcatctgtgacaacatggataaaccaggaggacattatgctaagtgagagaagccagtaacagaaagataaataccaaataccacataagtggtatttgtggaatctaaaaaagtctaactcttaagaggcaaagaatggtgtttaccagagactgaaaaatggggaaaagggagatgttaattaaaacagtacaaaatttcagttagtcaggagaaataaactttgttaatcgattgcatagaatagcaactacataaataatgtgttgcatgtttcaaaattgctaaaagtagattttaaatgttttcaccacaaaaaagtgaggtgatggatttaattagcttgatttaatcatttcgcattgtaaacatagatcaaaacagcatattgtaccctatcagtatataaaacatacaattattatttgtccatttttaaaaagttacttttctcataccttataacaagactggacttcctcaggggacacagagcagagtccccgccctcgggagctcataaccgatcccccacgctcgccctcgcggccacactttgaaagccctcccctaccggctctacactcaaacagcccgaggcttcgggcagcctcgagttcggattccacttctcagccttctggggtcactgaaaccctcagaactccgaggacaagtcggacacgccttcgcctcagccatcttcgccagcgcaataagtctctgtgtcttcacactcctggtagagggaaaactaaaacctccgggagccagcgtccggcggtgcctgcaatctaaccgggatttggggttccgagccacttttcccacaagccaccgcggtcatggagctttaggcttaaactacatttcccagagggcaacgggaacacccaatctatggcttcccttccgttttcgcgtggttcttttgcaaggtgggttgaactcatttcagtatataacaggcacagagtactcgcagggagggctctgggcaatcaagttacgttggagcccaacctaaaccagccggggtggtggaggaagccctttaaccgtggaagcctctagtgtggacggccagttgttatcg

SEQ ID NO: 21564 - DNA, 2300 bp, Homo sapien
acgattgtgttaactgtacaaattgtaaaacgtgtgtttcaacaatatgaaatctgattgtaaaacatgagtgtttgaacaatatgaaatcagtgcaccctgaaaaagaacagaataacagtgattttcagggaacaagggagataaccataaggtctgactgcctgcagggtcaggcagaataaagccatatttttcttcttgcagggagcctataaatggacgtttgagtaggagaaatatcgctgaattcttttcccagcagggaatattaataactgataccctggggaaggaatgcattcctgggggtaggtctatagacggccactctgggaatgtctgtcttatgtggttgagataaggactgaaatatgccctggtctcctacagtaccctaaggcttactaggattgggaaattccagcctagtaaattctagtcagactggttgtctgctctcgaatcctgtttcctgttaagatgtttatcaagacaatgcgtgcatagtgggacacagaccctcatcagtaattctaattttgtccttgccttgtgatcttttattgccctttgaagcatgtgatctttgtgacttactccctgttcgtacatctgctccccttccagaatccctaatagaaacttgctggttttgcggctcaggggcatcacggaacctgccgatatgtgatgtcacccctagaggcctagctgtaaaatttctctctttgtactctttctctttatttctcacaccggctaacacttagggaaaatggaaaagaacctacgttgaaatattgggggctggttcccccgaaataaacgcatgttacatatatgtatatttggaattatatatggatataaatacatttgtatgtgtgtgtatatgtgcatatttttatataaaaataccttctctggaaggatatataccaaaataaaaatgttgactctaaggttagctactgtatgactggactatgtggaaggaaaggctgcttatctttttacttaaaccttttcatacctattgaactgttattctatgtatgtattacatatttaaaatacgtaataatgctgatgactaaaacataggcatcctttgatgagtatgtttcccatttgctcaatgtcctcatgaacataaatacatataaacacaaccttggttcctttttttttttttaagacaaggtctccctctgtcaccaaggttagagtggcactgcagcctcgacttcccaggctcaagccgtcctcccacctcagcctcctgagtagctgggaccacaggttcgaacctttttattttttgcagagtcagggtcttgctatgttgcccatgctggtggcgaactcccaggctcaagcaatcctcccacctccgcctcccaaagtgctggcattacaggcatgagccaccacgcctggctcaattcttctgacagcaccttctacccagattttgggcgtttggccacaatttatcttcactgtcttgggatctcatgaccaggcattaccaatgaaagatgtttctccagtctatgggctttaaaatgcagcaaagcccatccatgcaaaatacaaaaagtattacacaagcgtacagaattgtacattataaacctaccttcaggagtttataccaactcaagcgcgcgttgttactcggggtcacagcactgattctacagggcagtcatcacacacgtctgaggcctcagaagagcgtcgaagtcacctttcagcctaccccagccaggttccactcagactcgcctcctggggccctaagaacacaggaacaccgcccttgacctagcgtcagaaacgttccctcacgggttggccgctctgcgcatgcgcactcctagcccaggctgcaactccccgaagcctccgggactcggcggtgggcgtggcgggcggtcgccgtggtcaccacggcttttctcagaggttttaacgcccctagacttcatttcccgacagggactgcgggtctggatattccgtcgtggactacgtttcccactgacgacggagaaaacttggtcctttggctccgcgctgcgcgtgacctgcagtcacctgagcaagagggcggcgtgggtcgctgcgggagcccctacagccccagcccgcagcccacgtggcaccctacagggctgtgagagtggggctgctggaggcgttcagagcgcggaggccccaggcgcgggccgggctctctcccgcctcctcaggcccgggggtgctggagctgccgaggtgggggctcatct

SEQ ID NO: 21565 - DNA, 2300 bp, Homo sapien
tacttaaggacacaggaaatatttcagatatactgtcaatagaaaaatcaggttggccaatataatcattattataaaacatgactatcaatacagagaagcagacgattactgaaatcagtaaacaaaaacttggaaggttatatggccacctattaacactatttttctttttgtttgaccttgattttaatttttaaagccttgttcataattattccaataataacaataggttaacttgaaacacatgtgggcttttttagtttttgttgttgttgttgttgttaacaggaagatgttcccccaaaagaaagggacttgagacaatgtctttgttctctacatttacgttgttatactaaatgtcttatcttttgtttcctttggatcctattatctgaacttacttgatcatttcttctcaggtatgacagaattctgtcttgaaaaaatggggagtagtccctgagtaatcttttgaataaactgatggcggtcaccacacagctttatttcagatcttctggacaaaaaggcttattttgtttctaagcctgtcagataagtcatgtcccctcagacagcttctgaattattattattttgttttatttttatttttgagatggagtctcgatctgtcgccaggctggagtgcagtagcgggacctcggctcactgcaaactccacctcctgggttcaagcgattctcctgcctcagcctcccgagtagtcccagctactcggactgggcgcacgccaccacgcccagctaatttttgtatctttagtagagatggggtttcaccatgttggccaggatgggctcgatctcttgacctcgtgatccgcccgcctccacctcccaaagtcctgggattacaggtgtgagccaccacgcccggccgaattactttattctattataatactttcattttgcatctaacctaattagaaggaaactgtgagccacgaaagttacagcacaaaatctatttattgccatagattcaacaggattggtataatttgttcatatcctgttgtgatagacagactgaagtgtatttccagcgaattcacgaggtaggatcacacactgcctaacacatattaatcctattcagatattaccttcactgacagataataaacattttaaaggacgcaataatgtctttttagtaactgtattgtcccaaatactacaaattccagagtcaccacaatgtagaacatttatgatcttacccttcaaggctccacttgcaagtacactctgccgcaatccccaggagggaatcctatcctagagtctatctgttaccaggaccccatctcagggcaattcctgatccataattcccatcctaacagcaagtccgtaccttcttgctggaaactcaggtaggactcaatatctgatttcctggatgggaccatttctctgtggcagtcatacttgactgagaggaggacaaaggaaacagcagggaagggttgctgacgccacggagccacagcaacgcacgctttgcaaaggacacgcactgcacatccaggttacgcaaggtcgaccacgcacccctcacagtcccacagctgcacccacgtcacacaggcacgcccggccctgtcgccgctgcgcggtctctcacactccccacctgtctcccaaagatgagcccccacctcggcagctccagcacccccgggcctgaggaggcgggagagagcccggcccgcgcctggggcctccgcgctctgaacgcctccagcagccccactctcacagccctgtagggtgccacgtgggctgcgggctggggctgtaggggctcccgcagcgacccacgccgccctcttgctcaggtgactgcaggtcacgcgcagcgcggagccaaaggaccaagttttctccgtcgtcagtgggaaacgtagtccacgacggaatatccagacccgcagtccctgtcgggaaatgaagtctaggggcgttaaaacctctgagaaaagccgtggtgaccacggcgaccgcccgccacgcccaccgccgagtcccggaggcttcggggagttgcagcctgggctaggagtgcgcatgcgcagagcggccaacccgtgagggaacgtttctgacgctaggtcaagggcggtgttcctgtgttcttagggccccaggaggcgagtctgagtggaacctggctggggtaggctgaaaggtgacttcgacgctcttctgaggcctcagacgtgtgtgatgactgccctgtagaatcagtgctgtgacccc

SEQ ID NO: 21566 - DNA, 2300 bp, Homo sapien
gtgtgtgtgtgtgtgtgtgtgtgcgcgcgagcgtgtgtgcgttgtttgttttcaaggtgagggaattgctggagtcaagaactggacagagctcctgcttttggctgggcacgctggctcacacctgtaatcctagcactttgggaggccgaggcaggtggaccacttgaggtcaggagtttgagaccagcctggccaacatggtgaaaccacgtttctactaaaaatacaaaagttagctgggtgtggtggcacatgcctgtagtcccagctactcaggaggctgaggtggaaggatcacctgaacccgggaagcagaggttgcagtgagccgagatcgcaccactgcactccagcctgggctacagagcaagactccgtctaaacaaacaaacaaaaactggacagataaaagggggtggaatctagtgcctaattgctgaatggactttagataagaacatggttagttcatttgcggcaagagaggagaggcagtgtatatgagcagagatgcagataggtaggcatggtgctgggagtctgtagagaatctcatctgatagctttggttttctcagtgaagaagcacttattagcctagagggaggcaatgggagtgtgcggtcggtttgaaaagttgtgtttggcagtgagtggactaaaaacacaacaaaaccctaaacagtgtgtctgcgggggagcactaagaactacttgaggttcgtggttataacttgaaagcgggagcagggtggcagtgcacttttctccagccacatgcgggccagggtgcagcttggctacttagggagcggaagccaccgcctggcgcctgctgggaaggctccctcttcccacaggatctcctgagagctgcaatccacctgtcgcctccaccttttctctttgggaactttgagggggagggagagacgaaatacagggagctacagacggggcaaactgagagttgtatgttaggagccgtagttcccaacgccctgtatgttaggagccatagttccggtcacctccccaagtaccatctctgctcctatctacttgcaggcaacattggggaggtgaacaccatggagacttccaacacgaggcagatggggaactttagtattcctgtcaccaccctcatctgctatcaccagaggacgctggggaacaggttaaagggaaaggcgaaatccatggaacttggaagggatcttacctgaaaagtcagtttccccaacgtggggcacagctgcacggggaaaacccagtcttctggccgccactccccgtagagatggacgaaggcagcgcctggggggcgctacgccctggacgctggcggatgcagtccggtgtcgcggtccccgataggacttgcagtccgcacccgcacccggaaggacgacgtctcccgccccaaggggaatcccgcactaaggccgtaataggggcttgtcaccaccaccaccccgcctttattttttttttatttttattttgagacggagtctcgctctgtcgcccaggctggagtgtagtggcgctatctcgcctcactgcaacctccgcctcccgggttcaagcgattctcctgcctcagccgcccgagtaggtgggattacaggcgtccgccatcatgcctggctaatttttgtatttttggtagagacggggtttcgtcatgttggccaggctggtcttgaactcctgagtcaccaccctttaatgccgctctccccatcctgtccctcctgtgtgggtctccgaacgcccggctcaaggcactactcgtaattgtagagggggagagccgcgagacccacagaaaaagagagctgaagagcgcgtgaggcgtcaaagtaggaagcctgctgtggagcaggagctgccgggcgagcctcgcggaagctcctgggcggggaggtgggatgtgacggagggcgtggctccgcggatggtagagcccctcctttgcgcgcgcgccctagccccgccctggcttgcacgcatgcgcgttcggtgggttccgcgtgctttctcgccaaagtgcggcggctgcttttcccagcttcagctaggcggcaacaaggttctcatagcacaccgggctggcgcggaagggagccaatggtccggcttagacacctgcctctgctcctgcccaacgccctgagacaccaggttctatacacggagtccagggccgtgttttccgtgtgtgtgtgtgtgtgtgtgtgtgtgtgtgttatttttgagacagagtcgcctctgttgcccaggctggagtg

SEQ ID NO: 21567 - DNA, 2300 bp, Homo sapien
gaatcacttgaacccgggaggcggaggttgcagtgagccaagatcatgccactgtactccagcctgggcgacagatctagctagactttgtctcaaaataaataaataaataaataaaacttttatttttttaaagttaatgtgtgcattataggaaaccgaaaaacacaagaagcaaagaacaaaatcatccacaatggcaagcactttacagtttgacgtgtccttctaggccctatgtgtgtatagacacatttaattttatgggattgagatcattcagtgtgtatcatgctttttcacacatcatgaatatttatcaattcaaaatccccaagccatttgagtattttgataaccaagaatacactacaccagctcaatctgttagaaaaaatgtaatcctgtctttcttgggacaaaaatttcatagaagacaaaaatggcaacaagcctgtagatgaaagcattggcagagttcgattaaaatactgcattcccttaacgctcaatttaaatgaagttattttttgtaaagtcttcattgattgacaattcagttgtaaatttcttggttcacaattcttccccttcaatattttacttcctggtctgtttgcatccagggttgctacaaagaaatttgatgtcagtttgaaccttgttcctttgcagataatctgatctttctctctagaagcctctctctttcattccctctccttccctttctatatatctatatatccatgtatcagctttctcagcctatttgcatgcacgtgggccaaatatggctattccagcccaatattacacttcctcagttcaagcagccagcagggtttgaccagatgctctcagttttagttccaaattccttgaaaggagaagctgattggcttagcttggatctggtatacactctgggtctaattaaccatgaccaaaaggagggtcatggctgctaggctcactcctctgggggaagggacaaatcttatagaagagagaatggtgtggtattgatgattctgtcccttgttcagaggccagatttatacctggctcctgtgcttcctgtccagctactggtatgcagttgtactgagtgatggctcctctgaacatgggtttctgttccctggactcactaactctcacaactttcacttttactccacatcagccacccacaccctggaatgtattactcagaatgatttccctctgaaagtgtatgtatgtatgtatgtatttacttatttatttatttatttatttatttatttatttatttatttattgaggcaaggtctcactctgtcactcaggctggagtgcagtggcatgatcacagttcactgcagcctccaactcctgggctcaggtgatcctcccaccccagcctcctgagtagctgggaccacaaacatgtaccaccacgccaagctagttttgtattttttttttttttgtagagatgggttttgccatgttgcccaggctagtcttgaactcttggactcaagcaatccacctgcctcagcctcccaaagtgctgggattagaggtgtgaaccactgcacccaggcccctctgaaattttaaattcaagcttcccacttcaaaaaatttttttgaaacagtttgtttcccaggctggagtacggtggcacaatcactgctcactgcggcctggacctccgggctcaggcagtcttgcctcagcttcccaaatagctgggactacaggcacgtgccaccacgccccgctaatgtttgtatttttggtagagatggagctttgctgtggcccaagctgatactgaacgcctgggctcaagcaatctgcctgccccggcctcccaaagtgctgcaagcttgtggggaaaagcaagagagatcagattgttactgtgtctgtgtagaaagaagtagacataggagactccattttgttatgtactaagaaaaattcttctgccttgagattctgttaatctatgaccttacccccaaccccgtgctctctgaaacatgtgctgtgtcaactcagagttgaatggattaagggcggtgcaggatgtgctttgttaaacagatgcttgaaggcagcatgctccttaagagtcatcaccactccctaatctcaagtacccagggacacaaaaactgcggaaggccgcagggacctctgcctaggaaagccaggtattgtccaaggtttctccccatgtgatagtctgaaatatggcctcgtgggaagggaaagacctgaccatcccccagcccgacac

SEQ ID NO: 21568 - DNA, 2300 bp, Homo sapien
ttgaaccagggagtcagaggttgcagggagccgaggtggcgccactgcactccagcctggcgacagagtgggactccgtctccaaaaaaaaaaaaaaaaaaagtagaactgaagcaatgaaaacatttttccattaacctaacttggaataatattttggatatatttgggttaaataaaatattaaaattaatttcatagctgggtgagatggctcacgcctataatcccagcactttgcgaggctgaggtaggaacatgtcttgaggccaggagttcaataccagcctgggcaacatagcaagaaaaaaaaaagtaaataataatgataaataaaatgaattttacctgtttatgtcaaaattaaaattgcatatgtggcttgcattacacataaaaacacacacatatataattttttttttttttaaagagacagggttctgctttgtcgcccaagctggagggcagtggtgcaatcatggttcactgcagtctcaaactcctgggcttaagcgatactcagcctcttaaatagctgggactatggccacatgccaccacgcctagctagttttttagttttagtagagatagggtcttgctatgttacccggccagtctccaactcctggccttaagtgatcctcctgcctcggtggctcaaagtgcagggtatatttctcttagctagtattgctctacattgttgtagtctggtggtggcctgatatccctactggactgaaaactccctgaaggtaggagtccagtctgtctggatttctcttgtgtctccataatcacccaacctgacatggaataggtggttaatccatttttgttgaatgagtggaaaaatgtgctctcccaggaagaaacatatgcttcccagcttcaagtgttagtgaacatcttcctagaaggcaggctgaggcggaaagggtattgactccggcttctccaccagaggaccttgcaattccagtcaattccctcggtaactcttatggaggagtggcaatataccttaaaaaaggagtgtgtgttgcggggtattccgctgcttggttatgtcaccaggtggattaaatttggacaaaatttcccaaggtgtaggtactctacaaacactagttaccctcaggaatgtgcgatcaacaaaagaatgcaagataacaaggcccctaggcagcccctgggtcttgtggctcccgtcgaaggcagagctctggagccgcctacgccggggacaggcgactacacctggggcccctcaccctcgggcctcctgcacgtggcagggaaggcagggcgtctctatctcaaagcattggctgcgcctgttacctgcgacaggattcccgacaagggacgggtacggcgtgtgcactcaggagctcctagagctaggggcagcaactaagaagctacctggcggatgttgcgagaggactccgcccacagaacggttggcccccaaccccgcagccggcggacttcccgaggccaggggtctgaacgcgcgtgcgcatgggcgcgcgcccggcgcgagaacgcgcgcgcgctctcgaaagaaaaaaaaaaaaaatcctctccgcggggtcccgcggcaatttaggccggggtctgccgacgaccgcgcgtgcgcgggcgtgcatctacgccctcctccaccgccccctccgctgggggtctagcgcactgctccgcttcccccgtttcccccgggctagcgtcctaggggtaagtgactcgagcctggcagagagtgagggagaggttccgccgaatgaagggaggaggtagacggggccaggagaaaggagaaaccgccccggcggggcgaagagcgcggctctcgagctgtagtctgcaggagacacacctccctccctcacgcccctcggggctgcggaagtgctctacagactggagctgcacgaaggcgaccagcggactaccgttcctaggaggcagcgcggcggtgcgcctacggctcccggcagcccccgcgcgccattctctttttgagttcgcggccggctagggcgaaactacagttcccaggaggactcgcgcgaagcggcttggaagtgggcagcctggaagtcactcgggccaccggagctggcggcgtctccagcgagcggcgcggagctggacgccgcgatcgtggggcccgcgaggcgggcagccggggcgtccaggtacgtggctccgggtgcaggatcggcctcgcgcaagggtggcggggaatcggtggctgcccggaccccgagggtcagcgcgggcggacg

SEQ ID NO: 21569 - DNA, 2300 bp, Homo sapien
acccatttcttcttaggcctttctactatagtgtgttccataatttaatctttggtaagtaaaatttgggagggagggggaagataaaaaaacactaactttgtgctcactctgccatgtaggtacaaacagaagcaaaaagggcctattaaaaaaaaaaacagcaagatacatttaatcatttaataagcacttactgtgtgccgggccttgtgcaaagcactaaacatgaattatctcctggaaccatccaaacaatcctggcacaaaagtcctatgactaccattccacagatgggacactgaggatgggagcaaatgtgtgggggagctcagggctgtcatgtcacagcccacagtcaggcagtctctgggccagatggagaatattgaagaacaattataatacataagagctgctacttagtgagagatggcgctggactagaaatacaatctcagcaaatccttacaaccctttgagagtgatcttgttattatcccattttgtaaatgaggaacctgaggtagtaggaagggaagtcaactggaccagttctgaatctggccctcgggggtgaccaatactacggccagagccccaccctcagagggtctctgggccactaggaaaacgctgaataaatggtaccatttactgagcgttatatgccagctgctgtgctaagcactttacacatggtattctcactgcatcctgaaaacaactcgacgaagtggttgctatttaaatccccattttatagatagggaaaccaaggcacagagaggtgaagccagttgcccaaagtcacacagctggtaaatgttcaaatttgaacctggggtctctctgccttccaaaccaacgctcttaacaaaataatctcggttaacagcagctagcctgcattgggtgctaactaaggactcacctctttacatgcacacgctcaactaatcctcaccctatgcaatcgataacatcttcacctcatttttcggagagctaacaataacccaaatacgtagtaagtgcctcctatgtgccaaatgttttattatattatctcaacagagtctccgccaagatgctctcctactccgttttactgcaggggaaattgaggttcggcgcggttttcccagatcgcggctcccgagtggcacagccgggacgcgaatccaccgctccccgcctccaagctcttcaccacagcgccggggtgcacgcctggaaagttgagccatgcgggcacgagtccggctgggtccggagggcgcgagtcccggcgccgccgccccccacggccagtacccacacccggccgtccgcccgcgctgaccctcggggtccgggcagccaccgattccccgccacccttgcgcgaggccgatcctgcacccggagccacgtacctggacgccccggctgcccgcctcgcgggccccacgatcgcggcgtccagctccgcgccgctcgctggagacgccgccagctccggtggcccgagtgacttccaggctgcccacttccaagccgcttcgcgcgagtcctcctgggaactgtagtttcgccctagccggccgcgaactcaaaaagagaatggcgcgcgggggctgccgggagccgtaggcgcaccgccgcgctgcctcctaggaacggtagtccgctggtcgccttcgtgcagctccagtctgtagagcacttccgcagccccgaggggcgtgagggagggaggtgtgtctcctgcagactacagctcgagagccgcgctcttcgccccgccggggcggtttctcctttctcctggccccgtctacctcctcccttcattcggcggaacctctccctcactctctgccaggctcgagtcacttacccctaggacgctagcccgggggaaacgggggaagcggagcagtgcgctagacccccagcggagggggcggtggaggagggcgtagatgcacgcccgcgcacgcgcggtcgtcggcagaccccggcctaaattgccgcgggaccccgcggagaggattttttttttttttctttcgagagcgcgcgcgcgttctcgcgccgggcgcgcgcccatgcgcacgcgcgttcagacccctggcctcgggaagtccgccggctgcggggttgggggccaaccgttctgtgggcggagtcctctcgcaacatccgccaggtagcttcttagttgctgcccctagctctaggagctcctgagtgcacacgccgtacccgtcccttgtcgggaatcctgtcgcaggtaacaggcgcagccaatgct

SEQ ID NO: 21570 - DNA, 2300 bp, Homo sapien
atgcctgtaatcccagcactttgggaggctgaggcgggcggggattgcctgaggccaggagtttgagaccagtttggccaatatgacaaaaccccgtctctactaaaaataagaaaaattagccgggcatggtagcacatgctggaattccagctacttgggaggctgaggcaggagaatcattcgaaccttcgaggtggatgttgcaatgagccaagcacatgccactgcactccagcctgggtgacagagcgagactctgtctcaaaaaaaaaaaaaaatgatgtctggggtttactctaaaacattctatcagaaacaaagaaggtcacaaggctgggtgaatagatgaaatgggaatggaaaatagttagtggttgttggagctgatgggtgactcagtctcctctctgcttttgagtatgtttgcaaatttccataataaaaagattttttaaatgagtaaggctgtcaagaaaagtcacatgtcccactttctgggagcagtaacacggccatcgcagctcatattttccttttcttccatttcagcatggcgaggacaacatccttgctgcctccagctggcgggcgaccacagctactgcctgctctgcgctactgagccactcggtctggagcccccaggacagcacctgcttcctgaggttgtcctggctcagctgtgcacagcgatggtggagaactggactccacaggctcacaaccttcctgtcaggtttcagggcccagcatccttcatcctgggcctggctgccctgaacaatggctgagggctgggggaccccatagagtgacaccacagcgtacggggccagcagcactccagtgcccgtggactatgaccacctatcgggccatccccagcgatggtgtggacctggcagccagctgtggcgccagggtgggcgatgtcctccctgggccacacacaggggactacgctcccttgggattctgggcccagaatggcagcatgtcccagcctcttggcgagagcccggccaccgccaccgccaccgccaccgccaccacccgccccagccccaccactcccgcaatgcccaagatgggcgtgcgcgcaagggtggccgactggccgcccaagcgggaggccctgagagagcacagcaacccaagcccctcccaggacacagatggcacaaaggccaccaagatggcccattccatgaggagcatacagaacggacagccccccaccagcaccccggcttcctcagggtccaaagccttccaccgactctccaggagaaggtccaaagacgtggagttccaggacgggtggccccggtcccccggcagggccttcctcccccttcggcaccgcagcagcagcgagatcaccctcagcgagtgtgacgcggaggacgcgggggagccgcggggggcccggcacacgggggcgctgcccctcttccgcgagtacgggagcacctcgtccatcgacgtgcagggcatgcccgagcagagcttcttcgacatcctgaacgagttccgcagcgagcagcccgacgcccgagggtgccaggccctcaccgagctcctccgggcagatcctggcccacacctcatggggggcggcggcggagccaagggggactcccacaacgggcagcccgccaaggacagcctcctgccactgcagcccacgaaggagaaggagaaggcccggaagaaacctgcgcggggcctcggcggcggggacacggtggactcgtccatctttcggaagctaaggagcagcaaacccgagggggaggctgggcgttccccgggggaggccgacgagggccggagccccccggaagccagcaggccgtgggtgtgtcagaagagcttcgcccacttcgacgtgcagagcatgctgttcgacctcaacgaggcggccgccaacagggtgtcggtgtcgcagcggcggaacaccaccacgggtgcttcggccgcttccgccgcctcggccatggcctccctcacggcctcgcgggcccacagcctcggaggcctggacccggccttcaccagcacagaggacctaaactgcaaggagaacttggagcaggacctcggcgatgacaacagcaacgacctgctgctcagctgcccgcacttccgcaatgagatcgggggcgagtgtgagcgcaacgtgagcttctcccgggcttccgtgggctccccgagcagcggcgagggccacctggcagagcccgccctgagcgcctaccgcaccaacgccagcatctcggtgttggaagttccca

SEQ ID NO: 21571 - DNA, 2300 bp, Homo sapien
ggggagttgaaccttgaacccgcaacttccgcctagcaggttcaagcgattctgcctcagccttccgagtagctgggattacaggcatgcgccaccatgcccggctgattttgtatttttagtagaaacggggtttcaccatgttggtcaggctggtctggaactcctgacctcaggtgatctggccacctcggcctcccaaagtgctgggattacaggtgtgagccaccgcgcctggcctgttgttttttaaatagaggcagggtgttactatgttgcccagtctggtcttgaactcctgagctcaagggatcctcctgtctcagccctccaaagtgcagggattataggcgtgaaccaccatgccccaccaagggtcccagtggtattggagggcatagtgatatctgttaggtgtgtgtgggtgtatggagttgctgactgtgtcccttcccctgggaactgggatggatcagtctgcctgtattttttttttttttgagatggagtctggctctgtcacccaggctggagtacagtggcgcaatctcagctcactgcaacctccgcctagtgggttcaagcgattctcctgtctcagcctcctgagtagctgggattacagatgcacactgacatgcccggctaatttttttgtatttttagtagagacagggtttcaccatgttggccaggctggtctcgaactcctgacctcaggtgatccacctgccttggcctcccagagtgctgggattacaggcttgagtcaccatgcccggccatctgcctgtatttttttctgtgggtgcctgagggtgtctgcctctgtatctccccaagggcgtctggatgtctcagtgtctggttggagctctttcctctcttaggtgtatcttcccaggtgtctccaagtgtcttagaaggcttgtgtcttgtgtatgtctggtctgtcagggtgtccggctcctcccgagtgtgtctgggtgtgttaggcggtgcggccgtctctttctgtgggtgtgtgggtgcctcggagtgtctgggagaatcttcctgatggtgtctggcgtatcaggtgtatttctgcacgtgtgtgccagtccatcagaggatctggacttacccttgaatgtgtttaggaatatcgggatcctcggggtcagtttctcttcctgagtccgagggtctgtgtgtacccaggagcgtggcagtgcccacctggctgtgtctcttcctgtctgtctcctgtgtgtgtttgtgtgtatctagctgagtgattctccctgagtatgtcggtatctccccgctatgtgtccaagcatctcatctggctgtgtcttccccagggtctaggtgtatctggagggctaattgtttctttctttttttcttttttctttttctttttcttttttttttttgagacggagtcttgctctgtcgcccaggctggagtgcagtggcgcgatctcactgcaagctccgcctcctgggttcacgccattctcctgcctcagcctcccgagtagctgggactacaggcgcctgccactacgcccagctaattttttgtatttttagtagagacggggtttcaccgtgttagccaggatggtctcgatctcctgacctcatgatctgcccgcctcggcctcccaaagtgctgggattacaggcgtgagccaccgcacccggcctctttctttctttctctttctttctttctttctctttctttctctctctctctttttcttttctttccttccttcctttctttctttctttccttccttctttctttctttctctctctttctttttcttttctttccctccttccttccttcttcctttctttttttttttcacccagtttggagtgcagtggcacgatctcggctcactgcaacctccgcatcccgggttcaagtgattctctgcctcaacctcctgagtagctgggattacaggcatgtgcccctacacccggctaatttttgtatttttttttttttaagtagagatgaggttttaccatgttggccaggctggtctcaaactcctgacctcaagtgatccacccgcctcagcctcctaaagtgttgggattacaggtgtgagccaacgcgcctggccagctaattgtctctgagcatttctgagtgtacccatgggtccagctatgtctcctccctgtgtctgggtgtctccaaggatctggctatacctctttgagtctctaggctgtatctgagagtgtggcttatgcctgtaattccagcactttggaaggc

SEQ ID NO: 21572 - DNA, 2300 bp, Homo sapien
acaggggtctggatatgttgcccaggttggtctcaaactcctgggctcaagcagtgctctcatctaggcctcccgaagtactgggattgcagactggagccatcgcacctggccgcattattctttctttcttattatttatttatttatttttgagagggagtctcactcttgttgcccaggctggagtgcaatggcacgatctcagctcactgcaacctccacctcctgagttcaagtgattctcctgcctcagcctcctgagtgggggagtataagcatgcgccaccatgcccggctaattttgtatttttagtagagactactaccatgttggccaggctggtctcgaactcccatcctcaggtgatccacctgcctgggcctcccaaagtgccgggattacaggtgtgagccactgcgcctggcctgccagtcacctcttaaaatgctttacctatatttactcatttaatcctcacaacactccagtgaggcatcatcctctttttacagatgaggaaactgaggcccagaaaggttaagtcatttgccaaggtcacatggccaccaagtggcagagctaggatttgaaccctggaggtgtgactactgtttctaacctgcactgctgctgtcaggcctgcagaaggcgttgagcagggcggggtgaccgtgagcgtggctgctgggagagacagccccgggtggggtctctggagccaggagggacttgggtggggggcggtgagggggtgtctgctggaagcatgttggtgagaagtctgtgtgggcacctgggaggtgtctctgcgtctcttagtattgcagtgtgtgtgcgtgtggctgtgtgagtccgtgcgaaggtgtgtgagtaggagtgtgtgggaggctgtgagtatccgcgtgaatgtgtgtgtaaactgccatgcgtgggcgtgtgcgagtccaggtgtgcatgtggttgtgtgcacgcgagagcaggatatgtggacgagtgagggcgggtgagtgacggtgcgtgccccgggcccctcctccgcgccgtcccgtccccgcggggtcccgggggccccctggcctgggactaccactcccagcatggcccgggcgggcccgccccgtcgccgcgattggccgtggccctcgtgctcccgccccccgggaatgaatggatgggcggcctcagcgcccgcccgaccgctgggaggaccgacccggcggggacctgctgggggcaggacccggggagcaagatggccactgtcatccctggccccctgaggtggtgcgggccggcgggaggcggagaggaagcgcgggcgggtctacgcgggcctgtgtgtgtgtggcgaccgggggtggggccgaaggggtgtctggggggctgtcaccgagtgcggggctgcgcgggggtgcgagagtgtgtgactgtgggtctctgacaagaatggtgtcggatgcaccgctccctggcggggtggagggcgtggggggcctccagattctttttggggaagggagacatcatcccttccctgcaaccctcgggtctgggagagactgaaatgacccgggggtgcgggggccttggcaactggagtgaagtccacactacctttgtcttgggatgtggagtgtgtgtgtgtatcacttatttgtgttctggtttttttaagaatttttgggggataggtgtgtggacatgtgtctgtttccttttattctgcactagatatctttggatatttgggtctcccagtgtgtgtccgtgtcctttggaactatatgtcatttgtcttgtgttctgtgtttttgggtatgtagggctgcgtgtatttgtgtgtaaatttttgtgtgactatgggtggatttggctgtttctgtgttttatatgtgtgtgtgtctgtgtggatgtgtgatattttagatactggttgcgcatcgtgcatctttgtaaatgtgtgtgtgtacctgtgtgaatctgtgtgatttctttgtgttgtgtgtctggatattgtgtgtgtggtttgtgttgtgtctttggatacatgggtaagtgcctaggggcgcaagtggtttctgtagttcctgtcttttgacatgcttgtgtctttggatgcatgagggggtgtatgtgtgtgtggtgtgatgtttccatgttgtgtgtctttgtgtgggtgatgtgtttctggtgtgtgtctgtggatatgtgatgtgtctttgtgcatggttatttgtgtgatttgtctccacactatggaacttgggatatttgtctttttcagtagatatttatg

SEQ ID NO: 21573 - DNA, 2300 bp, Homo sapien
ggaggggggacggggtggtggtgttgcagagagactgggtcagtttgtgactcagtgggtctgctcactccctggggatctcttcgggtggagtcagtgtgggtgacagtgggagagagaaggaggtcaggactacttggggagggccgtcaggggtgcctgcctccttccttcagtcttaccttcaaagagccgccagggcatgcgggcatgtgaggttaccttcctgtgcctcagattcctcacctggaaaatgcagataataaaagcatcccggggtgaactgtgcccagcacatgatgggtgcatttactcattcaacaaatatctactgagcatctatttttttttttttttttggagacagggtcttgctcagttgtccaggctggagtgtagtggtgtgatcatagctcactgcagcttcgatctcctgggttcaaccaatcctcctgactcagcctcctgagtagctgggaccataggcatgtgccaccatgcccagctatttattttttttttagtagagaccaggtctcgctatgttgcccaggctgttctcctgagctcaagcggtcctctcatctcagcctcccagattgctgggattacaggcatgagtcacggcgccctgcttacttagttttttgtttgtttgtttgtttgtttgtttgcttttagagacagagtctcgctctgccacccaggctggagtgcagtggtgagaccacagctcactgcagcctcagcctcccaggttcaagctatcctcccactttagccttgcaagtagctgggactacactgctgcgccatcatgcccagctaattttaatttttttttgtagacacaggggtctggatatgttgcccaggttggtctcaaactcctgggctcaagcagtgctctcatctaggcctcccgaagtactgggattgcagactggagccatcgcacctggccgcattattctttctttcttattatttatttatttatttttgagagggagtctcactcttgttgcccaggctggagtgcaatggcacgatctcagctcactgcaacctccacctcctgagttcaagtgattctcctgcctcagcctcctgagtgggggagtataagcatgcgccaccatgcccggctaattttgtatttttagtagagactactaccatgttggccaggctggtctcgaactcccatcctcaggtgatccacctgcctgggcctcccaaagtgccgggattacaggtgtgagccactgcgcctggcctgccagtcacctcttaaaatgctttacctatatttactcatttaatcctcacaacactccagtgaggcatcatcctctttttacagatgaggaaactgaggcccagaaaggttaagtcatttgccaaggtcacatggccaccaagtggcagagctaggatttgaaccctggaggtgtgactactgtttctaacctgcactgctgctgtcaggcctgcagaaggcgttgagcagggcggggtgaccgtgagcgtggctgctgggagagacagccccgggtggggtctctggagccaggagggacttgggtggggggcggtgagggggtgtctgctggaagcatgttggtgagaagtctgtgtgggcacctgggaggtgtctctgcgtctcttagtattgcagtgtgtgtgcgtgtggctgtgtgagtccgtgcgaaggtgtgtgagtaggagtgtgtgggaggctgtgagtatccgcgtgaatgtgtgtgtaaactgccatgcgtgggcgtgtgcgagtccaggtgtgcatgtggttgtgtgcacgcgagagcaggatatgtggacgagtgagggcgggtgagtgacggtgcgtgccccgggcccctcctccgcgccgtcccgtccccgcggggtcccgggggccccctggcctgggactaccactcccagcatggcccgggcgggcccgccccgtcgccgcgattggccgtggccctcgtgctcccgccccccgggaatgaatggatgggcggcctcagcgcccgcccgaccgctgggaggaccgacccggcggggacctgctgggggcaggacccggggagcaagatggccactgtcatccctggccccctgaggtggtgcgggccggcgggaggcggagaggaagcgcgggcgggtctacgcgggcctgtgtgtgtgtggcgaccgggggtggggccgaaggggtgtctggggggctgtcaccgagtgcggggctgcgcgggggtgcgagagtgtgtgactgtgggtctctgacaaga

SEQ ID NO: 21574 - DNA, 2300 bp, Homo sapien
gtctctcaggttcaagcgattctcctgcctcagccttccgagtagctgggattacaggcatgcaccaccacagctggctaatttttgtatttttagtagagatggggtttcaccatgttggccaggctggtctcaaactcctgacctcaagtgatccacccaccttggcctcccaaagtgttgggattacaggcatgagccactgtgctcagcacagagatatgcttcagatagcctgctctggctgtgtggggagagcagacttgaggggcaggagcccagtgatgaagctgctaccatagtccaggcagcagacaatgatggacaggactggggtgcaggccatgaagtgcagagagtgggtggaatctggatatgttttgaatgtagagacaacagaatttgccgatgggcttggagtgtgtgtgcgaaaaagaagaggagaaggagagttcaggatgattgattgcacttagaacaaaatccattttctttataatgacctacaaggtactacatgagccgggtccttgctctctccccaggctgtctccccctgctcactctgctccagtcacactcaattgcttcctgatctttgaacatgccacacttgttcccagcccagggcatttgcacttggtgatcctgtgcctagacatgcttcttagtgcatgctggcaacttctagaccttagctcaaatgtcatctcttcagagaagccacttcttcactccttcaaatcaatctgttttctttttttaaaattatcttttatttgcttcttttttctttctggaatctgtgttctgctgaatctattttattttcttcttttctttctttttctttctttctcttgcttgcttgcttgctttcttgcttttgacggagactctctctgttgtccaggctggagctcactactgcctccaactttcaggctcaagtgatcttcttgcctcagcctcctgagtagctgagactccagacatgcatcaccacacccagataatttttaaactttttgcagagatgggatctcactatgttgcccaggctggtcttgtgctatggggctcaagcaatcctcctgcctcaggctcccaaagtgctgggattataggtgtgtgcctggactcttctctttttctttttctttctttctctctctctctctctcttttttttttttttttttttgagacagggtctcgctctgtcacccaggctggaatgcagtggtacaatctcggctcactgcaatctctgcctcccaggctcaagtgatcctcccacctcagcttcctgagtagctgggactacaggcatgcaccaccacacccagctaattttttgtattttgggtagagacggggtttcgccatgttgcccatattggtcttgaactcctaagctcagatgatccacctgccttggcctcccaaagtgatgggattacaggcctcccaaagtgatgagcaaccacgactggccccattttcttttctttatagcacctttcactgtctgaaatgattttatctatttattttcttattatctgtctttctccactagaatgtcagctccttgagagcggcaactttgttttggtcattgctgtatccccagtgcctagaagagttcctggaacacagcaggcactcagtaaatgaacaaaggcactgattaacccctgtgcttgttcacaggctgtccgacatagaagagacacccaaataggcctagacaagaatacacgacagaccctagggtcatccacataccctggggacatctagaagctagggaccacctgcttccgcgcccgcggtgcctggagggtggagatcccgagttggagaccgagcactcccagggagggaggaaagatgctctggggggagccccgcccctccctgtatccccagcagccaatgggagcgcggtcctcctgacgccccctgggacgtgtagtccgggcaggggcgccctcgggcgccgccgcgcgcccctagactccacgtcccgtcgtgcgctgggaggcgcggggattggctgagccccgcccccggcccgccccgctccgctcgcgccgcagccccaagaatgaatgaaatcgtagcgcgctgggcggcagagcgggcggcgcaggccgggctgggcccgcgcgcggcggcagcggcgccccgggccggaggcggcccagccgagcgggccatggccaccgccattcagaacccgctcaagtcgtgagtgtccctgccgtccccgccccctgtccagacccccccac

SEQ ID NO: 21575 - DNA, 2300 bp, Homo sapien
aaaaaaacacagtcttattgagatataactcacataccatacaactcaccctttatttatttagagatggagtttcacttttgttgcccaggatggagtgcaatggcatgatctcagctcactgcaacatccccctcccaggttcaagcgattctcctgcctcagcctcctgagtagttgggattataggcatgtgcccccatgcccagctaatttttgtatttttagtggagatggggtttcaccatgttggccaggctggtctctaactcttgacctccgatgatccatccgccttgccctcccaaagtgctgggattacaggcgtgagtcactgtgcctggcccaactcacctttttaaagtgtatagtttggccaggtgtggtggctcgtcccagcaccttatgagtttcatgactgcaatttttttcctcccattccatgggttgtctcttcactttcttgatgatgttctttgaaactcaaaagttttacattatggctggctggtggagtgaggtggctcatgcctataatcccagcaccttgggaggccgaggtgggaggatcgcttgagcccaggaattggagaacagcctaggcaacatagggagaccctgtctctacaatttttttttttttttttgagatggagtcttgctctgtcacccaggctggagtgcagtggtgcgatcttggctcaccgcaatctctgcctcctgggttcaagcaattttcctgcctcagcctccccagtagctgcaattacaggtgcacaccactacgcctggcttttttttttttttttttgtatttttagtaaagatggggtttcatcatgttggcctggctggtcttgaattccagacctcgtgatctgcccacctcggcctctcaaagtgctgggattacaggcatgagccaccatgcctggcctttttaaaaaaattatttattattattttatttatttatttattttgagacagagtctcgctcttgttgcccaggctggagtgcaatggtgctatcttggctcactgcaacctccacctcccgggttcaagcgattctcctgcctcagccttccgagtagctgggattacaggcatgtgccaccaggcccagctaatttttgtatttttagtagagatggagtttcaccatgttggccaggctggtcttgaactcctgacctcgtgatccaccctccttggcctcccaaagttctgggattacaggagtgagccactgcgcccagccacatttaaattttagagtataattattgctgcttataattagaagtgagaagactgttttgaagtaagggacttccctggccaccctcgctaaaattgcaaccttaccctcactccatttctccttctctgctttatatttctccaaagcacttatatgataataaactgtataataccgtacttactgtgtttctcatgtatcccggctacaactgtcaactgcgtgggactggttttgtctgttttgttccctgctctatccctggagcgtaaagcagtgtctggtatagagtggatacttaatagatattcgttgaaccgggccagtggcggtggctcacgcctgtaatcccagcactttgggaggcggaggcaggcagatcacttgaggtcaggagttcgaggccagcctggccaacatggcgaaatcccgtctctactaaaaatacaaaaattagccgggtgttgtggtgcatccctgtaatcccagctacttcggaggctgaggcaggagaatcgcttgaacctgggaggcggacgttgcggtgagccgagatcgcgccattgtactccagcctgggcgacaaagagagacatcgactcaaaaaaaaaaaaattcgttgaacggaatgagtgaacaaacaaatggatggatgagtgaatgaatgaacgaaggaacaagtgaccgctcgaccttctacagcgacagcggcgcaggcgctcccgcaccaacagccccccaccccgccaccgccagagggcgcagacaggccgggtcccgagtgtctgtcccaggcccccgccccacaggatcccggcccgggagcccccgatgcagggacccgcccgggactctgggtccccgcccatacctcaacttcgcacgactgcgtgcctcaagccgacgcagcggcctactctcgcactgcagacggggaaactgaggcctgaggcggccggggtggggcagacctcccggcgagcccgagcccccgcccccggctagccccgccctggcccgtaagaagcacccg

SEQ ID NO: 21576 - DNA, 2300 bp, Homo sapien
gtcttgatctgctgacctcgtgatccacccgccttggcctcccaaagtgctgggattacaggcatgagccactgcgctcagccctccttttgagtttttgtgtttaaagttcaaaactggacagatgcagtggctcacgcctgtaatcccagcactttgggaggtcaaggtgggcggatcgtgaggtcagaagttcgagaccagcctggccaacatggtgaaactccatctctacaaaaaatacaaaaattagctgggcgtggtggcgggtggtgcctgtaatcccagctactcaggaggctgaggcaggagaattgcttgaatccaggaggtggaggttgcagtgagctgagatcacagcattgcactccagcctgggcaacaggtgaaactctgtctcaaaataaaataaaataaagaaagaagaggcctataccttcttccaagccttgacggctcagcacatacttctctgttttcatgctcaagcctaggtttagtaggcctgagtggcagtgggagattcaagtgctgggggagacctttggcctcacattcagattccaccttgagtcccatgatctcattgcaaggttagacttccattgtttaaggtaaataccattttgataactcagttacggcttttcatgtattattatgctaggagggaggctgaagagtgggagtggccctggctcctgaacacactattctctttcctgcctgaaggcctccgcatgtgccattcctgattcttggaatgtttgtcccttggcctttatcatccttcagagttcattatcaaagccacccctcacaaagcccttcctccgccaccccattcaaaagatctcttgttattttccatcccagcccctgattccttttctgtatagcactgtcaaagtgttttcaggccaggtgtggtggttcacgcctgtaatacaacacttttggaaggatgagacaggaggatcccttgaagccaggagtttgagaccagcctgggcaacatagcaagtcccctgtctccacaaaaaatttaaaaattagctggatgtggtggctcacatctgtagtcccagctacttgggaggctgaggtgggaggatcccttgagcccaggaggtcaaggctgcagtgagccaagatcactccattgcactccagcctgggcaacaagagcaaaacttccatctcaaaaaaaaaaaaaaaaagaaataatctaaaagtgttttcaataataatgcatttatgttgattaccttgttggctatcctctactcgtgtgcctgccccactccattcccctttctagagtctgttcacgtaactcctcttccaggaagccctctttgactcccaggcttggtcaggtgtcttctctgggtttccccaggggcttccttcctctcaattctgatgctgcctgtgctaagtatttgtctccatatctgtcctgagaaccttggagccagggctcggggctgtttttgcatgggcctatcacctcctccaggaagccctccttggccctctctcaggctggatgggaaagctgtctgggctcccatcatgccctggttttctagcgacccagcctctgatccctaagcttggccttccccatcacagctttcatcactttgtgctaagcttccgctatcactactctgggccgttcctgtttggtgactcagggaccagtctggcatggccaccgctgggtccccagcattaagccctggagcatgagcccagtgaactttgaaattcaggaaggaattcacaggaaagctgcggcgaggcgggcagaaaaccacaggcttccaagaaacgcgtgtctgccgccccctcctcccaccctgaggccagtcctagagcgaaggccctcctccgacgtcgtcaccaagcccaagggaagggtggcaggtgctcagcgggcagacgccccgccccgccccgccaggttctgttgggggcgaggcccgcgcaagccccgcctcttccccggcaccaggggcgggcccaggtgcgcccagggccggggagcggccgcgcaggtgcctgccctttgcgcctgcgcccagctcgccctgcctagccaggtgcgccccgccccctgcctgcccggccaccttcgggagccgcttccaataggcgttcgccattggctctggcgacctccgcgcgttgggaggtgtagcgcggctctgaacgcgctgagggccgttgagtgtcgcaggcggcgagggcgcgagtgaggagcagacccaggcatcgcgcgccgagaaggc

SEQ ID NO: 21577 - DNA, 2300 bp, Homo sapien
cgcataggcaagtctctagtccagttgccagaagactgcttgatgaagagagaggcagaacgcggggagctggtttgcaaggtgaccgtttaatagcatcaggctaggccaggcccgaggatgcggaggagccagggttccctccatcttggacgaggtgtgggagataagcgctgtgtaaaatgtatcatgtgggccgggtgcggcggctcacgcctgtaatccagcactttgggaggccgaggtgggcagaccaagaggtcaggagatcgagaccatcctggctaacacggtgaaactccgtctctactcaaaatacaaaaaaaaattagccgggcctggtggcgggcgcctgtggtcccagctactccagaggctgaggcaggagaatggtgtgaacccgggaggtggagcttgcagtgagctgagatcgcgccagagcactccagcctgggcgacagagcgagactccgtttcaaaacgaaaaatttgtcatgttaacctttaaaaaaagtgtcgtgttttgttttgtttttctccccccaaagagattaggtctttttatgttgcccaagctggtctcaaactcctggcctcaagtgatgccccccacccttcacccagtgtaagcactggtattacagttgaattagttagatgagttgatacagttaagcaattatttggccctggaagtcactgtgttttgattgtttgtttctttctttgagacggagtttcactcttgttgcccaggttggagtgcaatggtcaatggtgtgatctcggctcactacaacctctgcctcccaggttcaggcgattctcctgcctcagccacccgagtagctgggattacaggcatctgccatcacgcctggctaactttttgggtttttttgtttgttttttgagacggagtctcactctgttgcccaggctgagtgcagtggtgcgatttcggctcactgcaacctccgcctcccgagttcaagcaattctcctgcctcagcctccggagtagctgggactacaggcgcgtgccaccacacccggctaattttttgtatttttagtagagatgggttttcgcagtgtcggccaggatggtctcgatccctgacctcgcgatctgcccaccctggcctcccaaagtgctgggattacaggcgtaagccaccgcacccggccctaacttttgtatttttaataggttttgccatgttggccaggctggtctcaaactcctgacctcaggtgatccacctgccttggcctcccaaagtactggaattacagccatgagccaccacacccggccaagtcactgtctttttaaggtcactttgcacatctctgctctgattccctgcaagttaatcttaagtttcctcttcgggaggcaatcttggttccttatttccaagttgtggtctggcatgcacattgaaggtcccatgtaaaggagaagtggatgctgtggtgagaggcgcacagggccagctcattctttgtccctggcagtctctcgaaagctctttcactgtgctgtttctttgtccccttgcagagaatgccacgggtgacctggccaccagcaggaatgcagcggattcctctgtcccaagtggtaggttcttaaagagacccgcgatggagtgaggccaccggatgggtcattgtgaaaggacacttgtcatttgggaactgtcacaggcttccctctcatggttctgtttactcaaaattggcaaaccgggggctctgcctgggctgccggcttctggctccagcatccttatgggggagtttatactgtccagctgacacaggggccggggatcctgcagcacttcctggctggcccccatctcctcctggaggatgggatggaggtggctgctgcccatgaggctcaggcccctccttgctgtgcgggcctccagctgctctgctgaccccactccccacccaccctcctgtctgcctgttctgtctcctctgcttcctttgctccctgttgccatcgctgtcccctgccccgtgggcatcctctgtcctctgccacccccgcctccccgccactgcagcttgtgatctcaagatgtgtgttagcttgctttgtagtgctggcggctgctgccccattcctcctttatggtttaaggactctgcatcgggcgcctggggtgagtggtcccgatgcactaccaggtagcaaatgcaccctcggggcagacctcaggccatggactctgggaggctgctgtggagggggtactgcaccgcacccctgctgg

SEQ ID NO: 21578 - DNA, 2300 bp, Homo sapien
tttttttttttttttttttgagatggattcttgctctgtcgcccaggctggagtgcagcagtgtgatcttggctcactgcaacctccaccccccgggttcaagcaattctcctgcctcagcctcccaagtagctgggattacaggcgtacgccaccatgcctggctaatttttgtattttttttagtagagacggggtttgaccatgttggctaggctggtctcaaactcctaacctcaggtgatccgcctgcctcagcctcccaaagtgctgggaattacaggtgtgagccactgtgctcagcctgtgtgttttgagacagggtcttgcttcgtcacccaggctggagtgcagtggctcaatcacagcttactgcagcctggacttcccaggctcaagtgatcctcccgcctcagcctctcaagtagctggaactacaggcgagtgccaccatgcctggctaagttttaattttatgtagagatggtctcagtatgttgcccaggctgatttcaaactcttgggcccaagtgatcctcctgccttgcttccctcccaaagtgctaggattacaggcatgaaccacttcacctggcccatgctatatgtttgcccctcgtcttcttacctactccctcagttttctcatctgtgaagcaggggttggaacagtaggggttgaatgtttgtgtcttccccaaactcctgtgctgaagctgagtgatggtatttggaggtaggacctctgggaggtcatcaggtgatgtgggtggagcccttattaatgggatttgtgcccttatagaaagggacacaacatgagatgatcttgctctgggccatgccgggaggaagggagaaggtggctgtcaacgagccaggaagcggcactcctgacactggatctaccaacacccctatctcagacttccagcctccaggaccgtgagaactgtttcctgttgaagccaccctctctatatttgttacagcagcccacactgattaagacactttttttttttttttttttttttttttttttgagatggagcctcgctccatcacccaggctggagtgcaatggcgcaatctcggctcactgcaacctctgcctcccgggttcaagtgattatcctgggtcagcctcccaagtagctgggattgcaggcacctgccaccatggctggctaaattttgtatttttagtagagacagggtttcaccatgttggccaggctggtctccaactcctgacctcaggtgatccacctgcctcggcctcccaaagtgctgggcgtgagccaccatgcccggcctgacacttatcttttatatctatatatttttttctttgttgagacggagtctcactgtgtcgcccaggctggagtgcagtggtgtgatcttggctcaccgaaacctctgcctcccaggttcaagtgattctcgtgcctcagcctccggagcagctgggattacaggcgtgagccaccatgactggcctaaaacacctaccttttattttttaaaaaaccaacacattatcagtacttcatgccagacaccattctaggaaattaactcctctgactttcacatcaatcccatgggtagctgttatttacagatgaggaaactgaggcacagaggtaaaacaactttgctgaggtcaccttgctgctaagtgacacagctggcatctagtgcagcaggctggctccaagtctatgcccctcacccctcagacgctgctcaccaagccggaggggctgtgggagcgagttagaacacgggacgcccctggcagcagcgccctgcgtgttaaagcgccgcggaggaagctgtattgtcgcggtacgcaggaaggcaggggcagcacctccctcttcaagaacgagcatctgagcttttgggggaaacctgtagctccccgaatgccatccacagagcccccctcagtcggcctcccctgaggcaccaaggctggcggaagcagtcacctgtccatctcccccacttctcacagaggaaatcctgggtggtgccgggcaatgagtcagggctgaggaccaggacagaggttgggtggggcgtctcagcattcctccaacgggcaggtctcagcgctcctccccctgctccgctcctctgcagggcccaggcgcccttggccttaggacccaacttctcttaccgccatggagttcgacctgggagcaggtgagctcctggggagtgtggactggaggtgcagggggccggactcaagcccagaagctgcctgcaccaaccaccca

SEQ ID NO: 21579 - DNA, 2300 bp, Homo sapien
ggaaggagattctctagagcccttcccactggagtcaggggtgctggtgaagagcactggggtctgcaggctgggtggaccccaagcttagttggatcctgggcaaatcacttcctttctttaaattcagtttccccttttgccgggcgcggtggctcatgcttgtaatcccagcactttgggaggccgaggcggtcggatcacgaggtcaggagatcaagaccatcctggctaacacggtgaaaccccatctctactaaaaatacaaaaaattagctgggtgtggtggtgtgtgcctgtagtcccagctactcaggaggctgaggcaggagaatcgcttgaacccaggaggtggaggttgcagtgagccgagatcgcacacctgcgctccagcctgggtgacagagcgagactccgtctcaaaaaaaaataaaaataaaaaataaactcagtttccccttttgtaaaataggatgatgatacttgcacctcaaggtgctgggaggattcactgtgagcatgtgagaagcagagggcagactgtggtggctggtgggccagggcagagccttggataaactttgacttaagtctcatcatttaaaagtttaggccaagcacgtgactcacatctgtgatcccagcactttggcaggctgaggcaggaggatcactggaggccaggagcttgataccagcctggacaacatagcaagaccccatctctaaaaaaatataaaaattagccaggcatagcagtgtgcacctgtagtcccagctactcaggaggctgaggtgggaggatcacttgagtctgggaggttgaggctgcagtaagctgaggtcacgccactgcagtcaagcctggcggacagggtgagaccctgactttttttttttttttttttttttttttgtgagacagagtctcgctctgtcgggaagctggagtgcagtggcgggatcttggctcactgcaacctccgcctcttgggttcaggagcaagtctcctgcctcagcctcctgagtagcagggactacaggcactcaccaccacgcccagctaatttttgtatttttagtagagacggggtttcatcgtgttggccaggatggtctcaatctcctgacctcgtgatccgcccgccttggcttcccaaagtgctgggattacaggcgtgagccaacgcaccaggccagagaccctgtcctttaataaaaataaagatagcatttctggcgtgtcttcagaaattgccgtgtggccagcataagggggggcagcatcctgggccacgtctcccaccccctcaggccgggtgtccaccgggaagtcccccttcacccgctccaagaccttgcctggcatttgagtatggaaccttctcagattttgcccacagggcccggggagaagcaaatcctcaccatgttaggaggtttggggaaactgaggccccgggagcagaaacctgaggctgcagagggccagggacttgtccccagctgcctggggcttctaggcagaggctggaagtatgtccgggctctcactctggcccagagggctcaagggtaaatcccttggttcctctctctctttcccacccagatccggacgctgcggctgaagatcttggcagacgcagcagctgagggggtcccggtgcgtggggcccggaaccagctgcgcatgtacctgaccatggcggtggcggcggcgcagcctatgctcatgtactggctcaccttccacctggtgcggtgagcgcgcccgctgaacctcccgctgctgctgctgctgctgggggccactgtggccgccgaactcatctcctgcctgcaggccccaaggtccaccctgtctggccacaggcaccgcctccatcccatgtcccgcccagccccgcccccaacccaaggtgctgagagatctccagctgcacaggccaccgccccagggcgtggccgctgttacagaaacaataaaccctgatgggcatggcgtggacagcctctccttggcctcgcgcacgaatgggcgggcccagcgctgggcagggggcagggagctggggacgggccagagtaggcaccacgctgaccagtcgcagaaggcagagaggaaggtttaatgagccctgtccagggcccttcagtggggagcctccttcttcttgcccttctccttcttgcccttctccttcttcttcactttgggcttcttggccttgcccgggatgctctcgtgctgcttggagccagcagcgtgggactgtggggccgagggcagggatgg

SEQ ID NO: 21580 - DNA, 2300 bp, Homo sapien
gaatttctgacctggtgatccacctgccttggcctcccaaaatgctgggattacaggcgtaagccactgcgcctggcctcttcccacttcttaacacacctcctctgagcacccctcagcaagtcctgtccctcctagctctgaaactgatccagaaataacccattcctcttttacacccccagtcctgtctgccatggtctcccacctggatcaccccagcagcctctctcccttccctgcccacccctcatctgttccccacgtgaggccacagggaccttttaaaaacttttgaaacctggctctcatactatgactttgggcaaaggcctgagcctctttagggcttgcttttctcatatgtaaaatggggatgatgatagcattggcagctggcagaaacagggtggttgtgaagatgagatgagttcatccacaggattattgtaatatttatcaggcacagcagggctggactcctgctctgccactcactcagtttggccctttgcacaagtcattttagctgtctgggccttggtttccacacctgtaaattgggagtggtcatttattctgttttttgttttttgttttttttttttgagacagggtctcactgtgttgcccaggctggagtgcagtggtgcagtctcggctcactgcaacctttgtctcccaggctgaagcgatcctcccaccttggcctcccgagtagctgggaccataggcgtgaaccaccacacctagctaatctttctatattttgtagagatggggtctcgccatgttgcccaggctgcctttattcattgatcaggtttttatcaagtgcctactctaaccctgtgcaaggggctggggactcagctgtgaacgagatcaagatccccaccttgggggactcacagttgagtgggggagacagtgaacaaaataagacagccagcatgtcagctagtgccgagttctatggatatcagtgaagcagggcagggggtggggagtgccaccaagggaggtacggttgtagacaggatggctggggaaggcctcactgaacaaagcccttgaggaggagaggagggagctctgaggatgttgggggaagagcgttccaagcagaggcacagctggtgcagcggccttgaggcaggcaccttcctggtgcattcagtgagcattgggaggcgcaggtggctggagccaagtcattgagggggagcataggagatatggacagcggccttgtgtaaaaggcttggtacaggattttgtgcccaatagcccccccttcctctcgcacatagtagcttttgagataatcatcatcattgatatctggatggatggatgataagtggatgggtgggtgggtgaatggatggttagatggatggatgatgatggatggatggatgatagatgggtggatagatgaatgagttggtggatggatagatagcttggtgagtggatggatggatggatagatggaaagataaatgcatcagtggatggatagttggctagataggtgggtggatgggtggatggatgggtgggtgggtggatggatgaatgggtaggtggatggatggatgggtgggtgggtgggtggatgcatcattagatggatagttggctagatgggtggtggatggatggatggttggataggtggatggatggatggatggatgggtggatggatgaatggatggattgatgggtgggtgggtagatggatagatggatagatgggtgggtggatggatgaatggatggattgatgggtgggagggtggatggatggatgggtggatggatgaatggatggacagatgaatgcatcagtggatggatagttggctagatgggtgggtggatggatggctggatggatggatggatgaatggatggatggatggatggttagatggatagatggatggatgggtgggtgagtgggagggtgggtagatggataggtggatggatgggtgggtagatgaatggatgcatagatgaatgtatcagtggatggatagttggctagatgggtgggttggtggatgaatggcagagcttgcacctgccagtccatctgacatcaaagccagtgtctctaatggtgacaccaccctcctctgcagcaggaggcagagctgtgggatgaatgaggttcgccaggtctcccttacctatcctgggtccccagctccttctcactctcttcccttgcagcctcgaagcggaggatccctgtgtcccagccgggcatggccgaccccca

SEQ ID NO: 21581 - DNA, 2300 bp, Homo sapien
ttgggaggccaaggcaggtggatcacctgaggtcaggagttcgagaccagcctggccaacatggcgaaaccctgtctctactaaaaatacaaaaaattagccaggtgcgatggcacacgcctgtaatctcagctatcgggaggctgaagcaggagaatcacttgaacccaggaggcaaaggttgcagtgagccgagatcgcatcactgcactccagcctgggcgacagagcaagactccatctcaaaaaacaaacaaaaaagcaataagaaaaaaaaaaacatttatggaagagatgtatctggagcaaccagagcaagagagggctgaggatgaggagaaaatggtgttggagcccaggggacagaggctaaatcagaggtgaagaagaatgcgggcatttcgctcacaaaaaggaaccacagtggagccagcactcatcactgagaaaccaggagcagcccttaaggtctccaaaaagacaacgtctcagaggaggaagaggaagccacagcgatagggtcacttgctgacatccttccggatgcgctatcgctgcgcagaagtaacttccaccactatgttttcctgagataagtcggggagtctgagagggagagaaggggggagactgagagtcagagagaggagagactaaggacgctaggtgggcagggctcttcacttgcaggtgcgcctgtgtgctgtgagttgctgggggttgtagaatgcttttggtggacagagggaaccaggttgcaatgtgagaacatttttatgaatttctgggaaactgccttaagatctattccaagagagacacctggttcttctcacctaacttgttgggtttccttttctcactctaaatattcactttaaggccgggcactgtggctcatgtctgtaatcctaatgctttaggaggctgaagcaggaggatggcttgagcccaggaattcgagaccagcctgggcaacatagcaagatcctgttttgacaaaaaatttaaaaattagctgggcatggtggtgcatgcctgtggtgccagttactggggaggctgaggcaggaggatcacttgagctcagggggtccgaggcagcctggaaaacagaggaagaccctgtctcaaaataaataaatatttactttaatacctaagggatgtcaaaaattgtataagcccctacaactccaattagcccctcaggaacacaaatgtttctcttttccttgctccacagccttttctggctctccagtgctctcaatgacccaaactgaacggctgtctgcagagaactgcatttcccatcgaccttttcgctcgatatttacattttaaaaaatgttttgtagcgatggagatctcgctgttgcccaggctggtctcgaactcctgggctcaagcgatcctcagccttccaaagtgctgagattacaggcgttaagccactgagcctggctaaattaaaaaaaaaaaaaattgtagggatggggcggggcgagggtcactatgttgctcaggctagtctcgaatccctgggctgaagcaatcctcccgcctcggcctcccaaagtgctggagttaggggcgtgagccccggcaaggggcagacactcattttctgtcgtggcagacaccgcctcctcctgggattggtcccggcctcgccctcctgccactcaggccttgactcgctttactgcatgagcccagtagcccagtctccgcctcttacgtaaggcaccgcccagtcgtccaggcctccgtgaaggggggggctggaggggtcgggggggtgggggcgaggccttccctcaatcctgacgtccattggctgtctcttcgccggcggggcgtgggtacgggagccgggcgggcacgctccgaaccgcggcttaggtggcggcggcgaaggatgcacccggcaggcttggcggcggcggctgcggggacgccccggctgcgtaagtggcgtacgtggccggcggaggagatcgggcgggcgggggcgtggcggggcggccgcgtcggttggcgaggtcactgcaggtcagaggtcacgagatcaaggatctggaaccctgaggtgtgcacagcgctgggatgccaggttcgggtaggaggccccttggggggcgattctttaggaaattcctttagaagaaaacaacttgggactggatagcgtgcgatatgcagagaaatgcaactttcattcatttgcagttagcgatccgcccttccctgctccccacccttccgtggctccccagtacccgcctgctgtcgcc

SEQ ID NO: 21582 - DNA, 2300 bp, Homo sapien
ttgtattttaagtagagacagggtttcgccatgttggcaaggatggtctcaaactgacctcaggtgatctgcccgccttggcctcccaaagtgctgggattacaggcgtgatccgctgcacttggcagtacttgctttattaattaaatatatatacataaggctgggtgcggtgtttcatgcctgtaatctcagtgctttgggaggccaaggcaggtggatcacctgaggtcaggagttcgagaccagcctggccaacatggcgaaaccctgtctctactaaaaatacaaaaaattagccaggtgcgatggcacacgcctgtaatctcagctatcgggaggctgaagcaggagaatcacttgaacccaggaggcaaaggttgcagtgagccgagatcgcatcactgcactccagcctgggcgacagagcaagactccatctcaaaaaacaaacaaaaaagcaataagaaaaaaaaaaacatttatggaagagatgtatctggagcaaccagagcaagagagggctgaggatgaggagaaaatggtgttggagcccaggggacagaggctaaatcagaggtgaagaagaatgcgggcatttcgctcacaaaaaggaaccacagtggagccagcactcatcactgagaaaccaggagcagcccttaaggtctccaaaaagacaacgtctcagaggaggaagaggaagccacagcgatagggtcacttgctgacatccttccggatgcgctatcgctgcgcagaagtaacttccaccactatgttttcctgagataagtcggggagtctgagagggagagaaggggggagactgagagtcagagagaggagagactaaggacgctaggtgggcagggctcttcacttgcaggtgcgcctgtgtgctgtgagttgctgggggttgtagaatgcttttggtggacagagggaaccaggttgcaatgtgagaacatttttatgaatttctgggaaactgccttaagatctattccaagagagacacctggttcttctcacctaacttgttgggtttccttttctcactctaaatattcactttaaggccgggcactgtggctcatgtctgtaatcctaatgctttaggaggctgaagcaggaggatggcttgagcccaggaattcgagaccagcctgggcaacatagcaagatcctgttttgacaaaaaatttaaaaattagctgggcatggtggtgcatgcctgtggtgccagttactggggaggctgaggcaggaggatcacttgagctcagggggtccgaggcagcctggaaaacagaggaagaccctgtctcaaaataaataaatatttactttaatacctaagggatgtcaaaaattgtataagcccctacaactccaattagcccctcaggaacacaaatgtttctcttttccttgctccacagccttttctggctctccagtgctctcaatgacccaaactgaacggctgtctgcagagaactgcatttcccatcgaccttttcgctcgatatttacattttaaaaaatgttttgtagcgatggagatctcgctgttgcccaggctggtctcgaactcctgggctcaagcgatcctcagccttccaaagtgctgagattacaggcgttaagccactgagcctggctaaattaaaaaaaaaaaaaattgtagggatggggcggggcgagggtcactatgttgctcaggctagtctcgaatccctgggctgaagcaatcctcccgcctcggcctcccaaagtgctggagttaggggcgtgagccccggcaaggggcagacactcattttctgtcgtggcagacaccgcctcctcctgggattggtcccggcctcgccctcctgccactcaggccttgactcgctttactgcatgagcccagtagcccagtctccgcctcttacgtaaggcaccgcccagtcgtccaggcctccgtgaaggggggggctggaggggtcgggggggtgggggcgaggccttccctcaatcctgacgtccattggctgtctcttcgccggcggggcgtgggtacgggagccgggcgggcacgctccgaaccgcggcttaggtggcggcggcgaaggatgcacccggcaggcttggcggcggcggctgcggggacgccccggctgcgtaagtggcgtacgtggccggcggaggagatcgggcgggcgggggcgtggcggggcggccgcgtcggttggcgaggtcactgcaggtcagaggtcacgagatcaaggatctggaaccctgaggtgtgc

SEQ ID NO: 21583 - DNA, 2300 bp, Homo sapien
aattttttgtatttttagtagagacagggtttcgccatgttggccaggctggtctcgaactcctgacctcaggtgatccacctgccttggcctcccaaagcactgagattacaggcatgaaacaccgcacccagccttatgtatatatatttaattaataaagcaagtactgccaagtgcagcggatcacgcctgtaatcccagcactttgggaggccaaggcgggcagatcacctgaggtcagtttgagaccatccttgccaacatggcgaaaccctgtctctacttaaaatacaaaaattagctgggtgttgtggcgggcatctataattccagctacttaggaggctgaggcaggagaattgcttgaacccaggaggcagaggttgcagcgagccgagattgtgccattgcactccagcctgggagacagagcgagactcttgtctcaaaaaaaaaaaaaaaaaaaaaaaaaaagcaagttcattagttcattggcttcctgctggcctcatgttcaccccttaccagttgtgtgactactactttttatttttttgaggcagggtctactctatcacccatactggagtgcagtggtgcgaccataactcattgcagtctctaattcctgagctcaaacgatcctcctgcctcagcctcccgagtagctgggactacagacgcatgccaccacacttggctaatttttgtattttttgtcgagatggggttttgccatgttgcccgagctggtctcaaatgactacttcatttttaagcctaaattttctcatctgtttagtgggaattatattgggacggggttgagaattcagtgcaagttcaggtgtccacagggcctggcagaatgtaagccttcgatcactggcacctattgtgttactgattctattatcaggtgcctctgcttctggattgtcaaccccaagttgggctctgcccggtgatctgccagctctttaatagaaccagctgggacatgtctgagctgagccccaagccccactcctctgccagtcggatggggttaggactctgggctgccctccaaaaggctgtcaggaaggcgctgagttctggctggaggcagaagtggagagacttacgggggggcgcagaaagaaaaatttcctcttaaatagaggcgtgtatttgtgattctgcctggcttgtttccattcatccttcatgcttcagctcagctagccccttcctcaggaagctctcttgacctccctaggcaggggtggttgcttcctctggactcccagggccctctagggctccctgattccaggcttgatcattgtacccttgcttccctcatcacagccctgaccactctgggctgtcttttttcttttttttagagatagggtctcactctctcccaggcatagctcactgcagcctcgaactcctgggctcaagcaatcctccgacctcagcctcccgagtagctgggacaacaggcgtgggtcactcttgtgtcagtctcccagttagactgggagccccatgaatgcatggcgcaggatggtctcatcattactgagtctccaggatcatccagcgaggggtcagcagaaagtgggcattgaacaaagctttggtgagtagctgaggatccccactctgtccacacgggcacaggggacacctgactctgtggtgtccgctgttcccactccgaggctcacaacttggcgaatggagcgagaattggatttcagtttgccccttgctccgtcagccgcgcgccctgatgcagtgcacaaccttagctgctgtgcgcgatggggggcgactcctcggcctgcgagcagagaggaaagttcagattcttctaacatagagaaccagccttccaggaggacgagaaggaaggaatgaggggaagagaggactacctccaccctttccatcccgttggtctgctgggtctgggagcactgggctccaccctctccgaacgaacacctggcggttgggcgtgcctcagtttcccggaggcggggcattcctccgtcgccgccccccacctcccctttttcctcttcctcttggggcatctgctgccgcgcctgtagcactcccggaactggaactaggtgccagacggtccggaggcgggggccacgtcagcggggccacccagggctcgcggggtcccggtgggtgccatgcggaggggcgcgcttctggcgggcgccttggccgcgtacgccgcgtacctggtgctgggcgcgctgttggtggcgcggctggaggggccg

SEQ ID NO: 21584 - DNA, 2300 bp, Homo sapien
ggcaggaggaagcgggtagtcctacccggaactgggaatcggagagaggaagtgagcattacaatccttgtaactctttccacgctcttgctaggcactatgccctatcccagcctagtaggattactaccacatttgaggaagggattgttttttgtttttcagacagggtcttgctctgtcacccaggctagagtgcagtggcgcagccttgacctcctgggcttaagtgatcctcccacctcagcctcctgagtagttggaaccacacgtgcacgccactgcacccagctaatttttttattttttattttttgtagaaggtggtctccctatgttgctcaggctggtctcaaactactcctaggctcaagcggttctcctgccttggcctcccaaagtgctggaattacaggtgtgagccaccttgcctggccaggaagggattgcttacgagcccatttttgcagagagggaactgagcctcagaggggagaagtcatctggccaaagtcatgcagggagtaaatggcaaaacactgttttggactcttctctttgaaatagtaacttgaggctcacaggccccatgcttttcaaactctatgatttgtctatttataaagatctcttttattattattatttttttttacagagatagggtcttgctatgttacccaggctggtgtcaaactcctgggctcaagtaatcctcccactttggcctcccaaagtgctgggattataggaatgagccacctcacccagcctgtttataaggatttcatgtcatttgcaaacctgccaggctgctggagtttccccatcaaaaacccttgtattaatgagggttgggggtcataagtgatacacctcaaattacagttgcttaaataagaagtgtatttcttgttcacattccaggtagtcagtccaagtcgtactgcatggtcagagacctaggctccttctcagcaaaaccctggtgttcctgcctaactcctctgcgcaacttccattcccaaggtcgcctaatggtccaagatggctgtgtagctccagcctccatgtctgtgctccagccagcaagaggagggaggaaagaagggagactggcatccctcgctccttaaggacccttcctggaagttgcctgactctttcatgaatacctcattggccagagattagtcacagaaccacacctggctctgcaagggaggagggaacgtcctgattccaaaaggccatgtatccagctaaaacccagggggagccttttaaaattattattattgttattattttttaaagtagagatagggtcttcctatgttacccaggctggtctcaaattcctgggctcaagtgatcctcccaccttagcctcctagagggctggggttacaggtgtgaaccaccatgcctggctgggatcatttcttttcccaagttttttattatagtaaaatacacataacataaaatgtaccatcttagtcatttttaagggtacagttctgtgacattaaatacattcatattgttaccatcatcaccttcatcttttttttttttaatagatacgaggctggccatgccatgtgggagatggagttattgctcaactcaaatcactctccaccatccatctctaaaacttttttttttttttgagacggattcttgctctgtcacccaggctggaatgcagtagcacaatcttggctcactgcaacctccacctcccaggttcaagtgattcttctgcctcagcctgctgagtagctgggactataggcgtgagccaccatgcccggctaatttttgcatttttagtagagacggggtttcaccatattggtcaggctagtcttgaactcctgacctcataatctgcccgcctaggcctcccaaagtgctgggattacagacctgagccaccacgcctggcccattgtctcgcccattttagaatagggcaagctgaggctcagagccaggcaagagcctgcacccttcattctttgttttgagaagtactgatcgagcgcccacagcagtgatgaaacacgcagaacctcctgctttgctgaactggcagcctatgagaagacggtaaaccatagagcatgctagaaggtgttaagtgctatgggaaaaaaaagtgttgggtaagaggatgttaccatttagggtgctcaagggaaagcctcactgagaaggtgacatttggatgaagaagacctggagaggagagaggggagcattctttggggaaggaacaaccagtgcaa

SEQ ID NO: 21585 - DNA, 2300 bp, Homo sapien
ggcagagaaagccatacaccctgccctcacggagcttgtgatccagtggaaaagaaacacccatttccagtcatgagtggcctagaggggccaagaggtaggatgagggctggtcatgtatcacagagaagacctaaaggaaggaaagtggtgggccctgttaaaaagcatggaatggtattccagagggcattactgagtctgcacaggtctggagcatgcatggctcacacctgaccaaggatattcaagtcgctccatgtgaccagactgtggaccacagaggtctaagggggagagggcagatgagccagatagaatgacagggaggagagtatgaggggctctggaaaccgaggggtttggaagttttcctgagggcctagagggtcatggaaggttctagagcactggttctcaaggtgtggtctccagaccactagtatcagcatcacctaggaacttgccagaaatacaaattatcaggccccactccagatctactgaatgaaaaattctggaagtagccaggtagttactcaggaggctgagatgggaggctcacatgaggcctgaaattcaaggctaacctgagatagggtgttgctcttttgcccaggctgaaatgcagtggtgtgatcacagctcactgcatttccgtgtatttcagagctcactgcagcctcaaactcctgggctcaagtggtcttcctgcctcaacctcccaggtagctggggtcacagggatggaccaccacactgggctaatttaaaaaaattgttagcaacagggtcttaccatattgcccaggctggcctcaagcgatcctcctacctcagcctcccaaagtactgggattacaggtgtgcagcaccacatctggcttaatttttttttttttttttgagacagggtctcattctgtcgcccaggctggagtgcagtggagggatctcggctcactgcaacctccgcctcctgggttcaagcaactcctgcctcagcctcccgagtagctgggattacaggtgcccgccgccatgcccggctaattgttgtattttttggtagagacaaggttttatcatgttggccaggctggtatccaacttcagacctcaagtgatccgcctgcctcagctttccaaagtgctgggattataggcatgagccactatgcccagccagagactccatctttaaaacaaaaacaaaaactcagggtgtggtacccaccaacctggcttacccagccttttaggtgagtctaatgcatgctcaaatttgaaaaccactgggttaaacgtctggtctggagttcatcaaaaagtcatggcctgaatccttacctgtaaggcatcagaatgcaaatgaaaattaacttaatgaatattttacttgagccgggcacacttcccacaacagtataggatggctgtccttgtcctgttttgtagaggacggtgctaagcagcctattcattctcacaaggtctccaggaaaccacacttttttaaggagtagaattttggggtagggccgggcgcagtggctcacgcctgtaatcccagcactttgggaggccgaggcgggtggttcgcctgaggtcaggagtcgagaccagcctggccaacatgatgaaaccccgtttctactaaaaatacaaaaaataaattagccaggcgtggtggcgggagcctataatcccagctactcgggaggctgaggcaggagaatcgcttgaatccggggcaggggcgcggaggtttcagtgagccgaaatcgcgccacttcacactccagcctgggagaaagagcgaaactccgtctcaaaaaaatatatatatatatatatttgggtaggaagcacaagtagggaccgtgcttgctgccagaacaaccaatagaaactccttgaaggccttcctggcacaaacgtagtctccagcaccctctgccgaccaggccccgcgccctcagtgctgagacagcctccagccctcggtgccttaggggttgcgcgtcaccttggagaccgcgtgagaggagggcgtgcctctgcaaaggcggaagtcggctgtggaagtgtgggcggccattttgagaccgggcaagaggggcgggactggtgcggccgagtgacagttgaccggttttaaccaagtgactggtaccacggggccggggaaaaagctgtgccatccaggggcggggggatgccggggacggggaggaactaggaaggggaggggaaggggaaggcgagaaggggagaggcaggggaaagaggggaagagt

SEQ ID NO: 21586 - DNA, 2300 bp, Homo sapien
aggaaagtggtgggccctgttaaaaagcatggaatggtattccagagggcattactgagtctgcacaggtctggagcatgcatggctcacacctgaccaaggatattcaagtcgctccatgtgaccagactgtggaccacagaggtctaagggggagagggcagatgagccagatagaatgacagggaggagagtatgaggggctctggaaaccgaggggtttggaagttttcctgagggcctagagggtcatggaaggttctagagcactggttctcaaggtgtggtctccagaccactagtatcagcatcacctaggaacttgccagaaatacaaattatcaggccccactccagatctactgaatgaaaaattctggaagtagccaggtagttactcaggaggctgagatgggaggctcacatgaggcctgaaattcaaggctaacctgagatagggtgttgctcttttgcccaggctgaaatgcagtggtgtgatcacagctcactgcatttccgtgtatttcagagctcactgcagcctcaaactcctgggctcaagtggtcttcctgcctcaacctcccaggtagctggggtcacagggatggaccaccacactgggctaatttaaaaaaattgttagcaacagggtcttaccatattgcccaggctggcctcaagcgatcctcctacctcagcctcccaaagtactgggattacaggtgtgcagcaccacatctggcttaatttttttttttttttttgagacagggtctcattctgtcgcccaggctggagtgcagtggagggatctcggctcactgcaacctccgcctcctgggttcaagcaactcctgcctcagcctcccgagtagctgggattacaggtgcccgccgccatgcccggctaattgttgtattttttggtagagacaaggttttatcatgttggccaggctggtatccaacttcagacctcaagtgatccgcctgcctcagctttccaaagtgctgggattataggcatgagccactatgcccagccagagactccatctttaaaacaaaaacaaaaactcagggtgtggtacccaccaacctggcttacccagccttttaggtgagtctaatgcatgctcaaatttgaaaaccactgggttaaacgtctggtctggagttcatcaaaaagtcatggcctgaatccttacctgtaaggcatcagaatgcaaatgaaaattaacttaatgaatattttacttgagccgggcacacttcccacaacagtataggatggctgtccttgtcctgttttgtagaggacggtgctaagcagcctattcattctcacaaggtctccaggaaaccacacttttttaaggagtagaattttggggtagggccgggcgcagtggctcacgcctgtaatcccagcactttgggaggccgaggcgggtggttcgcctgaggtcaggagtcgagaccagcctggccaacatgatgaaaccccgtttctactaaaaatacaaaaaataaattagccaggcgtggtggcgggagcctataatcccagctactcgggaggctgaggcaggagaatcgcttgaatccggggcaggggcgcggaggtttcagtgagccgaaatcgcgccacttcacactccagcctgggagaaagagcgaaactccgtctcaaaaaaatatatatatatatatatttgggtaggaagcacaagtagggaccgtgcttgctgccagaacaaccaatagaaactccttgaaggccttcctggcacaaacgtagtctccagcaccctctgccgaccaggccccgcgccctcagtgctgagacagcctccagccctcggtgccttaggggttgcgcgtcaccttggagaccgcgtgagaggagggcgtgcctctgcaaaggcggaagtcggctgtggaagtgtgggcggccattttgagaccgggcaagaggggcgggactggtgcggccgagtgacagttgaccggttttaaccaagtgactggtaccacggggccggggaaaaagctgtgccatccaggggcggggggatgccggggacggggaggaactaggaaggggaggggaaggggaaggcgagaaggggagaggcaggggaaagaggggaagagtcgtgggagctgggagaggagggaaagaggggaagagtcgtgggagctggcagaggagggaaagggggagccgaacgtgaagggcgaagggcggggcggggcaggagagtcggggtatagagcaggcaggtgttaatggcat

SEQ ID NO: 21587 - DNA, 2300 bp, Homo sapien
ccccatctctactaaaaatgcaaaaattagccgggcgtggtggcgcatgcctgtaatcccagctacttgggaggctgaggcaggacgatcgcctgaacctaggaggcagagggtgcaatgagctgagatggcgcccttatactccagcctgggcaacaagtgcaaaactccgtctcggaaaaaaaataaaaaataaaaaaattagccaggcgtggtagtggtacctgtagtcccagctatttgggaggctgaggtaagaggattgctgaagtctgggagaggtggaggttacagtgagctgtgatggcaccactgcactccggactgggcaacagagcaagaccttatcttaaaaaaaaaaaaaaaaagccaggtgcagtggcttacacctgtaatcctagcattttaggaggctaaggctggaggattgcttgaggccaagagttcaagaccaacctggccaacatagcaagaccctgtcccatgtaaaaaataaataaataaataaataaataaataaattacagaaatagccagcctgggcaacagagtagactctgtctctacaaaaattaaacagttttcaaagaaagaatggcctggtggctcatgcctgtaatcccagcactttgggaggccgaagcgcgcagatcagttgaggtcaggagtttgagaccaggctggccaacgtggtgaaacctcatctttactaaaaatacaaaaattagctgggcatggtggtgcacgtgtgtagtcccagctactcaggaggctgaggcaggagaatcacttgaacccaggagacagaggctgcagtgagtcgagatcatgccactgcactgtagcctgggcgacagagtgagactccttcttgaaaaaaaaaaaaaaaaggaaaagaaaggagcctggcaaagaaagtaaagaaagtcagccctctcgatgaagggctgtgcacaggtgctgaatctggtaaatccctcgccctggtcccacagcaaccaaggcctccccttggtggcctgagtgccgccttctctcggggacgcctcttagccttcactggtgctgttctgcatgcctgaaacatccttctcctcttctcccatctccactctaagcgctccccacccttttctattcagccaggatcccgcatccctgggaggttgtccaggcatgccctgtcaccctcgtcctcagtcccttcctgtgtaatcgccccatcctacactcaccccaagctcaaggcccagaacttggctgtcctctgacttgcataggtggcagaaagtctgctgcagagagggtggaagcccacctcaagagtgagactgggggccagatgagatggctcacgcctttaatgccagcactttgggaggccaaggtgggaggctcacttgagaccaggagttcaagaccagcctgggcaatctaattttttttttttaagcctggaactgggaatccctggagtggaaagcagcaccctgggtgccacatccctcccaccttcccagcatccctcccacctgcacagttttgttcatcccatgctgcccttccctatgtattccctacatgcacattctgtctgcagacactggctctggagtcatctcctccaggaaggcctccgactccctccacagccccttacccctctgccccctcctaggctgttccatcccccatccaagccccaaacctagaccatgtcctctgaccatcacatggtggacagtgtgctgcccccggacagcccaggagacagactgttagaggcgggcttaaggcagggggcacccagaggctaccataaggacacacttgtggggccatctcaccctcagccctctgaggacctggtgcgcatgggccacctgacggggctaaagcccctggtgctggtcaccttccagtccccagtcaacttctaccgctggaagatagagcagctgcagatccagatggaggctgcccccttccgcagcaaaggtgggcctgggggaggcgggagggatcgcaacctggcaggggtgtggggtttgctgggggcctctgtggggccatgatctgaggagggtatgtggggggcgggagctcagcacattccatggcctagaggggccacacagaggccccagtgggacccatggcgtggaggcaggtatggggagttgtggggagatcccagggtggtctggggcctggaaccggccattgggaggccccagcagtttcagtgcccagggcctccctgcagagccatgcatggcagaagaagtgtgtagcatgag

SEQ ID NO: 21588 - DNA, 2300 bp, Homo sapien
gaagcaggaggtcctgattaatcgcaactcggtgctattttcggtgaggccccccggggagttgggatcaagggaggttttgttttttttttttttttttttttttggagacagggtcttgctctgtcgctcaggctggagtgccagtggagcgatcactgcattcttggcctcctgggctcaagcgatcctcctccctcaacctcctgagtagctgggactgcaggcacgcaccacagtgcccagtgaactttttgtttttcttttgagacggagtcttgctcagtcgcccaggctggagtgcaatggcacgatctcggctcactgtaacctctgcctcccagattcaaccgagtctcctgcctcagcctccctagtagctgagattacaggtgcatgccactacacccagctaattttttgtattattagtagcgatggggttttaccatgttggccaggctagtcttgaactcctgacctcaaataatctgcccactttggcctcccaaagtgctgggattacaagcgtgagccactgcacccagccttaactttttattttttgtagagacgggggtctccctatgttgcccaggctggcctcgaattcctggactcaagagatcctcatgcctcggcgtgaggtgtgaggtgtgaggcatgaaccaccctgtgcttggccccgttagcctattccttttttttttttttttttttattgatcattcttgggtgtttctaggacaatagtggagggaaggtcagcagataaacaagtgaacaaaggtctctggttttcctaggcagaggaccctggggccttccgcagtgtttgtgtccctgggtacttgagattagggagtggtgatgactcttaacgagcatgctgccttcaagcatctgtttaacaaagcacatcttgcaccgcccttaatccatttaaccctgagtggacacagcacatgtttcagagagcacagggttgggggtaaggtcacagatcaacaggatcccaaggcagaagaatttttcccagtacaaaacaaaatgaaaagtctcccatgtctacttctttctacacagacacggcaaccatccgatttctcaatcttttccccacccttccccgctttccactccacaaaaccgccattgtcatcatggcccgttctcaatgagctgttgggcatacctcccagacggggtggtggccgggcagaggggctccccacttcccagcaggggcggccgggcagaggtgcccctcacctcccggacggggcagctggccgggcggggggctgacccccccacctccctcccggacggggcggctggcctggcgggggctgacccccacctccctccaggacggggtggctgccgggcggagacgctcctcacttcccagacagggtggctgccgggcggaggggctcctcatttctcagacggggcggttgccaggcggagggtctcctcacttctcagacagggcggctgggcagagacgctcctcacctcccagatggggtcgcgaccggacagaggcgctcctcacatcccagacggggcagcggggcagaggcactccccacatctcagacgatgggcggccgggcagagacgctcctcactttccagagtgggcagccaggcagaggggctcctcacgtcccagacgatgggcagccaggcagagacactcctcacttcccagacggggtggcggccgggcagaggctgcactcttggcactttgggaggccaaggcaggcggctgggaggcggaggttgtagcaagccgagatcacgccactgcactccagcctggacaccattgagcactgagtgaaccagactccgtctgcaatcccggcacctcgggaggccgaggctggcggatcactcgcggttaggagctggagaccagcccggccaacaccccgttagcctattcctgagtagaaaatggcagccttccgttttcctaccagccaccacctcgccccagctatgggttatttgaactgtttgttggactttggggagacctgttcaccccttcatttctgcctctcccctccttcaaccccagattacgctcaaggataaaaagctttgctatgaccaaggcattagtggacatcaccttatggagacttccatgacggtcaatgtgaggtccaagcctggaggggagggtgcaggatggtgggaaagcctgggccggcggggatcaccatcttcacctgctcctacccacaggtggtgggttcatccgggctctgcttcca

SEQ ID NO: 21589 - DNA, 2300 bp, Homo sapien
ttccgttttcctaccagccaccacctcgccccagctatgggttatttgaactgtttgttggactttggggagacctgttcaccccttcatttctgcctctcccctccttcaaccccagattacgctcaaggataaaaagctttgctatgaccaaggcattagtggacatcaccttatggagacttccatgacggtcaatgtgaggtccaagcctggaggggagggtgcaggatggtgggaaagcctgggccggcggggatcaccatcttcacctgctcctacccacaggtggtgggttcatccgggctctgcttccaggaaacacacctggggccccatatgcaagtattggagcttgggatactgggccctgggaggggaaggttggggtcgggtctcaacagggctaatccccctgagaatcccactaatgcattcataatttcctttcttctcattctttctcaacattcatccacccacccactaccacccactaactcctttcattcttttttctttaagacggagtttcactcttgttgcccaggctggagtgcggcggcgcggtcttggctcactttgcctccttggctcaagtgattctcctgcctcagcctcccaagtagctgggattataggcgcccgccaccacggctggctaattttttgtatttttagtggagacagagtttttccatgttggccaggatggtcacaaactcctaaactcaaatgatccacccgcctcagcctcccaaagtgctgggattccaggtgtgagccaccatgcccggcctaactcctttcattcattcacgttttcagaaagggccaccttcccagttgtgcaggttgcacacaaactggtatgttccctctgataacttttcttcagagggagaatagagtgagcaacagggccgttttttttttgttttttgttttttttttaacgatgtctcactcttgtcccccaggctggagtgcaatggtgcaatctcggctcactgcaacctccacctcccgggttcaagcgattctcctgcctcagcctcccaagtagctgggattacagttgcataccaccatgcctagctaattttttatattttaaatagagacggagtttcaccatgttggccaggctggtcttgaactcctaacctcaggtgatctgccggccttggcctcccaaagtgctgggattacaggtgtgagccaccgtgcccgacctagggccactttttgcaattggcacaaaggtggcataagggctggcctggccctgctttcacatctctctcttcttctgcccactcacacattcctcattcagttctttgggtgcttggtgcttcacttgcttatacacgtgatatcgcctttgcccggggcagacactgaggctcagagaggtgcagagtaacccagggagctaataagtggtagaggaggggcgtgccccagagttcttgttctcacccatttccctacccactccctggcatgcagatcctggtgttcctccctcctggcttagaatgaccttgggcagtcaaaaggggttgtaacagcccccacctccttagagtacatgagatttcatgtgctagactgaataaacaaggaggaagtgtgattgcatcagggtgggcaagggggaacgtggtgggatgagctcggagcagtgatggggcagagtaagcggagcccttatgggccatggtatgtgagctggctcctcgggagggctctaagcagaggagggactcgggtgtccccagggcccatctggctgcatggggtggggggacatcaatgaggggactggaagcagggagactctggaagagacaaggttggacaaaacagggtgggggcaaaggagttggaggtttaggggagagaacaggcaggctctcggtctttttttttttttttttgagacagagtcctgctctgtcacccaggctggagtgcagtggtgcagtcttggcctctacctccctggttcaagcgattctccagcctctgcctcccgagtagctgggattacaggcatgcaccaccacacacccagctaattttttgtatttttagtagagacagggttttactgtgctggccaggctagtctcgaactcctggactcaagtgatcagcccgcctcggcctcccgaagttctgggattacaggcatgagccactgcaccaggccgtgttaatgatattaatgaccatattgcccttgggggtgagggagagccaggcagctggtggtggtgtttgtgggaggg

SEQ ID NO: 21590 - DNA, 2300 bp, Homo sapien
tgcccgcctcagcctcccgaagtgctgggattacaggcatgagccacctggcctggccatatcaacgtggtattttgtttatttgtgtctttttctttttttttttgagatggagttttgctcgttgcctaggctggagtgcaatggtgcgatcttggctcactgcaacctccacctcccaagttcaagtgattctcctgcctcagcctcccgagtgagtaactgggattgcaggcacccgccaccatacctggatagataattttttgtatagtagagacggagtttcaccatgttggctaggctggtctcaaactcctgacctcaggtgatccatccacttcagcctcccaaagtgctgagattacagacttgagccaccacacccggccatcatttttgtttaaaacattttttaccaccacaacttctttcacatattaatttactcattaattcaacacatatataatttctttctttttctttttttcttttttctttttttttttttgagcacagtctcgctctgtcacccaggcaggagtgcaatggcgatctcagttcactgcaacctctgcctcccgggttcaagtgcttctcctgcctcagcctcccaagtagctgtactacagatgtgcaccaccacgcccggcaaatttttggtatttttacatttatttatttattttctctgagacagagtctcactctgtcacccaggctggagtgcagcggcacaatctcagctcactacaagctgacctcctgggtttaagcgattctcctgcctcgggctcctgagtatctgggattacaggtgtgtgccaccacgcacagctggtttttttgttttttttttttggtatttgcagtacagatggggtttcgccatgttggccaggttggtctcgaactcctgacctcaagtgatctatctgcctcggcttcccaaagtgctgggattacaggcatgagccaccatgcctggccaacaaatatttattgactgtctactaatatttgccaagcactgagatactgggaattcagtagtgaaggaaatcgtcctgccttcatggagatgacattctaaatggtggagacggagagtgaaagtcgggtttgagaaaaacgtgctgcccaggcgcagtggctcacacctctaatcccaacactttgcgaggtcaaggcaggaatatcgcttgagctcaggagttcgagaccagcctgggcagtataatgagactctgtctctataaaaaatttaattttttttaaaaagagagaaaaagcgatgttgaatgtgcagatgtaatatcaatcagtggaggaagaagttggtataagaagttgtgaatactggccaggcaaggtggctcatgcctgtaatcccagcatttcgggaggccagggcccagggaatcgcctgagttcaggagttggagaccagcctgaccaacatctactaaaaatactaaaattacgtctctactaaaaatacgaaaattagccaggcgtggtggcacatgcttgtaatcccagctacttgggaagctggggcagaagaatcacttgtacccaggaggcggaggatgcagtgagccaagattgctccattgcactccagcctggacaacaagagctaaactccgtctcaaaaaaaaaaaattgtgaatcctccacttacacatgacattgaaagccatagagctggatgagttttgtaactagttagttcatataagcttgggaaaaaaatgtggaaggatgcattgaaaaagactggagagggagccccaggtacacatcctagctgttagtcctttggaaggttacccagcctctcagtctgtctataaaatgagaataacacagctctccaaatggcacgacacccgctaccttttggcttggagacgctgccccgaaggcggaacctccaggacagctacgtagcgtcccgagcactcagactgaagccagggcagccatgttcattattggaaccgtgaggtgggtagggggggtggtgttgagacagctgtcattttcagttagggcaaaagccaacttccggtcaccatcttgagtgacgacagaggcggagctccaactgacatgttcattaagggcagggctccgagggcgccacctcgagagcgacggcgggctacccggggcgggctgaggcaggttgtagccccgccccgggccttgggctccacctctcggccccacttccgccgggcaagcgtttgtaggcggcgctgccgtaaatcaggcggtctgcttgccgc

SEQ ID NO: 21591 - DNA, 2300 bp, Homo sapien
cgtcttccacacagctcctttcttcctcatgccatctcttctctctcacctctatcttcttctccatgtctgccctttctctctgtacccacctttcccccatctctccgtccccacccccatagccctggtgttgcccttccctccccctcctgcttatccctatcacccccttctcctccctcagcacatacccacagccccacccagtgctccccctcacagctgggtgcctgcgcatatatattttctctgggcccatcaactcagctcctgttctcccaaccctgcctccgcaccctgtcgtccaggccacaggctgggtgagaaacccaggctctttcccccccacccaccccttcccggatttatgaatgagaccggatgcaaagctcactgagtcacccagcaacgggagatgggcagggaacagggagagaaccagaaatggccagaaagagaggctcagagggagacggaggcagaggaagtcagaaacgggcgaccgaagacacatccagagagcatttcattcacaaaaatcaaggctgctcccccaggccccagccgagggaagccaggggggaaagatgggatgggggggcagattgatccttcctccctcttcccttcccgccccccagccccagcatccttcagaaccattttaccccgccccccagctcagaggacgtagccctccgcccagtaatcgggatcagtgtccagcccttcactgccatccagcacagggaccctggcgtcccaaccttagggacccggacgagctctagccccctcccccacctgcaggctgctgggtttcccgggcccttcaggaggggaaggggcggctgcagcgcccccagcccccttttctcaatgggatgggattttgtgaatgagcagtcacgtgacgctgcttcctttgtccgcccgcctcccccgacaacaggtgaagcagggaatgagagcaggggtccccccagggcctagctggaatggggcactggcatttcagggtggcctacgctccccacacatcctgtgtcccccggggggagtggtcctcagcgttcctcaacggtgagggtccaggacggaattttgtgaatggggcatcctcggagaaagtccagaccccacaaatgaagactggtaccctgaatggctgccgcgcagtttggggggtccccactctctagtcctcctagccggggccttgggggcgcctgggtgggcagaaggcgcagcgcggtcacggccgccccctcatcggggcaggcagtctgtcagcccccgccccctcgcccccctcggcacctgcctgcgaggctccggccgggctccgagcggcggcgacgcggcctcctcctcctccttttcgttccggctccctggctggctccggcggcgctggagacgggcaccgggagccggggcgaggggggagggagggggaacctggaagacgggtggggggggaaggggcggcttgggggaggggtaagagcgaggcgggcttacttgcctgctgggtcctagagcccggcactagctccagagagcaaccccccagcccccattttcttaagatccagaggggatcccccacttttccacccatctgcgccattggtctctaatgctatgaggaggggacggggcagggacagggactggtctcaaggttctaaagaggtggtggtctacgctgtggcttgggtgcctggcagagttcgataaggggtggggcgagaggggagccttcacaagtgggtggggttggagggcctgggtataaggaggtttggatgctgcaggcgaggactagtgcgtgcgtcacgaaggggcgggcccacggtggatgggccttctcggcgcccggggggaaggagagggtcttgagaagcgatgttgccgggtcttaaaaaggcggagcttagaggtaaattgccttaggggcggggcagatgagaggtccaaaggggaggagcgacgcatcggtgttcgcgtgggcggggcctcgggagggaatgagaggggcgggacattctaaaggggaggggctaaggagaacaacccaaaggggtggagcttagaaccagaaggcctgggggcgaggaacaagacctcggagtatttcaaggggagacctaggttcgtaaggggccgggctcccgcgggctcgcaggagggcggggcctcgagctccgggggcggggcctacatctcggggtccgccctagttgtctcgcccacttgccttcacccgcacccccgttcttttcggttatttt

SEQ ID NO: 21592 - DNA, 2300 bp, Homo sapien
tggtcttaaactcctgggctcaagcgatcctcccacctcagcctcctgaaaggcggggattacaggtgtgagccactgtggcccacctctgggcaatttttaacatttgatttatgtcaaaaaatagccccccaagtgtcctgccttggggtaaacagggttatggggttactcgtatctgcccttaaggaacaagttctacccctgttcttccctccaggctcctggtccacccccaacttccagcagaattgtctaggaactactggataccaggatacagtaaggaagagattagatctgacacaatgtttacttagcaacagcaacaaaacaacagcagtagtaacagtggaaataggttccgtggtttaagagtatagagtctggaatttcatcttcaagccttggcatcaccatgaattcactctgtgacttatcttctctcaaccttagttttctcttctgtaaaagagataagatacttcgcccaatagtacacattaaatgctgtatatatattagttattccttattaagtactccctatatatctgctaagcactttttacatatgaaactctaattaatcctcagcaacaactctaagaggtaggtactattatccccattatacagatgggaagcaatttggcaggaacatggagctggcgagtaacagaatcaagccctaaccctttgcctgattcctagggtgtaatctcttaaccactatggtgcattgcacctgctcactccaaggcctaagagggagaggagtgaaggcctaacaggcacatcgtgatcgatgaggagggcctggtgtgtgaggggtgtgctgggattcctgggtcccttatgtaattcaaaccctgaggtggaaaggagggaggaagttttggattttaggcagagttgggtgaacaccactccgtctgggctgctttaagagcagaggacagggccaggaacactggctcaagcctgtaatcccaagctttggaaggctgagagggaaggattgcttgaacactggagttagaggcaaacctgggcgacatagctagacccctctctacaaaactttatttcttttttgacacggagtcttgctctgtccccaggctggagtgcagtggcgcgatcttggctcactgcagtctgtgtctcccgggctcaagcaattctcctgcctcagcctcccaaatagtggtgactacaggcgtgtgccaccacgcccggctaatttttgtatttttattagagatgaggtttcaccatgtgcccaggctggtctcgaactcctgacctcaagtgatccacccacctcagcctcccaaagtgctgggattacatgcgtgagccaccgtgcccggcctctacaaaactttaaaaaaaaaaaaaaattggccggttgcagtggctcacgcctgtaattccagcactttgggaggccgaggcaggcggatcgcttgaacccagcagttggaaaccaggctgggcaacatgaggaaaccttgtctctacaaaaaaattaaaaacaaatcagccaggcgcggtggtctgcgcctgtggtcccagctactaggtgtaagccaccaaggctgactgatttttaaaaatttagctgggaggctgaggcgggaggatctcttgagcccagaaggtcgagactgcagtgagccgcgatggcgccactgcagtccagcctgaacgatagagcgaaatctgcctcaaaaacaaaccaacaaaacaccagcagaagacaactgagggaggaaaaggaaaatggcaccgaagttgtttttatgtcgccgcaacagtgacacccgccgccagcttgtcttgacagcggagatcccgaacgcactgcaatttacagctccagggggcgttcctacaaccccgacaggttagccgaggggcggggcgggcgggccccggggcgggttcggcgtcctcctgcgccaatgggagcacccaagcccctgcgcgggaagatgccgattggtcagtgccgccggacgctgcggggagctcgtgcgcgcggcgcttttggggcggagcctgccaccggccgccagggggcgcgccgagaccacactttcatggaggcggtgaaggcggaagcgtgggagggggccgcggtggcccaggacctgctggctctggggtaaaagggtgtgcggtgaggctggtgggtgcaggaaggccaggtctgccccctggacgcggacgaaaagggattcccagtgacatccccgccccctcccgctgcctcggtccccacaggtatggag

SEQ ID NO: 21593 - DNA, 2300 bp, Homo sapien
acacccgccgccagcttgtcttgacagcggagatcccgaacgcactgcaatttacagctccagggggcgttcctacaaccccgacaggttagccgaggggcggggcgggcgggccccggggcgggttcggcgtcctcctgcgccaatgggagcacccaagcccctgcgcgggaagatgccgattggtcagtgccgccggacgctgcggggagctcgtgcgcgcggcgcttttggggcggagcctgccaccggccgccagggggcgcgccgagaccacactttcatggaggcggtgaaggcggaagcgtgggagggggccgcggtggcccaggacctgctggctctggggtaaaagggtgtgcggtgaggctggtgggtgcaggaaggccaggtctgccccctggacgcggacgaaaagggattcccagtgacatccccgccccctcccgctgcctcggtccccacaggtatggaggtgtcccgggggcggcgtcgcggggcgcctcatgcccagacttcagggggctgtgcgtgcggctggcggcggagctggcgacgctgggcgccctcgagcagcagcgagaggcgggcgcggaggtgctgagcgccggcgacggtaaacacggagcgggagggtggcaggggggccgccacggggccaccgagccctgacacccctgtcctcgcaggccctggcgcggaggaggactttctgcggcagctcggcagcctgctgcgggagctgcactgcccggatcgcgcgctctgcggcggggatggcgcggctgcgcttcgggaacccggtgccggactgcgcctgctgcgtgagtcccgggatgcagaagtggcaaggccatggcctccggagcggcgggctctgactttttaggggaaatcgaggttcccaaggggtgtggtcagaactttggggcggcccagagggtacgaggtgggtggggtgagcatgttggggcaagcagagcgctctaaaatgggcgggggtagaatttcgttttattttttatttattttattattattatttttgagatggagtttcactcttgttacccaagctggagtgcagtggcgtgatctcggctcactgcaacctccacctcccaggttcaagtgattctcttgcctcagcctcccgagtagctgggattacaggcgcgcgacaccacactcggctatttttagtagaaacggggtttcaccatgttagccaggcaggtctcgaactcctgaccccaggtgatctgtccacctcggcctcccaaagtgttgggattacaggcgtgagcccaccacgcccggcccggggttagaattttaattggagggcctaggagctcaagtgggttggattaggaggaaggcttgaggtttcaaagtgggcaggagtggaattcgtaggaggggacagggtctcaaggtggggcttactctggaaggctttaggtgggggggactagaaggtggaggattttgttttgttttgtttttaagtggaggtggggtctccctatgttgccctgtctggtcttcaactcctggcttcaagcgatcctcccacctcagcctcccaaggtgttgggattacaggctacaggcatgagccactgtgcctgggcaaaggtggaggttttaaagccggtggagcctcttttttttttgaaatggagtctcgccctgttgccaggctggagtacagtgacatgatctcagctcactgcaacctccaacttcctggttcaagcgattttcctgcttcagcctcccgagtagctgggattacaagcactcaccactatgtcctgctaatttttgtatttttagtagagacacagtttcaccatgttggccaggctggtctccatctcctgacctcgtgatccgcccgcctctgcctcccaaagtgctgggattacaggtgtgagccaccgcacccggccatcagtggagctttttgaccaagatggatgagtgggtagcagcctccctgagtgcacagcacccatttattactttcaggctttctctgctcagagctccaagccacccgcctcctgtgcctccgctctctgctggatccgagtcctaggccaccccttggtgaaggggtagtggagggagccggcatggtccaagaactggaccttaccctccaagccctggggctgcccagacctgcaccagggacccccgccagccagctgctgcaggagttgcatgctaaggtagagagtcagagtcccctcccgacctgggctaccccactttccttgtgggggtgg

SEQ ID NO: 21594 - DNA, 2300 bp, Homo sapien
tgcttgaaccatttgaaattgtcatatattacctacccaaggatcagtttcatgtgcttcaacatatatatgcattagcttttgccatctggacatcatcatttcaagggaaggtggggatctgtttccttcatgtgaaactgtcccgattgtatgtgtgtgttgtgtgtgtgagtgtgtatgcaaatatactcagtgtagtggatgtgggtatgaaatgaacactccttgggcagaacagatagaggttgatttcaattcatcttccccagccttccctttgcttactgtataccagtcaggtgtacagttaagagcatatagacgcccaccctgactcacacctgtgtgaccctgggcaaattacctatcctctatgtgcctcaactgtctcacctctaaaatggaatgatactcacctcatagagttatgaggattaaattatttaatatgattacttgtcaaatatagtgcctggctatattgaaacatgcctcctcagatgggagaggagcatggtgacgttaaggacatgtagcagcctgagggttgggggacagatgacaaaggtcactccggctagaccaggctaggacatcagagatcgtgactgctagttggatgccatggaagggcagggcctgagcgccacggcccaccttgacacccacctcgctcccagccccaggacctgcggagctacgttttgcagggctcagtacgaggctgcccggccctggagggctccgtaggtctcagcaacagcgtgtcccgctgggtgcaggtgatggtgctgagccgtcccgggcccctacagcgtgcacaggtgctggacaagttcattcacgtggcacaggtgaggcccgccccttggggctgcgaactccactgcacgcagccacctggtccttccccttccagaccctcgaccccacagggtcatcccggcggtgacgtcacgcatctcccggccccgcccccgaggccacagcctgggcattccaaccaaggaccgtaacttcttctttggccttgatgtcaccgcgtcgcacccaccgtggccccaccccttggccctagacgtgacaggctcccaagccctatgcccgaatattctatccccaggtcaatgagagtgtctcttccatgcccccacctttgtggggcatggaagcccgaggcttcaatccccagtccccaggccccagcggtcgcttcgggattgtgcatcgctccccattgcgtccgggctctccccgccccgccccattgtgttacgcccttctcttcccctcccttccccctcctttccggacaccttctcgcccttctggggaaaagggaagccctacggccccgctgtggccgcgcccccttgcgtatttccacgcagaccacgcccttcctctggtgtcttccctggcttgcttactcctgcagggcccctgagacctgggggtctcgacgtccgcctggggtgtccttagtctgagcattttccattcctccctggccccactctctccacagcaacctctgccgaaatttgtcaaaaggagggcaagggaattccccagctgccctggtggccccacacctgtctagcatctgtctgactcctccatatctctctggccctattcacctctgcctggctcccagctcctgcccagagcctgcaccttcttgcctccccgcacctgtgtgactctcagagcagtcagacccccagatggctgacaccctgacatgtctgaagcctcctccacctgacacacacctgtctattccccaaatccgcccaacttctcgtacttcctgtctccccagattttctaacctcgtatcagtcaatcacttgcttgaccctcccggctcagatagccatctgacacccctgtgaggcccacacatggcatgtcccactcttgccgcacacacccgccttctctcacctgtctgatccccacattggtccacacatgcctgggaccccacctcaactgggatgctgtcatctgaactcctgacttgccctccctcccgtgacggccctgtgtgcatgcttctcttcctagaggctccaccagctgcagaatttcaacacgctgatggcagtcacagggggcctgtgtcacagtgccatctccagactcaaggactcccatgcccacctgagccctgacagcaccaaggtgaatcccactaccctccccaaagctccaagtggtcagctgtcttgagcccccacacctaattccccaagccctgtccattcctgcccaggggtcctggtacc

SEQ ID NO: 21595 - DNA, 2300 bp, Homo sapien
cagagcaggactctgtctcaaaaataaaaaaaaaaaatagaagttagcatgccaccagcccgcttagtcactatccacaacacctatctctaaataaataaatatatatatataagtcatggaattgtcacataatgaaagactatatggaattattattattattattattattattattttgagacagagtctcgctctgtcgcccaagctgaagtgcagtggtgcaatctcggctcgctacaacctcctcctcccgggttcaagcgattctcctgcctcagcctcccaagtagctgggattacaggcacgcaccaccacacctggctcatttttgtatttgtagtagagatgggagtttcaccatgttggccagacgggtctcgaactcctgacctcaagtgatctgcccatctcagcctcccaaagtgctgggattacaggcgtgagccaccgcgcccggccaaaaaaaggaataaattataaccaaatatgataacatggaagaactgcaaagacaagacgtggagagaaagaacccagattcaatacaggagtccatttttatccagctcaaaacaagacaaaactactgcgccagacttcgggcgagtggggatctgtgggaattcgtgctgggaagaaagacagggggcttgtggagggtgagaatgttctgtgtctggatttgtatgaatgtcacacaggtttgctcagttggtgacatttcatcaacctaaatacttaatgattcgtgatcttttttgtacttcaatttaaaaaaaagtgtcgagcatgacacatttaggtaaaaagaaaaaaatgcacactcaaaagaaaagtctgtttctaggagcacatgtttatatgatgtgcttaaacgcacagacagcagtttggacgaaactcgacaacgtgtcatattggtcacaccctgcttaagaaaggcaggggatggggaggggcttccccaaggctttacctccatctctaatgttttttgatgtgtgtgtgtgttttttttttttgttttttgttttttgagacagggtctggctctgccacgcagactgaagtgcagtggcaccatcatggttcactgcagcctcgacctccttgggctcaagcaatcttctagcctcagcctcctgagtagctgggactacaagtgtgcatcactacgctcagctaactttttttttttgagacagagtttcgctcctgttgcccaggctggagtgcaatggcgcgatctcggctcacggcaacctccgcctcctgggttcaagcaattctcctgcctcagcctgccgagtagctgggattacaggcatgtgccacaacgcctggctaattttgtatttttagtagagacggggtttctccatgttgctcaggctggtcttaaactcccaacctcaggtgatccgcccacctcggcctcccaaagtgctgggattgcaggagtgagccaccacaccggcctaacgttttacattttttgtagagacggggttttgtcacgttgttcaagctggtctcaaactcttagactcaagcgatccgcctgccttggcctcccaaagtgctggatgacaggcgtgagcccctgtgagcccccgtgcctggtccggtatgtaattttttttaaggtaacagtggattgtgtgaggattaaatgagttaatatttttaaagtccttacagcagtgtgtggtacacagtaggtgctatgtggaggtttgttacaataaagtcagaaagtgaaaatgttttccagggtacaaatggtatcacttaaactaggaataagagacgcctatgaagaaatatacaaaatactatgtcttgtgagtttccattcaaaccttcatgaattatatatatgaatatgtccttctagacagacagacttatctttttgagtgagtgtgtgtgtttttacataaatatcagtcatgctttaaaaagaaaagccccttcttttattgaagtatgacagtgacgggtctcgacaccgaaagatgggggagatagagagcccgccggggagcttgagggtgggagagccagcgatgccggaaacctcagcagaagggatccccgtgtgggggaggggggccttcggtctctccccagcctcttccttccccctggcctgagggtgggtggggaggggcagttcctctttccttcccaagcaccgaggaggccccagctccctaggggctgagaagctggagtcctgggcaaggggaggagctgagccctactcttgcaagacccccggcctcctcac

SEQ ID NO: 21596 - DNA, 2300 bp, Homo sapien
agagctggaggcagcctgggtgtccgctcccagtaggggtaggtggaaaaacagaagggatcagtcaccagagaatcctgcaaagccaccactgtcacacaccaggtgtccacagagcaacaagggtaggtcttaaaacacataatgatgactgacaaaaataagaaacactattaatatcttatgatataatgctcaatgacacagaatcattttacatttacataaagttttagggaaaaacaatatttaatatacaactatgcgttggataatgtataacagatacaacatagaattgtattgtactgtataattatattagcctaaatatataattatataattatacattatataatgccaaattatataattccataatatgacacaaacttttgtgctatttattgcagttgtgttaacatcagtatttaattatggaacacctagaaacctgctataccttgaagaacggtttctatgtaattttgtttaactatgggatattgttttatataacttactgtataccactacatgttaataaaaaaaatttttttttttttttttgaggtggagccttgctctgtcacctgggctggagtgtagtggtacaatctcggctcactacaacctctgcctcctgggcttaaatgattcttgttcctcagcctcccaagtagctgggattagagtcgtgtgacaccatgcccagctaatttctgtgtttttagtagagtcagagtttcaccatgttgaccaagctggtctcaaattcctggcttcaagtgatctgtctgccttggcctcccaacgtgctgggattacaggcatgagccactgtgtctggcctagtaataattttaatagggctggacgtggtggtttacacctgtaatcccagcactttgggaggctgaggtgggcgaatcatgaggtcaggagttcgagaccagcctggccaacatggtgaaaccccgtctctaccaaaaatacaaaaattagccgggtgtgttggcaggtgcctgtaatcccagctactcaggaggctgaggaggagaatcgtttgaacctgggaggtggaggttgcagtgagtcaagatcttgccactgcactccagtctgggcaacaagagcaagagtccgtctcaaaataaataaataaataaataaataataataatagcaacacttacattacattaaccaggcactggcactgttttaagttttatctcatttaattaattatctcatttaactctcccaacaaccacgtgaggtcggtactattaatattccccttactggatggggaaaccgaggcacagagaagctaagtggcttatccatgtaactcaaggaagtggcaaggctgggtgggattcagatccagattatctggcttggagtcggagtccttgttcttttttttttttttttcagacgaagtctcgcccaggctggagtgcagtggctcaatctcggctcactgcagcttctgcctcccgaattcaaggagttcaagcaattctcctgcctcagtttcccaagtggctgggattacaagcatgtgtcaccacgcctggctaatttttgtacttttagtagagacgggggtttcaccatgttggccaggctggcctcgaactcctgacctcaagtgatccacccacctcggcgtcccaaagtgctgagattacaggggtgagccaccactcccggccggagtccttgttcttaatcactatgtttggtgctttttaaagtcaggagatctggtgcacatccctgctctgctgcgtgatatcttgcaagaacttccccactcagagcctcagtctgccctctgtgaaatgggagaatgatggcacgttacttaccgtggtggggagaaagcgcaggtacctcctagatactctctctcccaccccacctccggcggccaacggccaagcaaacctccagccaagatttggggtatgtgggcagggctccggcgaaggggagtggccggggagtcctggtccaatggggcccgggggcggggacttcctcccatctctgtccagcatgcgtgtactcctcgcagttccatctacctcgcgggtgcctctggtgtctccagaggtctccgaccccagcccgcccccagccctcccgcccagcccgcagccccctccctctgttccccgacctcagaccctgggcttccgacctcgacatcatgggtgacgcagaaggcgaagacgaggtccagttcctgcggacggtgcgtatctctgggttaggggcct

SEQ ID NO: 21597 - DNA, 2300 bp, Homo sapien
cagcactttcggaggccgaggcgagtggatcacaaggtcaggagttcaagaccagcctggccaagatggtgaaaccccatctctactaaaaatacaaaaatttgccgggcagggtggtgagcgcctgtaatcccagctactcgggagtctgaggcagagaattgcttgaacccaggaggcagaggttgcagtgagctgagatcatgccactgcactccagcctggcaacagaacaagactccatctcaaaaaagaaaaagaaaagaaaaaaaaagaactgagggtacccccatcaagaaatggggactccgggttaggggctgggctgggtgccagggtgggtctgaggttcatcaccagagataactcccatggtaggccacgatgttggcgtgccggcaagttttcaatatgaggatttccttctgaagggtggagacatcatcatctgtgaggagggcgggagagaaaaggcagctcgcatggggagagagctacaggggaggtgatcccagtgtcccaggaggcgaaggtggggatgtggggaaggagctccatgttccctcctcaccaggctccatcttcaccatcttcagtgccaccaggtcccctgacaccttgtctcgagccttgcaaaggggaagttggcagtcaggcaggctccatttgccagagtccctccacagcatccctgagtcaaggtcaagaactgggaccccctcttgcagcctcctccctgccgagggcttgccttaaaggtcactggttgtagggtgttggggacagaggggcttcctcaccttaaagacttccccatacgtgccgccacccagccgctgtagcaggtcatagtggtcccgggggtctctattgaaaatgtcagggtccacgacgtccatccctgggggcctgagctgggcctgcgcccaggggccagcagggcctcagggctcaacttctggcacctccctccgtccccagaagccctgcacccgccttgcctccgcgggctgtggcctcccccctcctcactctcgcttcctgccccagctgcactgcacgactgtgcaacgggctccacccccccgtcccctgggctctgagagcctctgaggggcagcttgtcttgggacccaagggaccaccctcaacctccaaggcccagggctggatgtaaatgtgatgcaaatgatcttaatcgtaactgggttggaggggggtgccttagaacccccgcccccgtctcctaggtagtgtctaaacctctgctgggtgcttgaaggtttggccacaacccgaaggcggcaggtctgcaaagggatggctatgcagtgtacatgcctgttcacctgtcacatacatgcacttgggttacctcctctgcactgcgcaggcgtgtagacgtgcatctgcctggatacctgtgtgcacagtacacacgtggatgtacccaggacatatacctccacatgcatggcacataactgcattttgtaggcctgcagtgtacaaaacctatacataatatataattcatggcagtacaaatgggacgctcgccctcagctccaagaccggaacctaatggagacggggcgcgatccggcgaagtccaggagccctcaccccagcccctgcccggcagagcacagtagctttgtgggaccctcctcctggagctggggaccaagggctgagacttgaaactggagagctcaggatcctgcaccaggcgcccaggcctgtggcaagagggacctcagaacacctccctcggaacttggccatggcctaaacgtaaggctgctgcgtgcattcccgcagagctccgtggcctcatggccgcgcgcaatacaacgcgcgcgcacgccgccagagctccgggtgcttcccggtgagttcgcgcgcgcacgctcccgcgctaccggcactggaactgggtctgtgaggcccgggaaaagcttagccccgccccctcgccacgagaggcgcctgcgcactgggatccagtaagatttttctcacgctgtctgtccagcttgagtggcgcgaatgcgcacgcgccaattgcgcctgcgaggaagaagtcacgtggcagccggaaagcgtggcggctgctgctagagcctttccctttaccgcacccaaggagctggagcgacaacaacgacgtcgtttccgtttccaccacctcttcctgttcccgtccttgaggacgccgtgccgggtcagtgttagcctccagccctggttgtggaaggcgacagaagtcatggcgatgtttgagcagatgagagcca

SEQ ID NO: 21598 - DNA, 2300 bp, Homo sapien
ctcaacctctgagccagtcagtcactgcagcttgtacacctggcctcctgaatgtctctgctactcaccccttcctcccctgttcaggcctccaccctgatccagccccatcctctcctgcctacctcgctgcctacttcctccatgtccacctgaacactctggcctttgcttcccccatttcagttctaatctctcccggctatcgctgtctgctgtcaggtttgtctcccttatggaaagggaactcagaccgtgaaggcatgatctgccgctgtctgattcgcctgtggttcccagcattgcctagcactgacagtttatttcagtaaacgtgtggagaatgaatgacttatagagcagagaagggagagattaagaggcactcaaaggaggcggagcagagaaggaaaccttaaggcaatttacgaagagactgagtggtaccaagattctctcgcttctaggcctttgcagtgcttttgtttctttcttttagagacggggtttggctgttgcccaggctggtctctaactcctgggctcaggcgacccacctacctcggcctcccaaagtgctaggatcacaggcgtgagccactacccccagctcagtgccgtttctttaagcatctcctcctccaggaggatagagaaaccccaccccgcggcaagcccaggaccctgaacaccccttgctgtctccggaaaaccctctcctccgccccgcttggccagagcgcttcctccaaccgggctcagacctgtcgatacccttgagcaacttgcccacgttggctctcatctgctcaaacatcgccatgacttctgtcgccttccacaaccagggctggaggctaacactgacccggcacggcgtcctcaaggacgggaacaggaagaggtggtggaaacggaaacgacgtcgttgttgtcgctccagctccttgggtgcggtaaagggaaaggctctagcagcagccgccacgctttccggctgccacgtgacttcttcctcgcaggcgcaattggcgcgtgcgcattcgcgccactcaagctggacagacagcgtgagaaaaatcttactggatcccagtgcgcaggcgcctctcgtggcgagggggcggggctaagcttttcccgggcctcacagacccagttccagtgccggtagcgcgggagcgtgcgcgcgcgaactcaccgggaagcacccggagctctggcggcgtgcgcgcgcgttgtattgcgcgcggccatgaggccacggagctctgcgggaatgcacgcagcagccttacgtttaggccatggccaagttccgagggaggtgttctgaggtccctcttgccacaggcctgggcgcctggtgcaggatcctgagctctccagtttcaagtctcagcccttggtccccagctccaggaggagggtcccacaaagctactgtgctctgccgggcaggggctggggtgagggctcctggacttcgccggatcgcgccccgtctccattaggttccggtcttggagctgagggcgagcgtcccatttgtactgccatgaattatatattatgtataggttttgtacactgcaggcctacaaaatgcagttatgtgccatgcatgtggaggtatatgtcctgggtacatccacgtgtgtactgtgcacacaggtatccaggcagatgcacgtctacacgcctgcgcagtgcagaggaggtaacccaagtgcatgtatgtgacaggtgaacaggcatgtacactgcatagccatccctttgcagacctgccgccttcgggttgtggccaaaccttcaagcacccagcagaggtttagacactacctaggagacgggggcgggggttctaaggcacccccctccaacccagttacgattaagatcatttgcatcacatttacatccagccctgggccttggaggttgagggtggtcccttgggtcccaagacaagctgcccctcagaggctctcagagcccaggggacgggggggtggagcccgttgcacagtcgtgcagtgcagctggggcaggaagcgagagtgaggaggggggaggccacagcccgcggaggcaaggcgggtgcagggcttctggggacggagggaggtgccagaagttgagccctgaggccctgctggcccctgggcgcaggcccagctcaggcccccagggatggacgtcgtggaccctgacattttcaatagagacccccgggaccactatgacctgctacagcggctgggtggcggcacgtatggggaagtctttaaggtgag

SEQ ID NO: 21599 - DNA, 2300 bp, Homo sapien
gactgggattggaacccaggcatgtccaattcccaaactccagaataaagcagctgcctggcacctggtgaggattggggacttggaggtgccactgtggccacgtctcttgttctttttcttaggtaccagttcaacccagccttctttcagaccacggtcaccgcccagatcctgctgaaggccctcaccaacttgccgcacacagacttcaccctgtgcaagtgcatgatcgaccaggcacatgtatccttccagcactggggccggggggtgtgtgggaaggggtcagagtcaaggtgcatgaattcccagggagatggtctgtgggtgtatccacaaacaacaagtgcctgctctggtccagcgtggcaaggtgctggacagtgctgggacactggtgactgagacagtcctgggccctgtcttcacaaagttgtcgcagtccagtgaagagtcagtgatagactggagtggtcagggttgggttacaagagtcacagcagccgggcacaatgactcaggcctctaatcccggcactttgagaggtcaaggtgggtggatcacctgaggtcaggagttcgagaccagcctggccaacatggcgaaaccccatctctattaaaatacaaaaaattagccaggcacagtggcacacacctatagtcccagttactcaggaggctgaggcaggaggatcacttgaagctgggagatggaggttgcagtgagccgagattgcgccactgcactccaccctgggtgacacagtgagactctgtctcaaaaaaaaaaagaagagccagagtaggcacctgaccatttgggtgggggaatatgtggacatgaacacagccatctgtatttacattctatagaacaatgtctggaaaggtggaaaggtacccaagaattggaaatgactgttacctcccaggaaggatggctgtgagacagggaagggaagacctattttgccactgttcactcttctgtatttttaactagaaactataaaccagggcctcctggaggagggaacatctaaaacataacgagttaggtggaggggtaggcaaaggtgatccaggcagagaggacactcatgggctaaaggaagcagagctcggtgctgtctttcaggaatggtagaggaagcctgacataggaatgatttaaggtgggtttttttttgttgttgttttattttatttattttattttttttttgagacggagccttgctctgtcacccagtctggagtgcagtggcgtgatctcggcttcctgcaacttccacctcccaggttcaagctattctgtctcagcctcctgagcagctgggaccacaggtgcatgcatgctaccacgcccagctaatttttgtatttttagtagagacggggttttgctatgttggccaggctgctctcgaactcctgacctcaggtgatccacccgcctcagcctcccaaagtgataggattacagatgtgagccaccgtgcccagcctataggttttattttattagtaataatagtagggtttttttgttaatattttctttttttttgagatggagtcttgctctgtcatccaggctggcgtgcaaaggcgtgatcttggctcactacaacctcctcctcccgggttcaagtgattctcctgcctcagcctcccaagtagctgggactataggcacgtgccaccacacccagctgcttttcgtatgtttagtagagatggggtttcgctatgttggccaggctggtgtcgaactcctgacctcaggtgatccacccgccttggcctcccaaagtgccaggattacaggcgtgagccaccaggactggcatgtcatttctcatcttttgccattacaaacagtcctgcagccaacatcctttctcctgcatacacctgcaggagaaataagctggcttccttttccagctgtttttctgagctgaagctttggaagaaagcagccagaagaaggtaggtggggaggggtgatctggggtccaaccttacgctccgaggccagttttccttaatgcttcctcctcccagcaagaagaacggccaatccgacagattttgtacctcggggacctgctggagacctgccatttccaggccttctgggtaacttccctggggtccaggggcaggggagatggcagggccatgtggagctgagtgctaaaagtaacaacggtgcacactgactggcttcctgctttggcggtgggcccagtgctctgcatgtgtgtgtttgtggaattatcatcctc

SEQ ID NO: 21600 - DNA, 2300 bp, Homo sapien
tgacctggggtgatccgcccacttcggccccccaaagtgctgggattacaggcgtgagccaccacacctggccggatatttatttatttatttttatttttattttagacggagtcttgctctgtcgcccaggctggagtacagtggcgcgatctcggcttactgcagcctctgcctcccgagttccagtgattcccctacctcagccccctgggtagctgggattacaggtgcatgccaccaagcccggctaatttttgtatttttagtagagacggggtttcaccatgttggccaggctggcctctaactcctgacctcgtgatctgcctgcctcggcctcccaaagtgctgggattacaggcatgagccactgcgcccggccatttatttttaatgtaaacatttttttgtagagatgagatcttgttatgttacccagtctggcctcaaactcttgggctcaagcactcttccagccttgactccccagagtgctgggattgcaagagtaagccaccagtgcctggctgaatatttaaatttaagatgcttcctgatgcagtggctcgcacctttgtttaaatgtctgccttctccatgaagcctacctgagtagtttatttgcattccagcccatgcttgatttttctccaaatactcaacaccttggaatatacaatactacctattttttacttttatgtatatttttgagacaggatttcgcttctggagtgcattggtgtgatcacagctcactgcagactggaactcctgggctcaagtgatgtcccttcctcagcctcctgagtagctgggactacaggtgcacacagccatgcccagtgaatttttacatttcttgtagagacaggttcttgttatgttgcctaggctggccttgaactcttgggctcaagccatcctcccgcctcagcttcccaaagtgctgggattacaggtgtgagcccctgtgcctgtctacatattttttaaaattttgagtgttgaggccaggcgcagtggctcatgcctgtaagcccagcactttgggaggccgaggtgggcggatcacctgaggtcgggagtttgagaccagcctgaccaacatggagaaaccccgtctctactaaaaatacaaaattagccaggagtggtggcacatgcctgtgatcccagctactcgggaggctgaggcaggagaatagcttgaacctgggaggcggaggttgcagtgagcccagatcacgccattgcactccagcctgggcaacaagagcgaaactccgtctcaaaaaaaaaaatttgtgtgttggttgggcgcggtggctcacgcctgtaattccagcactttgggaggctgaggcgggaggatcgcttgagctcaagagttcaagaccagcctggccaacatggtgaaaccccgtctctactaaaaaaatacaaaaattagccgggtgtggtggagcatgcctgtgttcccagctactcgggaggctgaggcaggagaattgcttgaatccgggaggcggaggttgcagtgagccgagatcgcgccactgcactccagcctgggagacagagcgagactccgtctcaaaaaataataaaaataaaagtagatttgtgtgtatgtggcttcctttactagaaggtagtttcatgaaagttgggatttttttctgtttttagtgcctgcgtaaaacatagtctggcacagaataggtgttcaataaatatttgttgaatttgtgtcgctgaatgggaacccggtgcagtgcattccaagcctgagctggttcaggtccgatggcggggcctgcccttatgaatcattcatgatctggccccgcccatacgcgaacgacgcgcgcgttcacgccggagagggggcgcggctcgcccccgggctgagtcgggcggccaggaagcgggactctgcgcaggcgccaagctccggagcgcggccttggtgccttttctggtttggcaggcgcgcgcgcgcgggagggcggcaacctcggcgctgtgcgcaggcgcggcgggcagtgcgcaggcgcgggcggagggcgggctgaagcagctgaagcggcggtagcggcggcggctcgggcagaggggcgggagctgaggcgggagcggacaggctggtgggcgagcgagaggcggcggaatggtggactaccacgcggcgaaccagtcgtaccagtacggccccagcagcgcgggcaatggcgctggcggcgggggcagcatgggcgactacatggcccaggaggacgactgggaccgggacc

SEQ ID NO: 21601 - DNA, 2300 bp, Homo sapien
agcttccccacctgtgaaatgggcatcgctgtagttcggtctcacaggattgttctgggcgtgaaacgagctcctgcaggcaaagggcttagcacagtgcctggcacggcagctgccatttaggcagctgccagggagccacagtggtggggagtgtggttcttcccagcctcgggccagaaaggcctcttcacctcctcagcatgcgattggagcttgtgtttggagtgttctgctagagggcacgggccaggagggtggagggaggacccctgacccacactcccgcgggagggtgggcagggaccagcagcaatggacgattcgtcaccacagaccccaactaacagcatgtttgccattggactcacccctacgggccccgaaccagccccctgcccaccacatggcctcaccagattgcttttctttctacccacactgctcccctgtgcttagggctgaactccagtctggaggctctgagggattttgggggagcagggactggcaggcaagcccaggacagtatgggtgggtgctgaggcactgggcctggaggcttgtcactggcccctctctgagggggtagtggaggcccggctgcagggcgctggctggtcagaaaggaaagtgctgggtccctgtgtgctcctcaggacagccccgtggtgctgctcctgctgcctcgtttccccagagacccagtccaagctcttgcaagagtgctctctggggttcatgttttataaacgcagagtgaaccccaggtctagcgccagtgtgcccattctgtcctgagatcatttatttctagtcaccgaagcgttcccgcctcgttcctttattcactcactcattcagcaaccctgaacaccgccagtgcactgagccccaagctggatgcgggaactcagcggtgaaacatgattcccttgccttgcggcagccccgtgctcacagagaggacttgagtttcgggtgccagttgtctctgccaagttaggagtcagggactgacctctgtgacccccacaagctgcagccctggctgtgttttccacactggcctggggcccatgttcattggctgaggaacctcttggacctcatctctgaggagcaccgcctggggccctgggtgtgtgtcccgcagcatggcgcggggtgtgcacgtgcgtgtgtgcgctcacacgagcaccggctgccgcctccccgcctgtctccaggtgccatgtgtggaggggagaggctgggcgtcgctgcctgcagcactggctctgagccgttggccaagcctctccattttccttccccatcactctgtagaccctcctcactctttctgttcctgttctgttgccgtttcaactcctcctcttggaccctttctgtgcttcctgaaaggtacctggtctctctctccccgtgtgcaccccctgcctcctctacactgttcactgccccctagcaggacagggcaggacgctctcctgtagttcaggcccagggactatgtccaccactctcaccctccaaagccccagcacttttctgccccacggatggtgacttctgtcctctggagctcctattaacattgcctccaaggcaggagagtggacaggcctgagtgtgctcctgtgcacggaccactaggctcctccgggacccgggcgcccctgctctgttgcccccagctctccagctctcggcttcccatcctttcaccttcccaccgggagagactcctccgcagtcttaggtccaacgcagccgacccgtccagcctcaccctcctctgtgtggggcactagagggtttgcgagcagcagtgggagggctccccaaccctcctcggtgcctccagggtctgggctttctggacccaggggcattttgcagtcagcagtgaggatgccaacaaggcctattgggacagggcaccatctcactggagctgtgcttcctctccttcccctctgtgaggagttccgtgggccatggaccagctgctttcaagggacgtgcccgtcaggagggagggtggccagcccccaggcagccctgactgtgtgctcccctccaggctgaaactgccgccaaccggatctgtaaggtgctggctgtcaaccaagagaacgagcacctgatggaggactacgagaagctggccagcgacgtgagtgttcccccagtgaaagtcagggccacctcattatcctcagccagaggtcactgtgactcttgcagggggaaagcaggtgtggcagcgagatgacctagaaaaggctgcgtgg

SEQ ID NO: 21602 - DNA, 2300 bp, Homo sapien
ggggttcatttctggagcctgaagggtatttgacaatatttaagaaatgtgaggggctttgggatctgggagtcatttccgggatcttgggaccccctcgaggtggggccgggcagggtctgactgggccaccgtgcaggatggagctgcgggacttcctcctccatttcgacaccgtgcagatctgctcgctgagcccggaggtgctgggccccagcccggaggggggcggctggcacgtccacaccttccaaggccgctgggtgcgtggcttcaactccggcgggagccagcctaatgctggtgaggcctgaggggccctgagaggcttcctggggtggggggcgctgtggccggctaggaaacccccttttttcctcctcccttagaaaccttctggaccaatcctcagttccgtttaacgctgctggagcctgatgaggaggatgacgaggatgaggaagggccctgggggggctggggggctgcaggggcacggggcccagcgcgggggggccgcacgcccaagtgcacggtccttctgtccctcatccagcgcaaccggcggcgcctgagagccaagggcctcacttacctcaccgttggcttccacgtgttccaggtgaggtcctgggcaaagctgaggctggagggaacccggagggtggaggggcggggccgggccaaggagcgggggaggcatggaggggcggggccagtgggaagaggggaggtgtggagggcggggccaagggggaagagggggagtggtggaggggtgggactgaagaggatcggggaggaggggaggagtggaggagcagggccaagagggggcggcgctgggaggggagtagggggctagtagggctggggggccaggtctcagaggggagagggagctaagggaatgagagggaggggctcagggacagacagagggacgaggttagggacagagagaggctgggggttagaagggccagaggggaccaaggatacagagaaggcgctgggagcgcagatggggaaggaagagttggggaggggtcggcgagggcctgggtcggggactgcggggcaaaggttcaataagggtctaataggacgaagaaggagggagagagcacagaggtgagaaggggcagggaggagaccctgagcggcggccacctctcccctgccccgacgccccttgctcttgcttctttcagattccagaggaggtgagtctgggatggggtcaaccggccctggggcttggtcaacctgccctggggcttggtcaacctgccctggggcttggtcaaactgccctgggggtgggggggcagagccgggtccgggggcaggggaggcgtggacaggggttaggcagggtggacggggcgcgctggagggtgcggggatgaagggccgggggtgagcctggtccgtggtcatgccgccccgtccccagctgctgggcctctgggattccccgcgcagccatgcgctcctgccccggctgctgcgcgccgaccgctcgcccctcagcgcccgccgcgacgtgacccgccgctgctgcctgcgtccaggccactacctggtggtgccgagcaccgcccacgccggcgacgaggctgacttcactctgcgtgtcttctccgagcgccgccacacggccgtgtgagccccgggcacccaaatccgaccccatccctgcctagacaggccccgagacccccgagacccccgagacccccgagacccccgagacccccgagacctgacctgccccgcccccagaacccctgccccgccccgccccgcccccagaacccccgccccgccccgcccccagaacccccgccccgccccgccccgcccccagaacccccgccccgccccgccccgccccgccccgcccgcagaaccaccgccccgccccgccccgcccccagaacccccgccccgcccccagaacccccgccccgccccgcccccagaacccccgccccgccccgcccccagaacccccgccccgcccccagaacccccgccccgcccccagaacccccgccccgcccccagaacccccgccccgcccccagaacccccgccccgcgaggatgagcccagggctccacggtccctacctagaccccacgcgattcctcacctgagaccccgtcccacacagccccagctggggcaaacagccccctccccacttcccatctgtaatttgcagggagatcgacgacgtgatcagcgcagacctgcagtctctccaggtggggactgttcctggaggggcg

SEQ ID NO: 21603 - DNA, 2300 bp, Homo sapien
tagtgtcatcatagctcactatagccttgacctctgggctcaagggatcctcctgcctcagcctccagagtagctgggaccactggtgtgcaccaccacgcctgttgaatttttaaaatttttgtagacttggggtcttgctatgttgcccaggctggtcttggactcctggcctcaagtagtccttccacctcgacctccctaagtgctgggattacaggcgtgagcccgtacctccatctccttttgtctcgtttccatctcccttcctctccttttctctttcgccttcagtcactaaccctgacatggtctctgagctgcgtgccattcagttcagtgctctggttggctcctgccttggtggcaggaggttgggggcagggaggagcagctgccctcctgtcccctaccttggcctcaccatcccatcccctgcccagagtgatcggggtgagtaccgcacagaagagggcctggtaaagggacacgcgtattccatcacgggcacacacaaggtaagtgtcccccatgggtggggtggcaggccatgtccaggcatcacccccactgacgatgctgccccaggtgttcctgggcttcaccaaggtgcggctgctgcggctgcggaacccatggggctgcgtggagtggacgggggcctggagcgacaggtgggatgggtctggggtgggtgtggggctggaccccacctgcccgcccctcacaccacagtctctccagctgcccacgctgggacacactccccaccgagtgccgcgatgccctgctggtgaaaaaggaggatggcgagttctggtcagttcgtcagggtcccagctctgcctctgggagggtctctgccaaggggttcagggagggcgagccccagttgaaggatgggtcctaatagggagaaactgtgtacatcggtggtaattttggggccaggttctattttgggaaatcaaggaagaattggtagtaatattagagaacctctgattggagtgggtttaaaaaagtagtaatatgaggggaatttgaaggcctagttatctgtggaggattgaaagggatgggcagtatttagggcaatggaggaaggcttggtgatatttggggcatttcttgagatttggcaatgttgaggggctgaagggtacttgttggtaatttagagtctgagggtcttgctatttgggggttggtggcaatttaacgatatttgggggcagcttgtgaatcttggcgatttgtggggcatgtctgaggacttggaggaatttggcagagctagaggcccaggcatttggggttcatttctggagcctgaagggtatttgacaatatttaagaaatgtgaggggctttgggatctgggagtcatttccgggatcttgggaccccctcgaggtggggccgggcagggtctgactgggccaccgtgcaggatggagctgcgggacttcctcctccatttcgacaccgtgcagatctgctcgctgagcccggaggtgctgggccccagcccggaggggggcggctggcacgtccacaccttccaaggccgctgggtgcgtggcttcaactccggcgggagccagcctaatgctggtgaggcctgaggggccctgagaggcttcctggggtggggggcgctgtggccggctaggaaacccccttttttcctcctcccttagaaaccttctggaccaatcctcagttccgtttaacgctgctggagcctgatgaggaggatgacgaggatgaggaagggccctgggggggctggggggctgcaggggcacggggcccagcgcgggggggccgcacgcccaagtgcacggtccttctgtccctcatccagcgcaaccggcggcgcctgagagccaagggcctcacttacctcaccgttggcttccacgtgttccaggtgaggtcctgggcaaagctgaggctggagggaacccggagggtggaggggcggggccgggccaaggagcgggggaggcatggaggggcggggccagtgggaagaggggaggtgtggagggcggggccaagggggaagagggggagtggtggaggggtgggactgaagaggatcggggaggaggggaggagtggaggagcagggccaagagggggcggcgctgggaggggagtagggggctagtagggctggggggccaggtctcagaggggagagggagctaagggaatgagagggaggggctcagggacagacagagggacgaggttagggacagagagaggctgggggttagaagggccag

SEQ ID NO: 21604 - DNA, 2300 bp, Homo sapien
cctccacctctcgggttcaagcgattctcctacctcagcctcctgagtagctgggattacaggtgcgtgccaccacacccagctaatttttttgtattttttagtagagatggggtttcaccatgttggccaggctggtctggaactcctgacccgcccgtctcggcctcccaaagtgctgggattacaggcgtagtaaactaccgcgtccagcctaatttttgtatttttaatagagatggtgtttcaccatgttggccaggctggtcttgaactcctggcctcaagtgttctgcccacctcagcctcccaaagtgctgggattacgggcatgagccaccatgcccggccctgttttggggggttttttgagatgcagtcttgccctgttgcccaggctggagtgcagtggcacaatctcggctcactgcaacctccgcctcccagattcaagcggttctcctgcctcagccttctgagtagctgggattacaggtgcccgcaactatgtccggctaatttttgtattttagtagagacggagtttcactacattggcctggctggtctcgaactcctgacctcaggtgatctgcctgcctcggcctcccaaagtgctgggattacaggcatgagccaccacgcccagccagaaagcctgttttgtaacccacttttggtagccgtgtacgtgggtggcttggacaatatttgtgggtccacttggagggaagaaggccaaaaggcttgagggacatctgagtggcgtggaggtgacaaggctctgggagggcagcagacaccctcaacgagggtggaaggtctgctgggaccagcactgctgaggctctggcatctccgtacctgtttctcccatttcctccaatggctccagagtcctttgggggaaatactgctccatccagactctgagtggcgtgggccagggcagggcatcatggtcaccagatggctcccagcacaggagaggtacagagccatccctccagggtcagcctccctgggcaagcaggctgagtctaccttgtccgggaggggaggaggcgcatcctgagggcttagggggcgtgagcggaggggagctcagggtccctcggtggatgatggaggagccacatatgggttacagggacagacagaaagatggagaggaagagacagggaggcagacacaaggtacactgacagggtctgaaggaggaggggctgggggcctggactcctgggtctgacaggtacagagaggaacagacacacgctgaaagagacacaaagagagaggggacaggcatagtgattcacgcctgtaatcccaacactttgggaggccaagcggggaggatcacttgagcccaggagttcgagaccagtctgggcaacaaagtgagatccccgccccatctctacaaaaaaaaaaaaaaaaaaaaaaagagggtggggtggggagaggggtggagttggggaaatacagagacacaaatattgccagaaacaaaaaacaagaaagggccaggcacagtagctcacatctgtaatcccagctctctgggaggctgctgaagcaggaggatcacttgaggccagcagttcaagaccagcctggggaacatatgggaccgccccccgccacccctctgtctctactttaaaaaaaattttttttaattaacaaaacctgaccaggcacagtggctcacgtctgtaatcccagcactttgggaggccaaggtgggcggattgcttgaggccaggagttcaagaccagcctggtcaacatggtaaaatcccttctctaacaaaaaatacaaaaattagctgggcatggtgacacgagcctgtaatcccagctacttgggaggctgaggcaggagaatcacttgaacctagaaggcggaggttgcagtgagctgagatcgtgccactgcactccagaaactgatggagaagaaacatgaaggcggggagagagaaactgtcagagggagggggagagaggcagtctgagagatagagacaccgaggtaaacccgcctccttccccagccccacaggcataagtaggcagaagctcacccccacactgacctccttcttggtgctctgacagcggcagccggtcctccctcagctctgcccgccttctctcctgctgctggccaagcccattaagctgctaccttggccacaactgaaggccccacgccctgggaagaaagctactgaagaggcgtccctgctccccagcaccccaaaccatcaattaatattaacgagggaag

SEQ ID NO: 21605 - DNA, 2300 bp, Homo sapien
ggtgtgaagtcatatccagccacagtgaagaaatagaaataaataaaaagatgttcttgggaaacaatagcaaggtacagaatgatgtatcaagtaatgtaaggagtgtcttttctttttgtggactgaggtctcactgtgttgcccaggctggagagctgtggtgtgatcatagctccctgcagcctctgatctcctgggctcaagcaattctcctgcctcagcctcccaagtagctggaattacaggcagatgtgcgccaacccactgggctattttattttatttttattttttgtagtgatgaggtcttgctgtgttgcccaggcgagagtgtcttctttagaatggtcaataatgttagaacaatggagtccaccattcaggggaacattctcgggaactaactgagctgggctggtggtatgatcaccggacaccctgctatcctctctgtccgtgcccatgacatgtccttggcacaaagacccctctggagctgaggggctggcctcttccttgactgagaggtggcccctgtctaagcctcagttttgtcctctgcagaatgggggtgcttgcagcccctactgaaatgcagctgctagcctccctctctgagctcatgttcccaagaactggtccctgagcttggtgccttggagtgtgtggggagggggcgagaggctgggggcctgggacgcagagggtggaggatggttctgggtctgctgtctccacccaaactttccactgccagcctgcctctgcccaggcctctcagcagcctgctgggtggggcaggagctggagtggcgagtggaaaaggtccaggagggctgctgggctgctaggagtggtttctgctcagctcccacaccatccctgcctttcagaagcatctttcagccctacccgcccctccaccaagccaattccccaaccctgagttctcttgcagagtcttaggcccaagggggctgtttcgggcctggcgggagggtccccgccttgctctgcttttgatctaggtggtgatggaatgctaggccacccaccaccccaaaacccacctcatcctgacctacaaacttggtggcatgatggtagcagtcctggaaggaggaagaagagagacttgaaggagagaagtgggacaggaatatgtggtagacagagttaggggcagagacggacagagtgagacagccagccccagagacagaacccacaggagaggtgcgagcagaggtgaggagagccagaggtcagggcaacgggtcctgcacgctcctgcctttggcaaatcgcttcccatcccagcttcagcctcctcctctgtacaatgggggtgacccatactcctccctgttggaatgatggggtcccaatcagtgatttcctgcatctcctgggcagccgaggggccttggaaatgacaggcatagtcctagtggatcccctcctttcacccctcctgactgaggacttccatgaactgggcacactccaggacccaggggtgcagcgctgaggggatcaggcaggccccctgtgaacccatgaagccaccctgtcagtcactagtgctcctattgtggccgctgttccattacagaggcagaagcttagatttcagcacggatcagtccaggcaggaggttctcagctggagagaagggtctggagttcccacccagattggcctcccaggacctaatatgtctgtgtataaaataagagaaattactaacaaataaatacatgaaatgagatagaggctctccgtgtgccaggcagcgggaagacaggggtggaggggcagtggcacaaggagccttctctgctgtgagtttattactattaaacattccctcttattatcagctcctaggagaggggcagtgcacccgggccctgggtgatggggggatcagggcccccaagaagaggtgccactcccgcttcgccgggcttgccccagggccagggtccgtgccaggtgtgggtggtgggtgggaaggggtggggtgagtcatcagggccagccccgccctgcttttatttaaggtccccagcaggccccaccaccacggctgcccaacccggtcccagccatgtccgtgagtgctccaggggcccggggcggggccaagcagggagggggctgggggctcctctttcaaaggagcaagtgggcagtgagtgtgccacggactggcctgggctgtggcctccgggtaacccccatcccgactgtcccctctacctctttgtggcttcctctggggccctctttg

SEQ ID NO: 21606 - DNA, 2300 bp, Homo sapien
tcttctgcagaatgggggtgcttgcagctcccactgaaatgcagctgcaagcctccctctctgagctcacgtccctaggaactggtcccccaccttggtgccttggagtgtgtggggagggggcaagaggctgggggcctgggacaaagagggtggaggatggttctgggtctggtgtctccacccaaactttccactgccagcctgcctctgcccaggcctctcagcagcctgctgggtggggcaggagtgcaggagttgggtggggagtggaaaaggtccaggagggctgctgcattgctaggagtggtttatttttatttatttatttgtttgtttgtttatttatttttgagatggagtcttgctctgttgcccaggctggagtgcagtggcgcgatctcggctcactgcaagctctgcctcccgggttcatgccattctcctgcctcagcctcccgagtagctgggactacaggtgcccgccaccatgcccggctaattttgttttgtatttttagtagagacggggtttcaccgtgttagccagtatggtctcgatctcctgacctcgtgatccacccgcgtcggcctcccaaagtgctgggattacaggctttatttttattttttgagacagagtctagctctgtcgcccaggctgcagtgcagtggtgtgatctcggctcactacaacgtccgcctccccagctcaagcaattctcctgcctcagcctcccaggtagctgggattacaggtgtccaccaccacacctggccaattttttgtattttctatagagaaggggtttcaccatgttggccaggctggtcttgaactcctgacctcaagtgatccacctaccttggcctcccaaagtgctgggattacaggcgtgagctaccatgcccagccaggagtggtttctgttcagctcccacaccatccctgcctttcagaaacagatttcagtcctgcccgcccccccccccccccccgcctcccccagtctacttccccaaccctggattctcttctagagtcttgggcccaagcgggctatattggggctggcgggagggtccccaccttgctctgcttttgatctaggtggtgatggaatgctaggccacccaccaccctaaaacccacctcatcctgacctgcaaaattggtgggaagatggtaacagtcctggaaggaggaacaagagagacttgaaggagagaagtgggacaggaatacgcggtagacagttatagacagagacaaacagagccagacagccagccccagagacagaacccacaggagaggcacgcccagaggtgaggaaaggcagaggttggggcaatgggtcctgcccggcttgtggaaaatcacttcccatcccagcctcagcctccttctctgtacaatgggggtgacccatgcttctctctgttggaatggtggggtcccaatcagtgatttcctgcatatcctgggcagcccaagggcctgggaaatgacaagcgtagtcctagtggatcccctcctttcacccctcctgactgaggacttcccatgaacccggcacactccaggacccaggggtgcagcactgagccaaccaggccgccctccgaccctgtgaagtccccctgtctggcactatcgtcgttgttgtggctgctgttccactggagacttagaagcagggatttcagcgcagacatttccagtctaggcaggaggttctcagctggagagaagggtctagagttcccgctgggcttggcttctcaggacccaacatgtctgtggataaaatgagcatgagagactctcctgtgtgccaggcagtgggaagacaggggtggaggggcggtggctcttattatcagctcctaggagaggggcagtgcacccgggctctgggtgatggggggatcagggcccccaagaagaggcgccactcccacttcgccaggcttgccccagggccagggtccgtgccaggtgtgggtggtgggtgggaaggggtggggtgagtcatcagggccagccccgccctgcttttatttaaggtccccagcaggccccaccaccacggctgcccaacccggtcccagccatgtccgtgagtgctccaggggcccggggcggggccaagcagggagggggctgggggctcctctttcaaaggagcaagtgggcagtgagtgtgccacggactggcctgggctgtggcctccgggtaacccccatcccgactgtcccctctacctctttgtggcttcctctggggccctctttg

SEQ ID NO: 21607 - DNA, 2300 bp, Homo sapien
actttctggagtgatggatatgttccataccctaggtcacacagctctgtgcatttgttagaactcattggctgtatattttattttattaaattctttttatttttgtttttattgagacaggatctcactctattgcccaggctggagtgcagtggtgtgatcacagctcattgcaggctcaacctctgggactcaagtgatcctcccactccagcctcccaggtagctgggaccacaggtgtgcaccaccatgcccagctaattaaaaatatatatatttataaagacgggggtctccttatgttgctcaggctgatctcgactccctgggctcaagcaatgctcctgccctagccgcccaaagtgtcgggattaccggcgtgagtcgctgtgcccagccaactgtacattttagatttgtgcatttcaccaatataaacaaagaatctttccgcaaagcttaccacaaggaaagaatcataaacaaatattgtactctagctaatgatgtacttctgaaatgtttaggggtgacaaatactgatgtttacaatttacttcgaatggataagtaaataaaatgatggctgggtgcgatggcatgagcctgtaatcccagcactttgggagacgaggtgggaagattgcttgagcccaggagttcaagaccagcctgggcaacatggcgagaccctgtctctacaaaaaataaaaaagtaagccagatgtagcaaacatctgtagttccagctgctagggaggctgaggcaggaggttggcttgtgcccaggagttcaacgctgccgtgaaccataatcaggccactgcactctagtctggacaacagagcaaaactctgtttctaaaaaaatacaaaatagctccctccccctccccctccccctctccctctcctctttccacggtctccctctggactgtgctgctgccatctcggctcactgcaacctccctgcctgattctcctgcctcagcctgccgagtgcctgcgattgcaggcgcgcgccgccacgcctgactggttttcgtatttttttggtggagacggggtttcgctgtgttggccgggctggtctccagctcctaaccgcgagtgatccgccagcctcggcctcccgaggtgccgggattgcagacggagtctcgttaactcagtgctcaatggtgcccaggctggagtgcagtggcgtgatctcagctacaacctccacctcccagccgcctgccttggcctcccaaagtgccaagagtgcagcctctgcccggccgctaccccgtctgggaagtgaggtgcgtctctgcctggccgcccatcatctgggacgtgaggagtccctctgcctggctgcccagtctggaaagtgaggagcgtctctgcccggccgccatctcacctaggaagtgaggagcacctcttcccggccaccatcccatctaggaagtgaggagcgtctctgcccggccgcccatcgtctgagatgtggggagcgcctctgccccgccgccccgtctgggaggtgaggagcgtctctgcccggccgccccgtctgagaagggaggagaccctccgcctggcaaccgccccatctgagaagtgaggagcccctccgcccggctgccaccctgtctgggaagtgaggagcgtctccgcccggcagccaccccgtccggaagggaggtgggggggtcagccccccgcccggccagccgccccggccagccaccccgtctgggaggtgaggggcgcctctgcccggccgcccctactgggaagtgaggagcccctctgcccggccagccgccccgtccgggagggaggtgggggagtcagccccctgcccagccagccgccccgtccgggagggaggtgggggggtcagccccccgccaggcgagacgccccgtccgggagggaggtggggggtcagccccctgcccggccagccgcccggtccgggaggtgaggggcgcctctgcccggccgcccctactgggaagtgaggagcccctctgcccggccaccaccccgtctgggaggtgtacccaacagctcattgagaacgggccatgatgacaatggcagttttgcggaatagaaaagggggaaaggtggggaaaagattgagaaatcggatggttgctgtgtctgtgtagaaagaagtagacatgggagacttttcattttgttctgtactaagaaaaattcttctgccttgggatcctgttgatctatgaccttacccccaaccctgtgctctctgaaacatgtgctgtgt

SEQ ID NO: 21608 - DNA, 2300 bp, Homo sapien
agtttgcaaccagcctagtcaacatgttgaaacccagtctctactaaaaatacaaaaattagctaggtgtggtggcaggtgcctctagtcccagctactcgggaggctgaggcaggagaatccttgaacccaggaggtgagtttgcagtgagctgagatcatgctgctgcagtccagcctgggtgacagagtgagactctgtctcaaaaaaagaaaaaacaaaacaaaaaaggactttggggtttctggccgggtgcagtggctcatgcctgtaattccagcactttgggaggttgaggcaggtggatcacttgaggtcaggagtttgagaccagcctggccaacatggcaaaacctggtctctactaaaaatacaaaaattagccaggcgtggagtaagcctgtaatcccagctattcagaaggctgaggcaggagaatcccttgaacctgggaggtggaggttgcagtgagctgagatggtgccactgcactgcagcctgggtgatagagcaagactctgtctcaaaaatgagcaaacaaaactttgggattttttatccatatatcatcccaatcttccggatttatgtttggaatgactgcaagagaccaagcattaagttaatgacttctatatgctatgtcctgttctgagcatttattatcttaatgatcaaggactctatgaagttgatactattatgattattattattatgactattattgttgctatttttagagacggactcttagtctgtcacccaggctggagtgcagtggcatgatcatagctcactgtaaccttaactcctgggttcaagcgatcctcctgcctcagcctctgagtagctaggaatacagatgtgtgctaccatgcccagctaatttttattttatttttgtagagatgggggtctcactatgttgcccaggctggtcttgaactcctgggctcaagcagtcctcctgcttcagcttcccaaattgctgggattgtaggcacaagccaccacacccagcctaaggttgatactactcttttctttatttatttatttttctgagtggcagttggacccacagctagaacttatttggcagattaataacatacaggcattactggatcacaaattcatttttaaaatattttgatagctattcaatacttgtttcctctcttatgaattcctttttttttttttttttttttgaaacagagtctccatctgtcatccaagctggagtgcagtggcgtgaccttggctcactgcactctcctccactcaggttcaagtgattctcctgcctcagcctccaagtagatgggattataggcacccaccaccatgcctggctaatttttgtatttttagtagagactgggattttgccaggctggtctcgaactcctgccctcaggtgatccatccacctcggccagtcaaagtgctgggattacaggcatgagccactgcacccagccgatactactatatccccattttacagatgagcacatgggcaaattgagggtaaggcactgacccatgatcatacagctgagaagtggcaaaggcaggatttgaacctagaacctctggctccacacactagtaatctaaaccactctccctacaatacaacatacgtggtaaagatgtgtggtgggcacgcaatcaacgtaggtcccttcacagttgctgggagaggcaggaatttgcagttcctccgcgttctcctcctccgctgcccacctgtcctgggtcattcctgcagcctgccctgccctgcctggtctcaccctccctctgccaacagaagtctgggcagggttttatgggctctgataaggccctggcagggccgaagttcatgagcacttcctctttgcaggagggcgtaggggaggggacccaggtgatttgggtcctggctggtcaccagggaagctggcaagggaagggagactagggtgcgctctaggagaagccgacagcctgagagtcccagaagaggagccctgtggaccctcccctgccagccactcccttaccctgggtataagagccaccaccgcctgccatccgccaccatctcccactcctgcagctcttctcacaggaccagccactagcgcagcctcgagcgatggcctatgtccccgcaccgggctaccagcccacctacaacccggtgagatgccagctcaggccccactccgcccgcagctccgtccataagccctcacaccaattttccccactctgatcctggggggccccatctgactct

SEQ ID NO: 21609 - DNA, 2300 bp, Homo sapien
ctgcctctcccagcaactgtgaagggacctacgttgattgcgtgcccaccacacatctttaccacgtatgttgtattgtagggagagtggtttagattactagtgtgtggagccagaggttctaggttcaaatcctgcctttgccacttctcagctgtatgatcatgggtcagtgccttaccctcaatttgcccatgtgctcatctgtaaaatggggatatagtagtatcggctgggtgcagtggctcatgcctgtaatcccagcactttgactggccgaggtggatggatcacctgagggcaggagttcgagaccagcctggcaaaatcccagtctctactaaaaatacaaaaattagccaggcatggtggtgggtgcctataatcccatctacttggaggctgaggcaggagaatcacttgaacctgagtggaggagagtgcagtgagccaaggtcacgccactgcactccagcttggatgacagatggagactctgtttcaaaaaaaaaaaaaaaaaaaaaggaattcataagagaggaaacaagtattgaatagctatcaaaatattttaaaaatgaatttgtgatccagtaatgcctgtatgttattaatctgccaaataagttctagctgtgggtccaactgccactcagaaaaataaataaataaagaaaagagtagtatcaaccttaggctgggtgtggtggcttgtgcctacaatcccagcaatttgggaagctgaagcaggaggactgcttgagcccaggagttcaagaccagcctgggcaacatagtgagacccccatctctacaaaaataaaataaaaattagctgggcatggtagcacacatctgtattcctagctactcagaggctgaggcaggaggatcgcttgaacccaggagttaaggttacagtgagctatgatcatgccactgcactccagcctgggtgacagactaagagtccgtctctaaaaatagcaacaataatagtcataataataataatcataatagtatcaacttcatagagtccttgatcattaagataataaatgctcagaacaggacatagcatatagaagtcattaacttaatgcttggtctcttgcagtcattccaaacataaatccggaagattgggatgatatatggataaaaaatcccaaagttttgtttgctcatttttgagacagagtcttgctctatcacccaggctgcagtgcagtggcaccatctcagctcactgcaacctccacctcccaggttcaagggattctcctgcctcagccttctgaatagctgggattacaggcttactccacgcctggctaatttttgtatttttagtagagaccaggttttgccatgttggccaggctggtctcaaactcctgacctcaagtgatccacctgcctcaacctcccaaagtgctggaattacaggcatgagccactgcacccggccagaaaccccaaagtccttttttgttttgttttttctttttttgagacagagtctcactctgtcacccaggctggactgcagcagcatgatctcagctcactgcaaactcacctcctgggttcaaggattctcctgcctcagcctcccgagtagctgggactagaggcacctgccaccacacctagctaatttttgtatttttagtagagactgggtttcaacatgttgactaggctggttgcaaactcctgagctcaggcaatccacctgcgtcagcctccaaaagtgctgggattacaggtgtgagacgccagcatcagatcccatgtgctgtgcagtgagaggtgccaggcagggcacgaacgccaccctcaaccccagggcaggcagggagaccaggaagccttgcaacccagagggaccccagcgacttttgctcactccctccgccccggaattccttgtgcccctcgcctgcccgctgccagtctgaatggccatcacctccatgccacccattcccatgcatccaacctctagccccagccttcaggactgcagtctctggagcccctaggtgcatcccagcccctcccacctctcctctatccaagaagggcaccaggttctttactttgctttattgtttgtggggtgaagataaggccttgggcttgagaaactcattgtcataaagttataaactgggaaactgggtcagaaggcatagaaacaactgtcatcgcccatcctccctttctgtggatgaggcgggacaaggccggccccctggctggggcctgggacgcgagggctctcagagctt

SEQ ID NO: 21610 - DNA, 2300 bp, Homo sapien
agtggagggccataccctgagggagggaagggatctccagggttggaagagtgacaccttttgtcctcacttatatgaataggaaagctacaatttctgaggctccccatatcctagcttcaggaatacctttgttaggcctgttagtctgaggagggatcgtaaaattccaggtagtcgccactatgacagggctttgggcaaaaattatgtctttctgattggtgagcctgggtgcctaaagaatgtaacagagttctagaagtcgttcttataggagaaactagaaaagcaccagagacagcaaattttagaagcaggactaaactcggagaagagaggtgagaggaagtttgtctggcaggcattaggacccgggggcaagagtcaggatagataggatagatgggcgagtctcgcttgggcgacatgcctttgagtgttccgctcatggctgcagggtcaacgaacttgttgtcttgtcgggaccctagagctgcatggctttcctctctgtcgaccctcggctcagcccagaagtacaggaaaagcagaagctggttctaggcaaaccaacgctcccaactccaaagagtcgggagttgttagagagccctttcccagaaagcctgacacccatgtctttagtccagcggccatgctagtcacttttaactggcagacaggtgcctggtatttagcccccaaattctaaggaaaaataggacagaatagcaagtgaaaggggtccagtggtactcactgcttggcgataggtgatagtctcaccgctcagcgataggcagtggtctcaccgcttggcgataggtaatagtcccatctgggtcaccaaaatgtatccggaattggtgggttcttggtctcactgacttcaagaatgaagccgcagaatctcgtggtgagtgttacagttcttaaaggcggcatgtccgcagtttgttccttctgatgtgttcggagtttgttccttctgatgtttgggtgtgttcagagtttcttccttctggtgggttcgtggtctcgctggcttcaggaatgaagctgcagaccttcgcagtgagtgttatagctcttaaggcggtgcgtccagagtggttcgttcctcccgtccggagttgttcattcctcccagtgggttcgtggtcttgctggcctctggagagaagttgcagaccttcgcggtgagtgttatggctcataaaggcagtgtggacccaaagagtgagcagcagcaagatttattgcaaagagcaaaagaacagagcttccatagcatggaaggggacgtgagtgggttgccactgctggctcggacagcctgcttttattcccttatctgtccccacccacatcctgctggttggtccgttttacagagagctgattggtctgttttacagagagctgattggtccattttgacagggtgctgactggtgcgtttacaatccctgagctagacacaaaacttctccaagtccccactagattagctagacacagagcactgattggtgcatttacaaaccttgagctagacacagggtgctgattggtgtatttacaaaccttgagctagacacacagtgctgattggtgtatttacaatcccttagctagacataaagattctccaagtccccaccagattagctagatacagagtgctgattggtgcatttacaaaccttgagctagacatagggtgctgattggtgcatttacaaaccttgagctagacacagagtgctgattggttgtttacaatcccttagctagacataaagagtctccaagtccccaccagattagctagatacagagtgctgattggtgcatttacaaaccttgagctagacacagggtgctgattggtgcatttacaaaccttgagctagacacagagtgctgattggttgtttacaatcccttagctagacataaagtttctccaagtccccaccagatgagctagacacagagcattgattggtgcatttacaaaccttgagctagacacagggtgctgattggtgcatttacaaaccttgagctagaaacagagtgctgattggtgtatttacaatcccttagctagacataaacgttctccaagtccccaccagattagctagatacagagtgctgattggtgcatttacagtccctcagctagacataaatgttctccaaatccccactagactcaggagctcagctggcttcacccagtggatcctgcaccagggccgcaggcggagcactcctcagcccttggg

SEQ ID NO: 21611 - DNA, 2300 bp, Homo sapien
ctgtggcccaggctggagtgcagtggcgtgatctcacatcagtgcaagctccgcctcctgggttcacgccattctcctgcctcagcctcccgaatagctgggactacaggcgcccgccaccacgcccggctaatttttggtatttttagtagagatggggtttcaccgtgttagccaggatggtctcgatcttctcaccttgtgatccacccgccttggcctcccaaagtgctgggattagaggcatgagccaacacgcctggctaatttttatatttttaatagagattgggtttcaccatgttggccatgctggtctcaaactcctgacctgaggtgatctgcctgcctgggcctcctaaagtgctgggattacagacctgagccaccgcacccagcccagctatactttcttacaccaaaggaacaaaggatcatactaaatgttctattacatcttcacatttttttctcacacatttttatttttgcatagaggtttcagagttttctatggtataaacagtctactgttgatgggtagttaatggttctgtctttcaaaagagcctgcttttctagtctgtgaaaacacacaggagacaggttcattaaggaaagatacttccttcaatctcactggcccagagacatctgttcaccgccttgctcaatgtctccccaaaaagcatacttaagcagttttacagtactttttttttttatttttttgagatggagtttcgctctgtccccaggctggagtgcagtggcgccatctcggctccctgcgagctccgcctccggggttcacgccattctccagcctcagcctccccagtagctggggctacagacgcccgccaccatgcccgctaagtttttgtatttttttagtagggacggggtttcactgtgttagctaggtcaggaggtcgatctcctgacctcgtgatctgcccgccacggcctcccaaagtgctgggattacaggcgtgagccaccgcgcccggccagcagttttacagtactttttatgccttttggtagctggcttttcccaagggaatttcggtttttttgttttgtttgttttttttaagaacatgaacttttttttcttcttttttttttttttgagatcttgctctgtcgcccaggctggggtacagtggtgccatctctgctcattgcaacctccgcctcctgggctcaagccattctcttcccgctaggattacaggtgccggacaccgcacccggctaatttttgtatttttagtagagacggggtttcgccatgttgaccaggctgctgttgaactcctgacctcaggtgatccgcctgcctcggcctcccaaagtgcttgtattacaggcgtgagccactgcgccaggctaagaacatgaactctggtgccaggtaatcctgctttagcccttctgaagcccaccgaccttgaacctagtgtcttcccgtgcctgggccagtttcctctgcatatagtaggaaatagtacgacctcctggtgggagttcatattatacagtcagcgcttaatgttggcccgtctgtactcattcctttacctgagtaaactcacagtactgcaagttttcttttatttttagttaacatgatatatacatgcatgattacaagctctgctgcaattatgtccttggacatttcagctgtcgcctattattccaccattatgaaacagctgtgtgatgaactttagcgggagctgtttgcttttctgtttttttttttgtttgtttgttttgttttttttaagacggagtgtcgctcggtcgccaggctggagagcaatggcgcgatctcggctcactgcaaactccgcctcccaggttcacgccattgcaggagctattttctttggccaggttcccactggggcaaagggtccatttctgagcctggctctatgtaaggcaaccggaaatcgactgcccttagtaaagatggcggaaagaacggcgtcattgcctgtcaggttgcggcatcggtgccctcgctcaacatggcggccttctgtgcccgccccctccgctaacgggcacgttactccgtccgaacgcagtagacgaaggcggcggcgatggcggcggggatagtggcttctcgcagactccgcgacctactgacccggcgtgagtcacctcttgccttatgggggtgcgtcgcgctgtcgtgctgttatagcagatgtaggacggggagggctatccggggtcacgaagggcccgagtcccctaaattcaggggtgcgtgt

SEQ ID NO: 21612 - DNA, 2300 bp, Homo sapien
acttttaaaacaattctttaaaaaaattgtagcggatgtgtaccgtgacttgtatttatgactgtaaaaccatgtgatgcagggtcgcagtgtatgtttgatgggacgccatctttcagaactgtgctaactcactgttgaagcgtccaatggtaagagaaaatacagatttgttttttgtgacaaatggacattgtactctgtacttctgctgtaagtagtccttttccattttgtaatgactggtaacaaaacccaggccgggtggcaggaaagggcagtggtttcgagccctgggttttggagtcagccagacctgggttcaaatatggctcagccactgtcttgctttgtgactttgggccaaagtgtcttttaactgctcagttaaaagttaacaactcagtcttcttatctgtaaaatggggctgaaatatcagaacctacctcatagggttgttgtgaggaatttcagaagctgtgatgtctgtaaagcgcttagcccagtgcctgccacttaagcgctaagttaaaggcagtgattacgaactgctggggtcggggtggatctgcgccattgctgggtgtgggaatgtcgatgccttgtacatgattgcttatttgaactgattctgctgttgccctgcttgtcagctacagtcagtccctcttgggctggcgggactgggagggaggggggactgggattaagaaagaagggatctaacagagacagtctggagctcctagaactttgggggctttgggggtcaaacttgcttgcttccctctggggttattttcctcttaatctactctcccttcattgggagtcactttagaaagctgcttttggcccgccataatatatcagcttctgtagcagctgcacattccccagagggcctgggagctgggctttctcccagggccagggtaggtgagagcacagaatctggccttgtccttcacagaacaaggccagccctttggtatgagcaggggaaggagagtgggcaccagctttgaggctcgggcttcatgcccgccgtaggtcagatcacaaaaggaggccccacagccctcgaggaagggagggcttgcagttggcaggagctgggggctcagatcagcctgtgcagtcaggagggagggagagaccccaatttctgagtgagactcctaactgttttctctctccacaggtgaccctggcagcaaccccaacaaacgccagaggcagccccctctcctgggagatcaccccgcagaatatggtgagggcagggggttcccctccgtggactcccgtggctcatgtgcccctgcccgccgcccgccgtgcaaattctcacccgtcctccctctctttccttcccaccccccaggagggccccacggtgggtaccacagccattaccatgatgagggctacgggccccccccacctcactacgaagggagaaggatgggtccaccagtggggggtcaccgtcggggcccaagtcgctacggcccccagtatgggcaccccccaccccctcccccaccacccgagtatggccctcacgccgacagccctgtgctcatggtctatggcttggatcaatctaagatgaactgtgaccgagtcttcaatgtcttctgcttatatggcaatgtggagaaggtgagctgctgccgggccccctgggttcctcgctgagcctcgtatcttgccagtcagcacgggaaagaaccaggggggagcctggtgtggcgctgggcgggcagacgccaatgagtgactcagtgagctcaggcagcctgcttgcagacgggttttgtttggtcctcactgtatgtgggtgttgtgtttttgaattaccaatgtttaaaaaaaagattttatcacataaaagtactaataccagtacatgaacatagagatttataaaacataaaaatgaatccattatagtgaaacaccatcgtttaaggatttcctcctgaaaacttaagacctggcaacaccgggccttctgccttcccatgggacagttgactggggctagcggtggctgagtgtctacctgagaccaggcggcattttgcttaacattaaacccgtctgggtcttgggggcctttgtgcagctcatgacttggcccattacttagagtagttcgtaacacaggtgaagtgttgttagttaccaggcactgttaaagatgctttacatgtagtgacctgtgtaatttctcacattaatccttaatgagatggacaggggaagtggaggacggggcttaaataacgcg

SEQ ID NO: 21613 - DNA, 2300 bp, Homo sapien
tggacaaggtaatcttgacgaccactttgttctaaacatacccgccttgctttcactcgactagtgcacttaataggcctgggctcagggttatgtaatgccattgggccccccatggacatgggagggccttggggtcagcacttggacaccctagtgggatgggggagtgagaggcctccatgggtcttcactgctgcttggggccctccgatgctgctcaggatacagaggcaaggcagaagcctggatgggcggggagcagggcctcactgaggatgaggcgtgggggcggccttagaaaccagcagtggctcctttgagagtctggtgagggtcactcactccattcttgctggaccaggaattgtcctcttgttctgcgctgttgagagggtctgatttgggggagtgacagtgttggggggcgatgaggtctcctgggctcttgcagtgagccttgtgagcaagctgaccctgtggaggtgagacactctggattggaccagggcggacatgcctcacatcatttgtagaggggacgcaacatctctgcaggtggcccaaatggacaactcccttcctagtgtctgtcaagaatggtttgcctttggtagcagggagaggtggaggattgcctatgagaaacagcggcagccccccaacaagaccatccatctcggtgtctgtcttggtctgatacgtcggaccaggccatgggctgagggaggaggctcgatgctgacatcgcacaggccctgagaggccagagccccccattcctaggcaggcctgtcttgctcgcccttgcatctgggaagcagtgggcagggtgggctagactcttccccaggatcctcacagtgggccctgtgggcctggctgctccctccaaaggtcagaggcaaattggtgaccaagtgaatgtaccagagcgggcaatggcattacatgactgctaacagaaacatggcaacaaccatttcttctccaaggaacataaatagaagatgtgcagaccggcaggggctagtggcagggggctggctgtgcattggttttgatgcctctcagctttggcagccccaaggctggggcccaaaaaaaaacgagggctgatgaggtgacctggagtgagggcggtgcttcgccacccctcaggaaccatacttcagcggctctgcctctgcacattgctcaccaacacacagggtagaaaaccactagctcttcctggagagaacagaacatgcagcctccaccacgtccccagaaacagccgcagacttgagctcactacatcaagaacaccacaccgcgctccaaggaacagctacaagcacagagacagaggcatacagagacaaagagagaaagagacgcaacatggcagcagacactgctttttttattaaacattaaaaaaaaggtcaaaatccaagcaaacttgaacccgagaatgtacacagaagtaggaaacacagagaacagagctgtcccagccagccagcgagcgatgctcttttcggagaacgtttcatagacggaagtagattccatgggcctccaagacaataggatcctctctccattcctcgccatatgggttttgttttttaagtcatttggtttggggagggccttgttttttttctgttttgatatttttattttttctgcagtcaccggctgccaacataatctgcaccaactggagatcagaaaccaaaaaaaaaaaaaaaaattttaaccacaacaaaaaaaaaatcaaaaaaaccaaaacagacctaaaaccagacagccaaacagctcagaggcacacagttacctgctgccgggtaaccaggcgcgctcccaaggccaaaagcgcgagcgtagtggggccactggcacacctcataccaggagacacgcacacggagcgctacacagccagaagcaccgcaccaccgcactgcagcacatatgtgaggaggtgacaacatggagggacactacccacttcatacacctttatttccacttttctgatatcttctgaggacagaacatctgtgagccatttttgatttaatcaaaatattgacttttaaaacaattctttaaaaaaattgtagcggatgtgtaccgtgacttgtatttatgactgtaaaaccatgtgatgcagggtcgcagtgtatgtttgatgggacgccatctttcagaactgtgctaactcactgttgaagcgtccaatggtaagagaaaatacagatttgttttttgtgacaaatggacattgtactctgtacttctgctgt

SEQ ID NO: 21614 - DNA, 2300 bp, Homo sapien
gttgatgtttcagatttagtcgaagggtgtgagagggctgagacggagaaagtggtgtggcagaagaggttgctggtggccatgggtcggggtgcagattatgagagaactctggccagtgactgctcacccggggcagcgttgagtccatcaacaccgttttggtctcttaacctgaggctagtggctgggcagtgagctaatcccaaagcttccgtctgtaccacagtcttggggtgctaccttgtccttatcacactctggggtaacttgaagcccttctcaaagatctcctgtgatgggactttccttaacttgactcacatttgactcagttcaaagtgcccagcgggccaaggcctctctcaatggggctgatatctattctggctgttgcactctgaagatcgaatacgcaaaggtacatctgggaggtgactgactgccccttgtcagcttccaggtgagctggggcatggctgacctcaagtcttgtcttgtcctgtccttgcagcctacacgcttgaatgtgttcaagaatgatcaggatacttgggactacacaaaccccaatctcagtggacaaggtaatcttgacgaccactttgttctaaacatacccgccttgctttcactcgactagtgcacttaataggcctgggctcagggttatgtaatgccattgggccccccatggacatgggagggccttggggtcagcacttggacaccctagtgggatgggggagtgagaggcctccatgggtcttcactgctgcttggggccctccgatgctgctcaggatacagaggcaaggcagaagcctggatgggcggggagcagggcctcactgaggatgaggcgtgggggcggccttagaaaccagcagtggctcctttgagagtctggtgagggtcactcactccattcttgctggaccaggaattgtcctcttgttctgcgctgttgagagggtctgatttgggggagtgacagtgttggggggcgatgaggtctcctgggctcttgcagtgagccttgtgagcaagctgaccctgtggaggtgagacactctggattggaccagggcggacatgcctcacatcatttgtagaggggacgcaacatctctgcaggtggcccaaatggacaactcccttcctagtgtctgtcaagaatggtttgcctttggtagcagggagaggtggaggattgcctatgagaaacagcggcagccccccaacaagaccatccatctcggtgtctgtcttggtctgatacgtcggaccaggccatgggctgagggaggaggctcgatgctgacatcgcacaggccctgagaggccagagccccccattcctaggcaggcctgtcttgctcgcccttgcatctgggaagcagtgggcagggtgggctagactcttccccaggatcctcacagtgggccctgtgggcctggctgctccctccaaaggtcagaggcaaattggtgaccaagtgaatgtaccagagcgggcaatggcattacatgactgctaacagaaacatggcaacaaccatttcttctccaaggaacataaatagaagatgtgcagaccggcaggggctagtggcagggggctggctgtgcattggttttgatgcctctcagctttggcagccccaaggctggggcccaaaaaaaaacgagggctgatgaggtgacctggagtgagggcggtgcttcgccacccctcaggaaccatacttcagcggctctgcctctgcacattgctcaccaacacacagggtagaaaaccactagctcttcctggagagaacagaacatgcagcctccaccacgtccccagaaacagccgcagacttgagctcactacatcaagaacaccacaccgcgctccaaggaacagctacaagcacagagacagaggcatacagagacaaagagagaaagagacgcaacatggcagcagacactgctttttttattaaacattaaaaaaaaggtcaaaatccaagcaaacttgaacccgagaatgtacacagaagtaggaaacacagagaacagagctgtcccagccagccagcgagcgatgctcttttcggagaacgtttcatagacggaagtagattccatgggcctccaagacaataggatcctctctccattcctcgccatatgggttttgttttttaagtcatttggtttggggagggccttgttttttttctgttttgatatttttattttttctgcagtcaccggctgccaacataatctgcaccaactggagatca

SEQ ID NO: 21615 - DNA, 2300 bp, Homo sapien
gtccgggccggccgcgggggcggggaggggaggggccctctctctccccctccccccaccgcattcctctgacgttgggacggagcgaccccgcccttcgtcgcgaccggcccggcctcctcccgtcacgcgggccacgtgcttcagacgcggccccgcccccgtctctgttccgttggcgtggtcggatcttcctggtgtccgggggagctgaccgaggtccccagcaaggccccctcccctaactttatttcccctcaccggcagagccaccaggcctgtcccctcttgtattgccataaaccccattttttctgatagggtctcgctccgtcgcccacgctggagtgcaggggcgcgatcacggctcactgcaacctcgaaatccggggctcaagcgagccttccgccttggcctccccaagtgctgggattacaggtgtgagccaccacacacggcctccatttcaaacttagtttccacccggacctcaactcgaaatcccccatcagccgggcagaaaggtcctggagcacttttggggcgtccgccgcgtttctcacgacgctagcttcgcttttatttcttttcccccctttggcgatatcgtcacttgccaatagcttcgctaaggtgttcccccccacaccctgcgcgggcagccccataatgttaaatgccgtaggacgggatcccgggttaatccccgtttgaccccgctgcctgcgcgtgataactggggcgcgctcctctccaccccccaggctccgccagttgggcttcgccggagtctggagataccctccgacattctcttggtgcagtgcgggtggtcttaccccgcccttgaggaagaaaggcccgacgcaggcacagatcacaagaacgcctcccctgtgcagggggcttgcactgtgccaggtgctgtactgggcgcttggtaggtggccaccctctccagggtcggggccaggacctcctgtggtgctcagaggggtcgagctgtcaggtgaaaaccactggcccgagttatggctttgaagggaatcctgggggtctgggatggcagggacctgttaatttagatcgcacggacaagatgacttggcccttagctcctgcaggaggggtagtggactattgcaggtggaagggactgcatgggcacacatggagagtgcgcggaagagccttctcccaagggaaactgaaaggggttgcggctgaatttagaactggacagggtccgaagacagtcggcagcagcgagtggttttctactgaggaaaaggctcagatttgggattttaacaattcctcctagaggtagaaatgaacacggtatagtgatggcgacagagataccctgggagttcctgtcaatcttggtctagccttccggcgcacacacagcggtcgctccataagggggccccgcctctgggcggtgcctgaaagcgtatttgcgcatgcgttctcgccttcgctcgtttcgtatactgcaccaaagagcgcctaccctggggcggggctccccatttcatccaatcagagcgtatcaacagtcctaccatctggtgagagggtgcgctccactctccattgaccaatcagtggagacgcagaagaatgggcatctgtaaccaccactggagagagaccaaaaaagggcggggcttccttgtctccttgcgaagtggcgcgggaaggtcgtcattgtgactggtgctgacggattagcgaggagaccaatgaaagtgggagggaggcggagattcttgggaggtttagagcgccgttcctatcaggtgcttttagggaggccagcagcgccagaaatccgacctatcaaattggattttattttaaggcggcggggtcgacggaaagactggcagaaagcgaccacctataaggagtgtctcagacaaacaagggcgggccctcctgcagaacggcgtgggcaatgtccaataagcgcgcaaggcgtgtggcggcctaccctccccccgcggcgggaccagtggctccccctatcgggtgggggcggcgggtgacgggcgtgtccctcccccaatgagaggcggggggaggcgggttctgcgccgccatgtcgcggaggctgctgccccgggcggagaagcggcgtcggcggctggagcagaggcagcagccggacgagcagcggaggcggtcgggagcgatggtgaagatggcggcggcgggcggcggaggcggcggtggccgctactacggcggcggcagtgagggcggccgggcccctaagcggctcaagact

SEQ ID NO: 21616 - DNA, 2300 bp, Homo sapien
tgatggcatgtgcttgcggtctcagctactcaggaggctgaagtgggaggatcacttgagcctaggaggtcgaggctgcagtgagctgtgtatgcatcactgcactccagcttgggggacaaattgaaactcttgtctcaaaagaaaaaaaaaaaagaatgagaccttctcatatactgctggtgggaatatatggtacagatatattgaataacaatttgttactacccaataatgtcaaaatatgttacacgacccagcaatcccactcctacctacatgcccttaaaactctcacacatggacacaagaagatatcactaggaatggtcacagcagcattactattttttctttattttatttatttatttattttttacttttatttatttatttttgagacggagtctcgctctgtcgcccaggctggagtacagtggagcgatctcggctcactgcaagctccgcctcctgggttcacgtcattctcctgcctcagcctccccagtagctgggactacaggcgcctgccaccatgcccagctaattttttttttaattttttttttatttttagcagagacggggtttcaccgtgttagccaggatggtcttgatctcctgacctcgtgatccagccgcctcagcctcccaaagtgctagtattacaggtgtgagccaccgtgcccggcctattttatttattttagttttttgagacagagtctcactctgttgcccaggttagagtgcagtggcacaatctcggctcactgcaaacttcacctcccgggttcaagcaattctcctgccttagcattctgagtagctgggattacaggcgcctgccaccacgccagcctaatttttgtattttaagtagagaccgggtttcgccatgttagccaggctggtctcgaacccctgacctcaagcgattctcctgcctcggcctcccaaagtgctacgattacaggcgtgagccacggcgcccagccatatttttctggggtgttgtttgtttttgagacagggtctcgctttgtcagcctccacctcttgggctcaagtgatccttccgcctcagcctccccagtagctgggactacagttgcacgccaccacgcccagctaatttttttgtattttatgtagagagaaggtttcaccatgttgcccaggctggtcacgagctcctggacttaaacaatctgcccacctcggcctcccaaagtgctgggattacaggggaagccaccgtgcccggctggcatgggtttacaaggatctgcaagggtccgattaagttttgtgtggattaagaacgggagcgacctgctctttcagaggctgcccagctgtggtaatttttcgcggttcttccactctctgggccagttttacttcaactgtgaaatgggggtagtcctctaaggtcccgtttccattctctgcattcctcatgacgacccagacgaagctcctactgccatccccctaacggatgaggaaggctaagttactttcctaaggccagagacagtaaatgcagcttccacgttggaaccccggtagggtggctccagtcccctgctctgaaccccccatctctacagcctaccccatcaccctaataagccctgcaagtgcagtggtgatgcgtctgctccggcgtcagaccagccccgccatgccacttgcaagctgtggcatcctgggttagtcacttgcgtccctccagcccatttccttatgtgagcaatgtacaccccaaacacttgcctcagccaagacacttgcctgaccaggaggaaagatgcgcgagtctcaaacaactgcgtgactttccgtctgcggggggcgggggtggatttttggggaaaagggacgcggagcccgaacaccgcggctccaaggtcttcccgctcctttctcgcctggtttcctccattcccccgcggggcgaccctcggtctcctgccgtgtccccgctcccgcgccccctgcccccaatttttcttccccccacggggctgaaaaaaggtcgtggtccctttaaggcccgcccctccctctcccaaaacttcccagtgtctgctcttttcgatccgggacggccggtcaggctcgccgccgagctggtaggggctgggggcgaggggtgcgggaaggtgaccggggcactggcgggcggcgccgcgcgcggccgggggccagggtccgagcagcggggtgggggcggggcggtggccgggagcgcggggggtgcgggtcaccaggccgggccggcggcctgg

SEQ ID NO: 21617 - DNA, 2300 bp, Homo sapien
ctcagtaaatgtttgtctaatgaatgaatccttgttggtggcataagtggtacacaagagtaaagatggagactccaaagagtgggaacttccctgttctgaaggtccctggggggattctgaaggaatggaggagcaagagcatcccaggggacagaaaactgccaccactcaagtttactttctccttcttcctccccccaccacaggtgtgtccctggaatcctccaacctctgcatgccagacctgccccatctcctggcctttctatcagccagcaggtacaggtcacccatctgaggcactaagggggacccttccctaagacaccccactgacactgtggctcccacctctttattctcagggatgttctgcccagaaccctgctcttgccccctcccactctagggcccagagatgaacacacaggtgaggcacggttctctaaagagggcacagccaacctgccaatttccttgctccaagggaatgaatggggctttggggcccagactactgggtttgaggagaatatagaactggagactagagagagctgggggcctggactttgtagtcccagagggaggaggggatgggggcctgtattcctaggtcctaacagaggagaggattggaggaggaaggaactgggggtcccggacgcctgggcctaagtgagaaggggactaggggcctggactcctgggtctgactgaggaggggccaggagctaagcctcagcacctccagcaatgaagctgggaagtaagtctcctggcgccttgaggggaccagggttggtcccttggatacctaggacaccttctcacttctgctggctccagatcctgtgcagatcggcagggtccaacaggacaccccagggaaggtgctttccattgtgaaccagctctacctggagacccacagaggctgggggagggagcagacccctcaagaaacagagccagaggctgctcagagacatgatccaggttagctgggcggggccctgggcctctgaaggggagggagctgctgcccctgttctaggcgaccgaatgccctcctcacttccagcccccaggaaccctgcgcctcacggggtctcctgggtgaaaggcccgctcagcccggaagtggaccatcctgggccggctctcgccagcctactggaagaggaggaggaagaccttgaaggaaaggaggaaggaagggaggacgaccctgaagaggaaggccctgaggacgtgctcaccattcacgtccagtctctggtcagggcccggagcagctacgtggccaggcagtaccgaagccttcgggtgcgcatcgcctcagattctgggggtccccacgggtctggggacccggccacggagctgcttcaggatgtgcggcacctccttactgacctccaggatcacctggcaaaggactcctacatcagggctgtctttggaagcaggggtcctgggctccccaagaaggacgaggatccaggtaatgggaggactggaagggagcccccacgggttcaagtgtgcaacttcgtcctctccatcggtgcgcacacgtttccttctgcacccacacgcccttcctacacatcccacgcgttctatcgcccacgtatgcgcgcaagttcacacccaggctaactcttccacacatgttcacaaccatgtctacactcacgggggaccagagctaggcaggggtggctgtgggccagggtgggttgttggagcgcgtgggtgggcgtgggacaacttggcggtcctgtgctcacccgtcccccacaccccgcaggccccgcgctggagacggcggtgtgccaggcggtgctggcgcccctgaagccggccctgtggacacgactccgcacactccgagcaccggagctgcggcggctgcggcggcgacagacagccctgcgggcgggggcggggcctccgggggcacaggggccgggaccggaagggcagagccccgcccccgccttgcggagccgcatccacgagcgccttgcgcacctccacgctgcctgcgccccgcgccgcaaggtggcgctcctcttggaggtgtgcagagatgtctatgcgggcctggctcgaggcgagaaccaaggtaagggaggggtcaacgtctagcgtggtggggagagccttgagagttggagccaggcgggagagggtagcactggtgggaggaatctatgcggtcctgaagattctggtaggaggcgctgtcatgcccgacaaggtggaggggcagccagccctcgtggtcc

SEQ ID NO: 21618 - DNA, 2300 bp, Homo sapien
tttttcctgggcagcctcactctagggcaggtgctccctcctaggtgttcccctcaggggaagtaggcagggtcaccgggcaagcagcgcacgctgtgggcagacactgtcccaagtcttagcctgcgtgaactcactggcgccacaaccccatcgcggttttgtgatcacccctattctacaggaaactaagacacagagaggacaagtcacttgaccaaagtcactgagctggctgggcgcaatggctcacgcctgtaattccagcactttgggaggccgaggcgggtggatcacctgaggtcaggagttcgagaccagcctgaccaacatggtgaaaccccgtctctactaataatacaaaattagccgggcatggtgctgggcacctgtcatccaggctactcgggaggttgaggcgggagaatcacttgaacccaggaggtggaggttgcagtgagccgagatcacatcattgcactccagcctgggcaacaagagtgaaactttgtctcaaaaaaaaccaaaaaaacaacaacaaaaaaaaaacaaagtcacagagctaggatacaaacccaggccacctggctccagggtctgtgctcttagctctcccttccctgctcctgcccctgacccaccccctccctgacagtcggaccctttcctggggatgattatgggcctcggaggaggcatggactttgactccaagaaggcctacaggtgaggccccgccgggggttggggcagcctggaagggacagggtgaggtgggagcgggggcacgaaggcagatgagaggagcaggcaggggcgagcccgcctgggaactctgatctcctgctgcaccgcagggacgtggcctggctgggtgaatgcgaccagggctgcctggcccttgctgagctccttggatggaaggtgaggagctgagcaaccccagcctgtcctgagccccatccctggaccctctccccaccccatgggtcctctgaccccatgatgcacagtgacctttgacttctgtgacctttgctcctgcagaaggagctggaggaccttgtccggagggagcacgccagcatagatgcccagtcgggggcgggggtccccaaccccagcacttcagcttcccccaagaagtccccgccacctgccaaggacgaggccaggacaacagagagggagaaaccccagtgacagctgcatctcccaggcgggatgccgagctcctcagggacagctgagccccaaccgggcctggccccctcttaaccagcagttcttgtctggggagctcagaacatcccccaatctcttacagctccctccccaaaactggggtcccagcaaccctggcccccaaccccagcaaatctctaacacctcctagaggccaaggcttaaacaggcatctctaccagccccactgtctctaaccactcctgggctaaggagtaacctccctcatctctaactgcccccacggggccagggctaccccagaacttttaactcttccaggacagggagcttcgggcccccactctgtctcctgcccccgggggcctgtggctaagtaaaccatacctaacctaccccagtgtgggtgtgggcctctgaatataacccacacccagcgtagggggagtctgagccgggagggctcccgagtctctgccttcagctcccaaagtgggtggtgggcccccttcacgtgggacccacttcccatgctggatgggcagaagacattgcttattggagacaaattaaaaacaaaaacaactaacaatccggtctggcctcctgtttctttctgtgggcacccagggaaatctctgaagggagggggttagatcttgggccactaaggaaccagaaagtctccgggatccagagtgaggggtaacaagagggtcctcacgggggccctcgtggctctgacccctggactcccagcctgccagtgtcccttcctctaagccccgtcactaaaggcctgaggccccagaaagagggaggaaagttgacttcagataccccagccccgcctcttccccctgcctgctcagcttcctctctccacttcctgctactgcaggcctctcctccgagaacaggtagggcccccaggaaccgagcatctggcatcttcagcccctgctgcctccctttggtatgaggcagctgccctgacccacccctgccacgcactgcccacagcctcctctcctgccacggtacacaagcaggcatctgcttccctctcccctcccctcccctcccttccttcc

SEQ ID NO: 21619 - DNA, 2300 bp, Homo sapien
gtgagtgccgcaagttatatgttgttgaagtatacatgagtataatcaaggtttttgcagaggttgtccaatctctctttctctctgtctctctctctctctcattctcactctctctttctctctctctttttttttgagacggagtctcgctctgtcacccaggctggagtgcagtggggtgatctcgctgactgcaacctccacctcccaggttcaagcgattctcctgcctcagcctcctgaatagctgggactacagacacgtgccaccatgcctggctaattttttgtatttttattagacacggggtttcatcatgttggccaggatggtctcgatctcctgacctcgtgatccacccacctcagcctcccaaagtgttgggattacaggcgtgagccaccgtgctcagcctttctctctctttttaaatagagacagagtctcactgtgttgcccaggctggtcttgaactcctggcatcaagcaaccttcctgcctcagcctcccaaagtggtgggattacaggcatgagccaccacgcccagccggagttgcacagtcttaaaaagcaattttttaaattgtcgtatgttcggaagggagggtcttattcaaaaagacttggacgcagagcagtgagtatccggggaagggagttgtctgaggtggtggcttggtcagaactgcattttggtgaaatccattgcagggcccagccgtggtccagcctgaagcaggcattcattccaaggtagaggagctcctggagctcctgccaggagccagaccctgttctcagtgctgggcacccagacaaagtccctgcccttgtggacatcctggcaattccatagatgtctgggaagactgcagaagccagagagaagggcctttgaagtggagaggggcgagctgacccagacagcctcacatgcagggcagcagggtggatgggaggtggagactgaggctgggaggctgggggaggaggctggggcaggacccccggaggagaggacaggctggaccaggtggagcgccggggagggaaagggggttggtggacagacccttaggaggctcagcgtacatgctctggagctgaagggctgtggcaggagggcgaggagggaggcgggggcaggaaacatctggctgatgggggggacagtacgatcgcattgagatgaggcctgggaggaggatgggcttggaggagatgccagggtccatttgggacatagtaggagtgagaggctggggggcacctagggcaaggtgtccaggaagccagggaaccccggatctgagggcagagagatggtatcatgagtgacgaggcagaggtcattggcatggatgagacaggtaaccccaggaaagtggaaagagaaagcagagaggccctggacagagtcccagagacctgccagtctggagctgggctgaggggaggcttcgaggaaggagacagaggttgctggagaggtgggcagagtgtctgaggcctcgagcagggggcacataggtccttgaagtgagggccaaggctttgcattggaatcattcccagagtgacttgggacattattcagaggcccccagggctgctgggaagggacagcaggcccacgctccaggggacccgggaacgaagggaagaccccaggctgtgataataacagcaacagccagcgcttaccaagcacttcccccgcccctggtgctgcgcccagcacccaagctccctttccaaggtgagggacaccaagacttagaaaatcaaagtcacgaccaggcacagtggctcacgcctgtaatcccagcactttgggaggccgaggcaggagacttgcttgagcccaggagttcaagaccaccctgggcaacagaggaagacctcgtctctacaaagcaaacaaacaaacaaacaaaaaatgagcctggcatggtggcacgtgcctgtggtcccagctacttgggaggctgaggtgggaggatcccttgagcttgggaggttgaggctgcagcaagctgtgactgcaccagtgcactccagcctgggcaacagagcgagacactgtctcaaaaaagaaaagcaaagcaaagccactcacatgaggtcttgctcctggggacgggcatggccaggactccaaccccggcagcctgtcccagagccctggagctagccccagtgcagtctctccaccaccccgcacttcctcaggccaccttcctgccacagccttttccccaaacctggtatcaccccctctcctccctccctaat

SEQ ID NO: 21620 - DNA, 2300 bp, Homo sapien
ttttagagaaagggtcttgctctttcaccccggctggagtgcagtgatgcaatcatagctcactgcagcctcaaactcctgggctcaagcgatcctcgcgcctcagtctcctgagttattggaattacaggcataagccactgcatctggccccctgagttactttcgtcatcacgctgtgagatcattttttcccatcacttgtccacgagatctgtgcgttccaagaccaaatgggatacctgtctcttccagtcccaggacaaatgtggttcagaagggatggcaggcagtggcaaggaagaaggaaagtttgggaggacaggcctggacttgaggctggaaactcttctctgacaatccccagaatctgcctttccccagaaagctgcactgggtggtgtgagggattggggcaatgagccgagggccctggggtgactgtttcccctttgccacctccccccagtgtgggatgtggaacaagtccgtctctctcctcccctccaccctttcccccatctcacctgagcctcctgcaccttccctgcctgggtctccagagggtgagaggctgggggaggggagcagaggtggttacagtggggagaacgattaaggggggaataaaggggttcaaatggtcagtgagggggcaagaacacccaccaacctagttacactgggatgggatggtggtaaaaatggagcagagggagggaggggacggagaaaagatcttatctacatgcaaagtgatgccgggagaggtgattagtgaggggcagagaggctggagaggaagatttagggggacagggagaaagtaggggcttttgcccaggctggtcttgaactcctgggctcaagcgatccaaccaccttggcctcccaaagtactgggattacaagcatgagccattgtttctggccctgacttactttctttcttttttactttttagagaaagggtctcgctcatgtcacccaggttggagtgcaatagtgcgatcatagctcactgcagcctcaaattcctgggctcaagcgatcctcctcctcctacctaggggattcagggcatgaaggaacactcaggaggagttaggaaggacacgacagtgtgtgagtgtgtgtgcggggagggttagatttacaaggcagagggaagtttagaaaggaaaagagaagggaagagacgctttggctgggaggcaggtttaggagggaggtgcagtggtgcagtggaggcggtaggtttaggagaggcgcggaacaaggggaagccataggaggggtcagcaggggtccctcagcatcctctggttgcctctaacaatcaggtacccatagcaagcgggaccggggcaacttatgttctttgcagcgagggaccttagcaaccaaggtgcgagaaacacgcgatcattggcaacttggcaagtggatgtggtaaacgaaccctgaacacactgcgacccagaaacccaccagcctagcgatacagatcgctaagcaacagccctcagaatcccactccccgaagcgctccctacttcccgccccaccgcggccacccttgggccccggggcctgcagcattcagccaggccccggcgcggcccgaccctcctacccggatccccgactcacggtctggctctgccatgggcgcggtgctgaagcccttgaggctgtcaccgaccgctctgtcccgtcaccaaccactgtgtcccgtcaccgactgctctgtcctgtcaccgactgctctgtcccgtgacggcaccagaaatgggagtggccgtgatagggcacagaactacaactctcagcagacattgcggccgcagacgcgctttcgtacaacacccagagcgccccagttaggtaagaaagcgcgcgaggaccggactacgagtcccagaaggcgtggcgtcagcagccatgttggtaaagggcgcccggaaaatgtgggaacggctagagagttgtagtcctcccgaatactctgattggtcaggatgcagtacgagggcggggtgtgagcgattcagcatattatcattgggtgaatcagggggcgtggtggggaatttcccgcagggcggaagctccagaactcccggcaaagcccagctacaggcgggcgactgcggggggcccctgaggcggcgggggccatggctggggtcgcgtgcttgggaaaagctgccgacgcagatgaatggtgcgacagcggcctgggctccctgggtccggacgcagcggcccccggaggacctgggttgggcgcggagtt

SEQ ID NO: 21621 - DNA, 2300 bp, Homo sapien
aatgcttgagctcaagagtttgagaccacagctgcacacagtggctcacacctgtaatcccagcactctgagaggccacagcgggtggatcacctgaggtcaggagtttgagaccagcctggccaacatggtgaaactgctgttgctactaaaaatacaaaaattagccaggtgtgggggcacgtgcctgtaatcccaaatttgggaggctgaggcagtagaactgcttaaacccaggagtcagaggtttcagcgagcagagatagtgccactatactccagcctgggtgacagaacaagactctgtctcaaaaaaaaaaaaagagtttgagaacatagggggacaaaaaaatttaaaaatttgccaggcatggtggcatgtgcctgtggtcccagctactcaggaggctgaggtgcaaggatcacttgagccaggaggttgtggctatagtaagccatgatcatgccactgcactccagcctgggcgacagagtgagacttcgtttcaaaaaaaaaagtcagaacagagaccaattgaatagaaagtaaaaaaaaattaatgaaaccaaaattaattaatgaaatttaatgaaaattaacgagactataaagctggttgagatcaatattcagtgcctcctggatcaggccctgcttgcatcactgggcatacagcagtaaacacaacagacaaaaaacccagtacaatccctcatctgggcctttgcaactgcagttccttctccttgaaatgctcttatcttgtttatctattgcctcattttcctgctttatttttctccaaagtacttaactacctctgactttatttccttttcttactttctatgtttctttctttctgcgtgtctttctttgtttcttcctgtctttccatttctttccttccttgtggtcttatcaatctgtttatttagctccactaaaatgtatgctccacaagggcttaagtttttgtttgttttcttcactgcctttatcactagcacctaaacggagcctggaacgtggtaatgtgtaaagaatatttgtttaacagatgaatccttggtctcatggagctaacattcttttttttaattttcctatttttttactttaattaggaattcaacatagaagagcttacattctctctctttgaatttaagatttgaagaacactgctcagaagacaggatcttagagtcagggaccaagtattaatttcggaaatcaaactctagggctcaaatcgggaactaagaatcaaagatcatatttggaggttagaagtcaggagaagccacagttctaacagaagtctcaggactggagtcaggtttgggtatcagtggatacaatgtggattccaggagctgagaatcatagttcaagaaaagaaggtaagaaatgattgggttaggatcatagctagatagaagattggttttgttaaaagttaggactcgggggttagaggtcaggaagttcagcatcggaagtcagatttaggagtatgaggttaggaagcctcagggatcagagattaatgaggaatgtgacgccgggtcctagggctccgtttggcagcctaaggttcactcacgtgtccccatcctcagtgacgtagccgaagacgaggggagcccacgacagccccgggcccaactccgcgcccaacccaggtcctccgggggccgctgcgtccggacccagggagcccaggccgctgtcgcaccattcatctgcgtcggcagcttttcccaagcacgcgaccccagccatggcccccgccgcctcaggggccccccgcagtcgcccgcctgtagctgggctttgccgggagttctggagcttccgccctgcgggaaattccccaccacgccccctgattcacccaatgataatatgctgaatcgctcacaccccgccctcgtactgcatcctgaccaatcagagtattcgggaggactacaactctctagccgttcccacattttccgggcgccctttaccaacatggctgctgacgccacgccttctgggactcgtagtccggtcctcgcgcgctttcttacctaactggggcgctctgggtgttgtacgaaagcgcgtctgcggccgcaatgtctgctgagagttgtagttctgtgccctatcacggccactcccatttctggtgccgtcacgggacagagcagtcggtgacaggacagagcagtcggtgacgggacacagtggttggtgacgggacagagcggtcggtgacagcctcaagggcttcagcaccgcgccc

SEQ ID NO: 21622 - DNA, 2300 bp, Homo sapien
ccaaaaagagaaaccatatgacctacaaagactaaaatagttatctggctccttacagaaaaagtttgctgactcctgctgtagggttgatagtttacaactttaggttatcatgggctaccttaaagtgatattatgccatttcacatagagtaaaagaaatttattttattttattattattatttgagacggagtctcactctgttgcccaggctggagtgcagtggcacgatctcagctcactgcaacctccatttctcaggttcaaatgattgtcctgcctcagcctcctgtgtaggtgggattacaggcgcatgccaccatgcctggctaaattttttttgtattttttgtagagacagggtctcatcgtgttggccaggttggtctcaaactcctgacctcaagtgatctgcccgccttggcctcccaaagtgccaggattacaggtgtgggccaccgtgcccagcataatgaactgttttaatattcttgtttgcaaattctaacatctctgtcatttctgggtcagtttcaattcactgatggttcctattatggatcatgttttcctgcttctttacatgcctgataatctttggttaggtgccagacattgtgaattttgccttgttagtctggagaattctgtattcctataaatattcttgaggccgggcgccgtggctcacacctgtaatcccagcactttgggaggccaaggcgggtggatcacgaggtcaggagttcaagatcagcctggccaacatggtgaaaccctgtctgtactaaaaactgcaaaaattagccaggtgtggtggcacgcacctgtggttccggctactcgggaggctgaggcagaagaatcgcttgaacccaggaggtggaggttgcagtgagccacgatcgtgtcactgcgctccagcctgggcgacagggcaagactctctctcaaaaaataaaaattaaaataaataaataaataaataaataaataaatattcttgaatattattctgggatggagttaaattactcggaagtagtttgagtctttccagttttgcttttatgatttgttaggtgggtgttgagcagtgccccatctacagttaattattccccactattgaggcaagaccttcctgagtatcccacccgatagcctgtgatgatgtttttccagcctggctggtgggaacactcactattcctggccctgtgtgagtaacgagcacttttctgaaatccttttggatggttttcccatccccacagactcacaggcatggctgatccgtattctccggaatacacaagagaacctcctgcagttccccagcaatctctcctttggcaactctgttttgtactctgtcctgtgactctagccacgctggcctccacagactcttcctccatatccatctcctgacctcagacaacctgatgcgctctgcttggattcccctctctgcaccgtggctttgaaactctctcaagacaataagctgtggcagtcaagtgtggggcccacctcgtgtttcctgtctttcaggggtcactgtgattcattgcacgatgtccagtgtcttcaacactgttgcttcatataccgtatttcgtctgactcttgtttgtttgtttgtttgtttcacgtgggagtgaattctggtccatgttacttcattttgggcagaagtggaaatcccactgaataaacattgattccacgaatttgctgatgaaactctgacctctgacctcccagatagctgacagggggttccagaactgtggtcacaaggcctagcatacagtaggcgccccatgtttgttcaatgaaggaatgcaagaggacttgaactttgccctctcaccccggtctttgtccccagggcactgcacttggctgtgattcatcagcatgaacccttcctggattttcttctaggcttctcggccggcactgagtacatggacctgcagaatgacctaggccaggtgagccacgagggatggtgtagggcttggggtccagggttcccagtgtgactccctaccgcctgtcctctgcttctgcagacagccctgcacctggcagccatcctgggggagacatccacggtggagaagctgtacgcagcaggcgccgggctgtgtgtggcggagcgtaggggccacacggcgctgcacctggcctgccgtgtgggggcacacgcctgtgcccgtgccctgcttcagccccgcccccggcgccccagggaagcccccgacacctacctcgctcagggccc

SEQ ID NO: 21623 - DNA, 2300 bp, Homo sapien
cgtgtctggccaccggtcctattacctgcgcggggctggagccctcctgcagcacggcctggtcaacttcacattcaacaagcttctccgccgggtatgggccaagataggagggctgcctggagggggtggcatcgaagctgagctcagagggcccaacggggatgggagtgatctctgctctgccctagtcactgctctcagagcttcatgtgtatcattgacacatttagtccttacgacaactttatgaagtgggtgctgtcatcatccccactttacagagagggcttgaggcccagagaggggaggtacctatagcccaaggtctcacagccagtctggagctgggcctagagcctgtgcttgtaatcattgcacctcactgcctgcttgcggtataaagggagcatttgggaatcatagcatccattgaaacatggcagggactggttgcatggagcattggtcacggtgaggaactcagacattttcagagggtactagggagccatgggaggcttttaagcaggggagggtgtggccaaatctgtacttttttgttttttgagacggagtctcgctctgtcacccaggctggagtacagtggtgcaatcttggctcactgcaacctccacctcccgggtttaagtaattctcctgcctcagcctcctgagtagctgggattacaggcacatgccaccatgctggctaatttttttttttttctttttgacagagttcgctctgtcacccagactggagtgcagtagcacgatctccatgccggctaatttttgcctttttagtggagagggggttttgccatgttggccaggctggtctcaaactcctggcctcaagtgatccgcccacctcagcctcccaaagtgctgggattacatgggtgagccactgcgccagcccctgcctcagtttcgtctgaggaggaaggggctctgcagcaccccttcttcagggctgagcttggggtctggtaggggtcccagctctgctcactcatcctctcccctgaacagggcttcacccccatgacggtgccagaccttctccgcggagcagtgtttgtgagtgaggcctctccgcttccctcgcccacctgggtgtcaggccctgccgtgggtgcccgaggcagggaaacctgaggagaccgccctggggctgggttgagggggccaggccataccagggaggccagggcagctccagatgttttcaggggaggagctggggttgggactgtaaaacgagaggccagggttacctgtcccctgatccctgtggcctggcctcctcccccaggaaggctgtgggatgacaccaaatgccaacccatcccaaatttacaacatcgaccctgcccgcttcaaagatctcaacctggctggaacagcggaggtggggcttgcaggtgaggacctgtgtgggtggtggggaggagcaggagtgatgtggaaggacaactgggagcgtccagggagcactgggggggatcacctgccccgagcagctcagcagccccagggccaacatgtacggctgtgtaggttgtttactgtacagcagtacagtgataatccagccccgggccttgacctggggttgcatccaccagagggagtgcctcttaatcttccaaaggcttcctctgggcactggcagccctggctcaccctgtggtctctcctcccaggctacttcatggaccacaccgtggccttcagggacctgccagtcaggtgacacctggtttccttagaccttgaccccacctgtgacaatcagtcttccctccttgacccgactttccctgctctctgccaggatggtttgctccagcacctgctaccgggcagagacaaacacgggacaggaaccccgggggctgtatcgagtacaccacttcaccaaggctggtgtcgctgggactaaacggggctggggtggggggccaccccaagagctcagagcctcctgactcctgtgccctctgtcccaggtggagatgtttggggtgacaggccctgggctggagcagagctcacagctgctggaggagttcctgtcccttcagatggagatcttgacagagctgggcttgcacttccggtgtggagaggggccagggatccagggatggcaggggtggggtaggggagggacaaggggctggccagctgctcttcgctctggaaccacctctccagccccctcgttgcccccattttcctgtacaaggattacaggagcatatacaggatcccaatctgtctgccg

SEQ ID NO: 21624 - DNA, 2300 bp, Homo sapien
tagcactttacaaatgaaagagaatataattaaagaacaagaatgcatcacacgtggtaagagcaataattgttaatgaaaccggtttcaattttgggtgtgtgtactgggtcaggatgtgaaatgtatttcttactcttggccacaaagtttgaaaaagcctgctaaaggatgtgacgctctaaattatctacatggccatcaaatggaattttccatcctacctccaggcttttgtatattctggtcccctacttgggatactcttcttccctcttccctggtgatttctcaatccacagatctttgtttaatgccacctcctctgagaagtcctcccaggctgtcctccactttgccttcacagcatttaccacagattataatgagtatatctgtctctatgaatttgattactctaggtagtcaaatttaccagaaattgtaattagtatatatgtatagttgtatatgttaaatgtcttttagtggggcatggtggctcacatctgtactcctagcactttgggaggccaaggtgggtggatcacttgaggtcaagagttcgagaccagcctggccaacatggtgaaaccccgtctctactaaaaatacaaaaattatgcagatgtggtggcatgtgcctgtaatcccagctactcgggaggctgaggtgggagaatcacttcaacctgggaggcagaagtcgcagcgcactccagcctgggagacaagagcaaaactccatctcaaaaaaaaaatgtcttttactagactgtgaactcagatcatgagagggcacagcagggtacttaagattgtggagtctgggtgtggtggctcatgcctgtaatctcagcattttgggaggccagggtgggaggatcacttgggcgcaggagttcaagaccagcctgggcaacatagtatgtccctgtctcaacaaaaaatacaaaagtttagccgggcgtggtggtgtctgcctgtagtcccagctacacgggaggctgagtgggaggattatttgagctcaggaattcaaggttccagtgagctataattgtaccactgtactccatcctgccatcctgggcgacagaacaacaccctatctcaaaaaaaaaaaaaaaaaaagtggattctaggccagaaagcacaggttaaaattcccactctgccacttcccagttgcatgacctagcgcaagtgaattagcttctcgaagccttagtttcccctctgataaaatgggagaaataatggcacctacttcatagagttgctgtgaaaattaaacgaggttaaagtgaataaagcacttcaaacaggctgggaggggagtccaagagaggaatgggaagacgtggggaccccactatcgttagcacctcaacacagagatattgtgaacccggtcctaattcccttttataagtgctagcaattttattattattcaccgcatatttgcaacatctagaacaccggaatatagcagttgcaccttaagtatcagtttaatagaaccattcattaatggattcattcattcattcattaactctatttaactgcctgctatgtgtggcggaggtgcacaactctccctacctctctctctaaacgcaagagctccaccacaccccagccctgaccccgtccgattcacacttggctccccattttcctttgtggtcttagggaaaggctggcatgaggttgcagcacggagggcaatgtcacatagcaagttcctaaaggacaggaggtacccagcgagcagtatgaaacaagcgcataatgggtgtccaggacacagtaggcattcttggcacatagtagggcctcagcactcactggacaactggcacataagtgggtgccatgcacaagacgttggctaacttgggaaataactaaaattcctactacaggttcgccccctgccggagggcatcttgcaaacccaattcttccgtaaagcaaacgtctgcgccccccggccggcgcaggcgcactcacgatcgcgggcaggtccgccgagcgcagctcccccttgcggagctccagggcgtgtgcggcctcttctgggcatgcgcagaaccgctctatgtccagctgagggagtgcgctgtagccctcgcgcgcatactcgtacaggaggttccggtttcgtttctctgtagtgaaacttctccttggactatcgttggagatgcagcctccccggggccggaacccccgacgagtcagcaaaggccacaagcgccgcgccatggacgcagccatcttggaccggg

SEQ ID NO: 21625 - DNA, 2300 bp, Homo sapien
agatgcatttgttcacatctaatgttatctacagacaaaagtaactctttattcttcaaggaagcattaccttttttttttttttcttttttttttttgagacaaagtctcactctgtcgcccaggctggagtgcagtacctcaatcttggcccactgcaacctctgcctcctgggttcaagcaattctcctgtctcagcctcctgagcagctgggactacaggcacccaccaccacgctcggctaatcttcgtatttttaagtagagacggggtttcaccatgttggtcaggctggtctcgaactcctgacctcggcctctcaaagtgctgggattacaggcgtgagccaccacggctggccaggaagcattatttttaatgctgtttaaaataatagtaggctcagtggctcatgcatgtaatcctagcacttttggaggctgtggagggtcacttgagctcaggagttaaggccagactgggcgacacagggagacctccctctctacaaagaatcaaaaagttagctggttgtggttctgcaggcctgtggtcccagctacttgggaggctgaggcgggaggatcacttgagcccaggaggtcgagactgcagtgagctgtgatcacaccgctgcacttcagcctgggcgacagagggagatcttaaataaataaataataaaactgacccaaacgccgcttgacacgcagtagccctccatgcagctgcttcccacctcttgctctagcagccctagctctgccaaaaccccaccgtgtttttccacccccgtttccctcggggctccgacggaggcacacaagtccaagagcgaataaccctccccctctagcctcgtccctgaagcccaagtcccccacttaccacaagttagggacgtgttgaggccatggagaaggccagaccaggacatcctgccacctgggccgtccctgtggtaggggataagagactcagaaaggaggaaaaagtgaccgatccgcaaatgctccccgatccgctctcaggactttctggcttaaatcaaaggaaatacctctataggtctaaccacaggccctcatgctgctaacagaaagtccctccgtaaatttagcctcgctctgagtgggttcccgagggcccaaccactctcgcccgcacgcaggaagaactgggaaactggggagatggcctggtagatttggaggaccccaggattccaccgacctcacaggacctaaaggtgaggtcgcggacacgctgaatccagcttctagcctcttccgggcgctatccgtgcagggattggctggttctgcctcgcgtcactgaagaggcgggacacagacgacgattgggcgacgaaggactctatcgcggtcaactttcctcaggatctgattggctcgtcacggtcaggttcgctgccttgcaattggtctaaacgcggagtgggcgggacgaagtgccgccttgttcccggtccaagatggctgcgtccatggcgcggcgcttgtggcctttgctgactcgtcgggggttccggccccggggaggctgcatctccaacgatagtccaaggagaagtttcactacagagaaacgaaaccggaacctcctgtacgagtatgcgcgcgagggctacagcgcactccctcagctggacatagagcggttctgcgcatgcccagaagaggccgcacacgccctggagctccgcaagggggagctgcgctcggcggacctgcccgcgatcgtgagtgcgcctgcgccggccggggggcgcagacgtttgctttacggaagaattgggtttgcaagatgccctccggcagggggcgaacctgtagtaggaattttagttatttcccaagttagccaacgtcttgtgcatggcacccacttatgtgccagttgtccagtgagtgctgaggccctactatgtgccaagaatgcctactgtgtcctggacacccattatgcgcttgtttcatactgctcgctgggtacctcctgtcctttaggaacttgctatgtgacattgccctccgtgctgcaacctcatgccagcctttccctaagaccacaaaggaaaatggggagccaagtgtgaatcggacggggtcagggctggggtgtggtggagctcttgcgtttagagagagaggtagggagagttgtgcacctccgccacacatagcaggcagttaaatagagttaatgaatgaatgaatgaatccattaatgaatggttctattaaactgatacttaaggtgcaactgctatattcc

SEQ ID NO: 21626 - DNA, 2300 bp, Homo sapien
gtttattaaaaccccttcccagcagagggcagtacagtgtcttgtcccagcagaaaaggtccttcaggccacccctctaaacacaggagccaagggtgttgacagaggggcaccctttgcacccccaggactcctatggcttaatagtggtcctgatggaagaggcggagccaggacttgaatccatgagtggctgcctctagaggcgcaaaggccagcatcggaggaccctgtggcagccaggagcggaaggttcatgttctgcaggggcgcccagcccactgtgcccccagccgtcacttcttctgcacgtggccacagtcgtacttgccacgcacaacggtgagcttgacgcctggcaggtcctgggtgcggccgccctccacaaggacaatctggtgctcctgcagggtgtggccctccccagggatgaagcagacggcctcgcggccagtgctgagccgcactcgacagcacttgcgattggctgagttgggcttcttcggcttgcgggtaaacgtgcacaggaccacacccttcagctgcggccggccttccgtggggcccagcttccgaggcggccgcttggggggccccaggcggtgcatctggttcagggtagccatggagcaggtagcccagagccggggaaccagagctgggcctggagagggccgaaaggggttattatcccagagaacagatcttagagtagtagcaactcaattttggtgttttaggcattgtttaaagcactttacaaagatgcatttgttcacatctaatgttatctacagacaaaagtaactctttattcttcaaggaagcattaccttttttttttttttcttttttttttttgagacaaagtctcactctgtcgcccaggctggagtgcagtacctcaatcttggcccactgcaacctctgcctcctgggttcaagcaattctcctgtctcagcctcctgagcagctgggactacaggcacccaccaccacgctcggctaatcttcgtatttttaagtagagacggggtttcaccatgttggtcaggctggtctcgaactcctgacctcggcctctcaaagtgctgggattacaggcgtgagccaccacggctggccaggaagcattatttttaatgctgtttaaaataatagtaggctcagtggctcatgcatgtaatcctagcacttttggaggctgtggagggtcacttgagctcaggagttaaggccagactgggcgacacagggagacctccctctctacaaagaatcaaaaagttagctggttgtggttctgcaggcctgtggtcccagctacttgggaggctgaggcgggaggatcacttgagcccaggaggtcgagactgcagtgagctgtgatcacaccgctgcacttcagcctgggcgacagagggagatcttaaataaataaataataaaactgacccaaacgccgcttgacacgcagtagccctccatgcagctgcttcccacctcttgctctagcagccctagctctgccaaaaccccaccgtgtttttccacccccgtttccctcggggctccgacggaggcacacaagtccaagagcgaataaccctccccctctagcctcgtccctgaagcccaagtcccccacttaccacaagttagggacgtgttgaggccatggagaaggccagaccaggacatcctgccacctgggccgtccctgtggtaggggataagagactcagaaaggaggaaaaagtgaccgatccgcaaatgctccccgatccgctctcaggactttctggcttaaatcaaaggaaatacctctataggtctaaccacaggccctcatgctgctaacagaaagtccctccgtaaatttagcctcgctctgagtgggttcccgagggcccaaccactctcgcccgcacgcaggaagaactgggaaactggggagatggcctggtagatttggaggaccccaggattccaccgacctcacaggacctaaaggtgaggtcgcggacacgctgaatccagcttctagcctcttccgggcgctatccgtgcagggattggctggttctgcctcgcgtcactgaagaggcgggacacagacgacgattgggcgacgaaggactctatcgcggtcaactttcctcaggatctgattggctcgtcacggtcaggttcgctgccttgcaattggtctaaacgcggagtgggcgggacgaagtgccgccttgttcccggtccaagatggctgcgtccatggcgcggcgcttgtggcctttgctga

SEQ ID NO: 21627 - DNA, 2300 bp, Homo sapien
tcggaagcatcagggtagcaatgggacaggtgtgggttctggttcattccaccttggaaccttttcacactgatgaggagcagggagagtgtaatgaagtaatggaagaggtaacagagcaggtttgtttgccagctaaagctaaagtggcaaaggaggaagaggttcatccctacccttctgcatcccctccttagtgtgaagaaaaagagtgacctgaccctccagatctttcttttccagaggacactgggtgaaaagtagttgccccagtgactgtttgggcagtgcctcaagcgactgctctcagttccattcaggcaggaattcagcaagctagaagagagggtgatttagaggcttggcagttccctgttagaatacatcccccagatcaacagggaaatattacagctacatttgagccttttccttttaaattactcaaagaatttaaacaagctattaatcaatatggaccaggttctccttttgtaacgggactgttaaagaatgttgctgtttccagtcggatgattcctcctgactgggacgctcttacttgagcttgtctaactcctgctcagttcttacaatttaaaacttggtgggcagatgaagcttccattcaggctcctcgcaacacccaggcccaacctcaaattgatataactgcacaccaacttttgggggtcggcggctgggctggtttagatgcacaggtggtcatgcaggatgatgccatagagcagcttagaggagtgtgcatcagagcttgggaaaaaatcacttcaggtggagaacagtacccttcctttggtgctgtaaaacagggaccaaaagaaccgtacacagattttatagctcggttacaggagtatcttaaaaaggtgattgcagattcggctgctcaggatatagtgttgcggttattagcttttgacaatgctaatctcaattgccaggctgctctgtgacctattagagggaaagcacatttagttgattatatcaaggcctgagatggtatcagaggtaatctgcataaagctactttgttggcacaggcaatggcaggactgaaagtggataaaggaaatactccatttcctggagcttgtttcaactgtgggaagcatgggcacactaaaaaagaatgcagaaaaaaatcagcaagtcaggccggcagacaggggaaaaaagaaaactgctgagcctgatatatgtccaaaatgtaaaaaaaggaaaacattgggctaatcagtgtcactctaagtttgataaagatgggaacccgatttcgggaaatgccatgaggggcccatcccgggccctgttcgaaaccaggggcatttccgcctcaggccactccttcacccctgtacaatgtctgtcccctgccacagccagtaatgccacagtagatttatgctgcacaaaagctgtgagccttctgcctgaggaacccccgcaaaaagttccaacaggggtctgtggacccttgccagtggggacaataggattacttctagggaggtgtagtttaaatttaaagggggtacaagtacaaacaggagtcactgattcagattacaatggagaaattcaaattgttttttctacttctgttccctggaaagcagagccaggagagcgcatagcacagctcctgaatgtgccatatgtgggaatgggaaaaagtgaaattaaacgaacaggaggatttggaagcacaaataaacaaggcaaaacagcttattgggtgaatcaaattactgataaacgtcctacctgtgaaataactattcagggaaagaaatataaaggtttggtagatacaggagcggacatttcatttctctatagcaatggccgtccacatggccaattcaacctgctcagtttaacatagttggagttggtaaagcccctgaagtatatcaaagtagttatattttgcattgtgaagggcctgatggacaacctgggactattcaaccaaaacttctgtacctataaatttatggggaagatatttattacaacaatgcggagcacaagttctaattccagaacaattatatagccctcaaagtcaacatatgatgcatgaaatggggtatgtccctagtatgggactaggaaaaaatttacaaggtttgaaggaaccgcttcaagcagaaatacaagtttccgccaaggtttaggatattatttttgatggcggccattgttaagcctccagaacctatacctttaaaatggttaacagataagccaatttggatagaacaatggcc

SEQ ID NO: 21628 - DNA, 2300 bp, Homo sapien
aggagtcggtaggagaaaccagggaggattggagcacaagagggagaggctggtggacagcacaagctggctggttgcggggtctcttctgggcaggctggcaggtgaaccatatgttcaactcttgttttcccacagagggcttcagaggctgggaggtggagcatggcgggaacggctgggccatagaaaagaacctaacaccggtgcctggggctccttcgcagacctgcttcgtgacctctttcgagtgagtggcccaagtgagaggccccgatccctggggcaaaggccccaaagaaagggaccctaccccccacactgtcctcatcgtcaccttcaccctctccttcccccatttatttattcattgattcattccatcaatcaacaaatacttgttgagggtactgtttcatatgccagggatacaaggaaagatcaggaaggttagcaaccacaggcagcaatgctctgtgcatcatcgcctgcagtttgtgagacaacagcaagacagctttgatctaaagacagggttttgggccgggcacggtggctctcgcctgtaatcccagcactttgagagcccgaggtgggcagatcactttaggtcaggagtgcgagaccagcctggccaacagggggaaaccccgtctctactaaaaagacaaaaattagctggacgtggaggctgaggcaggagaatcgcttgaacccaggaggcaaatgttgcagtgagccgagattgcaccactgcactccagcctgggcgacagaatgagactctgtctcaaaaaaaaaaaaaaagggaacatggcagattagcacccaagatggagtcgcttttgcctccacaaggagttactctatactagacactttacatataattctggcaacaaccctgtgacatagatactattattgcccccactttataacaggaaactgaaggccgggcacggtggctcatagctgtaatcccagcactttgggaggccgaagtgggaggatctcttgagcccaggagtttgaggttgcagtgagcctaggatcatgccactgcactccagcctggcaacagaataagaccttgactcaaaagaaaagaaaaaatgagaatctgttctccatggaatgatggtgccacctctacagtttatgaagtttctgtgtatacctacgtctgtccctggcactctgttttttttgtttttgtttttgttttttgagatagagtctcattttgttgcccagtctagagtgcagtggcgcaatcttggctcactgcagcctctgcctccctgggttccaatgattctcctgcctcagcctcccgaatagctgtgactacagaggtgcgccaccatgcctggctaatttttgtattttttgtagagaagaggtttcaccatattgaccaggctcgtctctaactcccgacctccggtgatccgcctgcctcgggctctcaaagtgctgggattacaggtctaagccaccgcgctcagccggttcctggcactttgttctattccattgctcaacttacccatccttccaccaatactgcacaatttatgttattatggcacattctagtttgaggagaaggactgtttacaaagttgtaggcaggagcccctgagctagtaacagttaggaaaggaacgttaccacccctagactgctagaggtgaggggaggaaacagttactggaaaatgaggagagagtgccatggagatttgctttttccttgggggacaaggcagtcccttgagaaggacctaagaggataaataccctgattttagtcacctctttcacttccatcccctgccggagcatcccattggctgatccaacaggaagcaatgggtgacagagacaaggctgtccagctttagacccggggccctcacactttaggaggccacagagctccccgctcacatgtctagtatgtggccttcatttgtagtcatgtcctgtcccacaaagatgagggtcaggctttcatagaggtcagctgcctggagcccgcagcagggtggagaatggcaaagggactccaagaggccaaggagagatgtatagcccatcatgcatcttcaggtctgctagagcaaaccctgagggctgctttagagagggttatcaagggagacttcttggaggaggtggcttctgactgtgacttgaatgccaggactgtttgccctgccccctgccatctctccttcccagatggtgctccaagaggcagcttgtggacctggtgatggaaggggtgtggca

SEQ ID NO: 21629 - DNA, 2300 bp, Homo sapien
gccaacatggtgaaaccctgtctctactaaaaatataaaaattagccaggtgtggtggcgggcgcctataatcccagctactcaggaggctgaggcaggagaattgcttaaacctgggaggtgaaggctgcagtgagctgagatcgcgccactgcactccagcctgggcaacaagagtgaaactctgtctcaaaaaaaaaaaaaaaaaacacattctcggcccggcgcagtggctcacacctgtaatcctagcactttgggaggctgaggcaggtggattacctgagttcgggagttcgagaccagcctggccaacatggtgaaaccctgtctctactaaaaatataaaaattagccaggcgtggtggcagaggcctgtaatcccagctacttgggaggctgaggtaggagaatcgcttgaacccaggaggtggaggttgcagtgagctgaaatcgcgccactgcactccagcctaggccacagatcgagactccatctcaaaaaagtaaataaataaaaaataacacattctctgcacacacccttgcccactttggcttcctcctgcatgagaccctggttaaatccagccttcctctctgccgtgcctgcacccacacagcttgagtgagctaaaaaacaacacagccccctggccaggctaatttcaagtctgtgaacttgaccctcaggcggaccccaatgctgcctggcagccatatgacatttctctgatcccctccttcctcctgtcttctagacaactaattcacaccttttcccttctcctctaatcctttccaacacctcctccccccctttcactctcccttggcttcttattttgcagagaaaatgcaagagatgagaagtgaacttccacagccacccccgcctctaccacctacctgcacccttgcccacacccgttctcctgctgtgactgtcccatcacctgctcccaccttcccgcccacttccagccaccgtccctggttctcacctctctctgctgctcattcagtttcccccatgcactggatctcctgttagcccacacagcatcctgtctcccatctcaaaacaaaccctctctctttttttgtttttgtttttgttttgttttgagacagggtctcactttgccgcccaggctggagtgcagtggtgcgatctcagctcattgcaacctctgcctcctgggttcaagcaattctcctgccttggcctcccgagtagctgggattacaggtgcgccaccacacccagctaatttttgtatttttagtagagatggggtttcactatgttagccaggctggtctcaaactactgacctcaagtgatctgcccacctcagcctcccaaagtgctgggattacaggtgtgagctaccgtgcccagcccaaaccctctcttgacttcacctccccttctagctacagccccactttttttgctattctttttattttatttagagacagggtctcgctttgttgcccaggctggagtacagtggcataatcatagctcactgcagcctccaactcccgggctccagcgatcatcccaccttaacctctggagtaggtgggactacaggtgtgcaccaccacacccggctaattttttcattttattttttgtacaggtggagtatcgctgtgttgcccaggctgatctcaaactcctggcctcaagcagtcctcccaccttgccctcccaaagtgctggaattacaggcatgagccagcgtgccaggtcaagaatgtttttaatgattaaccatggaatttaagctggctaaggaagaaatgagggcatgggagggtgagggggagtaaaatatgaaagggacaacggatgggagatcacagtgggttggaaggatcatgcgagtggggcactggagggaatgaggtggaaagaaaaagtgatgggtggagagtgagtgtgagattgaggttctgaagaggctgctgttattcaaacaaggtctgggtttgaccacgagagggagatgttggggaaggaaaaagtcactagagagaggtcagggaacagagaggttggggctgcggaagaactatctggttatagaaatcactgagaatgatgctaagagcagcgggagcggccgtgagcccagagctaaaattagggagaagagaggagtcatgatctgggtcagcagatgacgcatgaagcaaggtagtgatgagattcatcgctgggggttttggggagggtggagggagaatggtcaggaagtagctcccaggagcacggagacctc

SEQ ID NO: 21630 - DNA, 2300 bp, Homo sapien
ggtggcgtgcccctgtagtcccagctacttgaggggctgaggtgggaggatcacttgagcccaggagatcaaggctgcagtgagctgtgatcatgccactgcactccagcctgggtaacagagccagacgctgactcaaaaataaatcaataaatgaaaaataaacaattccactttttgtaataataacaataaagaaacaagctcaagtccatgggtatcagcacactggtgacacgtgtcagcacaagtatgcattagctttgtaatcattataataacacacaattgctttgtctatttgttaaggtatttacaacaatcgcaaacatctgacattagatttgggaaggctttaagcgatggcttttggaaggaatgttgaaatgattagggaaatctggtttcgaggaagacttagaggaacaactgtttaatgttttatcaaagaacaaagattagttagtattcttgtccctacatatgcaagcccctggatgtcagagaattgagcagcatgaagaaatggctacttacggccaggcgtggtagctcacgcttgtaatcccagtactttgggaggccaagacaggcagatcacctgaggtcaagagttcgagaccagcctggccaacatggccaaaccccctctctactaaaaatacaaaaattagccaggcgtggtggcgcgttcctgtaatcccagctactcgggaggctgaggcacaagaattgcttgagcccgggaggtggagcttgcagtgagccaagatctagccactgcactccagcctgggcaacagagcgagactccgtctcaaaaaactaaaataaaataaataaaccccccaaaatccggaatgcaaaacaaacctaggcctacgcctttcacataaggaactgcgtgtggatctgtgctaaaaactctaccaataatacagtaattttacaacccacagcagaaaatgctttcaaaggcggttgttacaaataatgtaatagtagtcaaattagcgttggctctgagtccagcactgtgctccgcgctgcacacgcagtctcacgccgtcctcacgatggcgctgtggggcctggctgaggtttctaggggaaggggctttagggaatccaggctctctggctgtgtgacccctccaagctagcgacttggactacgtgcaacagaccaggtatctctggacttcagtttctcgggagaggcgtccatgaggaggtcatgcatacaaagcatttagcacagtggcagatatgagccagtgggcctggagaatgatttaccagcgtgggggaggcctggcttccagaaaactagctctggggtgtctgagatcagtcaccttgaggtccctggtgcaatctagggccatcagaagggactgcaaagacccaagggcagaggtaaagggagaaaatgggtcgcggccccagcctgaccgaaactgaacctccggattaattcagttgtctatagctggggggatggggaggacaggggagtcctaaggtggaagggtacaggtttgtcattgccacagagagtgcgtgtggtgaagggatttaatttaagatcagccccgggcttctgagaatctggccctgggaagcaacgtaaatacaagaaaatccctgtggccagggactttgatccaagtgtttcgaatcaggccctgggtcgggctcacagctaagcggtttaccaaccgtggacctgtgcaggatcccatggatgtgaggggtggagacggccgcaagcaggaggccaggaccagaaggaaacggaatttgggtgggggtggggagctaggaccagtccccccgcgggggcgtcttggggatgtggaactcgcacacccagaggaggtggctctcccaggggtgggccccggatcctaggggcgcggggctggccccgctccccgctggcctcgcggcaactgggcctccccctcgctgcacgcagccctccaagctcccccgcccgcccgccctcgctcccgctgggccccgcagccggaggaggggcggcctcccgcccccgcccgctggatctcagagtcgccgcccccggcgccgggctgcagccgccacgccccgggagaggaccgaccgcccagaccgccggtcccggggccccctgggccacgccgatcacggggagcccctcgactgcctcccagaacaaagtgggaaagggaagcttagcccgccgctgccgcctccgagcagcccgccaggtgagcgccgggacaggtaggggacccaggtcgggacccaagcgt

SEQ ID NO: 21631 - DNA, 2300 bp, Homo sapien
acagcttctcactctgtcgcctaggctggagtgcagtggtgaggtctcagctcactgcaacctctgcctcccttgttgaagtgattctcatgcctcagcttcccgagtagctgggatcacaggcatgcgccaccatgcccggctaatttttgtattttcagtagagacggagtttcgccattttggccaggctggtctcacactcctgacctcaagtgatccgcctgcctcagcctcccaaagttctgggattacaggcgtgagccatcatgcccggcctggaggttttatatttaattatttccctgatactacgtaatttgctcattatgccaactgtttatcatgtctctccctctagaaggtaagttctttgtggggaagaatccatgtctggttttgtttgttgatgtcttaaactatgtatacagctcacgttatgtcgaagccaaataaaatatagagatatagagacaaatctctcgatttaaaatgttttgttgcggtggctcatgcctgcgatcccagcactttgggaggctgaggcgggcagatcacctgaggtcgggagtttgagaccatcctggccaacatggtgaaaccccgtctctactaaaaatacaaaaattagctgggcatggtggcatgcgcctgtaatcccagctactcgggaggctgaggcaggagaatcgcttgaacccatgaggcggaggttgcagtgagacgagattgcatcactgccctccagcctgggcgacagagcgagactctgtctcaaaaaaataataaaatgttttatttgggaagcaagaattgacattcgaggcatccacacagaccaggcggtcttcagaactttcaaagaacaaagaggttagaggtttttataagaaacagaaatgttaggtattgttttgcaagaaagttcattgacactagcaacgttctggggagctggcaagttctgactggtaagtgacagcagagggaaaaactagtcttagagtcacggcaggttttttcagtaccagttagactgcttccaggttacaacaggcagttttaacagccaggcttgcagagaatcactttcttggagcaatggtatctgccctaagtgttttccccccggcctctcaactttgttttagttggatatgacaagaaggatccaattcacatgatcaactttcacaattttttttttctgtttgttttttgagacggagtctcactcactcttttgcacaggctggagtgcagtggtgcaatctctgctcactgcaacctccccctcccggattcaagcaattctcctgcctaagcctccaaattagctgggattacaggcgcgtgctaccacgcccagctaatttttgtatttttagtagagacggggtttcaccatgttggccaggctggtctcgaacttctgacctcaagcgatccgcctgccttggcctcccaaagtgctgggattacgggcatgagtcaccgcacccagccacaattgtatttttattggacagagctgatctagaggttaaaatgaggaattccggagctaggctggctggattcaaatccctactagctggtgatcatagacaagccacttggcctctgctggtctcagttttttcacctgtgaagtaaagggcataacagcacctacttcatggggttgccaccctggctggcagtaaaaccgtccataaaagttggctggtgttactattggttgcattaatttttagcagccggagcctgttttctcctgtgaaatgaagataaccacgcccgaccttaaaggtgatggaaattttttaacacgttaacggatacgaggcctcccactcagaagcctgaccaaaataacaatggttgctcagagccagacgtctcattgctactaacgaattagggacacttcaaggggccggctggaggggacggctgtgagcagcaggccttggctcctggctgcacctggccccgtcgcgggaagcaggttgggtttggagagcgggagggagcaggcgggaggggctggcgagtaagaaagaggatgcaggggtgggtgaagctggctagtaagaggggaggggccggcgagtaaaaaggacgcagaggggcgtggggagcttgcggcacagctagggcatcccggcgaggagcgccgccaggccccggggtaggacttggggtgcggtgtcggtgcggccgccgaggggggctgattgcatgcaattcggggcatacacacagaccgcggggtctccgggatatcggggctatca

SEQ ID NO: 21632 - DNA, 2300 bp, Homo sapien
caataatcttctaattattataatgataattagaagattatacgggggcacttgctctgtgctaggcactgttctaaggggtttattatttaatccttgcaacaaccctataaggtgctactattgttcccatttcacagatggggaaaccgaggcaccgtgcggttaaatcacttgtctaagttagtcagtgctgaagatagatttataaccaggccatctagccccagagtcgatgctccattccccaccgcaagcttatacctgagctataagccctcatccgccagtcagggtccaaccagaggcaactccagtgggctcttttcacctgggctggtggttgggaattcaggagctacgtgaacttggataggggaaactttttttacctctccttttactacactttaatctagcagttctcaaaatgtggtctgggggcacctgtgggtccgcaagacctttctcaggggctagtgaggtcaaaagtattttcataatgatattaagacgtttgtccttttcattctccagagactacctgacctgtgataatgtcatcactctgatggctaatagaaatatatgcatgtatattcgtgtgtttttaaaacttctcgttttcagccaggttcatgcctgtagtcccagctactcgggaggctgaggctcgaaaatcgcatgaacccaggaggcagaggttgtaatgagccaagatcgtgttactgtgctccagcctgggcaacagagtgaaactctgtctcaaaacaaaaacaaaacacacacacacacaaaaccaaaaaacaaacacaaaaacaaaacaacaacaacaaaaaaaccccccaacaccttgtatcacaatagcactggtttcctttgtatttctgtgtatttatattatgcatgtaacgacatgatcctgagaagggcttgaccagcttgccataggcatctttagcacaaaaaagcttaggaacctcccattctggacgaactaagaatacggggaggttataattgggggccacaggagtggcaggtactcaagtttggttatgagagctactttcattatattttaggctgtaatggagactctggaagtgggaagaaaaaaaaaaaaactcaaacagtgcaaagggctcgttttgattttcccacactcctagtgccaatttctgaaattggtgtccacaatcagtagaagcctatgtgctctgaatttacaaagccaagtggtggcgggtcattgtatctgcagtcaggaaggggaaacgactggaaatccgggcccccccagttcttccctgcttctctttttgtggcagccgctcctcacgttcaaacagattgcaaaggtttacaggggagaaccctaacttgttccctagacgtcagtttctggagttcctgcattaatacgattaaaaagaacagctgattcttatccagcccttactctgggccgggccctgttatcggcatgaaatttcatgcagcaactcgtttactcctcacaacagcccacggggtatatacgagcatcacctcctttttacaggtgaaaaaacccaaggtccagcgaggttgaataactcacctaggtcgcacagctcagaaagcccactgcaattccgggattctggttttgttttgaggttgccccgggcttctgaggaggggtcagtgggctcagcatggaaaggaaggaagccggaaggctggaggaagatgcagcgaggctggaaaggttggggatcccccggtcctgcacacctgggtacctggggatcgggcagggccaggataggggccggtgtccgtgccctggggctccccagctgatgagtgggcgcctgagggacgagcgcagggttacctgcctgggctctcacctggtggccggctcagaggtggcgcgccggagacgtatcataaccttcctgggtcccccttcccgcgccacgccctggtggggtgggcgggtgggtgtggggcgcccaggcaggaccggccggacctgtgggacccggggccctggctgtctagggaggctgtcaccccgaggcgaccggctcttccggggctgggacggctgtaggcggcaagaggcctcggcacccgcgaactcataaataccggggcggcgctggtggcgggagaggcgcgtgcgggcagccggcgcccccgagggtgagccggggtccgggagggcgtcccctttcccggatggtcccgacccggctccatcctggcagctggagacggagctggagcaggcgggaaagcgctggaga

SEQ ID NO: 21633 - DNA, 2300 bp, Homo sapien
ggccaacatggggaagccccgtctctactaaaaatacaaaaattagccgggcatggtggtaggcgcccaggagtcgtttgaactctggaggcggaggttgcagtgagccaagatcatgctactacactccagcctgggtgacaaagtgagattctgtcgaaagaaagaggaaagaaagaaggaaggaaggaaggaaggaaagaaagagaaagaaagaaagaaaaagaaagaaagaaagaaaattagccggtgtggtggcttatgcctatagtcccagctacttgagaggctaggttggaaggatcacttgagcccaggagtttcagactgcaatcccgcctgggcgacagagtaagacccctatctaaaaaaaaaaaaaaaaacaaaaaacaaaacaaacaaaaaaaaaaacgaatgaacaaataaaaagaaaaaagataggtaaacataaagaaaaattaactcatcattcaatcattcattcattgttgccaccgacattagtagaaattaattaaatgcctactatgtggctgttctggggcagaggagaagcaccaaacatttaagagtatctctgaaggggtggaattaccacgcattcaaacagcccttccaccaatgtttactgagcatctacatgccaacagtgctggggcactgggaatgcagcagtgaacaaagacagaaatccatgttgtcatggggctgacattccagcagaggagacaaccaacaagcaataactacaattaggagtgagaaataagaacaaagcagacagagtttggtagtatgtgagagggatgtttgctgctttccttagggtgagcgagggaattagttcacagagaaagtgacatctgtgtaaagccctgaaaaaagggagggagagataaggatacctgggggaagagtatgttccaggcagaggaacaaccagtgcaaagactgtgaggtgagagcgcacctgacaagagttcaggaacagcatgaaggctggagtccagtgaataagatccaggaggagagatgtctggccgggcgcagtggctcacgcctgcaatcccagcactttgggaggccgaggcaggagtatagtttgagcccaggagttcgagaccagcctggccaacacaacaaaactctctctttaaaaataaaagaaaaaggccagcttggtggctcacacgtgtaatcccagcactctgggaggccgaggcggatagatcacctgaggtcaggagttcgacctggccaacatggtgaaacgctgtctctactaaaaatacaaaaaattagctgggtgtggtggtggacgcctgtaattccagctactcaggaggctgaggcaggagaatctcttgaacccgggaggcggaggttgcagtgagctgagatcgcgccattgcactccagcctgggcaacaagagcgaaactctatctcaagacaaataaataagtaaaaataaaatttaaaaaaatttttaaagaagatgtctgctgtttgttttcaatattttgaccaattacttcgtaaaaacttatttaaaaattgaagagcaaacagtctcaggttcccgggctcagacagaccagcgttcaaaactcattaccttctttctatgatgctaagccagctatttcaccctctgaacctctgtttctttatctgtaaaatgggtattaatgatattataccacagggttgtatatgcagcgagaaaatgcaagtaaaacacttatcccggtgcctgcctcctagtaagtgcttaagaactgtttctgcccattaactcattactttctcccagcccctaactccttctgggggggaagttagaaaatcggtatcacacgaaaacagtcatttcccctttaaggacctcagtgggccgggagccagccttcccgcaccttttccaaaatttccaatccccgcttggcattttctgcccgaaggtctccgattggacgctctgtaccaatcggaggctggagcgggccctgagaggcgcccgactccgcccccgcactggccctgcccactgcccggtcagcctcgttgctatggggactggtgggcggtgaggggggaaagccccggatgttcgttggggattcaacatggcggcgggagtgtccgcggtggtggcggtgcaagagagctgagggaggcgcgagggcgcggagttccaggtcgagcagttaggccgcgagcgactgcggcgccgagccggtaggataaggggtccggccaggggcttgcggtgggccgggcgctggcggcgggacggcg

SEQ ID NO: 21634 - DNA, 2300 bp, Homo sapien
gagagacagggcagcggcagaccacggattttgtgggatcagtgttttctacacgttacaggcaggcctctggctggaggatgcctggcagccccaggcagggtccgggtttcgtgggatcagtgttttccacacattagaggcaggcctccggctggaggacatctggcagccccgggcagggtccttgtcagcagggcccacgttctcagctcactgtggcctttgcacagacacctcactcactacgtggtttagcaaaagttcactgagcccctgctgtgcgccagatgctggtctaggtgctgagatggagcaggacccgaagcagacaggaaaaaacaatccctgcccagagcatgcactaggcagagccgggagcagacagatgcctgtgtgctctgtatcagctgctgttaggtgctctaggtagaatgcaggcagggcaggggccggggagggcaggggctggcattttagatgatgggaggccagcagaagcctcactgagaagctgagttttgagcaaagacctgaaggagtggagggagggagccacagggaccctgagagctgatgttccaggcagagggagccgccagcggagaggccctgggcgcaggggggcgggggtgggggagacacccgtgtgtctggaaatggaacgggggcagagggggcctgcaggacacgactcagaccacagagggtggggaccgggtgactcgggatgcactggatgctctgcctggtccccatctgcatttgcatttgccacccggctcctgggacccccttgccctctactttgggaccaggcctttctgactctccctgtcccccactccttgttgttcatgggagcagagagtgtggttttggggctaaggaacactggcgcccacatgggaggaagtgccaggccaggccctggccccagcgccctgtcatttgcagccctcggggctgattatggggtgggtcaatttctgcccttcctcccccaaacccctcagggcaggactattccaccagtgtgaggaacaggagaaaaacaaggggggcctctccagggtcccaccgagcccagggggcagcagcctggccatggcgatcactcctctggcccctgcagctgtgtccccagggaggggaggggctgcactgcccatgccattgtcactccatggcatctcttcattgcgtctctgtcttgtctctgtgtgtgtcgtgctgtcctgtccctgcgtgtcggatgcacgtcctgtgtgccccactccttgctgggcccccacccaccattgcctgggaccccagaccatcgtgcggggcagcaaaggtgccaaagatggggccctcacgctgctgctggacgagtttgagaacatgtcggtgacacgctccaactccctgcggagagacagcccgccgccgcccgcccgtgcccgccaggaaaatgggatgccagaggagccggccaccacggccagagggggcccagggaaggcaggcagccgaggccggttcgccggtcacagcgaggcgggtggcggcagtggtgacaggcgacgggcggggccagagaagaggcccaagtcttccagggagggctcagggggtccccaggagtcctcccgggacaaacgccccctctccgggcctgatgtcggcaccccccagcctgctggtctggccagtggggcgaaactggcagctggccggccctttaacacctacccgagggctgacacggaccacccatcccggggtgcccaggtaacccatcccccgccccagggcccccactgtcccctgcccgttgctcctctgtccccaccttccagccccgccccaccaccgtgcatctcatcctgaccacccatgtgtctgtcccatcgctgggtctctctcctgcttagggagcagagctgctccctggcacccatcactgacagctacctctcttctgtttcagggggagcctcatgacgtggcccctaacgggccatcagcggggggcctggccatcccccagtcctcctcctcctcctcccggcctcccacccgagcccgaggtgcccccagccctggagtgctgggaccccacgcctcagagccccagctggcccctccagcctgcacccccgccgcccctgctgttcctgggccccctggcccccgctcaccacagcgggagccacagcgagtatcccatgagcagttccgggctgccctgcagctggtggtggacccaggcgacccccgctcctacctggacaacttcatcaagattggcgagg

SEQ ID NO: 21635 - DNA, 2300 bp, Homo sapien
tgagataatttattaatttttttgtagagatggggtcttgccatgttgcccaggctggtctcaaactcgtgggttcaagtgatcttcctgcctcagcctcccaaagtgttagattaccggtgtgagccaccacactcagcccttgggggcaatttgaatctgtgtccctgtgtatgttctctaagattctgtatgcgagtgtgtctaactcgttgtgtaccagctgtgcaaccttgggtgagttactagacctctctgtgcctagtttcttcatctgctaaatgcacatgacttcctagtcatgctacttcctagggtggatgtggagactgaattaattgcctaattaattacctaagtccattgcaactaatggacttagtgcaatgcctggcatgagggcagcctcaattacatgatcattatcactggggcgtgacttctgtcccccacccgctgagtgtctgtgagtgtctgagcgttggggcaggaagtgcctgtgaaagcatgtggagttatctgggactatatgggacccagcctgggaaggcagcttctgtttccatggcacccctcacagggttgttgtattggaaagacccgtcccagagggcatccgccagcacacagctgcacacacatgtttgctgttacttttcctttacctataaaatgccagtcatagtagcacccaccttgtctttgtaggagaatgaaatgaacttagaggcgctcagtagaaagcactcacgcctgtaatcccagcactttgggaggccaaggcaggtggatcacttgaggtcaggagtttgagaccagtctgatcaagagggtgaaacctcgtctcttctaaaactacaaaattagctgggtgtggtggcacatgcctgtaatcccagctactcgggaggctgaggcaggagaatcacttcaacccgggaggcggaggttgcagtgagctgagatcgtgcttctgcacttcagcctgggtgacagagtgagactccatcagagagagagagagagagagaagcaagcgctcagtgctgagcttacctgggccaggtagagggatgtggccacgggcaggaagtggctgtgggaatctggcgctacaggttcctctgccaccccacttcctccacacctgacctcctgtccccacctgtgccccgtcccttgctcccacctcctcgtgacctctgatgggggaggcttctgcagccccccaccccagtcccaggcaggggtgcaggcccccagaacacccagttgggatcactgcttccctctcactgccatctttgtgcctccctggggtcccccatctctgaggctcctcatctctggttttgggtgtctctctgctctcctcaccttggttttctggacagtatgtgtcagggccccaagggggtgtcccaggtgaggacagagaaggaagtggcagaggcaggaccttccctttgcacctcagctcatccatccactccccctctgcagagtggggagggggaggaggggggtcttcgttaattagcctcttaatcctgccatgctggatcttaatgaggtgcacgggtcccattagacagcccggagccctggcattagcacattagtcacacgctctgtcaggctcacgctgggtcctcagctggccctgggaaaattggggcaggaagtctggggacctaaggagggggctggtgcctggacttctgggtctgaagaaggaggggctggtgcctggactcctggatctgagggaggacggactgggggcctggattcctgggtctgcgggaagaggggctggtgcctggactcctgggtctgagggaggaggggctggggtcttgaattcctgggtctgagggaggaggggctaggggcctggactcctgggtctgagggaggaggggctggggtcttgaattcctgggtctgagggaggaggggctaggggcctggactcctgggtctgagggaggagggtccgagggacaagatcctcccccgacacgcccctctcttaaatgtcagccagggtgccctgccccttcccgctcccagttaaccccagccctgtgaaaccgggacagtcgcgcagcctcgagggatggaggaggtgcgtgagggacacgcgctcggtggcgggatggaagccgatgggcccgcgagcctccaggagctgcctccctcgccacggtcgccttcaccgccgccgtcgccgccaccactgccctcgccgccgtcgctgccatcgcccgcagccccggaggcccccgagctccccg

SEQ ID NO: 21636 - DNA, 2300 bp, Homo sapien
ccatttcacagatgaggaaaccaaggcccacacctgtactgacagagccagtggacccttgtctctctaatcagcgcatccacacacttgaccctgttttgggaagaggctgggaactccaaagaaccttggaagggctttggccaggctcccagaggtccgggtccctgttcagcccgagggttccaatctccctctccttcctatactgctctaatttttcctttgcttgtttcttttctctttctctctttttttttttttttttttttgacagaatcactctgtcacccagactggagtgcaatggtgtgatctcggctcactgcaacctctgcctcctcggttcaagcaattctcctgcctcagcttcccgaggctctgtgtgtcaccgtgcccagctaacttttgtatttttagtagagacagggtttcactatgttggccaggcgggtctcgaactcctgacctcaagtgatccactcacctgggccttccaaagtgctgggactacaggcgtgagccactgctcccggcccttgtttcatttctattggctgattggtaagagctcattttatatgataggaattgagtctatttttccctggatgggtttgtgggttttgttttgtttttgctatatgacagtttttacagttttatacagctcaaaatctataaaacaagattgaagttttatagattgaagatttccaaccttagttaagaaagtctcctggctcctggggtgggagttgcaggctgttccctccctctccctctcctaggcctgtccttagcatgtgggagggaggagtgcatttcttgtcaatttgtatgcactctttttttttgacgcgatctcggctcactgcaacttccaccttctgggttcaagtgattctcatccctcagcctcccgagtagctgggactacaggcatgtgccaccacgcctggctaatttttgtactttaagtagagacggggtttcatcatgttggccaggctggtctcgaactcctggcctcaaatgatccacctgcctcagtctcccaaagtattgtgattacaggcgtgagtcaccgcgcccaacctgtgtgcactctttatatattatagcttgcaatgctatgcttttgaaatgttgcaaatatctcctcaagcctttgtacactgtcttgcaaaaggtttttaacgtgttatgcaaatactgctatcttgtacttcacagattctggattgccagccttggttgggaagattgcccagtctgagcctggtgggggtggggggtggggcgttgggctcctccccatctccttctctacctgcccccccccgccccaccacgagggcctctatccttatctccagcttctcctttcccaaggtcctgcctcccagggagggagcctgcccagccaggaggccccagcctcccactcctgcctccccctcccagtctttccttatttagaataagggttgttccattccttatcttttttttcctgtctttgttgcccaggctggagtgcagtgaaacgatctcggctcactgcagcctcgaactcccgggctcaagcgatccttccgcctctgctttgtgagtagatgggactacaggccatgccaccacgctgagctaattttatttttcagtagggatgggatcttgctatgttgcccagactggtctcaaactcctgggcccaagcgatccacccgtctaggcctcccaaagtgctgggattacaggcgtgagcaaccagcaagccccttgtcaatttttaagagctcttcccatttctgtctattaacctatgccaccctctgtgttgcaaatgactcctcctcaagttctgtctattgtctctctttataatgttgttggtcacctaacatcttaaggtgctaagttgtatacacagcgtccaccttgtactcagggttgtgggcttccgacctaggttaggcaggtctcccggctcctgagggaggggcgccctccccttccctcgatgagtccttatctcgcagcttgtcccttcccacgggtcgggcgcataaaagcgcgcggggctgcggcagggcactgccaccatgtccccgctgcgcccgctgctgctggccctggcccttgcctccgtgccttgcgcccagggcgcctgccccgcctccgccgacctcaagcactcggacgggacgcgcacttgcgccaagctctatgacaagagcgacccctactatgagaactgctgcgggggcgccgagctgtcgctggagtcgggcgca

SEQ ID NO: 21637 - DNA, 2300 bp, Homo sapien
acgtgggagctccggctggctgcacactctgggccttgcctctgaccccgccccctctggcagcacggaaacctccacgccattggctgccgaaagcagctcctgtcgtccattgggctggccgggcgaggctctcagtcaatgggtgctgaggcacgaaaacttcttcgcagccttgggcctgacttggatccactgtctcagatataagaggagcgggtccttctacagggaagagaccacagttctccaggaagccacgatatttcctcggggtgcattgtacgaccctccaacggttgctgtggcaggaaaaaacttgagctctggaaaccgtggctgaccccaggcaacagggaccagttcctccttgtgtggttaccaggacacccccaacaccaggtcctaaccccggatttgtagccccacagccagctttgagattctgtgaatccgtgactcttggatccggcatctaagggacaccaatccatgagggatttggtagtgaaaggcccaagggtccttaaccgactgtggttctttggattcccttacgtgtgtttgtatttgtgaagttcctgtgcatttgctattctgtctcccggtttaaatttattgccagttatcaaagagtgttttgatcgcattggttgttttccgtatgatgattgtgaggtgcaccttacagcaaaaaaagaggccgagccagggactcaggtggcctgagtttcagttctgaccctgccagttaattacagtggaattcagggcaaattacttttctgagcctctgtttcctcacctataggatgggttagcatacttgccttgtggaggagtagtgtccgttgagatcacgttttaaactctccagctgaggtcctagtatggtcttaatgagtggattctattaaataatcactcacataaatacacaaacaattgtgttattaattttttctccaaatctgtgcattagcaatctgcgttgctgaatgcacccctccttgccaaggtcacacggctagtgagggtcagaaccaggtttgaaccccagacccttcatctccaagacccatgctcttcaccactgcctgaacttccctaagaaagacggcacccacgtggtgtccttcaagtccttcgtcacacctcaattcttgagcagagcctcatattcctgagtccttccttgcctgggcaattaagaaatattggcctctgggcatggtggctcacactgaaatcccagcaatttgggaggcctagacagagagatgacttgacatcaggaatttgagaccagccttgccaacatggtgaaacgccatctctactaaaaatataaaaattagctgggaatggtggcacaaatctgtaatctcagctacttgggaggctaaggcaagagaattgcttgaacccaggaggcggaggttgcagttagccaagattttgcactgcactccagcctgggtgaccgaacaagaccctgtctcaaaatatatatatatatatatatatatatatgccaggagtggtggctcaggcctgtaatctcagcactttaataggctgggtgaggaggatggcttgagcccaggagtttgaggctgcagtgagctgtgatcatgccattgcactgcagtgacagagtgagaccctgtcttaaacaacaacaaaaccagagcaggtggaatcctcttgggaacataccttcctgtaggttacccctgagtctccatcagtttctctttccctccagctgctcatctggctcactagccctgccctgctctgggctttcccagcctggggctcccctggtggccggtgtcttacctgaggctgtgttttcacttttcctacatcagctgggactgcccttctgtcagggataaaagctgccccatggagctcaggcaggaattacatcccagacagagctcaaaactgacagaaagagtcaaagccaggacacagtctgagatccagaagaggggactgaaaagaacagagactccagacaagacccaaacagaccctgggtgacagcctcagagtgtttcttctgctgacaaagaccagagatcaggaatgaaactaggtgagtcccacatctctgtccgtgctcagctcctgcagcccctgccctcagtgggcagcctctgcattccctcagctccctttctctctgtgacacagacatgaccggggactgcatgccagtgctggtgctgatggccgcagtgctgaccgtgactggagcagttcctgtcgccaggctccgcggggct

SEQ ID NO: 21638 - DNA, 2300 bp, Homo sapien
tcgcattggttgttttccgtatgatgattgtgaggtgcaccttacagcaaaaaaagaggccgagccagggactcaggtggcctgaggttcagttctgaccctgccagttaattacagtggaattcagggcaaattacttttctgagcctctgtttcctcacctataggatgggttagcatacttgccttgtggaggagtagtgtccgttgagatcacgttttaaactctccaactgaggtcctagtatggtcttaatgagtggattctattaaataatcactcacataaatacacaaacaattgtgttattaattttttctccaaatctgtgcattagcaatctgcgttgctgaatgcacccctccttgccaaggtcacacggctagtgagggtcagaaccaggtttgaaccccagacccttcatctccaagacccatgctcttcaccactgcctgaacttccctaagaaagacggcacccacgtggtgtccttcaagtccttcgtcacacctcagttcttgagcagagcctcatattcctgagtccttccttgcctgggcaattaagaaatattggccttggctgggctcagaggctcatgcctgtaatcccagcactttgggaggacgaggaaggtggatcatgaggtcaggagttcaagactagcctggccagcatggtgaaaccctgtctctactaaaaatacagaaattagctgggcatggtggcacatgcctgtaatccaagctactcaagaggctgaggcaggagaatcacttgaacccaggaggcagaggttgcagtgagctgagatggtgcctctgcactccagcctgggcaacagagcgagactccatctctcttgctcactcactctctctcatgctctctctctctctctctctctctctctctctctatatatatatatatatatatatatacacacacatatatgcctctggccgggcgcggtggctcacgcctataatcccagaactttgggaggccgaagaaggcagatcacgaggtcaggagttcaagaccaacctggccaatatggcaaaaccccgtctctactaaaaatacaaaaattagttgggcgtggtggtgcatgcctatagtcctttctactcgggaggctgaagcagaagaatcccttgaaccaaggaggtggaggttgcagtgagtcgagatcacgctgctgcactccagcctgggctacagagcaagactccatctcaaaaaaaaaagaaaaaagaaagaaagaaagaaatcatggcctctgggcacagtggctcatgcctgcaaccccagcaatttgggaggccaagacagacagatcacttgacgtcaagagttcgagaccagcctggccaattggtgaactgtcatctctactaaaaccataaaaattagctgggaatggtggcacaaatctgtaatctcagctacttgggaggctaaggcaagagaatcgcttgaacccaggaggtggaggttgcagttagtcaagattttgcactgcactccagcctgggtgaccgaacaagaccctgtctcaaaatatatatatatatatatgccaggaggggtggctcaggcctgtaatctcagcactttaataggctgggtgaggaggatggcttgagcccaggagtttgaggctgcagtgagctgtgatcatgccattgcactccagtgacagagtgagaccctgtcttaaacaacaacaaaaccagagcaggtggaatcctcctgggaacataccttcctgtaggttacccctgagtctccatcagtttctctttccctccagctgctcatctggctcactagccctgccctgctctgggctttcccagcctggggctcccctggtggccggtgtcttacctgaggctgtgttttcacttttcctacatcagctgggactgcccttctgtcagggataaaagctgccccatggagctcaggcaggaattacatcccagacagagctcaaaactgacagaaagagtcaaagccaggacacagtctgagatccagaagaggggactgaaaagaacagagactccagacaagacccaaacagaccctgggtgacagcctcagagtgtttcttctgctgacaaagaccagagatcaggaatgaaactaggtgagtcccacatctctgtccgtgctcagctcctgcagcccctgccctcagtgggcagcctctccatcccctcagctccctttctctctgtgacacagacatgactggggactgcacgccagtgctggtgctgatggc

SEQ ID NO: 21639 - DNA, 2300 bp, Homo sapien
ccctacccctctcatgctacccagagggacagaaaggagaagtgggcctgctacccccagaggttctcatcttctacctgggctgcatatggaatagggagcaagtacataggactcatcataccccatttctgcctctatcccactgtgggaccttaggcaagtcactttgccttcctatgcctcagttatctcactagtaaaatgggcatgattattgtattagtcagggttctccagagagacagaacaaataggatgtttggataaatagatgatagatagagagatatagactagatagatgagagagatagactagatagagagagagagagagagagagagagagagagactagatagatgagagagagataggaggggatttattaggggaattggctcagacaattagggaggctaagaagttccacaacaggccatctgcaagctggagaaccagggaagcttgtagtgcagctcagttccagaataaaagcctcaggacttagggggtagctagtgcaagtcccagcattttttttttttctgagatggagtctcactctgttgaccaggctggagtgcagtgacatgatctcagctcactgcagcctccgcctccagggttcaagcgatactcctgcctcagcctcccaagtagctgggactacaggcctgtgccaccacgcctggctgatttttatatttttagtagagatggggtttcaccatgttggccaggctggtctcgaactcctgacctcaagtgattcacctgcctcagcctcccaaactgctgggattacaggcgtgagccaccatgcccagctgcacatcccagcattcaaagaccaaagagcctggagttctgatgtttaagggcaggtgcagggtgtcccagctcataagagagagcaaattctcctttcctctgcctttttgttctattcaggccctcggccaattggatggtgcccaccacattgggtaacaacgggtcttccttactcagtccattgattcaaatgccaatctcttctggaaacaccccagagtcatacccagaattaacgcatcaccagctatctgataaacttaaccagtcaaggtgacacctaaaattaaccatcacaattataaaaataactactcagagaaacattaggagcatgaactgaaattagttaatgggacattcttaaaccaatggcagaagctccttcttggccaggagcagtggctcatgcctttaatactagcactttgcgaggctgaagcaggaggatggcttaaggccaggagttcaagactggcctgggcaacatagtgagacccctatctctacaaaaataaataaataaataataaagtaaggtggtggctcacgcctgtaatcccagcactttgggaggccaaggcaggcagatcatctgaagtcaggagttcgaagccagcgtgaccaacatagtaaaacccagtctctactaaaaatacaaaaactagccaggcgtgatggcatgcacctgtaatcccaactacttaggaggctgaggcaggagaatcgcttcaactcgggaggcagaagttgcagtgagccaagattgcaccattgcactccagcctgggcaacaagagcaaaactacgtctcaaaaaataataataacaataaaataaaaaacaagcttttttttttttgaaacaggatctcactccatcacccaggctggagtgcagtggcacgatcttggctcactgcaacctccgcctcccgggttcaagtgattctcatgcctcggcctcctgagtagctgagaccacaggcgcatgccaccacacctggctaatttagaataaaaaagaagcttcctctctgccactcaggtagccttatccctaatctcagcctccgtcagggactccctgaggccagttggctgaaagctgcccagggagttctaaggatttcagtttctctttccttcttgatgcagctcccagctcacttggccctgcccacacctgttccctcatcaggctcccagacgggccccgcccactcatgcctcttaagtcaaagtggaaattctcatttccaattaccttttcactttacacacatcatcttggattgcccattttgcgtggctaaaaagcagagccatgccgctggggaagcagttgcgatttagccatggctgcagcttggaccgtggtgctggtgactttggtgctaggcttggccgtggcaggccctgtccccacttccaagcccaccacaactgggaagggctgcc

SEQ ID NO: 21640 - DNA, 2300 bp, Homo sapien
gaggcgggaggggggaaacccttaacatttattgagtacttactgtatgccaggcatggtcggtggtacatgaatgaagatggtacaattatcatcccaatttacagattaagaaattacagcctagctaggggaaatcattggcttgggggtcacagagctagcaaaaggggaatcaggatttgaacctgagtctgtttgatttcaaagtacttactctcaataatagggcactgttctatgcctggtacatattaagcacttgatgatcatgatgatgattgctaacatgtaataagcacattttatatgcctggcactattctaagtatgctatgttcatcaatacatttaatcctcacagaagtaaggcctgtttctatctcccttttacagatgaagaaaccgagaatcagagaggttcagatacttgctggaggtcacacagctagtaagtatcagagctgggatttggagctagggagtatggcttggatagccagggccttaaaccatagttaacagtgattttttagacaatttagtgggtactggagggcccaggttgggccaggtgtcacccctctggttgggagatcatgagaggtttgggagctactacaggaggggcagaggtgagggtgggacacgcaagtagggacaggggtattctatcaaccagtatagagatatttttatttttatttatgttttaagatggagtcttgctctgtcgcccagactggattgcaatggtgtgatctcggctcactgcaacctccacctccctggttcaagcgattctcgtgcttcagcctcccaagtagctgggattacaggcgcccaccaccatgcccagctaatttttgtatttttagtagagacggggtttcaccatgttggccaggctggtcttgaactcctgacctcaggtgatccgcctgcctcggcctcccaaagtgctgggattacaggcgtgagccactgtgcccagcatggaagtgttgtaatctgttgttaatagctgatagtggcttcctctcaccatcctatggaacccagctgtaggcggtaggggagggatccaggcctgactcgtagcaggacatcccatggcggccaagtcccacgcctgggtaaccggctccttccccggcaggtctcacctcccacccctcctgccttcccactgcaccatggctccaggacccttctcctcggccctcctctcgccgccgcccgctgccctgccctttctgctgctgctctgggcgggggcatctcgtggccagccctgccccggccgctgcatctgccagaacgtggcgcccacactgacaatgctgtgcgccaagaccggcttgctctttgtgccgcccgccatcgaccggcgcgtggtggagctgcggctcaccgacaacttcatcgccgccgtgcgccgccgagacttcgccaacatgaccagcctggtgcacctcactctctcccggaacaccatcggccaggtggcagctggcgccttcgccgacctgcgtgccctccgggccctgcacctggacagcaaccgcctggcggaggtgcgcggcgaccagctccgcggcctgggcaacctccgccacctgatccttggaaacaaccagatccgccgggtggagtcggcggcctttgacgccttcctgtccaccgtggaggacctggatctgtcctacaacaacctggaggccctgccgtgggaggcggtgggccagatggtgaacctaaacaccctcacgctggaccacaacctcatcgaccacatcgcggaggggaccttcgtgcagcttcacaagctggtccgtctggacatgacctccaaccgcctgcataaactcccgcccgacgggctcttcctgaggtcgcagggcaccgggcccaagccgcccaccccgctgaccgtcagcttcggcggcaaccccctgcactgcaactgcgagctgctctggctgcggcggctgacccgcgaggacgacttagagacctgcgccacgcccgaacacctcaccgaccgctacttctggtccatccccgaggaggagttcctgtgtgagcccccgctgatcacacggcaggcggggggccgggccctggtggtggaaggccaggcggtgagcctgcgctgccgagcggtgggtgaccccgagccggtggtgcactgggtggcacctgatgggcggctgctggggaactccagccggacccgggtccggggggacgggacgctggatgtgaccatcaccaccttgagggacagtggcaccttc

SEQ ID NO: 21641 - DNA, 2300 bp, Homo sapien
actgtctctatttttctctccatctctgtgtcttttttctgtgtctctctcttttctgtgtctcattcttcactctcagttttctgtctgttcaccttcctttcagactcatctttttgtctctctgtttctctcccaatctgtctctctctctttgccagtccacttctccctccccctggtctctccttgtctctcttcacctctgtctctgactttcctggtctctgtcccaggccccctccccactggcaggaagatcaaagccacctaaggccgtagccccaaacacagattcctgggaggtaggccagcaggggctagggtacagggcagggtggggtgaaaacagttttagggacgcccccttcccatcctttcctcttcaccccccgcccaccctgtgttgtgatgggaactgacatgtcgtgggctgcagccgccgcagggggaatccctgccggaaggttttgcctggagcagagacatagcgtgagtgtgtgagtgtgtgagtgtgtgtgtgtgtgttgtgtgtacccaaagatgtgagcatgaaagtctgccttgcttgggagctcaactgagcccaggatgaaaccagacctcagagaaggccttcctgaggctgaactggaagactctgatgtgttttcctcagtccctcccactttgacactctccctgccaatgccagaggcgggaggggggaaacccttaacatttattgagtacttactgtatgccaggcatggtcggtggtacatgaatgaagatggtacaattatcatcccaatttacagattaagaaattacagcctagctaggggaaatcattggcttgggggtcacagagctagcaaaaggggaatcaggatttgaacctgagtctgtttgatttcaaagtacttactctcaataatagggcactgttctatgcctggtacatattaagcacttgatgatcatgatgatgattgctaacatgtaataagcacattttatatgcctggcactattctaagtatgctatgttcatcaatacatttaatcctcacagaagtaaggcctgtttctatctcccttttacagatgaagaaaccgagaatcagagaggttcagatacttgctggaggtcacacagctagtaagtatcagagctgggatttggagctagggagtatggcttggatagccagggccttaaaccatagttaacagtgattttttagacaatttagtgggtactggagggcccaggttgggccaggtgtcacccctctggttgggagatcatgagaggtttgggagctactacaggaggggcagaggtgagggtgggacacgcaagtagggacaggggtattctatcaaccagtatagagatatttttatttttatttatgttttaagatggagtcttgctctgtcgcccagactggattgcaatggtgtgatctcggctcactgcaacctccacctccctggttcaagcgattctcgtgcttcagcctcccaagtagctgggattacaggcgcccaccaccatgcccagctaatttttgtatttttagtagagacggggtttcaccatgttggccaggctggtcttgaactcctgacctcaggtgatccgcctgcctcggcctcccaaagtgctgggattacaggcgtgagccactgtgcccagcatggaagtgttgtaatctgttgttaatagctgatagtggcttcctctcaccatcctatggaacccagctgtaggcggtaggggagggatccaggcctgactcgtagcaggacatcccatggcggccaagtcccacgcctgggtaaccggctccttccccggcaggtctcacctcccacccctcctgccttcccactgcaccatggctccaggacccttctcctcggccctcctctcgccgccgcccgctgccctgccctttctgctgctgctctgggcgggggcatctcgtggccagccctgccccggccgctgcatctgccagaacgtggcgcccacactgacaatgctgtgcgccaagaccggcttgctctttgtgccgcccgccatcgaccggcgcgtggtggagctgcggctcaccgacaacttcatcgccgccgtgcgccgccgagacttcgccaacatgaccagcctggtgcacctcactctctcccggaacaccatcggccaggtggcagctggcgccttcgccgacctgcgtgccctccgggccctgcacctggacagcaaccgcctggcggaggtgcgcggcgaccagctccgcggcctgggc

SEQ ID NO: 21642 - DNA, 2300 bp, Homo sapien
aagaaaaaaagaaaagaaaaaaattaagatggaagaagtaacactgcatggaggctaaggagaaagatccaggaggcatggggacgttggtgagacaagagggagagagaggacagctgcagagatgtaggtgaaggggtagagtccagtgtagggtccggggtttgcccaccatggagggaagtgggccagtcacagttggcctaggaccctgtggaaattgtcttttgtttgcttttatcttctcactgaaatacatatggtttttgtgtgaactacattccttttatttcttctttatatgacagtcaggacattatattgatttttttttgaatttatgtgtgtaagtaggttatattatctaggaattttatttcgggatgggaaaagggggcagtgcaaaaatactcaataaaaaaaatagccgggcatggtggctcacagtggctcacacctggaatcccagcactttcggaggctgaggcaggtggatcatttgaggtcaggagttcgagaccaacatggccaacatggtgaaaccccatctctactaaaaatacaaaaattagccgggcgtagtggcacgtgcctgtagtcccagctacttgggaggctgaggccggagaatggcttgaacctgggaggcggaggttgcagtgagctgagatcgcaccactgcactccagcctgggcgacagagtgagaccctgtctcaaaaaaaaaaaattgggtaccggtctgacgggattgaactcccttgttgtagggcctcataggtcattgcaaggctagtgaggttggaaaagtgcaggaaaaaagtcaccattacccaggcactgtggggttgcccctctggtccccattttgccattgacataatgggcgtcagtctgaccagcaaaagactaaactccccttttccagccctgcaattcaaatatcccagatgggggtaaatctaggaaggccacctggaggaggggaggagcaaaatagttcgtttttagtacctattgtgtctgccatgctggcagctatgtgaagctatttatttatttatttttatttatttgtatttttattgcctgggatagagtgcaatgatgtgatcttggctcactgcaacctctgctgctcggattcaagcaattcttgtgcctcagactcccgagtagctgggatcacaggcgtgcaccaccatgccaggctaatattttgtatttttagtagagatggggttttgccatgttggtcaggctggtctccaactcctgacctcaggtgatccgcccgcctcggcctcccaaagtgctggcattacaggtgtgagccaccatgcccggccgatgtgaagctatttatatcctcaccacaatctcaaatcagaggggtgaagttacttagctagggtcacacagcaaggaagctttggaaccctggtctgagcgatttcctgacaggtcctggcagatgaggggaaggaaggagggggaggagccctctgtgacagttgtcccagaaagggcataaacaggatgtggtgttggatgaaaccttcctcctactgcacagcccgcccccctacagccccggtccccacgcctagaagacagcggaactaagaaaagaagaggcctgtggacagaacaatcatggtcaggggccaggggttctatgggaagagctggggctggggttggggctggggcttggaggacacctgggcgaaggtcaggctatgggatggaggtcacgggccgggaagggggcccaactgtggtgaacagcccggctggaagaacagagagacagtggctctgggtttaggctcaggaagtggatctctgcacctccttgagtgtcccccaagagtccccgtggagaaggcgggaacccagcctctgctccgccccccaagctgagtgccctggtgaggggtatctactctgtgggaagggtgccttttctcaatgttcacaaaggcatcagatgggccggcgcgatgctcctcttcattagtggatggagaaacaggtttggggaaggggtgagggctgaggccaggccatttcagctcttcctgggtccctccggcagtctgactccctggtggtgtgcgaggtagacccagagctaacagaaaagctgaggaaattccgcttccgaaaagagacagacaatgcagccatcataagtgagtgacatcttcccccacagaaggatgggagggcggtggtgagggcagatagggagggctgggcttgtgtcccccatggatcagggggagtgtctaatcc

SEQ ID NO: 21643 - DNA, 2300 bp, Homo sapien
ttgtatttttagtagagacggggtttcaccttgttagccaggatggtctcgatctcctgacctcgtgatccacccgccttggcctcccaaagtgctgggattacaggcatgagccaccacgcccggcctcttttgagaaatcttgcagaaaagggaaggaaatgagtgagcagcagctggacaggagatacagttttatgtttttaagatggaagaggccagacacagtgactcacgcctgtaatccctgcacaccaggaggctgaggcaggaggatcgcttgaggccaggagtttgaggccagcctgggccacatagcgagatcctgtctctataaaaatcaaaagtaaaattggccaggcatggtgttgcgtgcctatagtcccagctacctaggaggccaaggtgggaaggtggcttgagcccaggagttggagactgcagtgagccatgattacaccgctgcactccagcctgggtaacagaatgagaccctgtctcaaaataaaagaaaaaaagaaaagaaaaaaattaagatggaagaagtaacactgcatggaggctaaggagaaagatccaggaggcatggggacgttggtgagacaagagggagagagaggacagctgcagagatgtaggtgaaggggtagagtccagtgtagggtccggggtttgcccaccatggagggaagtgggccagtcacagttggcctaggaccctgtggaaattgtcttttgtttgcttttatcttctcactgaaatacatatggtttttgtgtgaactacattccttttatttcttctttatatgacagtcaggacattatattgatttttttttgaatttatgtgtgtaagtaggttatattatctaggaattttatttcgggatgggaaaagggggcagtgcaaaaatactcaataaaaaaaatagccgggcatggtggctcacagtggctcacacctggaatcccagcactttcggaggctgaggcaggtggatcatttgaggtcaggagttcgagaccaacatggccaacatggtgaaaccccatctctactaaaaatacaaaaattagccgggcgtagtggcacgtgcctgtagtcccagctacttgggaggctgaggccggagaatggcttgaacctgggaggcggaggttgcagtgagctgagatcgcaccactgcactccagcctgggcgacagagtgagaccctgtctcaaaaaaaaaaaattgggtaccggtctgacgggattgaactcccttgttgtagggcctcataggtcattgcaaggctagtgaggttggaaaagtgcaggaaaaaagtcaccattacccaggcactgtggggttgcccctctggtccccattttgccattgacataatgggcgtcagtctgaccagcaaaagactaaactccccttttccagccctgcaattcaaatatcccagatgggggtaaatctaggaaggccacctggaggaggggaggagcaaaatagttcgtttttagtacctattgtgtctgccatgctggcagctatgtgaagctatttatttatttatttttatttatttgtatttttattgcctgggatagagtgcaatgatgtgatcttggctcactgcaacctctgctgctcggattcaagcaattcttgtgcctcagactcccgagtagctgggatcacaggcgtgcaccaccatgccaggctaatattttgtatttttagtagagatggggttttgccatgttggtcaggctggtctccaactcctgacctcaggtgatccgcccgcctcggcctcccaaagtgctggcattacaggtgtgagccaccatgcccggccgatgtgaagctatttatatcctcaccacaatctcaaatcagaggggtgaagttacttagctagggtcacacagcaaggaagctttggaaccctggtctgagcgatttcctgacaggtcctggcagatgaggggaaggaaggagggggaggagccctctgtgacagttgtcccagaaagggcataaacaggatgtggtgttggatgaaaccttcctcctactgcacagcccgcccccctacagccccggtccccacgcctagaagacagcggaactaagaaaagaagaggcctgtggacagaacaatcatggtcaggggccaggggttctatgggaagagctggggctggggttggggctggggcttggaggacacctgggcgaaggtcaggctatgggatggaggtcacgggccgggaagggggcccaactgtggtgaacagcc

SEQ ID NO: 21644 - DNA, 2300 bp, Homo sapien
tggtacttatcacgaagttacactgtatttccttattgtttgtgtccccaagaactagaatgtaagtctttttgttttttttttgttttttttttgagacggagtttcactgttgttgcccaggctggagtgcaatggcacgatcttggctcactgcaacctccgccacccgggttcaagcgattctcttgcctcagcctcccaagtagctgggactacaggcatgtgccaccacgccccgctaattttgtatttttagtagagatgggatttcaccatgttggtcaggctggtctcgaacacctgcctcggcctcccaaaatgctgggattacaggtgtgagccaccgcgctcatcctattgttgtgtttctagcaccttaagcagagcctggcacatattagatagtcaagaaatattattgaatgaattaatgaaccagcagttaatgagcacaataattctatgcagtgtgaaggctgttgcttaaatgcaggaggtagtggatggggtttgtgacatggccccaccctggtgaaacagcctttcctcaaagcgtctataatgccacactctcctggttttcctctctctggctgccttttgcaatattcatcgacagcgtcaattcctttgctcaaatcctgcctctctgtttcagggttctgttcagtccctgtctccagtgacccttcataccctccccgggctagacccctaactcccacagcctcaattaccatctttgacgatccttaaatcttggtctccagcctcaatttctcccttaagctccagacccagggtttgtgcacctcctggacctcgctactaggcatccacattgggcttagtatcttcccaacctgcttctggcgcccagtctcccggctagaggggcctggtcctaaacttttctcccccttccactccatagccagccagtgtcagggcccgttcgctctgcctccagggcgtccctcccacctgcacctccttccctccccacagtccctccctcgtgcaaaccccctctttcttccccaccccctcccccagctgcctccctggactcccgatcccgtttcattccctccaatccgccctccatgtataagccagagagacatctctccaaaaccccagactcaccatgatcctccccggcttgaagcccttcacggctccctagtgccctcgggacaagtccaaactccctcaagtggccaaacaactggcctctgctcgttcctcacccctccctgtcttcaactcgaccctccatcccgactgcctctctaagtgcctgtaacaagccagatctctgtcaccgagagccttctgaacacaggtccctctgattagttcacccggacccaatacagtttgtggaacgcacagatcacaaccaaagtcacagcaacaactcccgtttattgacagcctccttgatccttagcgctttctgtgcattctcttcccaccctaaaggctagatctcgcctcgccattcccatcggagagagcaagcggcaaggctgagaacagcgcgatgagaaagccgagcgcccagaagcccgagtgcagacgcccactgaggacagccttgggtgaggcgggccacccaaggggcggggaagaggaggcctggaacgcctgaatcaggaactgtgacttcgctcggggcagctggggtggacgcgcgcgagcctgccccctgcgggcctggaggcccaacctcagactccgccgggcccgttgccctgggcaacgccccgcgcgccccgccccttccccgccccccagccccaaaccccaggcctggccgactgcccgtcacccccacgtccgaccaatcccgccgaggagggggcgggcctcttgggccccgttccaccaccgtcgctcccccctcgccgcgaccccgccttactcggctcacacctcccgcccttcgggctgccctcgccgcccgttggctggcgcgccgttcgtcacccgggcgtgagctaatgccggcgcgcggcggcccccgtcggggcggggccaggggcggtgacgcacggcgcggtgacgcagcgcgacggcggcggcggcggcggcggcggtggtcggtgcgggaggagggaggggagcttgcgggcccgagagggggcgacggcggcggcggtggcctgaggaggcccgagcggcggcggtggcggcgaaggccgaggcggtgagtctcgggccgggccggcgcggggcggcggcgagtcggggcgcgcggggctcccctcagggcgacccaggccgcgcgg

SEQ ID NO: 21645 - DNA, 2300 bp, Homo sapien
ccaaggggaacccagggtgttgatactagaagatggaaatggatacagtaagatgctgccacagtgagatgcctcacccaggtctccctctgtcacttcagccaagcacatgggatagaaagtagcaggcggcctctggccctttaatggaagagggccatccagtcctctccagttaacatctagaccgaacacaaagcatccttctctcatccagaagacataggaaccctaccttcagggatgatttttttttaacagtgaaatcttaaaagtaactgtttcactaaagcctccagtatttactgaagactgtcagaatcatcctccatcactagatcttctccaccagtcatgttccctgagcagtggggtggcttgaaggtataaaccagagaggcccaagggagggatagttagcagacttctggtctttttctagtttgtgctcttctgttccaaggaccacaggtatgtcttcttctgtgtagttgttcactattgtttcaatgtgattcgtttcccacatttgaaaatagggggggattttactttaaaattcagatatctggctcctctttaggggaaaaaaaaaaaaaaaaaaacctaagacgtaacaatactggacccacattccttcatggtagcagttgataagaggtggatagtgacttctcccttttgaccgggtgtggactttccaactcaccatagtcccagttggcctgctttgttcaaagcctggccttgtaagcatcatgtttgagaccctattatgtccgaaagctttgcttctatcgtttggcctggggggaaaagctggattaatgtttagtcagcagcttattgggtgggtggagggggggaacagtgctgttgcttaggaaaagtaacaacccagtaaaagaatttatgggaaagagtgtgcacaactttggtctgtttgtggatttggtcgtttttttgctgtaaatgctgttggtatatcaaacctcctgtcacaaatgttccctctgaaatagtaacatgtccttctatcttatgagttgccacccagtgaaggaatccctcccactcccgagggatgttcatccagcctccgcttgaccacttccagcagccagggagcttattacctcctcacatggcagccagttccattcttggacagatgcgttattttaaaattcttccttatgttgaagcagctgctgcctctttgggactgaaagccacaaaatgctggagctgggaaggaaaaccgatttttttaggcgcgtgagctaccactcatccaccctgcatccagggcaaacattgataattaatcacagcactctttctcactgagtcaggaagtatgctgccttaaaattgtttttaattaaattcttttttaaaaattacaaaagtaatatgtattcacttgcaactagtgaagtagtacaaagttatataaagatagtgttaataatccccctgtttctccaagatagtgttagcagccgagggtgtattcttctatacatttatacacatatagacataaatattcatatataagatatataaggggttttgtatgtggcttttttttaatttaaaaaatggcattatattgtacatattactgtgtagcttatggacacccctccaagtagttacagatcaaacattgtatatagctttgtttttttgttttcttgttttctttttgagatggaatcccgctctgtcacccaggctggagtgcagtggcataatctcggctcactgcagcctccacctcccgggttcaagcgtttctcctgcctcagcttcccaagtagctcggactacaggcgcccgccaccacacccggctaatttttatatttttagtagagatggagtttcgccatgttggccaggctggtctcaaactcctgacctcaagtgatctgcctgcctcagcctcccaaagtgctagaattataggagtgagccaccacacctggccagattaggcatgtttttaatagatacgttatatcatacaatgtgggatctgccccagtttattaatcattccccattaatggatattcccattcatttcttcaggattcttctcatcgcagtgctccaggcagccactaccaatcgattggagttagcctgtgaggtaaaacctatttgtcatgtctcacccagtcccgctccttatcctacattctagagaagagaacagactagctccgtgatcaaagtgaatcagtggcttgggcaggactagaactgaattttcttgactttcagcat

SEQ ID NO: 21646 - DNA, 2300 bp, Homo sapien
atgaagggagaagtggctgatggagaagagttggcgaggtgagcgaggcagaggaaaaagcacagataaaggtctgggagctcatgggaacctgccctgtcttgggagtggttaaaaatcaagttggaggccaggcatggtggctcacacctgtaatctcagcactttgggaggccaaggcaggcggatcacctgaggtcgggagttcaagaccagcctaagcaacatggagaaacccccgtctctactaaaaaaatacaaaattagccaggcgtggtggtgggtgcctgtaatgccagctactcaggaggctgaggcaggagaattgcttgaacccgggaggcagaggttgcagtgagccgagattgtgccactgcactccaggctaggccacaagagtgaaattccatctctaaaaaatatatatatatatgaccaggcacaggtggcttacgcctgtaatcccagcactttgggaggccaaggcaggtggatcacctgaggtcaggagtttgagaccagcctgaccaatatagtgaaaccctgtctctactaaaaatacgaaaaacattagctgggcatggtgttggccacccgtagtcccagctactcgggaggctgaggcaggagaatcgcttgaacccaggaggtggaggttgcagtgagccaagattgcaccaccgcactcggcgacagagcaaaactccatctcaaaaaaaaaaatcaagttggattcctttgccaacctcagacttgggatggacagagggtatggagcatccttcagaagaggacctgggatcaccctgagtcaccaggcctcatgagtggccagtttgggctcactgcagaaaaaaaatgggaggtagtgaggccccataacagggttgttgaggaagcagcttacgtacttcattcattacaagatataatgatgtttaagatgggacaggtttctgctgtcacaggtcttctattctagcagggggtgtagttaataagtaaacaggctgggcgcagtggctcacgcctgtaatcccagcactttaggaggctgaggtgggcggatcacgaggtcaggagattgagaccatcctggccaatgtggtgaaaccccgcctctactaaaatacaaaaaaattagctgagcatggtggcaggcatctgtagtcccagctactcgggaggctgaggcaggggaattgcttgaacccaggaggcagaggttgcagtgagcccagatcgtgccactgcactctggcctagtgacagagcaagactccatctcaaaaaagtaaataaatttttaaaaaaataaacaaataacttgataatttcaggttgtgatgggtgctgtaagaaagacaagacagtaatgtgatagagtgacggattggggcagcagaggtgggcagtgacttcagattaagggttcagggtaggcctcagaggaggcgacacttgagatgagacttgagggagccaaccgctgagatcaagaaggtaggaagaaagagcaagtccagaagtcctgaggctggaacaaccttgagtgtttcaggaacaaaggggagtttgggaggaggcaaaggctagagaggcatgaaccaagtggtgggttgtgggagaggaacaggggccaggtcctgcatggccttttaggcatgtggaagcatttgtattttgttcccactatgaaaggaagtcacagggatttgagcaggagtcaggctcggtcagatttgcatttttagaaggacctttatggctgttgtgaggggcgtggactgtaggaggcaagagtgaaggcaggaaaccaatgaggaggctgtggcagtaattcctgccaggggtgctggtggcttgagccagcggaactggagaaattcaggaaagtggctgacagcttgctgatgggttgggtgttggaggtaagagaatgaggtatatctggtaggcagttacccttggaccccaggtcccttcctcttggcaggttatggggccaaactgccatcctggcactgacggcagggggatggtctcctgtggttgggtccccaggtctaatattttgcttttctcccactctggccaggtctcccctgccaaatccaccctagcccactgaagcgctccatgtcactcatccctacaagcccccaggtccctggtgagtggccgagtccagaggagcttggggcccgggctgcttttaccacgcccgatcacgcacctctctcgccccagagcagcgtggcctcctctggcagtgagcagacagaggagcagggctccag

SEQ ID NO: 21647 - DNA, 2300 bp, Homo sapien
ccattgtgttgtatgtggcccatagggccttacctgacgtggcacatgccagcccttccagtcttgtatcttaccagtgttggctttagaggcttcttctcagaacccttgtacacactcttcctctctctctctcttttttttttttttaatagagacgaggtctcacactgttgccctggctggttttgaactgacctcaagtgatccttccacctcagcctcccaaagtgctgagattacaggcgtgacgattttcttttttagagatggagtattgctttattgcctaggctgatctcgaactcctggcctcaagcgatcccctgccctggcctcccaaagtactgggattataggcatgagcaaccatgcccagcccgtacatactcttttgtcagcaacagtaccctttcctcctcctcacccctcagctgtcagttcaaacatttatacctcagggacacctttaccaacccctcatttttatttaagtttcttttgcttcctgttcttctccctcagggagggataatttgtcacagttatcatcatgtatgtatctttccctcacaaccagactgtaagctctctgggcatggtcacctctgcatcccagaattgcctggcacaggcacagagtagatgagcaatgaatcttttttttggaaacagagtctcgctctgttgcccaggctggagtgcaatggcgcagtctcggctcactgcaacctccgcctcccaggttcaagtgattctcctgcctcagcctcccaagtatctgggattacagacacacactaccatgcctggataatttttgtacttttagtagaggtggggtttcaccatgttgtccaggctggtctccaactcctgacctcaagtgatccacccgcctcagcctcccaaagtgctgggattacagcttgagccaccacgcccggccaggcaataaatatttgaacaaatgaatggaagactggaagggaggtctgaaggaagcatcaccctctctgcttcaccggtgtcctgccaattctaggctttcacggagacgcagaagaaacggctgctatcctggaaacagcaagtgctgaagctcctccggacattcccgcgcaaagccgcactagagatgcagaactaccggcagcagaaagggtaggcgggtggccaggttacagggacctgccctccataggcctttgctggttagcagatcgtgcttagaggggtgattgtgttctgggctgagaatctagttttattcagtcactgggcgactttcccagaagaaaatttccactagaataggatgctgagctgaaaaacaacacatgtcccatgagcaggcccctcatatgtaccttgctcctcgcctgtatgcagagggcctggaagtccctccttagaccagacaaataacagaaatgtctcctttgagaattgaagattggagaactgttttgagtggacagtgaagaaacccttgtacatgtcccatctccttccagggggtacccttggggcagatgaggacagaatgtgtgatggaggtttatgttctctcctacaacttggggttgttggggaaggtgaggaaggggtggacagataggccccatctatgtaaattaacaccctgccttctgctctctcatagctgggcattcggctccaactcgctccccatagctggctctgtggggatgggagtggcccggcgtacccagcggcagttcccaatgcctccccgggccctcccacccggccggatgggcctcctgagcccctcgggcattgggggtgtctcccctcgacatgccctcaccagccccagccttggaggccagggccgacaggtaagctggctggaagcaggggcctggcctcctggggttggggtggcagtacctgggatgtctatttgcctgtatactctgtgtctggacccagcttagaggtggcgggggtgggagtgggagaaggcctgtaccacctccaccactcttgggtctgggcctcttctgcactcactactttctctcttcctgggacctgtgtagaacctgtggtttgccaaccctggaggcagcaacagcatgcccagtcagagccgcagctctgtgcagcgcacccactcgctcccggtccactcgtcaccccaggccattctcatgttccctccaggtgaggtgccccacccttgggactctgcctggccaacatcctcagctgacctttcttttttctcctgggtctcatgtccactgttcttctagactgcattggcacct

SEQ ID NO: 21648 - DNA, 2300 bp, Homo sapien
aggggccactggacacacctaatatctccaccttccctctcttcctgttagtaacttacttgacctcaggcttctcattggagatgccataacggttgaactcagtggagatgtactctgtctttcgcatccatggcaccaccttcgcgtgctgctgggatctggggtgggaaatcaggtatctcaggaccccactgccctcctgcttgtagggcccacctgagccagtctccagtacccatttgctacccactcacctcttggagctggtgggggcctgaatctcctcttccaaaagtttctcatcagctggatctagaagaactagaggagagcggggggcaggaggaccatgagggaggcccaggcctgagcctttgctgacctagagcagaccctccctgtctccccacacaccattggggtcgatgcggtaggtgtcaggattgatgagatcgatggtgacccccaggtctggctcagtcaggaggtcatgtttgtgctgtttctccaaggaagtggctttgtactggacgaacctgggtggggaaacacctattgtggtgtttggattccagcttcacccctcacagccctgcttcccagaggcggagcttctctggggaggaactcagaatgaagtgtcccccatggcagagtctgaaagctggctccccagtgggaagggacttggacactgcttgctccattaacaattgagcagctactactatgtgctagggtaggtactgtgctaggccctgagcagacagcagccaacgagacaagcagtccctgccttcaaggaactcatacctgagtagttttcccattccttagtctcacctgttctggtcgaaggggtaggtgatgaacttggggtcgaaggggatatcagggaggctattgcagtacttgactcggcagaccactccagacctaggaacattagtggctcaaaagtgggcccccgctgccccacctctgctcccagccccactgccccaccgctcctgggaaagcacagtggggctcacctctcaggcagagtccggtgggaattgggcctagtggagaagaaagaaacagtgataggtggagaggacgggattgacaggagaatgaaaaaggcttccccaacctttcaaaaggtaggaggggtgacaaatgctggtttctttgggtggtggtgtggggagtgtccaaatgctttaatggaaggagacaaatgttcaatttatttaggaagaaatgcccccaaaagctttaatgaacaaggccaagtgctcaatcccttttgcaggagatggcttcaagtgctttaataaagaaccatgtactcaatcgtcttcggaagaggggtctccaaacggttgactggagggatcccttctggagggagtctccaaaagcctaatccctgaactgcacggcggggaggaggggaacacctgaatctcagaaggaacccgcccccttcgtcaaaggtgagcgcttcatgacgtcacgggcagacctgggggctggtgacgttgttcagcagaaaccctctcccgatcccccgccttgctgcaacagaaaagcgtggcgcctacctgtggccatcctcccgctgggcctgggtctggatggtgggcgccatagcgacgaggcgacggcagcccggacggggtcctagcgggaccgaagggggacgcagaggggcgtgccgacttcaggggacgcctgatccgaggaaggcccagcttggcgccgctccccgcggaaagtgggttgagatgaggtgggcgggcgagaagagctccagcgagactcaggtgaacgcgcaggcagcaccggggacggactcgaagctccggttccaccaactgccgccaagacgctgaggacccaacgggtctcctcaggccgcgacgccttcggggaaatgaagtccggctcggaaccacacacggattggcgagcgtctgggtgaagggcggagcgagggagagaggtgcttctgtgattggtggagagatatctcagtctggacgcagatttgagagtgacgtaacgttggggcacctccttcccctccattggcttaattgcctagggggcgggactaactagcaaacggggactagaaatagggatgctgaaaagcaacggggagagacgcagtcgtaacgcacttccggcggtctacgcgaggaagatggctgcatcccagcagcaagcttcagcggcttcctcagctgctggtgtatcgggtcctagttcggctggcggcccgggtccccagcagcagccgcaac

SEQ ID NO: 21649 - DNA, 2300 bp, Homo sapien
agccagatgtgctggcacgcgcctgtagtcccagctacttgggaggccgaggcaggagaatcatttgaacccgggaggcagaggttgcagtgagctgagactacaccactgcactccagcctgggcgacagagcaagactctgtctcaaaaaaaaaaaaaaaaaaaaaaaaaaaaaaaagaaaagaaagaaagaaagaaagaaaaggaaaaggctgggcatgatggttcatgcctgtcatcccagcactttgggaggccaaggtggaaggactgtttgaacccaggagtttgagaccagcctggacaacgtggcaagaccctgtctctacaaaacaacaacaaaaataaaataaaataggagaagtgattcgtgaggctgaggggatggctagaggccaggagtttgagaccagcctgggaaacatagcaagactccgtctctataaaaaaatcttacaaattagccaggcatctgtagtctgtagccatgtctgtagtcctggctacttgggaggctgaggcaagaggatctcctaactcaggtgttcaaggctgcaatgagccaagatcgtgccactgtagtccagcctgggtgacagagggagaccctgtctcaaaaaaaaaaaaaaaaaaaagtaaatatagaaggtgaggtgggcggggagcaggagaaggaaagatgaatttcaaagactgggaaggcaatagaatatcctggtaaagggggctgcactcactgtccattgtcgatgttagtgttctgaatcaagttttgggccgcaaccttcatcaaggtctagtcaaaacaaaaacaaaacacgtgggaaatggaaaaacaaaagggaatacctctggcagatctacactctttcttgagatcactcagtctcaggttttcttttcaactggcaccttccctcctgactttccaaagtaatattcgtttccattcctatagctgtcaccactccatcctcccagaggcccgctctcacctgagcttctcgccaataacctaagggtcctccctcacctatcaatcaagggcagaatctccgtataagccagtactctcctcaggctttaacgaccagagcccagtttctcctttaaacaacccctcactcaagctccggccagtcccagcctcagcatcagcgctgatcccatctctgccgagcttcgcttaggtctcgcagaaaacaacagttttatttatttatttatttatttttttgacggagtctcgctctgttgcccaggctggagtgcaatggcacgatgtcggctcactgcaacctccgcctcctgggttcaagcgattctcctgcctcagcttcccgagtagctgtaattacaggcgcgcgccaccatgcccggctaatttttgtatttttagtagagacgaggtttcaccaggctggtcttgaactcctgacctcaagtgatccgcccgcctcggcctcccaaagtgctgggaacacaggcgtgcaccagccaggccaaaacagcaggttctattcctctttctgcttagcgctctctccgactaacctggccctcggcctgcccctctagactaccaaatccagtttgcttctcgctgcttaaggccaatcacctgtagactctccttcagctgcgggatgagcatcttataacgctgcacaggatcgaagtcctgttgctgttgctgcaggaggccgctctgggcagggcccaccagttgtgctggcggttgcggctgctgctggggacccgggccgccagccgaactaggacccgatacaccagcagctgaggaagccgctgaagcttgctgctgggatgcagccatcttcctcgcgtagaccgccggaagtgcgttacgactgcgtctctccccgttgcttttcagcatccctatttctagtccccgtttgctagttagtcccgccccctaggcaattaagccaatggaggggaaggaggtgccccaacgttacgtcactctcaaatctgcgtccagactgagatatctctccaccaatcacagaagcacctctctccctcgctccgcccttcacccagacgctcgccaatccgtgtgtggttccgagccggacttcatttccccgaaggcgtcgcggcctgaggagacccgttgggtcctcagcgtcttggcggcagttggtggaaccggagcttcgagtccgtccccggtgctgcctgcgcgttcacctgagtctcgctggagctcttctcgcccgcccacctcatctcaacccactttccgcggggagcggcgccaagctgggcc

SEQ ID NO: 21650 - DNA, 2300 bp, Homo sapien
accactttgggaggccgaggcgggttgatcacggaggtcaggagatcgagaccaccctggctaacacggtgaaaccccgtctctactaaaaatacaaaaaattagccaggcgtggtggtgggtgcctgtagtcccagctgctcgggaggctgaggcaggagaatgcgtgaacccgggaggtggagcttgcagtgagccgacatcgcgccattgcactccagcctgggtgaaagagcgcgactccgtctcaaaaaaaaaaaaggaaaatgtagtctgaaggcacaccccactataagagacccatccagccatcaactgaggatgacctttttttttttttttgaaagcttttttcaatcaatgcaaccatcagttatagtgaaagacctccaccttgccaatcttgagttttctcagagggcaaacctcgacataatttcagaccctagtatgaggcctgtgccatttgctagctcgaactaggagagtaactttatttttccccctgagagggagtctcgctctgtggcccaggctggagtgcagtcgcctgatctcggctcattgcaacctctgcctcctgggttcaagcgactctcccaccccagcctgctccctccccgcccccgagtagcgggaccacagggtgtgcgccaccacactcagctaatttttgcatttttgtagaaatggggattcgccgtgttgcccaggctagtctcagactccgagctctagtgatccgcctgccttgggcgcccaaagtgctaggactacaggtgtgagccgggcaggagagtaacttcactttggtttcctcctgccttaaatgggcataccacctggcattaggattaatgtgcgtaaagtacttagaactcagcccaggtgagttctccttaactcagcctagaagagatcatccgcccgagggtgagggggctagagccgccctgtgaattgggaaaggaggccccttttcagccttgccaggtatcctggaccccacccaacccactcactcacccacccaaccccagcaagtggggagagggagagcagtccaggtctccttatctgtctgggctgtttaggagtgagaccacacaaggcaggcagttctcagagaattcccctccaaggcctgctggctctttcttggcactttgctctgcagatttctttccgtaagtgcttatttctcacagtctttctcctttttgtccagtttctttttctttttaatttttttaaatagtattttttgtagacatgggatctcactgttgcccaggctgatcttgaactcctgatctcaggtaatccacctgcctcatcctctgaaagtactgggattggccgggcttggtggctcacacctgtaattccagctctttgggaggcggaggtgggaggatcgcttgagccccggagctggagattagcctgggcaacatagggaaaccccgtctttcaaaaaaaaaaaaaaagaagaagaaaaaggaaagaaaaacacaaaaagtgctgggatcacaggtgtgagccactgcgctcagcccctttctgtttctttttgtgatcctcccaaccctcttctccctctgaatctgtctctgggactgtctctgtctccccgtcttccctcccttcctcaccctgtctatctctctctgtatgtctcttggtgtgtgtgtctctctcgatgtttttctctctgcctgtctgcctgtctgtacccctctgcgtctctccccgcccccatccgtctgtgtcgcacgcgcacccccatcgggcttctgctcttgtcaattgcccctggggccctgcccccacctccgccccagtttccttctacaagcctcagtctccagctttgaaaactgggcaggcgtccccccatccgcacccccaccccttccccacgcattccccgctcggtcacggctgtccaccggccaagctcaggcgcgtcctggcccagggccgggcggaagggaaccagtccagggccagccaggctgcgccgggggcgcgcgtccgggaagcgcccctcctgccccgcccccggccccggccccggccccgccccgtgcttgcagtttcctataagtagccggctctcggtgccagcctcagcctgacttcagcgctcccactctcggccgacacccctcatggccaaccgttacaccatggatctgactgccatctacgaggtgagtccccgccgcacggcatccccggtacctgcatgcctgagtccgagtccccacctctctagcgccgcaaactccagcccg

SEQ ID NO: 21651 - DNA, 2300 bp, Homo sapien
gtatcccttgacaccttgttctcaaatccacaccccagtccaacagcaatcctgtctgatccacctgcaaaatagatccactatccacctgcccccaccatgacccccaccctggtcctagccaacatcgtctgccatttgcatcttcatagcagccccagccccagtctctgctctagcccctgccttcagtctctcctttctccactcccccacgagacaaccaaaggaagcctgttatgagacctgagtcaggtcacataaaagtcaaagtccgaagtcctccccacagcccacacaatctggcacccatcgcttaccctcccccttggccactctgctccagccacactggcctcctagctgctctaccaagtctggtctgcttcatccataggagctttgcactagctgttccctctgcctgaacactcccctggtgtccccatggctcactcccctccttcatgtctctgctcaaaagttgccttctctgtgagatcctccctgaccactgctgttgcaatccacaccccacctccaactaccccatcctccctaccttgctcgactttttccatgacatttatcatcaccacctaacattaaaatgtacttaattcttatgttgacagcaatctgcctccccactagaatgtcgcgtcctcaggggcagggactacttgttcactgctgtattacacacagctaaaggaagccaggcatagtgaatgttcaatatttattgaaaaaacaagtcgactcaaaaacatagttttccttttcaacagaggtcgaaaactccaagacagatagctatgttcatctgtaaaggaggcattaaaaagacagagaaatacagaggaggcagagtcatatacagtttgccgaggacccacatctctacagaagtcaaactgtttgcacacaattccatgcccagagcatctaataagagacgatacccccacctggtggctgggacggaaacggcacctccctacaatacagaacacccaaaggaccgtcgccaaagccctaggagtcttttgagcccaataattcaaaagatagaaacgttcattcatctaagtgatgtagatgttttggttggtttattagatgtgtaagtttataaaaactgatggggaaaaaaagtgctccaggtgaggatcgaactcacaacctcggcattgctccgctcgcactgtcatataagtaccgcgcgctaaccgattgcgccactggagctccggccgcacccctgcgccggggtcttcttcagtggttcatagccacgtgacctcaccggagggccccgccttgtgttatatatgcaaattaaacattttgcattgaccaataggagacagtgcattgccagttccggattctcacgcctcgcggcccttgctgtaaaagggaaaagtccgcgaggcgtttggaatgtaggggtgtcgcctaccagaaggacacgcctcctcatgaatattcaaaacaaggggtggggtcttaacccttcgctggcgggtcggccggaaggcagcccctcccccccccgcaggcgggaacaggatgtgagccccggcgacagcgggggaggggaagccccgggcgaccgccccccgcctcacagctgggatcggactctcccgccccagatgtggcgccgccgccgtcacacgagccccgtgacacccagccgggagcccgaggggtccagaggctcggacccgggcgtccggaatttctgcaccgcatcctgagagaccccgaggtccagaccccggcgcccaggctggaggacttgagccatccaggtgcgcagcgccccctcctggagcagccgggagcccggacgtcaccccgcgagaccctggaggccgagcgccccgtatccccgtttcaagaactcaggatccaggaccgcagactccctccagggctccgatcccaagaccccgcgttggaggaacttgagatccggacttctaagcgccccaaccagtttcgggctgcagcggccatcgcttcaaggggacccaggactttgggacccccctgtgctcccacctggagggagtttcattcctgcccctagaattaggggaactcagaaatccatcccccaccccacggccctacctagaagacttaggaatgtgggtccccagcgccgccatctgagactccagagtcgaggctcctagcatcccctacgtagaacactgagaaattccgactgcgggaccccagtctccgagagaccccagattctattcctggagcctgagagcccg

SEQ ID NO: 21652 - DNA, 2300 bp, Homo sapien
ggggcagggactacttgttcactgctgtattacacacagctaaaggaagccaggcatagtgaatgttcaatatttattgaaaaaacaagtcgactcaaaaacatagttttccttttcaacagaggtcgaaaactccaagacagatagctatgttcatctgtaaaggaggcattaaaaagacagagaaatacagaggaggcagagtcatatacagtttgccgaggacccacatctctacagaagtcaaactgtttgcacacaattccatgcccagagcatctaataagagacgatacccccacctggtggctgggacggaaacggcacctccctacaatacagaacacccaaaggaccgtcgccaaagccctaggagtcttttgagcccaataattcaaaagatagaaacgttcattcatctaagtgatgtagatgttttggttggtttattagatgtgtaagtttataaaaactgatggggaaaaaaagtgctccaggtgaggatcgaactcacaacctcggcattgctccgctcgcactgtcatataagtaccgcgcgctaaccgattgcgccactggagctccggccgcacccctgcgccggggtcttcttcagtggttcatagccacgtgacctcaccggagggccccgccttgtgttatatatgcaaattaaacattttgcattgaccaataggagacagtgcattgccagttccggattctcacgcctcgcggcccttgctgtaaaagggaaaagtccgcgaggcgtttggaatgtaggggtgtcgcctaccagaaggacacgcctcctcatgaatattcaaaacaaggggtggggtcttaacccttcgctggcgggtcggccggaaggcagcccctcccccccccgcaggcgggaacaggatgtgagccccggcgacagcgggggaggggaagccccgggcgaccgccccccgcctcacagctgggatcggactctcccgccccagatgtggcgccgccgccgtcacacgagccccgtgacacccagccgggagcccgaggggtccagaggctcggacccgggcgtccggaatttctgcaccgcatcctgagagaccccgaggtccagaccccggcgcccaggctggaggacttgagccatccaggtgcgcagcgccccctcctggagcagccgggagcccggacgtcaccccgcgagaccctggaggccgagcgccccgtatccccgtttcaagaactcaggatccaggaccgcagactccctccagggctccgatcccaagaccccgcgttggaggaacttgagatccggacttctaagcgccccaaccagtttcgggctgcagcggccatcgcttcaaggggacccaggactttgggacccccctgtgctcccacctggagggagtttcattcctgcccctagaattaggggaactcagaaatccatcccccaccccacggccctacctagaagacttaggaatgtgggtccccagcgccgccatctgagactccagagtcgaggctcctagcatcccctacgtagaacactgagaaattccgactgcgggaccccagtctccgagagaccccagattctattcctggagcctgagagcccgaagttcacgcccctgagtctgggctccgcacctccctggggaccgcgtcggggtcgcgcaggagccgggctgcctcgagccggggctggaggctccccgggaggtgaggggggaggcgaggggcccaggcggactgggggagggggcggcgccactgctgaacaatgagggggcgtgccggcggggggcgagccgaggcgccggcgggagttgggggctggaggggtgtgggaaggcgctggggaggctgtggctgtggggacggcgatcggggttcggagagaccggccggagggggtgcgagggctcggggccagcgccccagcgcgcagccctcggcgggggagggagccgtctgcaggaccctggcatccggtcccccagcctccgccctcccctgggaccccgcggcctcccgcccacggcttttcccagccctgcccctcgccctccgctccagctggagcccaaacgttcccaggatccctaagcctccggccccagacaaacgggactcgcagcttctgcgcctcctgctccgctcactcttctttgtctcagcctttccatctttttcgccaggttctctctccttgtccccttctttctgtcactttgtgcctcccccattagttactcccaggggcccctccctggatttacaccacg

SEQ ID NO: 21653 - DNA, 2300 bp, Homo sapien
tttcattcctgcccctagaattaggggaactcagaaatccatcccccaccccacggccctacctagaagacttaggaatgtgggtccccagcgccgccatctgagactccagagtcgaggctcctagcatcccctacgtagaacactgagaaattccgactgcgggaccccagtctccgagagaccccagattctattcctggagcctgagagcccgaagttcacgcccctgagtctgggctccgcacctccctggggaccgcgtcggggtcgcgcaggagccgggctgcctcgagccggggctggaggctccccgggaggtgaggggggaggcgaggggcccaggcggactgggggagggggcggcgccactgctgaacaatgagggggcgtgccggcggggggcgagccgaggcgccggcgggagttgggggctggaggggtgtgggaaggcgctggggaggctgtggctgtggggacggcgatcggggttcggagagaccggccggagggggtgcgagggctcggggccagcgccccagcgcgcagccctcggcgggggagggagccgtctgcaggaccctggcatccggtcccccagcctccgccctcccctgggaccccgcggcctcccgcccacggcttttcccagccctgcccctcgccctccgctccagctggagcccaaacgttcccaggatccctaagcctccggccccagacaaacgggactcgcagcttctgcgcctcctgctccgctcactcttctttgtctcagcctttccatctttttcgccaggttctctctccttgtccccttctttctgtcactttgtgcctcccccattagttactcccaggggcccctccctggatttacaccacgctcctaattcccagcccccatctgtgagtctgggcggcggagaggcccatggggtcctgatatccaagaaggggctctttctgcaggactctgctgggccgctcagccatgcctgagggagcccaaggactgagcctctccaaacctagcccaagcctcgggtgtggccgaagaggtgaagtgtgtgactgtggcaccgtgtgtgagactcggacaggtgagcctagaggcaggggcggcggagcctgtggggcttttattccttggcaatgctgtcaaggcagggtgatggagacaaccccaggccaactcgcacaaagctccgagtctggtggggaaggcgggcccatccccaggcaatgacaggccagagggggcagcgctgggcagagtggtcagggctgtgatcgtggatcctctgagctcggaaggtcaggggaaggttcctggaggtgggaacatctcaactgggaagtggaagattagggggaaggagttgcgcaaagacaaggaagagtattctacatgcaaggaacagcatgtgcaaaggcccagcggtgagaaaaggctgcatgtaagtgactgaaagaagttgagtgtcactggcatccagagtgtaagaagaggggtggctgtgggaagagaactggctagagggatctgtgttggccacattgcccagtgccctgtggatctgaggagtttggactttatccccaggggcatgaaggggttacactcacgggagtaatacagtcagatagacaaattaataaatgtctacctagctgattcatggaggtggattagagaaatggaggccagaagtccagagaggaccctgatgggagaggatgggactggaccaagacagggcagtggggagaggaggaaggagcctgtgggaaagctgttggacaggtgtgggtgagggtgtgggctgaacgcatgaaaggctgtggaagtccgtgcatggggagatttctctgacctcctgttccacaccccagcagctcctgcagcccccaccatggcctccccccgaggttctgggagctccacatccctgagcacagtgggctctgagggggatccagcccctgggcccactccagcctgctcagcctccaggccagagccccttccagggcctcccatccgcctacatctctctccggtggggatcccaggttcagccagaccctcaaggctggagcgtgtggcccgggagatcgtggagacagaacgggcctatgtcagggacctccgcagcatcgtggaggtaaggcgggcagacaccagagggcagtgggtacccaggccagccccttggcccccataaccccagtcatcccaacaggactacctgggccctctgctggacggcggggtcctggggctgagcgtggagcag

SEQ ID NO: 21654 - DNA, 2300 bp, Homo sapien
ccactgacctgtgctgtgcccccagctccctggccctgctccgggagctgtcgttgtctccgccagcagccctgtggctgcaggagcgccaggcccagcttcgccactcgctgcccctgcagagcttcctgctgaaacctgtccagcgcattctcaagtaccatctgctgctgcaggtcagctggggcccctggagccaggctggggagggggaggtcctgtcccttgaccacctgttggttcatctggaggatggaccccccacgagttgggcaaggcctcccaaagtgctgggattacaggcgtgagccaccgcgcacagccctagcttttttttttccctttgaggtggagtttcactcttgtcgatgaggctggagtacagtggtgcgatcttggctcactgcaacctccacctcctgggttcaagtgattctccttgctcagcctcctgagtagctaggattacaggcgcacaccaccatgcccagctaatttttgtatttttaatagggacggggtttcactacgttggccgggctagtctcgaactcctggcctcaggtgatttgcccacctcagcctcccaaagtgctgggattacagacatgagccactgcgcctggcctctgcccctatctttatatttctccatctcctgttattctcattctctttctccttctctgtttctctccccatccctgcgtgcctggtggctgcctgacaggaactagggaagcactgggcggagggcccaggcactgggggtcgcgagatggtggaggaagctattgtgtccatgacagcggttgcctggtacatcaacgacatgaagcgcaagcaggagcatgcagcgcgcctccaggtggccccagggtgggctggggcttgctggatgagggagtgagcgagggggccttggggcgggtggggggaaatcagtgcctcagaggtagccttggagggttggctgggacagcatggccctgttgctaaccccctgttttggtgtgtatgtgtgtgccacctacccatgcttgtctctgcgccccggcgcacctggcggggtcccggcaggaagtgcagcggcggctgggtggctggaccggaccagagctcagtgcttttggggaactggtgttggagggcgcgttccgaggaggcggagggggtggcccccggctacgagggggtgagcggctgctcttcctgttctctcggatgctgctggtggccaagcgcagggggctggagtacacctacaaaggccacatcttcgtgagtttggggatggggtggggctagaatactacctacaaagtatatcccatatacctgtatctgtgtgcccggcagtgtgggccaggggaccctgccacattttcttgagttagagaatggaagccaagggaagctttctttctagtgtatagaatgagagctgccccacttaagaaaaaaaaggagaaggctgggcgtggtggctcattcctgtaatccgagcactttgggaggtcaaggcgggcggatcacttgaggtcaggagttcgagaccagcctagccaacgtggtgaaaccccgtctctactaaaaatacaaaaattagctggacgtggtggcaagtgcctgtaatcccagctactggggaggctgaggcaggagaattacttgaacccaggaggcggaggttgcaataagccaagatcatgccactgcactccagcctgggtgacagagcaagactctgtctcaaaaaaaaaaaagggagaggaaacccaccatacagccttatgggatgcatcttcctagggaggaggacccagatacacctccaagggtgtctccgtacaaggggcatcactgagcccaaggactctgagcttgctacccctctctttccttccagtgctgcaacctgagcgtgagcgagagtccccgagaccctctagggttcaaggtgtctgatctgaccattcccaagcacagacacctgctccaggtgagcatgtagtgggatcaggctggcagggatcccccagcctcgagacctcacacctggccccctgactctactccaacccactcctaggccaagaaccaagaagagaagaggctgtggattcactgtctccagcgcctcttctttgagaaccaccctgcctccatccctgccaaggtacagctcctgccgcagccgggggccctctgagtgctggagacaccctcccccaatagtactaagagacgcccctgcccaatgccagagcagtctgttataatgtgattgctaaaagtgc

SEQ ID NO: 21655 - DNA, 2300 bp, Homo sapien
cttggcctttcatctttctcttcttctccacttgtgcctacatttctttgggctgtgtctgtgtccctcccggtcagcctctgggtacttccttcctccctcccaacagccccctcccccctcacccttttagagctggactccgggctggcttttccctctggccccagacctgccctccagtgtctccctgtctccaccctctttggcaaggtgcaccacgacgcccttttgaaccctggatcccagaccctgtactgccagagaaactgaggcaactgtgggctccctctagctctgagagaggaacctcttcgctggggagactcttgatggggtgagacgcagggacatctgccggggaaccagaggacaacccaatcctggggttcctcaggtggggttggggggctggggatggagaattctgtggggaggaggcttaagtggagggtgatttgggggagaggaaaaagatgactgggagattctggagaaagagattctaggggctgggcgcggtggctcacgcctgtaatcccagcactttgggaggctgagatgagtggatcatttgatgtcaggagttcgagaccagtctggccaatatggtgaaaccccgtctctactacaaatacaaaaattagccgggcgtggtggtgcatgcctgtaatctcagctactcaagaggctgaggcaggagaatcgctttaaccggggaggcagaggttgcagtgagcagagatcatgccactgcactccagcctgggcgacagagcaggactctgtctcaaaaaaaagaaaaaaaaaaaacaaaaaacagagagattcggccgggcgtggtggctcacgcctgtaatcccaggactctgggaggctgaggcggatcacatcacctgaggtcaggagttcgagaccagcctggccaacgtggtgaaaccccatttctactaaaaatacaaaaaacgaccagggcgtggtggtagacgcctgtaattccagctactcgggagcctaaggcaggagaatctcttgaacccgggaggcggaggttgcagtgagacgagatcgcaccactgcactctagccagggcaacgagcgaaactccgtctcaaaaaaaagagagagattctagggtggggacggggaagaggttaattcttgggggagggtctcttaggagagggggattctaacggagggaaaactccagggaaggcagttgctgggaagaggagtctcggaagggaaataaactcaggagaaaggtagattttgagggacgggtctctgagagaaaagtttttgtggatttgcggggcggggtgttctgggaaagggggatttgccgggaaagggggatttgccgggaaagggagattctggaggagggagattccaggggtactgggtcctgacaagagaaagattctgggaagggtgactgaggggacgaggaccgaatggagggagattcagggaaaaggggggtctaagttgagcactcttaagagggacatttggggttggccatctgagagaaggatgggaaacattctgggaagaggaaactgaaaggaaggacattctggtgaaagggagattctgaggggaaggggctctgaggggaaaaggattctgggagaggatccccaaggagggggattctagggaggataggattctggaagtccttaatctgagaatccagccagatttcttgcagtagattccaaaggaagattctgatgcgggggattcggggaggagggagtccagaggggagaaagattacaggtgttgggagggtgggaactgatttaaagaaagggcgaagggagattattaaagagccagaatgcaaagaagagctgcggtagtcgactacagaggacgcgaagcacactcccgcagccttcccttcagtccgcacacgacactcccaggccccgccccttccgcccacagagcccgccacttccgcctcacagggcccgcccgctctgagcgcctaagggccttcccgccgctgaccagacgccccgcccgttagccgcaacagaagccgtaaagctctctcccgtcgcgacgcagtgctcaaggcgcctgcgcagaccctgaaaagcggccagggtggcccctagctttccttttccggttgcggcgccgcgcggtgaggttgtctagtccacgctcggagccatgccgtccaagggcccgctgcagtctgtgcaggtcttcggacgcaaggtgagccagacgccggatgggaaggggaggggaaggagaaggccagggt

SEQ ID NO: 21656 - DNA, 2300 bp, Homo sapien
tggggaaatgactgtgccctcttttttctgcagggaatggctttctgcagcagtgtctgtagcgatttaatatgtagaatcctattttcttgttgtttttttttttgagacggagtcttgctcttttgtcacagcaacctccacctctcaagttcaagagattctcctgccacagcctcccgagtagctgggattacgggtgtgcgccactacgccacctggctaatttttgtattttttagtagagacagggttttaccatgttggccaggctggtcttgaactcctgacctcaggtgatccgcctgccttggcctcccaaagtgctgggattacaggcgtgagccaccgcgcccggtggagaatcctttctttttttgagatggagtctagctctgttgcccaggctggagtgcagtagcacgatctcggctcactgcaagctcggcctcccgggttcacgccattctcctgcctcagccttacgtgtagctgggactacaggcgcccgccaccacgcccagctaatttttttttgtatttttagtagagatggggtttcaccgtgttagccaggatggtctcggtctcctgacctcgtgatccacccgcctcggcctcccaaagtgctgggattacagacgtgagccaccgcgcccggcccaggtgtgtcatacttatgtgagaaattttaccaatgtgtcctgaggcttcttttttttttttttttttttgagactgagtctcactctcgcccaggctggagtgcagtggcgcgatctcggctcactgcaagctccgcctcctgggttcacgccattctcctgcctcagcctcccgagtagctagaatcacaggcacatgccaccacgcccggctaatttttttgtatttttagtagagacggggtttcaccatgttggccagactggtttcgaactcctgacctcaggcaatctgcccgccccggcctcccaatgtgttgggattacaggcatgagccaccgcgactgacatagacttctgatttttaaaatttcccctatcaggttaatttttcaatttttaaaaatttaagttttaatttttttttttttttttttttagagacagggtctctattacccagtctggagtgcagtggtgcaatcatagctcactgaagcctcaacatgggttcaagtgatcctcccaccttagcctttggagtagcagggaccacaggcacacgccaccacaccacattaaaaaaaacacaaaaattggatacatggggtctcaatttgttgcccatgctagtctcaaatacctggcctcaggtgatcctcccgcctcagcctcccaaagcgctgggattacaggcgaaggttcatttttcatctctccattacacctgtccactctgccatcactcgtcagccgtcattactaatagataaattcgcctttaaatgaacttaggaagcctggaaagaaaaatagggacttgggccgggcgcggcaggttatgcctgtgatctcagcactttggcaggacgaggccggaggatggctttttagtttgagttagaggagtttgagaccaggccgggcaacagcccgactctaccaaaaaaaaaaaaaaagtacaaaaagaaagaaaaagaaggaaaaaccagggcttcacggtcactcagacttggcgaggaggcttgggtctgccgctttccactgagtttttctgagcttcagcgttctctccaaaacggggatacggatctcctggggatgctttagagggcctaggagataaagccttgtttcttttataatttgctattcgctgatttcgccgcctcctcgcagcttggcctaccgcgctagtgttccggactaacgaacaaacggctcactaaattcaaacatgagtttcagcctggtcgccgagccggcgggtagaaaaaacctttcccctcctaaccctccgcagatgtcggccccgcactccgcccaggccagccctgcctctctcaagatggcgacctggaagtgcgtcgcccgtgccagccccggaaatctcgtgttaggcgaggtcaacgggtaggttctcgcgagaggacccgtcagccccagtcaggcgtcgtgcgaacagcagctggtaccgaaggcggaggtggagcccgagaggtaagtgcgtgtgcagaggtggcagttccgggcgccggggaggtgtagagaacagattcggaaactggggaggtctagcatgtggcgtaggagggggtcctcactccgcttcgcgattgccaaaacgagcctgc

SEQ ID NO: 21657 - DNA, 2300 bp, Homo sapien
gggatggcgtgagatgagttagggagctcacgagggcctgcggcccattggagagctttggtgtttactggcgtaggatgggagggctgtaagggacacaggcagacttcaatgttaataagatttctctggtgactgtgttgagactagaccactggttctcaagccagggtgatgtttccccaggggacatttggtaacgtctggagacatttttggttatgtcagctggggagggggttgacgattatggcatctagcaggttaaagccagaaatgctagacacacacatcctccaatgcacaggatggctgcccacaacaaaaaattacctggcccaaaaagtcaatagtgccaaggctgagaaacccgggaatagcctggagggggccatgggcaagagcgtggagaccagggaggaggctgctgctgtagcacatcccacccagatggcagtgctggtgggataggaccaagaccctaatacacgttgagtgtctctaacctgaattcttgagaccacaggtgtttttcagatttcagattttttcagcttttggaatatttgcattatacttaccggttgagcatcccaaatctgaaaatccaagagtgagcatttccttcgagcatcatgttggtgctcacagggtttcctatttttgagcattttgggtttttggatttggaatgctgagactgcagtggaggaggggaagaggtcaggtattttgaaggcagagctgatggaatttgccaacgggtcgggtgtgggtgtaagagaaacaaaggagtcaagagtggctcccaggttgtgtgcctgagcagagggaagaatggagtgggaggcggcaggtttgggggaatcagcggtttggctgcggtcgtcctggatttgagggacctttagacatccaggtggagataccaagcaggcagtggctactcagtgccagagttgaggggacagacaagctagcgtgggacttttgggagtggtcagcagcctggtttcttccccaccatcctgcgtcccttctccttcctagcatctcctgacccttcttgtgtctggggtcagggaggagagtggggccctgctgaccttctgctcgccctgctcaggtggactacgtggagcccagccagaacaccatctccctgaagatgatcccacgcatcgactacgatcgcatcaaggcccgcatgagcttggtactcaggggaatctgtggcctgggggggagggagtgtgctcgatcccactggtggccaagccccctccctcacccttcccacccatgcccctttcctccatagaaagactggtttgccaaaaggaagaagtttaagcggcctccacagaggctgtttgatgctgagaagatcaggtgcgtgtccttggggactggctgggctgggtccccagggccggtgtgtagaatgtgccttttgcaggttcctccccaggggtggccccgccacaggtttagcctgtgaattggttagcttggcagtatagcctcaggcaagtcacttcacatccctgtgcctcagtttcttctgctataaagattgatgaggctgggcgcagcgggagggagcactttggaaggctaaggcaggaggcttgcttgaggcaaggagttcgagaccagcctgggcaacataatgagatcccatcttttaaaataataataataataaaaagaaaaaagttaaaaaaatatttaaaaagattgatgaggctgggcgtgatggctcacacctataatcccagcgctttgggaggccgaggcgggcggatcacttgaggtcaggagttcaagaccagcctggccaacatggtgaaaccttgtctctactaaaaatacaaaaattagccaagggttgtggtcagctcctgtaatccaagctacttgggaggctgaggcaggagaatcgcttaaacccacgaggcagaaattgcagtgagccgagatcgtgccactgcactccagcctgggtgacagagcgagactccgtctcaaaaaaaaagaaaacaacctctgcttcctcagattatagattatagtgagaattaaataaattagtatgcatatgtactcagaatgcccttggcacgtagtaagtgtgatccatggtgtgatatattgaaatgggattcatggactatgtcaggctttagaaagtctcctttcctgatctgcttatgcccacttgagatgggggggtatggagtgcctttccctcaggatgccccccagactccctagctgggtagagaattggagcagcc

SEQ ID NO: 21658 - DNA, 2300 bp, Homo sapien
tggcgggcgcctgtattcccagctacttgggaggctgaagcaggagaatcgcttgaacctgggaggtggaggttgccgtgagccgagattgcaccaactgcactccagccagggtgacagagcaaaactctgtctcaaaaaaccaaaaaaaaccaacaacaacaacaaaaaaaaacaccaaaaaacatttcagacgttcaagattatataccaagaacaccaatgtccccatcagccagctgaggaaacaggaaacaatatgtactagataggacccacttcagcagcaccctaaatccattcccccagaagtaaccaggagggccgagttccttgtgtctttccctttcttgaatttgtatttttactaccttggtatttggttttaaagtttacataaacaggatctgatttttcttccactcaatttaagggaggttcgtggtgtcttatctatagcctctaattcgtttctcactcaagccctgtacagccagatactgctgttctttggctgagcctcaggtaaaatggttggctctccagtcctttatagaaaatcatggcaggaaggaatgggagagaaaacagattctgcctcccagctccacgtgaggaagagttttattattaatttttattttattttttttgagacggagtctccctctgtcgcccaggctggagtgcagtggcacaatctaggctcactgcaacctctgcctcctgggttcaagcgattcttctgctcagcctccccagtaggtgggactacaggcgcgtgccatcatgcctggctaatttttttttttttttgttatttttagtagagacgtggtttccccatgttggccaggctggtctcaaaactcctgacctcaggtgatccgcctgcctcagcctcccaaagtgctgggattacaggcatgagccactgcgcccggcctattattattaattttaaaaatagagattgcagtcttgctatgttacccagtgtggtctcaaactcctggcctcaagcgatcctcctgcctcggcctcccgaagcactgggattataggtgtcagtcacagcgcctggccagaagagttttcgagggctggcttttcaggtcgttttctgggcctcaatgtctatttctgacaatgtggggaaaagaaagatcagattgttactgtgtctgtgtagaaagaagtagacataggagactccattttgttctgtactaagaaaaattcttctgccttgagatgctgttaatctataaccataccctgttatagatgacggggttctctataaccaaccccgtgctctctgaaacatgtgctgtgtcaactcagggttaaatggattaagggctgtgcaggacgtgctttgttaaacagatgcttgaaggcagcatgctccttaagagtcatcaccactccctaatctcaagtacccagtgacacaaacactgcggaagaccgcagggacctctgcctaggaaagccaggtattgtccaaggtttctccccatgtgatagtctgaaatatggcctcatgggaagggaaagatctgaccgtcccccagcccgacacccgtaaagggtctgtgctgaggaggattagtaaaacaggaaggaacgcctcttcgcagttgagacaagaggaaggcatctgtctcctgcccgtccctgggcaagtcttggtataaaacccgattgtatgttccatctactgagataggggaaaactgccttagggctggaggtggaacatgcgggcaacaatactgctctgtaaggcactgagatgtttatatgtatgcatatctaaagtacagcatttaattctttaccttgtctatgaaccgttgttcacgtgtttatctgctgaccctctctccactattatcctatgaccctgacgcatccccctctccaagaaacacccaagaatgatcagtaaatactaagggaactcagaggctggagggatcctccgtatgctgaacgctggtcccctgggccccctttatttctttctctatactttgtttctgtgtctttttctcttccaaagtctctcgttccacctaacgagaaacacccacaggtgtggaggggcaacccatcccttcagacaattgggaggtgagggccgattgccttacacggtgagacaagcggcctgactcgtgactatttttttggacaaatcaggcagccactgactcccttcattatggcctcagctttatctctgggcaataagtgtgatcccttccttcgctgcgtcctttgcaggggcg

SEQ ID NO: 21659 - DNA, 2300 bp, Homo sapien
gagcccctaccccattaggctcattttcaaaactatgccgccttcctctctccccttctggttaaccagcttttggtggtgaagtagatgacaaattggatagtagagagtagctgtcaatcctgtcacacctggctcttcctaggagaaaaatgaaattggtgggtccagaaagccacctgtttatgctgggggatgtttgcaaacagtcatgttaatacattgattgtttcaaactgggcagttgtagaatcatgctggcttcaacaaatcagtatgctgatttaaattgggcaggtacatctgcagttttaaagtgtatatgtttactagcctaactggtttcaatattgtggtttatttttatttttatttttttttgagacatagtcttgctctgttgcctaggctggagtgcagtgatgcaattttggctcactgcaacctccacctcctgggttcaagcatttctcgtgcctcagcctcccgagtagctgggagtacaggcgcacaccaccacactcagctaatttttatagttttagtagagacagggtttcaccatgttggtcaggctggtctcgaactcctgacttcaggtggtcactcgcctcagcctcccaaagtgctgggattacaggcttgagccaccactcctggcccaatatattgtgttttttttaagaggcaggcccatgtattgcactaaaaatactgtattaaagtaggtagccttgtaagtttactgttttatactggattcattagccgggagtggtggcctgtgcctgtggtcccagctactcaggaggctgaggtgggaggatcacttgagcctggaagttacaggctgcagtgagctgtgatcccgccactgcactctagcctggatgacagagtgagtctccatctctaaaaaaaaataagttaaaatgagaaagtaaactggagtcaatatattcacttaaaccagggtttttcacccttggccctattgacgctttggaccagataattatagaggactgccctgtgcattgaaggatttttgcagcatcctgggcatctgcctactagatgccagtattgcgataaccggttatatctcccggcattgccagatttcccaggggtaggcagatagacaaaattgttcctagttctgaaccactgttttatggtatatggatgtgtttatatatttattgtggtttagattcagcacactggattaaagtgggcagatctggaagcctagtgattcaaagtgggcaaaatacagtggcataaattaggtgtggtggctcacgcctgtaatcccaacactttgggaggccaaggcgggaggatcacttgagcccaggagttcaagaccagcccggtcaacagagcaagaccctgtctctattaaaaaagtatgtataccctggtgtaatgtcagcagatttacatgtatgtgggttttgttttgttttttttttttctgagacggagtcttactctgttgccacgctggagtgcagtggtgcaatctcggctcgctgcaacctccacctcccgggttcaagtgattctcttgcctcagcctcccaggtagctgggactacaggcacatgccaccacgcccggctaatttttttttttttttactgttttagtagagacagagtttcaccatgttggccaggatggtcttgatctgacctcgtgatccgtctgcctcggcctcccaaagtgctgggattacaggcgtgagccaccgtgcccggccttgtatgtgggttttaagtgggccaatgtaataagcattctgtttcatacctggggtagtatgtggatataagtatcagcttaaaatagggcaagtaaataaatctgtgttcctatctggcggtatgtcattgccttctatctttggacctagaaatgagttggttcaaaccaggcagatatgcagacctgtttgtatctggtagataagaaacccctggtttgtctgggaggttgaacagcggcttattgtggaatctctttgtgcctggtgttctcctagatccaattctggtacagcagttgcgccggacatacaaatatttcaaagattatagacaggtgagcagaagccctgggctcagtccccatgtctccagccctggcctccttgtctgagcgcccccatcctgtccctctcccacagatgatcatcgagcccaccagcccttgccttctcccagaccctctgcaggaaccgtactaccagccaccctacacgctcgttttggagctcaccggcgtcctct

SEQ ID NO: 21660 - DNA, 2300 bp, Homo sapien
cacaaaggagccagacccgcagtcacagcctatgaacttcttgacctccaagagccacagagacagagggagagaactctgttctgggaatcccccaggctggatctttgtcctcttggggactctgaggacctctgggtcttggtgtttcactgtcctcactgtcttcccagctggccactggctggaggtttaagaagcgcccaggcatcgagaccttgttccagcagcttgcccctttatatgaaattgtcatctttacgtcagagactggcatggtgaggctctggggcaggggagggaatattggtgtggtgggaggcgtagagatctggaggaccagggctcagcctgaccttttctcgctcccttcccacccccagactgcgtttccactcattgatagtgtggacccccatggcttcatctcctaccgcctattccgggacgccacaagatacatggatggacaccatgtaaaggtgccgtgggttcatgggtgggcctctgggatttggcggagttggcaccacctgagggaaggagggcccagctctgaccctagcctcacctggcttatggttctgcccagattcgattcctgctggcaggcacatgcctgcctctagccttggccagacatctgcacccttctttgttccctggaatctgggtgtgggagtggggggaaatggggtctctctaaagaagacagttgggggttagtggtaaggtcgtacgatttagaagctggttttatcttgctgtgtctgtaacttagtgtttctgggaaggtttgcttatagttgtacatatgagactggttggggtttgtttgacccgggctctgttactgtggccagtgctgtattcaggagtccggatctgcgaatgggcctctgtgggtctggctccaagtgtctgtgtgtctgttggtttctgtctgtgtcgtgtcggggtgggggttctgtgttgctcttggaaattccaaaatacgtgggctgtgatcgagggtcttgaagggtctgtgtctgggtgcctgtctgtgtggttccctgggtgtggctgcagatctgtctgcacctgtttacttgagtgagaggttcttaaacctgcaacataccacagtcacctgggcaggggttaaacacgagagtggccacctccctctccagggaacttcctaatcacctctctgtgtgctaggccctgggtctagaagtctatgtgattagctccccaatatcctgggggttgttttgttttttgtttctgagacagggttttgctctgtcacccaggctggagtgcagtggtgtgatgaacatggctcactgcagtctcaaccttctgggctcaagcgatcttcccacctcagcctcctgagtagctgggcctataggcacacaccaccatgcctggctaatttttatttttatttttatttatttattttttttgtgagacggagtctcgctctgttgcctaggctggagtgcagtggcgcgatcttggttcactgcaacctccccctcccaggttcaagcgattctctttcctcagcctcccgagtagctgggactacaagcacacaccaccacacccagctaattttttgtatttttagtagagacagagtttcgccatgttgcccaggctggttttgaactcctgagctcaggcaatctgcccaccttggcctcccaaaattctgggagtacggtcgtgagccaccgcacccggccattttttgtatttagtagatacggggtttcaccattttagccaggctggtcttgaactcctgacctcaggtgatccgcccgcctcggcctcccaaagtgctgggattacaggcgtgagccaccatgcctggccctctgtgggggtcgatgccatcatccaaagccggtctttgagaggccctgccattgtgatcccagtatgtgtgatgctgtgtatgtatgtatgttttgtgtgttttgggtcttcttgatggggggagagttgggcacagatgttgacctgatctgtcactcacttccaggatatttcatgtctgaatcgggacccagctcgagtagtagttgtggactgcaagaaggaagccttccgcctgcagccctataacggcgttgccctgcggccctgggacggcaactctgatgaccgggtcttgttggatctgtctgccttcctcaagagtaaggctgacccctgatcccttggcctctgaccccagagcccctgactctgaagaggaaggataaatgcatgattcatggctgggcgactgaggt

SEQ ID NO: 21661 - DNA, 2300 bp, Homo sapien
taaaagtagttgggcagagtggctcactcctataatctcagcatttggggaggccaaggcaggaagattgtttgagcccagaagttcaacactgcagtgagctatagttacaccactgtgctccagcctgggcgacacagcgagaccctgactccaaaaaaaaatcttaaggtttttttttttttttttttttttttgagacagggtctcgctctgttgcccaggctagaatttagcggcacgatcacagatcatcacagccacgcacgacctccttggctcaagggattcctcccacctcagcctctcacgtagctgggactacaggtatgcataacctcgctgggctcgttactttgttttttttttagaggcaggatttcaccatgttgcccagggtggtctcgtactcctggattcaagcaatcctcctgcttcggcctcccaaagtgtcaggattacaggcgtgagccactgtgcccagtctcaaacaaaattaaaaattcagtttctcagtcacactagccacatttcaagtgctcagaaactttatgtggggccaggcatggtggctcatgcctgcaatcccagcactttgggaggccgaggcgggcggatcacgaggtcaggagttcgagaccagcctaaccaacatggtgaaaccctgtctctactaaaaaaatacaaaaattagccgggcgtggtggtgtgcgcctgtaatctcagctacttgggaggttgaggcgggagcattgcttgaacccgggaggcggaggatgtggtgagccgacgtcgtgccattgcactccagcctgggcaataagagcgaaactccgtctcaaaaaaaaaaaacaaaggtttatgtggccactggctactgtactggacagtacagacctagaacatgaaccaaacatcacagaaagttccagtggagaacactgctacatatctgcctgttttagttagaagccaacattttatttttattttattttattttttgagatggagtttcgctgctgttgcccaggctggagtgcaatggtgcgatctcggctcaccacaacctccgcctcccaggttcaagcaattctcctgcctcagcctcctgagtagctgggatcacaggcatgctccaccacgcccagctaattttgtatttttagtagagatggggtttctccatgttgaggctggtcttgaactcctgacctcaggtgatccacccacctcagcctcccaaagtgctgggattacaggcgtgagccactgcgccccgctaggagccaacattttaaaatagggagatttaatataaaaatccctattttagctgggcacagtagctcacacctggaatcctagcgctttgggaggccaaagcaggaagattgcttaagactaggagtttgagaccagcttgggcaccaagaccccatctctacaaaaaaaaaatttgtttaaattagctgggtatggtagcacgcacctgtagtccccaggagggtactcaggaggctgaggcaggagggtcacttggagatcacttgagccgggaggtcaaggctgttgtaagctaagatcacatcaatgcactccagcctgggcaacagtgagaccctgtctcaaaaaaaaaaaaaaaatattcccaagttcttgcttcttttgaacaactggcgtgtcaagcaactccaggccccctttaccccagggccacactggctggagccaaccagcagctggcctgttgagaggggtaatctctggtccaccagaggcccactaggcccataacacattctctccacagtagcctggcagctacctgtctttaaagccaagtgccatcctctcttcccttctccacagatgaggagtctgtggtcagagggagatgtatttttcacagatcacgcaacacacaggaagacacagcgagggtttttagattccgagaccagggtgaaaaatctgctctgatccaacaaagcacccccactgtgcttggcagccgatcagccactgtgggacgatgacccaagagtcccggacctcaccctgatgcccccatctggagactctcgggacacagcaggtgtggcgtctgggatgtactttattggacaagtggtggcccaagtcttggtctggaagcactggggccctggacccaggcactgagtttgaggaggcccagagttcagggctgtttggagcgaggccacaagcggctggtgagggagccaaggaagaggttctgcttgttggacttggagagctcggccaggcgctgctgc

SEQ ID NO: 21662 - DNA, 2300 bp, Homo sapien
ctggaaggcggaggttgcagtgagtggagatggagccgctgcactccagcttgggcaaagaataaaactccatctcaaacaataataataaattaaaaaaaaataagggagtggaaaagacaaatacagggaaaaggagcctgggatgttctgcccaatctgacccatggcgctgccttgctcaaacgccactgttgtcagaattaagagaagaatctttaggctgtttttttctcctcctcctcctccttttctttttttttgtagaaaagtgtgtcttgctgtgttgcccaggctggtctcaaattcctggcctcaagcagtcccctgcctcagcctcggaaagtactgggattataggcgtgagccgctgtgcccagcctggtcttctttcattcattaaaaaattaactgcgcagggattagtggctcatgcttgtaatcccagcaatttgggaagccgaggtgggtggaccacttgaaggtcaggagttcgagaccagcctggccaacatggtgaaaccccgtctctactaaaaatataaaaaattagccgagtgtgttggtgggtgcctgtaatcccagctactctggaggctgaggcagcagaatcgcttgaacccgggaggtggaggttgcagtgagccaagatcgcaccactgcactccagcctgggcaacaagagcaaaacttcttcttctgaaaaaaacaacaacagcaacaacaaaaaacagagcgcctactgtatgcctggctctgctgggctaggcttcgttggttactatatcttacttctctggaaaaagacatataaattgaacctgtattttcccctataattattagcctctaagcactaaagttttttactttgggggggaaaaaaaagaagttaccccagctcaagggttttgccccatgcctggcagggagcaattatgaccagaggggctgggacatctgctcctaattggcttttcctgctgaggtcctggaatactaaagggtttctgaagggcccgggatgtccccccccccagttcttctggggtgggggagcgggtccctgtatgtgaagacggaatttcctgcccatttgctcctcacaccttccggaggccaaacgggcagcccagctgcggcccgaagggggaggggctcggccgcccggcagatggcggcatttacatacagctgggagccccctcttgaggccgagctcctcgccctggcgtctggtgcgtccgcgatgcggggtttgggagggtggctttgtcttgcggagggggaacacacacacgcctgcacacaggggtccacaaagagccctggatcttcatcgtatccacacacagctacacccgtggatctcccaaacccagtctcattcacacaaaccagcgcacacaggggtctacaaagaactccggatcttcatcgtattcacacgcggctgcatccgtggacctctcaaacccagtctcattcacacacaggcgccctcagccattcaccaccttgcacagcctctaccacacccgcacagagcacaaagtcacaggtttatacgcctatacaggatctcccataaacacacacgcacagagaagcagccacacagccacacaatctcaaagcgtcacacaatcacgaagtcgtgtacacttctagtgtcccactcgggtgtgcgtgcagaatcagaattgtttacaacctcataaatgtgtcaatcacacacaactccaggcgtatgctgagccgcacagtcccacgtggactcacaatgacaaagtcatgtgcaccctccggtagctctggttcataccacacacacaaaatcttaaaatcatgtacaacctcacacacaggcttagccccctaaccccaccccaccctagccacacaaaaagtcgcgggatcacccacgcatgacctcgctcgtgcccacgaccacagacggaatctcgctgttgctcctgcacgctccccctcccctgtgaccgccccccccgccccgcccttggtcccttggggccgggtagctgcctgaaggggcggggccattctctcagatataaggcttggaagccagcagctgcgactcccgagacccccccaccagaaggccatggtctccccacggatgtccgggctcctctcccagactgtgatcctagcgctcattttcctcccccaggtcagagccaggtgggaggtggcgtggaaagggatgaatgcggaggggaggggtgagtgcgacctgaaggtcctggggaaggagcgtggggcggacgggaagc

SEQ ID NO: 21663 - DNA, 2300 bp, Homo sapien
cccaaccttctggcaccgtgatcacagacttccaatctccagacctatgagaaataaatgtttaagccagtttatagtattttttttaataacagcctgagccaactaagagagttgggttttgctgcaataacaaatttccctcaaatcttactgacttacacaatcacaggtttcttttttgttcatggcacacatccaggccaccaggcttttcgtttttgttcaagagacatagtcttgctcttgttctgtcacccagtctagagtgcagtggtgtgatcatagctcatggcagcctcagtcttctgggctcaagtgatcctcctgcctcagcctcctgagtagctggaactgtgggtgcataccagcatacctagctaagtttcaagttttttgtagagaggggttcctggtatgttgtccagtctggtcttgaacccctgggctcaagcagtccccctgggctcaagcagtcctcttggtttggtctccagaagtgctgcaattacaggcagggttttaccatgttggccaggctgatcgtgaactcctgacctcaggtgatccaccggcttgctctcccaaagtgttggaattaccggcgtgagccaccgctccccatcaggggcttttttttttttttttttttttaaatcagtctctaacactggaacacttttctgcttcggaagtaaaaccatcaggctgttagacacagacacccctctcttggcttccttcaaattactgaaaacaagtctctccaccccctaccgtaccaaccaaccaaccaaagactggccagcacatgctgtagtctcagaactttgggaggccaaggtgggaggattgcttgagcctaggaggtcgaggctgcagtgagctgtgattgcaccactgtgctccagcctgggtgacagagtgacagcctgtcctcccaaaaaataaaaaaatgttttaaaaagtacatgtctgatgtgcttacaaaaaataaaagaagatccttggttaatggccctgccccttactccaaggccatatttgctgtgctcactgtctgggctctagtcctgctgcctccagctaactcctcctttacctggctaaccctttgtctctttattaatgccataaacatttattgagcacctactacatgccagatcttattctgggagctgggaatacagcagtaaacaagacggacaagaccccatccttgaggagctcacagcttgacattccttctcaaagtggttaagccccaggatgctggagcctgacgggttgagtttgaatcccagctctgccatttaactagctgtgggcaaatgtttagcgcctagtactgtaataaatgtgaactctcagccgggcgcagtggctcacgcatgtaatcccagtagtttgggaggctgaggcgggtgggtcacttgaggctaggagttcgagcctggccaacatagtgaaaccccatctccactgaaaacacaaacactagctgggtgtggtggcgggcacctgtaattccagctacttgggaggatgaggcaggagaatctcttgaatccagaaggctgaggttgcagtgagctgagatcatgccactgcactccagcctgggccagagtgagactgttgccgtggtgctcatcatcagtctccagatgtcagttgtccccttttctagtgagccgtctctgattgcagcaggctgactgaacctattctgggatcccacagctcctgggctccctcatccctgccctgaacgctctgggctgtagccctttggtaatgggtatgtgtcccctactggacagggagcctggtgagggcagggaccagggctttcctgatgcctgctctgtccccaaattcacccagcagagaagtgtgcacgcagcaggcactcagtacacatatgctgaacacctgagtgtcaccgacagctgcggaggcactggggcaatctgtgtgtttctcagcctggcgtcgggggttaagggggcgggaattactcggcgaggtcgggaggtcgcgcggtggaacccgggggccaggtggaactcggtgtaacagagcccccagtggtcgcgccgcgtctcagaacccggtgcgggagacgctctccccgcccaaagagggaaggcgggcgggactccccaaccggcttgccccggtccccctgggccccatgaataaccaggcgcggaccccagccccctcctcggcgcggacttcaacctcagtccgggcttctaccccgacccggacaccgactccactccggaccc

SEQ ID NO: 21664 - DNA, 2300 bp, Homo sapien
tagttctggagtcctggaagccatgagatgctcatccatcacaaggccatcacagccagtaaaatgcctgaggaaagcagcagagctggccgtgccagcatttacacagggaacacttcttgggcagccaggtgtcatggagcacagacccacagttctctttgcacacatcgtgctcacagttccatccatagaaggacggggggcaggcacaaaaggaccccaatgcaggttcccccattcaggcagcaggttctgcttagctccttactgtcctgtatccccatgggcagcacacgctgggaagactgaggccgaattgcaggctcctcctggggccgaatgctgtcatttctgaaggccaggtctccctgagatggacacgcaagttcctgatgacccagcccagcaactaatcccagttcaaaggcttcaaaatggccatgatccaaatcacactggaagagaagcaggccatcttcctgcagtccatagctctgttgttgtccccttgaagttaccttccagagaagtcctttcttttgtcttctgtggaatatcacaaatgtgctttttgaagcatatatgtcacatgtaggagaactccatctctccaagagaactgtagaaacaaagtaaggtacacgtgagtcagaatgatttccaacccaatcagctcccagacacgacctgtgataggtcagaatttttagatggatcctcctgaagttcaattgccagcaactctcatatttggattccagctaaattcaaaggattttttttcgagacagggtcttgctctgtcatacagggctggagtgcagtggtgcaatcatagctcactgcacagtccacctaccaagctcaagtcatcctcccacctcagcctcctgaatagctgagactacaggtgcacatgccaccatgcctgcctaattttttttttctgtagggacaggggtctcactatgttgcccaggctggtctcaaactcatgggctcaagcgatcctcccacctttgcctcccaacttgctgggattacaggcatgagccactacacccagccacagctgactgattttaaatggaacatagactttcacgttttgggttatcatcaggatcagagctagccacacagaaaggctaaccatatcattagagagttggggcttggagccatgtgatatcaggtaggaggctggagattgacttcaacaaaatggacgatggtttaatcaagcatgcctaggtagtaaaaccccagtaaaaactctggacaccaaagcctgggtgagagtcctatgttagcactacccccacacttattgccacacatggacgacaaagggtaacacatccctaggaacacaggaacttcacatttggaaccctccccatcccagattgtgccttatacatctcttctaatctgtgtcctttgcctgtaataagcatgactgtgaatataacagatttcaatgagctctgggaattatcaaacctaaaggtggttttgggaaacccccaaacttccagtgtcaaaatattacttacaggccaggccgagtggctcaggccggtaatcccagcactttgggaggccaaggcaggatgatcacttgagtccaggagttcgagaccagcctgggcaacatagtgagacccaatttctacaaaaaataaaaaatcagctgggtgtggttgtgtgcacctgtagttccagttactccagaggctgaggcaggaggatggcttgaggctgggaggtcaaagcagcagtaaccgagatcgcaccactgcactccagcctaggcgacagggcgagacccagtctgaaaaaaaaaaaaaaaagacaggagctggaaaatgaccgtataaggaactttacattaatactgaagtggttgtaatttaagataccgcgcagtccgcaggtcctcaggcgctcagaggaccagaggcggctacagacgtaatggctactcaggaccgctagggaacgctagaggattggccaccgtgcttacgcatgcgcacactctggcacgcacagcgtttacgcgctcactgagactcgcgcatgcgcaggtctcgcatacagcagtgcagtgccgttattccagtctccgtagaaacgctgggactatggcggagccgactgggctgttggagatgtccgagctccccggagatagcagtgtcccacaggtgggcaccgcgagtggcgtcagcgacgtactgcggggggcagtcggcggcggggttcgggtgcaggaggctcgggaaggccca

SEQ ID NO: 21665 - DNA, 2300 bp, Homo sapien
gttttattaatttggtgcttggaccaggaaaattaaaatgcagtcttgtgctctgtggatgagaccttactgcctcagaatagctacttctgatagggcagagaacgataagtcacttaagtcatttgttgatggtcatgaatcatggcatcatgacggggaccaccaccagcaaaatcaaatcaaattattttgtttgttcacattaatcagaacaaagggaaattaattggagagtcagtatataagatgcatgttttaatattacaagatccataaaagaatggtaataagccgggcacagtggttcacgcctgtaatatcagcactttgggaggccaaagcctggcggatcatgaggtcaggagttcgagaccagcctggccaatataataaaaccctgtctctactaaaaatacaaaaattagccgggcatggtggcgcgcacctgtaatcccagctactcaggaggctgaggcaggagaatcactggaactgggaggcagaggttgcagtgacccaagatcacaccactgtacttcagcttgggcaacagagcgagacttcataaaaaaaatggtaatgaatataataactatcaagaaaataaagtatttataaaccataatgaaaatgtaggctggaggccgagtgctctggctcaccctataatcccagcactttgggaggctgagacaggcgggtcgtttgagcccaggactttgagaccagcctgggcaacataaggagaccctgtctctacaaaaaaattaaaaattaactgggtgtggtggtgtacacctgtagtcccaggtactcaggagactgaagtgggaggattatttgagctcggaaggttgaggccacgttgagctgtgattgtgccactgcactccagtctgggtaacagaatgagatgaaagaaagaaggaatgaaggaaggaaggaaggaagggagtgagggagggagggaggaagagaaaatgtgaatggatgaatctcataaaaataatgcacaaaaaaacagatacaagtgtgtatgtgagaaaacattttaaatggtccatttctgaggcatgataaatctaagtactggcagccagcctgcaaatataacaaactgcagggctcatccacctagaaggtcacaataagggaacagaatgtagaggcggggtcagcccataaaagggaagaaagtggccggcgcagtggctcacgcctgtaatcccagcactttgggaggccgaggcaggcggatcacgaggtcaagagatcgagaccatcctggccaacatggtgaaacctcgtctctactaaaaatacaaaaattacgcaggtgagtgtgtttctcacatagataaagttcagaatacaaaccaaactaaactacagcattaggaatgcacccttaggtggtaaaatgaaaagaaaaacaagaaagtgattaccataagtatcagcatagttgttacttctgcgtagaaaggaaaggatagtgataagaagaagaggaagggttctgggatgctggaaatattccacttcttggactgtgtggtagttaaacggatgttcactttgtgataaatcattcagctgtatatttatgttttgtttacttttctgcatgttatattgcacaaataagattcgaaaaacaaatgtccaaggtagtcaatgcaatgttaaagataacacgaaaagactgtaattacaaagctttggtagctaggacgatccgtatggatgaagacaggcaaaggaatgaatgaaaaacaatttaaaaatccagaaaagaccatgaatctaaaatatcttgatatataatagaggtggcacataatcactggagaacaaagagaaacaccctaggacagaaccttgagaacgcctacaagaagcgatcttgtaagcgttcctcataaacatcaaactggttgaaatgtcccccgcccttcgtcgttgggatgtttcagatgcgttggcgcttcccggcctcgagggggcatctggagaacggcgggcgccgggaaagtacgcatgcgcactgctcccagggtttgcggtaagaatctatgctctcgcgcccggttacgcacactgcatttacagcgcgcatagcgcccacgcacgcgcactggggtgtccgccgggcatcgctctgtccagttattccagtttctctgggagcagccgagttgaccccacggtctgagatgtccaagctgcccgcagacagcagtgtcccgcagacaggcgcggcgaatggtgacagagacgtcccgcaggcggaggta

SEQ ID NO: 21666 - DNA, 2300 bp, Homo sapien
atcctggaagacaacctagacaataccatgtgggacataggcatgagaaaaatttcatgatgaagatgtcaaaggcaattaggagaaaagcaaaaattgacaaacagaatctaattaaactaaagagcttctgtacagtgaaggaaactatcaagagagtaaacagacagcctaaggaatgggagaaaatgttctcaaactatgtatctgaagaaggtctaatatccgagcatttataagaaatttcaacaacttcacgagaaagaaacaaacaaacccataaaaaagtgggtaaagagcttgacacagtggctcatgcctgtaatcccagcgctttgggcaaccaaggctggtggatcacttgagcccaggaatttgagaacaggctgggtaacatggcaaaaacccatctctactaaaaatagaaaaaaaaaatagcctagcatggagacatgcacctgtagtcccagctactcaggagactgagcttagaaaaatcacctgagccccggagccagaggttacagtgagccaagatggtgccacatcactccagcctgaatgtcagagtgagacctgttttaaaacaacaacaaaaaagttgagcaaaggacacgaacagacacttttcaaaagtaaggatacaggtggccaaaaaacatataaaaaagctcaatatcactgaacattagagaaatgcaaatcaaaaccacagtgagataccatctcacaccagtcagaatggctgttattaaaaagtcaaaaaaggacagatgcttcaaggttgtggagaaaagggagaactcacacattgttggtgacagtgtaaattagttcacccattgtggaaagcagtgtggtgattcctcaaagagctaacaatagatctaccattcaacccagcaatcccatcactgggtgtatacccagaagaaaagaaatcattctgccataaagacatatgcacatgaatgttcattgcaacactatgcacaatagcgaagacacagaatgaacccaaatgccaatcaatgacagatcggttacagaaaatgtggtacatgtacacaatgaaatactatgcagtcctaaaaaagaatgatattatgtcttttgcaggaacatggatggaactggaggccattattcttagcaaactaatgcaggaacagaaaaccaaatactgcatgttctcacttatcagcgtgaactaaatgaggaggctcatggacatcaagagggaaacaacacacactggggcctccttgagggtggaggatgaaaggtggaagaggagaaaaaaaataacttttgagtactacacttagtaaccaggtgaagaaatcatatacaccacaaatcccatgacacgactttatctgcatatgtaccccgaacctaaaataaaatgaaagaaaaatcaaataaaaacaacaatctcaccttcctcccagaatctgcaggagaaacagtgtctctgaaacttttatttacatggacaccaagagaaaggagagggtgtagctagagcccaggtgtgtgacagtcaggtgagagtggcccttacctggcagagccaagcagcctagtgtggaataggttcatgcaagaaatttctctgcttctctccacagatcctcctgaggatcaaggtcagtgctctcccagaacgttcaaaagcagagagaatcattaccttctagggctaatgtatttccccaaaatctccaacttttttcttttcagccgttgtacaaattgggaaaatgtacactttctgggtatattctgcatagatgagaaaaggcttgagaggcataaaggctgggctttacaaccactaccgctcactccatcatctttatctatgcatttccctggtaacccaatccacagcctggtaactcccccactgtcacttctgctgcattacagatacagacctgcaaatagctatggttgtgactgagtttcttcctaacaactaaacctgtctaaagctgcaaggaaatcttgctgggaggagcttggaatctggaatgaagcccgagggcaaggctgaagtgggtcatttaaatgctgcaactcagagattcactcagaagactggactcaattctgaaggtcgccaagaaggagagaacaatgtcttctttacccgtgagttgaaaaggcacagccttcaaaaatttcgtgtcacacaaaccaagaaagaaatgggagattttatgagatgaaaatatgagcatttttgctgtgaatgctttacttagagctattgaggtgtggaatagaaaccc

SEQ ID NO: 21667 - DNA, 2300 bp, Homo sapien
tcttattcagattcaagcgagggatcttttcctatgcttagaagtttttgaaggtaatatcctgtttcacaagaacagttctcctttcattctataagaaccctgggtttccttctttgccactaacacctcagatgtaggttactccaaagagaaactgtgccatcagtagtgaaaaacaatcacagttcatggaactgaaaagtatgcattcaacgaacatggtctagcactaaccctgtggcaggtcctgtgcgagatgcagggtctcaagttcctgagacacagtccctggcgatggggatcttccaggttagaagggaggctgagtaagcaaagactttgtgacacagagtatagaacttcgctagaggaatgagtggaaacattagaaataaagtcgggtactgtctcaaataggcacaaaacgtcatctgtaaacataagtgtatctaatacgttaacttgtataactaggaattttcttggggaatgttatttgtaccaggacagagtggagaggaggccgaaaacttgtttggtggcatgctttctttctgatgcatttttcctcttgtagataaaggtcaatggcatacgcatttacggctttgtccatcgaatcccgccatcatttgtgaagatggtgcaagtgtcgagagatatctccctgacctcagtgtgtgtctgcaattgagggagatgatcacactcctcattgttgaggaatccctctttctacctgaccatgggattcccagaacctgctaacagaataatccctgctcacattttcccctacactttgtcattaaaacagcacgaaaactcacatgatttggttcttgctttcagaggggaaaagaggaagttgtcatccccaaggggggccagggcattctatgggaggcatcaggaaatcaaaggggataaaccttcctgtgacaaagggagtgagtgacaaggtccgtggaatgtctgagaagacattagaaacagcatccttctatagcacgtagttgacctcagacagtctgagctaaaatacttacccaatctcaaatgactcaaggcacttaaatgttaggtagctgtttacagccacgcaagtgtacatggtggctttggggaaaatctgtaactcgaggaaaattatgtggaatttcttaatttttttccattgttctcaggatgcttactgtgtatgaacactgtgcccggctttgtgcgggctgctgtgaaggaactgaagaaaaagatgacaagtttgcatgtgaagttttcaatccaagtaatagtttagagaatcactggagcccagtgatttcccttaaagaatcccaattattcttattttcaaatatttgaaaattgcttcattttatgtggggagaatccaggggtttctctttggaaatgaatggtcatgatttgagatcagagaacatatagattattattggaatagatacaagtcacgtacattgacacagtgagcagacccttatttgttgcttttccagtgatgaattgcagcacagcaaacctcacaacacacatcggctaaaagcaatcatttattttgatctctccccgcttcacaggtttactgaacttaagtgagtggtagattatgtgacgggagtcgcgttttctgagagatcttttaggctgggatttcagaggatgctttactcatgtccaactcaacagcaggactgggtgaacacatagaaactgggaagctgtctccttcaatacctcaccttcccatgcatgacattaatttcctaaaatcaggagagtctcatggttctgggacttaataaatggtgattggctttcaccaaagaaagcctttcaaaaggctcatggagaaggtgcacagcatcacaggacttacctttgaatggcagacagtgttacttctaaggttttacattgatcaaggtgagtcatacagacggccctaatcaaaaggagaggactccacaagctgtggttattgtgactgtagtcatgaggggccatccttggcaactagttccactcagaactagttcccacataccgaaaacactaaccatgtaaggaatctcaggctgggcgcggtggctcacgcctgtaatcccagcactttgggaggccgaggcgggcggatcacgaggtcaggagatcgagaccatcccggctaaaacggtgaaaccccgtctctactaaaactacaaaaaatagccgggcgtagtggcgggcgcctgtagtcctagctacttgggaggctgaggcaggagaatggcgtg

SEQ ID NO: 21668 - DNA, 2300 bp, Homo sapien
taagatggtgtgattgctgtggaaaatattatggcagttcctcagaaaggttactcatcataatatacatctctttagcaactgggatacattttttctatcaatggtttaaattcactggcaataaaactgaagagaaaaatgaagtaagagggagaaagaaacaagggagaaaggaaattcgaattcacttgacctttaaattctaatatatgttttaaggctgcttcctttcatcatgaacagagaacttgagtcctccacaccagttgaagaaaactgcattgtgactgaagtccaatcacctgtacctcacacagtctggaaataaggaacacacaaatcaagaactagacaagaaattcaactttctccacaaatcttcttgggaaagagtgtctctgaaaattttgatacccttggacactcagaaaagaaaagggtggagttagagcccagctgtgtgagaggcagatgggaactggcctcacctggcaaagccaagggaaccagtgtgagaccaggggggacacaagggctttctctacctccttccataggtcctgtttaggatcaagaccattgttctcccagaacctctataggcaaaaagaaggattaccttccgttgccaataatttccaccagaatcctcactatttttaccattgtacaaattaggaaaatgcacacattcttggtagattctgcacagtggagagaaagcttaaagagaggcatggaggctggactttacaacccctcaacctcactccatcatccttatctgtgcatttccctggtgacctctttttcctcctggtgcctcccccactgtcatttctgctgcatcacagacacagacttgcaagcaagtgtggttgtgactgagtctatttctgacaccttaccctttctcaccctgtggggaattcttgctgagagggctttggaatcaggaatgaagccagagggcagggctgacagggaccatttaaatgctgcaactcctagagattcacatggaagcctggacacaattcagaagagccaacccaaggaagcaaaaatgtcaccactacctgtgagttaaaaaggcacagccttcaataatctcaagtcacattaaagaaggtggaaaaagggagattttatgagaggaaaatatgagagtttctattgtgaatgttttactgagattggaggtgtgtggaagacagagaccctgggactatgatgtctgagatgtttgtggggtgtcaggtgtggcccatggaccagtgtaaccctctgtgagggtgtgatagtgtctgatgagagtcaactctgctgagatgatgttacgttaggtaaaaggtgtaaagcccaccaggatgggtgggacgtgcctgagtgtaagagggtgactgtgttttgtcttcctgtctgtgatgtgagtgtgtgtgagcacacccagaccaatgcatgagcatctttatatggacagtgagcaggcatgtgtgactcagtgagtggtgtggctctgtgtgactgtggtagtgtgtgtgatgggatgtgactaggtgttgaactgggaacatgcacgtggccttctgtccatgtgaagtttcctccttacacagcagggcctctgatgaagcagctgtgcatcttcccatgtgtgtcagtgtggatcccgggtggcagaactggtggggatcttggggactgggagttaccaatgactcatttgtgagcattaatgagagcagaatgtatgatctgtagatgtctcttcccaggcagagtggaaaagaggaatccagactatgggaacaatggtccctcaggtggggtctgcacatagtgaccatgatctcctgcctctcatcctcaggtcttttcctgtctcccacccaaggctgccattcccattgtaggtcaggagggtgtgcaagtcctggctctctgaggaagaacattggagactgtggttttagagactgaatcacctcaaactggaaaggaacaagggtagcctcagttcagatagagtttacagtggatattaatcatccaagtagctgggtttgctggctcatgtctataatcttaccattttgataggcaaaaatgggaaaataacttgaggccaggagtataagagcagcctgggcaaaatagtgagacaccgtctttacaaaaactttaagtgtcagacaggcaacttggtgggcattttttttttgagacggagtcactctgtcacctaggctggattgcaatggtgcaatcttttcttactgcaaccttcgcctccc

SEQ ID NO: 21669 - DNA, 2300 bp, Homo sapien
agcttaaagataagcctatagaccagtggaacagaattgagagtcaaaataaatctaaacatccatcgtaagttgatttccacaagggtgccaagatcattcaatgtgggaacaaattgtctcctgaataaatggtttttggtttttgtggggttttttgtttgtttgtttttaacttttattttaagttcaggagtacatgtgcaggatgtgcaggcttgttatacacgtaaacctgtcatggaggttttttgtactgaatatccacatgtaaaagaatgaatctggaccctcaccttatactatatacagaaattaactcaaaatggatcaacaacccaaatttaagagataaaactgccaaatatgggccaggcatggtggctcacacctttaatcccagcactctgggaggccgaggagggtggatcacgaggtcaggttcctggctaacacggtgaaaccccgtctttactaaaaatacaaaaaattagcggggcatggtggcgggtgcctgtagtcccagctactcgggaggctgaggcaggagaatggcgtgaacccaggaggcagagcttgcagtgagccgagatcacaccactgcactccagcctgggcaacagagcaagactccatctaaaaaacgccacccttgtatcttaaagtccctcatgactgtactactctgtgcaggccctccaagaatgcggtgttgcttttgctttcctatttttgtaggtggaagcagctctaatggcttccattgccctttcctactatcacattcctccctgcacaggtcagacaaccaatgtgggattctgccatttgctgagtgtgtccattccacttctgcaacctgacactgagcaaataagcagaggatggatgtggggccaactgggcagtgccaggtgcttccagtgctttcactttcacataattccagctgaacttggaaccgacttaaaaacaggatttgattcccctttcacttctacttatgaagacatcaatagatttccaggaaatcccacgtggagaggaaactgattttgtaattcactgcttgagtctgatgcatactctctagttagtatttcagacacaaatcacaggaacaatatttgctgcttgaggaaacagctatgaagacactgagagtagatacagagtgtcttgcctgccctaggtgaactggcaggaaataagaatctctgtgtccctggttgctttaggaaagtagaaacctatagagactaggagaactttctataggtgtgagaaagtgtgtgaggaaaagaggaggatagtggacagcatagagatttctggactgagacgggatttcgggcgtgaataactgagtgagtagcagcgtggaaggggctgtgtctgagctgagcagggctgagtgggaactgcgctctctacactgaaacagagtagggacctcatgggggctcccttcccctatttggactccaaagtgcacaggtgcctccgctcgaccaggaaaaagaagagggaaattcatatgctctctgccctcagttcaggaatgggggatgaaccatcccatttctggaaatgttgagacccagacttagcaaaggctaatttgttgatttaaagagtgctcatagatgaccatgcccttctaccatcctcctttctgacttagaatgggaaaagtcatgtcatagaggaggagctgtgggctcaaatagtggacaaggcagtcagtactttgcagagtgtcaatcttggtcagagatggatgcaaggcaaaccctttgaccagggcacacaatgacatggcttcatgagaagcatggaggctgaagtgcacaacttcccaccctcactccatcatcctcatctgtgccttccctggcgattccctgccccttggtgtgaccctccgtgtcgtttctgctgcagcacagtcacaggcctgaaaactgaaactgagtctatttctgccacccctactcacgctgctgagaaatcttcctggcaggggttcagagaaagaaataaagccagagggcagggccaagagggactatttaagtgctgcaaatcagagactcacacagaagaccagatactattctgaagaactacacagagggagacaacaatgtcatcactaaaagtaagtcaaaagacacagcctttaataaactcaattcacataaaccaagaaagaatcaggggtgatttcacaagacgaaagtatgagagtttctcttgtgaacactttactgagagttgtgggtgtgtgaaagagaaac

SEQ ID NO: 21670 - DNA, 2300 bp, Homo sapien
taaaaaacaaagaaaaaaaccaatgtcacctttcttctggaatctgcaggagaaacagtgtctctgaaactttgattcacatggacatcaagagaaaggagagagtattgctagagtccaggtgtgggacagacagatgagagcagccctcacctggtagagccaaagggcttagcatggggcaggttcatgcaaggacgttctctacctcccccccggatcatcctgaggatcaagggcagtgctgtcccagaatctttaaaggcaaaaagaacaatttaaaggcagaatgtatgatctgtaggtgtctctttccaataagtgtggggaagaggaatacagactacgggggtactggtcccttaggtgaggtctgcacagctggtatgcagtaccagctactcaggatactgagctgggaggatcacctgagcccaggagccagaggttgcagtgagccaagatggagccacaccactccagcctgaatgtcagagtgagacctgtcttaaaacaacaacaaaaggcgagaaaagacaagaacagagaacagatacttttcttttcttttcttttcttttttttttgagatgaagtctcactctgtcccccaggctggaatgcagtggcatgatcttggctcactgcaagctctccctcccgcattcatgccattctcctgcctcagcctcctgagtagctgggactataggcgcccgccaccggcccggctaatattttgtatttttagtagagacaggggacgcttctcaaaagtacacatacaggtggccaacaagtatataataaaagctcaatatcactgaacattagagaaatgcaaatcaaaactacaatgagataccatctcacaccagtcagaatggctcttcttaaaaagtcaaaaaaggacagatgctggcaagggtgtggagaaaaaggagcacttacagattattggcggtggtgtaaattagctcacccattgtggaaagcagtgtggtgattcctcaaagagcttataacagaactaccattaaaccccgcaatcccattactgggaatggtgtatacactactgtatacacagaagaatagaaattattctgccttaaagacatatgcatatgaatgttcattgcaacactgtgcacaatagcaaagacacagaatgaacccaaatgccatcaaggacagattggatacagataatgtgatacatatacacaatggaatactatgaagccctaaaaaagaatgagttcatgtcttttgcaggaacatggatggagctggaggccattatttttagcaaactaatgcaggaacagaaaaccaaatactgcatgttctcacttataattgtgaactaaatgatgagactcatggacaccaataggggaacaacacacacagaagcctacttgaggttggagggtgaaaggtgagataggagcagagaaaataactattgggtactacgcttagtacccaggtgaagaaatcatatgtaccacaaacctcatgacatgactttatctgcatatgtacccctgaacctataataaaagtaaaaaaaaagaaaaaagaaaaaaaatctcatctttctcccagaatctgcaggagaaacaatatctctgaaactttgttttacatggactccaagacaaagcagagaatgcagctagagcccaggtatgtgacagacagatgagagtgaccctcacctggcagatccaaggggcctagtgtgaggcaggttcatgcaagaactatctctacttctcttcccagatcctcctgaggatcaaggtcaaaaggatctgacccttaaaggccctcccagaacctttaaaggcaaagagaagaattaccttctaggtctaacgtctttttccaaaattcccaattttttatttttagtcattgtacaaattgaggaaatgtacaccttctggctagattctgcatactggagaaaaagcttgagaggcacaaaggctgggctttacaatccctacccctcactccatcatccttatctatgcatttccctggtaacccaatccacagcctggtacctcccccactgtcatttctgctgcattacagacacagacctgcaaacatctatggttgtgacagagtttctttctgacacctgagtctttctcctgctgcacggaaagcttgctgggaggggcttggaatctggcatgaagccaaagggcatctctgagttgcagcatttaaatgatcccactcagagattcacacagaagactggacacaattccgaa

SEQ ID NO: 21671 - DNA, 2300 bp, Homo sapien
tgcggatcttcttaaaagaaaacaccggttatcactacatggcataaaaccatggcactgaaagttatgcattcaatgaatatttattgagcacttaccttgtgacaggcaatttatgtggtgcagggatgttccaggatagagaggtgactgagcaaacccaccttgctgtatagagtgttagaacatcgctggaggaacaggaaaaacagaacacaaaatagaaagagtgctctgtaacaagaagcatggttgctgggttccaaactgtgattaaattttttaaaaattttaactgtattatgacctttatttttaaaatgtttatacaaatcatttaagtaatataataccttcttgtgggtaaaattcaaacattacagatttataccttgacctcatttcttctaaacccagtgtccccccctacaaggaatgccttcttttgacattttctagtgcatttatgaatgtttgtgtgtacttatgagatcaattttatttttttgtcgttaaaataattggtctcgtattatgcatgttttcttcatgccttttcatactacagcatttcttgaagatatagccatgccagtactgataattttgtttttcttttatatatagtctatgtactggctacttaattaaaaactgtactgtaaaaaatttcaaatgtttgcaaaaggagagaactgtcatccccagattattttagagcaaatcccagatattatataatttcatacacaaaacctaaagtttttcgggggaacagtgtgtgcttggaaagatgtagttgaaaagaaagactgaaagcaagtcgtagggcataatggatttctgaagaaatagttgcaaccagcagaagtatgggctattgtgcagaggatatggaagttaaagaagatcaatctctctgcatcactgaaaggattgctggaatgcctgagaagtaaataacatcaacatctttatccacagcttactaggtggccagacgccctgaactgatatttcttccccagttcagatgaatagctgggatattactcaaaattctattgcatatctgttgcaaggaaaagcagttcctctttcccttctgtggtaatttcttacaagctacagttctgggcagggtgtgagggtggttgcctagaacggggtttccaaagctccttaattgtggcctctgacccttttcattgcttccatgtccatacccagagtcaaaacccaaggaatgcagtgggatgacattacaaattaatcttaaggaaatacgttatataccaaaagaactgtgtgattgtgctgatttatatgagcagaatcttggagtgcatgcttggaaatgaattgtcaaggttttagatcagggaaagtggaatttattgtcgggtcaagcacaactaatattaatgctaatgcatcctcatcgcttagctcccacttatgagtgagaaatctcacctttctccaagaatctgcaggagaacgacagcctcagattttgattcacatgaaaagaaatagggaaataagagggcgtacctaaagcccaggtgtctgagagacagagtgggagtggctctcacctggcagagccaagggatctgagggtgggtaaagaagacacaagtgttttctctacttctgtccccaggtcctgcgaatgatcaagatctatgctctcccagaaccactggagaaggaggaggaggattttctttcaaagccaagtgccttgcccccaggatctccagctttttaccattgcacaggttaggagaacgcacaccttcctggtagattctgcacagtggagaaaaggcttcatgagaagcatggaggctggaactcacaccactcatcctcactccatcgtctttatctgtgcatttccctggtgaccccttcctcctccagtacctccctcactgtcgtttctgctgcatcacaggcacaggcctccaaacaggtgtggttgtgactgagtctgtttctgacaccccaccccttctcactgtgtgaggaaaccttcctgggaggggcttggaatcaggaataaagccagaggcagggctgataggggccatttaaattctgcagctcagagattcacacagaagtctggacacaattcagaagagccacccagaaggagacaacaatgtccctgctacccgtgagttaaaaaggcacagccttcaataatctcaggtcacacagaaaagggaagagggagattttatgggatgaaaatatgaaaatttctactgtgaatgctttactga

SEQ ID NO: 21672 - DNA, 2300 bp, Homo sapien
aaatattgtctagtctttttcagggtagatgacaggatcaaattagtcaatataatatgaagtgtttagaaaagatcctggcatagaatagatactagataaaagctaggtgcatctttcacagcatttttatttggaaataatggagaactctcccatgcacccttcacaaggttcaccatttgttagccttttgctacatttgttttattattctcaactgcattattactattattaaagaagaggaagtagaaataagccaaacaattcctgggtataaaatttaagcactggcttttagataaataggactgtttaaggcttcctgcttcaaatccaaaacaaaactaaaaactttttttttttttaatttgagacagagtctcgctctgtcaccaaggctggcgtgaagtggtgcaatctcagctcactgcaacctctgcctcccaggttcaagcaattcttctgcctcagcctcctaagtagctgggactacaggcgtgtgccaccacacctggctaacttttatatttttagtggagacggggttttgccatgttgctcaggctgctctggagctcctgagctcaggcaatctgcctgtctcaggctcccaaagtgctaggattacaggcacgagccactgcacccagccaaaaactttcattaagccttttatcacatttcctaaacccgagtgtcttagcccattttatgcagctatcacagaatgctatagactgggtaatttatttatttttatttttatttttatttttttgagatggagtcttactctgtcaccaggttggagtgcagtggtacgatctcggctcactgcaacctccagttcctgggttcaagcgattctcctgcgtcagcttcccgagtaggtgggactacaggtgtgcgccaccacacccgactaatttttgtatttttagtagagatagggtttcaccgtgttggccaggatggtctcaatctcctgatttcgtgattgagccacctcggcctcccaaagtgctgggattacaggcgtgagccaccacgcccagccttagactgggtaatttataatgaatggaaatttatttggctcccagttccaaaggctggaaagtccaagattggaggtctgaatctggcgagggccttcttgctgtcatccattggcagaagggtgagagcaagatagaaagggggcataatcatccttttaatcagcaacccactcttgtgataatagcattactctattcaggaaggcagaggcctcatgacctgaatcatctctcgaaggtcccacctctcaactcttgcatttaagggttacgtttccaacacatgaactttgggggacacactagaaccatagcactgagttttacttgaattaataatgaaaacatctggtttaaagagcacacaagagaaaaacagcccaaagccctgttgtagacattagtcctttctcctctttaggccaactgcattgactccacagcctcagccgaggccgtgtttgcctccgaagtgaaaaagatgcaacaggagaacatgaagccgcaggagcagttgacccttgagccatatgaaagagaccatgccgtggtcgtgggagtgtacaggtgagcaggggcccagcaatacaccaagacagacatctctgtcccttgcaccccgagtgccatgatcctggggaccctccttcatcacctatcttcctctcacaggccaccccccaaggtgaagaactgaagttcagcgctgtcaggattgcgagagatgtgtgttgatactgttgcacgtgtgtttttctattaaaagactcatccgtctcccatgtctgctgctcattcctccccttgacctgctgacacagggagcacgcacccttggtcaattttgcggggttgggtaaattctcactcggtcacagagcgcatgctccgtttctagctgcctttgcgcagcggcagcctggatttcggttcttgggtgggattggtagctcgctgcgcatgcgtgcaggtaagcggccatctcgcgcaggcggagtgtcagtgtgggtcacgtgaggggagcggagagggagggatgggggcggagtccagggcgtgggggggccggtttgttgtggtcgccattttgctggttgcattactgggtaatcggggccctggcttgccgcgtccgccggataccctcagccagtgggcaggtctgagctcgggctccccgagcagtttgagtccccttgcccgctccttcaggtaacggcgcggggacgggtg

SEQ ID NO: 21673 - DNA, 2300 bp, Homo sapien
aaaatagcatgtattagctgctgtgtgaaaagtggactgtagagggagtagaagattaaaagtaaacaacttttggttgtttgggagttttgaaaatgaaaccgttcatttttaaagattaaattaggaatggctgttaaaagacacattttttatctttaataccattaaggtgcatgaagggttcgtaggacaagatcataatgtatctttacaaaaaacatgagcaaggctgggcgcgctggctcacgcctgtaatcccagcactttgggaggctgaggcgggcggatcaagaggtcaggagattgagaccatcctggctaacacggtgaaaccccttctctactaaaaatacaaaaaaattagccgggcatggtggtgggcgcctgtagtcccagctactggggaggctgaggcaggagaaaggcgtgaacctgggaggtggagcttgcagtgagccgagatcgtgtcactgcactccagcctgggtgacagagtgagactccgtctcaaaaaaaaaaaaaagcaagcttatgattgaatagattacatcatgtgagaatgtgagataattttaaaccactagttttccaactattttttttaacttgtgtgatttagtacttctgagtttttgaaaccaaatcagagaaaatattgaatctgttagcaccagagttctgttttaaacgttgttttgtgctaatggtgtttgttgtcctgaactggtaagaataaagcctgtctgagtctgttatttcttaaacatttcgatcttactgacaagtcgcaaactacttgtaaagtgcagcctatccttaaatgacagtttgttctgctttttcttgtttttcccctgagctgagagggacttctttaagcttggaagcagggagatgagttagggctgacatcatcctgtattcccctctgttttggggctggggttgacacttttcttccagctccaaggtcaggagtgggagagtatgaagacgtttgcagagtctagggggccctgttgtcacagcatgtgctcgtatgcagggctcactcttcacagtaattaatattgacatggaatgaattctgtgaatctgctatgcaaccaaggaaaccaggatattaacagtaacctacatctattcatgtactcctcccctatcccaaccccatattaatatctccttcccattcaccaatatcatgagttttacatttctcattcccttgctccttttcttgggcagtatgattgtggctgggtgtggtgcctgacacctgtaatcccagcacttcaggaggccaaggcaggaggatcacttgagccaggagctggagactagcctgggcaacatagtgagacccccatctctacactatgggagtagtggcacacacctgtaatctagctacttcagagaccgaggcaggagaattgcttgagcccaggagttcgaggctgcggtgagctgtgattgtgccattgctctccaacctgggcggcacagcaagaccctgtctcaaaaaaaaagcactaagcaaaaaaaattattatgattttaacatttattagtctgttgtgtataactgaaggtcattttcatgatcttgattgtgaatgtcttctattttatttgcccattctattgatggacatttgggttagtcttcacttttcttttgctgtggacattcttggaaatgtgtcctgctgtacacgggcacatgtatttcaggtttctcacctgagaggtattgctgggtacaaggtggtttaaccttttaagcttcattgccctgactcctgttttgtttcccccacaggattcagtccccgtgggggtggctttggcggccgagggggctttggtgaccgtggtggtcgtggaggccgagggggctttggcgggggccgaggtcgaggcggaggctttagaggtcgtggacgaggaggaggtggaggcggcggcggcggtggaggaggaggaagaggtggtaagattggctaggggttacagaggaggccttcctgaggtggggagtggggagggcggagattcaggatctttctctcctgttgtacctctcctttataggtggaggcttccattctggtggcaaccggggtcgtggtcggggaggaaaaagaggaaaccagtcggggaagaatgtgatggtggagccgcatcggcatgagggtgagtgaggaaggcagggagccggctgagcttcggggcagggagaggctgggggtcctcacccctgctctgatcccctcacccaggtgtcttcattt

SEQ ID NO: 21674 - DNA, 2300 bp, Homo sapien
ctgttttagccaccattgtgtccccagcacaagaccaacaggcacctccaccactaattacttaccgatagagccaatttcaggtcttcagagcaagctagcaggcaaagtatctcagaagcaggagatggtgccaggattccaagaaatagggctggaatcccctaaatctgcactgcactctgagtacttttgtcctttagaagaaaaatattaattagaaggcaaatagtaaaatccatgtgaaataggtaacattatccggaattggacccactggaatcattgcacatctagaaatccagaatagactcaactatttcatctcatagtttttaaaaagttttttttgtttggtttttgtttttgttttgggacaggggtgtcgctctgtgacccaggctggagtgtagtggtgcagtcatggctcatttcagcctagacctactgggctcaaaggatcctcctgcctcagcctcttgagtagctgggactacaggtgcaagcaaccatacccagctaattttttattttttgtaaagataaggtctcactctgtagcccaggctggccttaagctcctgggctcaagcgatcctcctgcctcggcctcccaaagtgcctggattacaggtgtgagccactgccccgaccggttctgaaaagtttaagcagattttccatcataatatctaaacaatctttcaggaatgtttctgtgcaaattggtggcattccacagctggaacactgtacacagagaactcacaacggtatgaggccatccattcattcaacaaacatttactgggcacccagagggctgtcctaggcctagagtgatagagcagtgaatggaacagagtcaacatctaggctctggactggtaggttcttctggagtttttcggtaacttctcataacagcagttgtcttgctttgcagaatgaatatagggatggatactgatattacacaattacaaagcccaaaattcttaatacttaagcagaatctgttgacccctgacgccgctctctgcccccactctgatctgtccatccttttcttctgattcacggcagcagccagtccttggttttcctgctttcaccctcactcctgcagtctgcttcccacatgcagccagagggacctgtgtcagatcacattccttctctgcttggaacccttccatggttccatcttactgcctaagtcctcactatgtcccacaaagctccgcacaatctgcccttgttagctacccgcccttatctcctcttactctccaccttgctcactttgccccacccaccctcctcattgtctctccaacttcccatatctttccttcctcagggcctctgcatctgcagatcttttccctgcctggaactctcttcccctagataggtgcatgcctcactcctcacttccttcagccctttagctcaaaagtctcctgatgcattccttgaccaccgtgccaaaaaaacaaaaatcatttgccctccaaaatctctatcccctttccctgctgttattttctccaaagcacttatcgctttcaaacattcaacatgtttggtgtctatttcctccattaaaaagatgaactccaggagagtggagatttttatgtctcgtacaccgctgtattcccagctcctagaacagcacctggtacacacgaggtgcactgtaaatgtttttcggatgtttgaatggaagcccagagtcggtcactgttcttggggctggaaatgtattggggaagcctttttgggtgtacaggggccagagggatttagctaggaatacaaaagagggcacagcccgtgcgaaggctatgagccctgattattggggtgctcgcattggggaagaggaaaccggaagcgagtttagggcgaccgctgcacaggcaaaggctgggaaggcagagagcgagggcagcgggttgcgtgtcgacaggctcgagaatccaggctcactgcgcgtgcgccgagctccgggcggggaaggggcccgggggcgggactacggggtggcgtcacgcagcgcacgtcgccgcgcgcctgcgctcttttccacgtgcgaaagccccggactcgtggagttgtgaacgccgcggactccggagccgcacaaaccagggctcgccatgaagccaggtcaggctggggtgagggtccggggtcagggacggaggccgggcgggaatccgggtgccaggccagaatcggaggggtggggccttggcctgggggcaggggttctgagcacgggttccagt

SEQ ID NO: 21675 - DNA, 2300 bp, Homo sapien
gtctcaaactcatggccttaagcaatcctcctgcctcagcctcccaaaatgctggaattataagctgagccactgcgcctggcctcagacagagaattttcacatcttggtttgcaattgctgtttcctcctaggaatcccgacgtctcctcctccgagtccttctctgtctcagggacccagcagccccttccaccaacttttagacccctcagggacccaggcatccttttcccaaagcttccacttcctgtgggtcccctgcccctgcttgtttcttgttatctctggcttttagccagtctcctatttactcacctcattctcctggttgactttatgtcccagtcaactcttagcctttatctttccctccaggaacgtttcttgggtgggcgtggggattggttggagctccagggagagagaagccccccacccgctctggcctcccagaggcccaggctgctgtgataagagaggaggagccccaggggcagcagctgctagggtgttggtccaagagagcacccaggctttgcagctgctggtcccaggggagactcccccagcaaacaatgagatcctgagtcagggagaaggcaggcagggcatgggtcaggccagcccctcagaggagctgactccagctgagaaagcccaactttcagctcattcttctgctccttgtgtgcaacctagacctccacctcccatctcaggcaaattctggggtgatggagaggcacagagtcccctaaacctgttcagctagcccctgctaagagcaaaccctccctacacacaaaaaaactccaaaaccaacaggtcctggctcttcctcagtcctcacaggctggggagtccctggccacctatatcctgtttccagcaccactgaggagcaggtgtctgggatcagaagtagaatctgggtgtctgtgtggaaccaggaaacagaggccattgtcccttcttcacacaccgcctcagtcccagtgcccacctgcagcctggcctgcgcccacaccagaggaggctgccccccagctctacagtccttgagaatttttttacatctctgggacgtaaagatgcccagagaggctggttttggtgttcccattttgcagatgagaaaccgcagacgccccactgggctgcggtggaggtcttgtgtcccactccatagcctcagactcctgcccatcccagacacctgcccctagtggtgtctggaagcaggatgtgggtggctagggactccccagcctgtggggactgagaaggaaccaggacccggatatgggtccctcactgttgttcctggcaggagccaaaggaaggaacctagccactaagccagcaaatatgaccacatgccacctcccaccctcactgcccacacccccaccctaccccacctccacccagggacccaggtgctcatctgcctgctccccagctgtctccctcagggaccccacccttccaggaccaaactctccagaaggcttccagggaatggccaccagctgtcctcactcccttcttggaacccaggcatccagaatcactgtccctccttcccaggccttcacagtttcccatttcatctggccatgaggatggcagcctcctccaggaagttggcatcatctgcctggcacgtggcccagggtgtggcccagaaactccactatatagccctgccacagggctggccctgcagctccagggacctgcaggtgagaagggctggggtcccctttggaagtgggacagcaggtcccctactcttgcccctgactgtaggcctcctcatcctacccctagacccacaagacagccaactctccaccccgtccctggcttctgccctccccaacccacctccagacccgctggacagccagcctcccctatacacacacactggtccttggatccataccccctggcccaatctgcccgacttctttccccacctcagccttcatggtcccaggtggcccttgtcatgagagtgggcccttctgcccaggacagtctccagcagaggcggtggatcagccttctatgatcctttctcttttcctactgcagccatgggtgccctatggagctggtggatactctgggctggagcaaccctcctgtggggtaagtcagaccaagaccctctccatgtccttgttccaatctggggaactctgcgtgggtccacgccttccatgtgtgcctcctccacatgtcaccccaggctagctgagacaggagagaggcccttaggctctgca

SEQ ID NO: 21676 - DNA, 2300 bp, Homo sapien
catggcccaagattccattccttggaatccgtgaggccaagaaccccaggtcagagaacaagagacttactgccatcttggaagcggcccaccaccatcttgggagctctaagaacaaggacccccagtaacaatagcactataacacccctaaactggaaaatatccagtctgaggtatagggcatagtcataaaatggaaaccatccagaatgaaaatgaaagaactatttctacacacggtatgcatgaatctcacaaaaacaacattaactaaaagaaaccaaacacagtacacagagtactggtctagagagaaggagaattcaaaacaaacaaaagtaacccagctgttacaagtcagggcgagtccagccaggcacagtggctcatgtctgtaatcccagcactttggaaggctgaagtgggaggatcatctgagtccaggagttcgtgaccagcctgggcaacacagcgaaaccctatctctacaaaaaacattttaaaattagcaaggcgtggtggcacacgcctgtagttccaggtgcttgggaagctgaggtataggattgcttgagtctgggaggttgaacctggagtgagtagtgatctcaccactgcactccagcctgggcaacagagcaagaatctctttcaaaagatatatttttaaaggctacatggggtgggtcatgcctgtaatcccagtgctttcagaggctgaggagagaggatagcttgaggccagcagttggagactctagtgagctatgatcgtgccactgcactccagcctgggcgacagagactctagctcttaaaaaaaaaagaaaaaaacagatgaatgataacctttagaagggatcgggaggccggatgtggtggctcacgcctataatcccagcactttgggaggccaaggcaggcagatcacttgaggtcaggagtttgtgaccggcctggccaacatggtgaaaccctgtctctactaaaaatacaaatattagcctgggcaacagagtgagactccgtctcggggcggggagtggaggggggagaagaagggatgggggaaaggggagcacatgaggcttctactgtttggttttgcgatctggattcaggttgtatgggcatgttcactttgtgtaattttgtcgagctgtaatgatttgtgctcttctctttatttaacttcaataaaaggtttacttaacaaaaattgtagctggtgtgaagggtagcagtgtttccctggggccaagagtacaggctttggggacagacagacctgggtcccaatctatgctttgtcccttcggcacattgttgactgtggctggtggcttcgtggctctgagcttgtctccttctctataaatgaggaaacataatacttgcgacgatgatgcctgtaaagcttaagcgcaggacctggcatagatctgtaaggcggaaacctgggatacagaactaaggtctatggatctcctgtgctacccaacttctgggcactcgctgcctccttttccccagcccagacgcgtgggttctactcgattggttgctcactgcgggctcggggctcctcaatcccggggtaaagcccagtatgaaatgtcaccttcaggggcagctcggatcttcccacgcccgcgcggcgcacaatctttggatcagcgccacgtggagaccttacccgcccgtacgatcaatcccttctgtggaacccagctcaaggaccctccagcccagacactagaaagcgaagagcagttggccgccagactgtccgtgccagagctctgcgaacttactccgttgaaagagcaacggggctgcgccacctcccggagagaacccccagccctccacggcagggcgagatggcgccaccgcgtgatactgcgcacgcccacagctcccgtcccgccctcgcgcctgcgggtacggacagcgcatgagcttatgttgagggcggagcccagaccagcccttcgtcctatcctgcccttccagcacctctcagccgtaacttaaactacacttcccagaagcctcctcagccagggacttccgttgtcgtcagcggaagcggtgacagatcatcccaggccacacagaggccggcttggtcactatggaggagataggcatcttggtggagaaggctcaggtacagtggggacttgggctttttagtccgggccgggctcgcggggagagggtgaagccagacctgagtggggggaggaatggcttccaggaccccggcccaggttggggttattttagaggcc

SEQ ID NO: 21677 - DNA, 2300 bp, Homo sapien
actatgcttcccgtacagcctgcagaactgtgagccaattcaacatcttttcttataagttaccgagtctcgggttttctttatagcaatgcaagaatggactgatacggatatatacagatatatacagatatatatagtgggatgactgggtcatatagtggttatatttttaatttgagaaaactccggatattttctatgtttgtactaatttacatttccacaaatagtgtacaagtgttcccttatatccataccctcaccaacccttgtcgtcttttgtctctttgattacagctattctaacactgtgaggtggtatctcagtgtggttttaatttgcatttctctgatgattagtaatgttgagcattttttcatatggacactttttttttttttttttaaagatggagtctcactctgtcacccaggctggagtgcagtggcgcgatctaggctcactgcaaccttcgcctcctgggttcaagcaattctcctgcctcagcctcctgagtggctgggattacaggacccaccacgcaccaccacacccagctaatttttgtatttttttagtagagacagggtttcaccacgttggtcaggctggtctcaaactcctgacctcacgatccgcccacctcggcctcccaaagtgctgggattataggcataagccaccgtgcccagccttatattgacacatttttaagggatttgggggggggcaggggttctttgcaacaatgtaaacatccagtccctcatcaaactttcaattttttttcacgtactaatttatatcagtttggaattatgattccctctgttatttaatgggttttaatctataactagcattatttattttgatgctcaaaccatgtcaagtttggtcagtggaagtcccttcaatctggtttccatgtcctttgaacacgtccccaccattctttgagcactgccttactttcaagcacaagatgttccaagttcattctgaactttcccttccccagctctggaatctgccatttctccatggagccttgctcctttcagtggagcatggtatttaggaaccaagggctgactgcctaatgtgctttccaagtataatttcctcagtccaagcttttcaaattgatctgccaaagacccattgccaaagatccattgccagaatataagagtggaaggaaattcttaatattttttgaaagttactattattttcatttttctctttgtaaaaaattcatttaattcaatataaaaagacaaaaatctttggcacataaatcgcaactctctgatgcaaatgtttaaataaagctgatactccaagaagacgcaacatattctctttatcccacagacatataggcctatggttgcaaacttttatacacacacagagtcacaattccactggcacccgtgatgttccacatccagattttccaaatcacacattctcatcttcacatagccttgccggcaaccacacggcatagtaccacattgttacgtcaagcacagccagtctaccacagagcctgtcgtcccattgaccaaagtcacaaaaatcacagccccgggtatttactgtggttttctccagtcagatcccttcactcactacacactgactcacactcaaattacacacacgcggaaacacaacccgccagagccagagaggttccgtcggtcccgcaaccctcacagtgccacacacacgcgctcacaaggcaaatacaaatggccaggcactcattctttacaatacacatattaagcgcctattatgtactacacgccgggactacctcaagaggtgaaacaaacaaaatcctgcctggcggagctatcgcccagtcccgcacgcactcggcctcagggtcacactcggcggtcccacgctcaagtggcccggccagtggcccagaggcgtctgttctcctcctcagcttcctgcgtgggttcctggtaagtgagtcgaacccgccggatgcgcgcgcgcctgcgcctccgcccaaaaggatcagtttccggctgtggactacatttcccagaagccccttgggcagtgttgcctggaccccaagggccctttacattgcgttcttaacggttcagtcaccttaaccgttattattcacttgcgggcgagaagtccgagctaggtgaggcggaacgggactcttacgagtaggactggggatagaactgccgcccaaagtgaggcgctccagggcccagacctggcgtgtcgtgcccgcagggagcct

SEQ ID NO: 21678 - DNA, 2300 bp, Homo sapien
tttggtgaactcagaatgctgaacactgcccatgcaattctgtctatatcctttccagttctcatgccttgccccactgcacccaatcctgagttcacaaagaggttctggattggatgatgcaagcccttctcagctctgaaaggtggactaggggaggaggattgcttacagcaggatcagaggcccagtcctaggccaagattggtatcccaagagtggaggactggctggaagccacaacttcaaggcagaaatgcctgtgctcggcattcatgcttccgccgcaggttccctgggatgtaggcgagagcttggtttcatccacactccacctgttcactgccagtttatttgtgagagtgtgtgtagggaaaaagggagtgacgggagaagggtggaagtgtgcgtgtgagcaggagtagttgagaaataggaatggaggataaaatatttattcgttctagtgctttcggacacagcttgacttagggcctttttgttgttgttgttttccaggggagaagcccgaggaagattgaccaattttgtaattctagaaacatggtccatgtaagttggtgtttctgtcttcttgaaatatggtgactttcaggttaggttaggtgactgttattattaaacctgaaccttcttacgtaaggatccacgatttttttttttttttttttttttttttgagacggagtcttgctctgtcacccaggctggaatgcagtggtgcgatcttggctcattgcaacttccgcctcccaggttcaagcaattctcctgcctcagactcccgagtagctgggactacaggcacccaccagcacgcctggctaattttttgtatttttggtagagatgggatttcaccatattagccaggatggtctcgatctcctgacctcatgatccccctgccttggcctcccacagtgctgggattacaggcgtgagccactgtgcctggccaggatccacaatcttacaccccactttgtcccattacagtgaagtttggtgaccaaaaaataaaagtcagtgctcttcctattcgtacctctgttttcccactggctttgatgttttctttgagcaggttattcagtctgtgcttaactcagtccttggtcagaaagaatgttggaacagtggaggagttggtccccacagggaaacatggtcttgtgggtttgataagttacagatgattgtcgcatttgaccacactcgggaacaccttgaaactcctccacagactggagctttctaggtagctgaggtagaattccatagtgagtggcctcagtctgcaagcgtgacaaggtgttctgctttatgaggcttttaggaaagtgatcagtgaggacagtgggcagtaacagagattattcagggcatgagtggtaggtgattacagattctctgaatttgggaaaaccttagagactctgaccatcttaaatgtataaatagaaaaatatgactaaatctaatatgtcagttattttgaattttacgcagcttataaaaatcatttgtcatgacaagaaaaaatacttttgctatcatctgataccacagtaagcttgaggattaacggcattcctcaattgtatgctgccaccttttttttttttttttttttttttttgagatagggtctcactctgtagcccaggctggagtgcagtagtgccatcacacttcgctgcagcattgaactcccaggctcaagcaatactcccacctcagcttcccaagtagctgggactataggcacatgccaccacgacagttctttctttctttcttttttttttttttccagggagtgcatctcgttatgttgcccaggctgtttgccaactcctgggctcaagcagtccttccaccttggtctcccaaagtgctggtataacaggcatgagccaccacaccaggccagcagcaggattcttgaagaatgtgtaggcactctgcgattttccatattgctcctttattgcagtttaatccttcacttcctctcctttcgtcttgaaacaactttcttcaatttcaccataatccatgtgtttgtggtttcagggatcagtgacattcagggatgtggccattgacttctctcaggaggagtgggagtgcctgcagcctgatcagaggaccttgtacagggatgtgatgttggagaactacagccacctgatatcactgggtaaggtcattggtcccagttatttttgtatctgttctctggaatatcagctttcttcatcatgagtttcagg

SEQ ID NO: 21679 - DNA, 2300 bp, Homo sapien
gcaatctaatattccatattcacaatactcatgaggatattttccatttcattggctatattctaagacttctgattaccttagtatatgcagagtatatatctcaatttaaaaggtatggtgttcagagaagcgccatttgaaggtagctataatttcaagtttattaaccataaagtccagcattgaggattacatacaattttatcaaaatttaaaaataatagactgtgtcaaaaaaaatccttaaaaatatggtgatactggctaagaaattgattaaagcattggaatatataccaaaaataattattctgctctttaatgcatagtcaatatagatagcttaaaattttttccttactacaaaaacattattttgttttaatgcaaatatgttattgtttaccctttaggatataacagaaaattatgactcataaaggaaattttcaaacattatataatttcaattatcatagtattcatacattttcaaatttttactactttggacaatatatagtgagctgttattgatttctaatttaattccatttttgtcaaaaacattctttgtatgacttgagtccatttactcatttatggagacttgctttatggcccagaatatggtatacgctggaaagtgtctcctgtccacctaagatgaattttactgtctttgagaagagtgttccagaagtgtaaatgagatcaagcaggttgatatgttgtttagataatctataccctgttgcttttctgcattagttctatcaattaccaagagagatatgttgaaatatctgattataattgtggatttgtctgttactttattgatctaacaggtttttactcacatacttagaagctgtattaagagcataatttaggtttgttctttccactggatgaactgtatccttcatcattatgatgatgtaactttctttatccctgatatagtctttttggtgaagtcactttgtttttaatatagccactccagctttcttttgactagtgttaggattttatatatttttccatccttttacttttaacctattagtgcttttatattttaagtattacctgtaggtagcacgtatttgggtctgacttttaaaaaaaaaatccaacctgacaaccttcttaagttaaggtgttagaccagttacacttaatgtgatcattgatccaattaagtttgttatcttgctatctgttttctgtcacagtcgggaatgaaaagacattttgctcttcattattccacgtttccgctttatatagcataggaaactacaaaaatcattttgaaagttcaatgttgctagattacaacagtgaaatcaagcttttcctacgaaaaacaaaccccctttggcatttatttagactgttttaagaaaatgtgttaattattcatccttcaagataaggcaagtaattctctgtgtacttttatctgtttccatgccgtcctgaatcacgtttttctctccagataacaggaagattgtcttgaagaatcaagtatatttgattctgaaatctctcatgtaaaccacacttcctcttctagtataaaaccaacgattccttttctttctttctttctttttttttttttttttgagacggagtctctccaaccatttctttagttcaggcttttcaaatttatcctaagtcccttcaaatagcacaaaggggaagcctatgctcggatctgagacgaagaggtcaaagcagctacattttgacgtaattttactttaaattcttctttaaaagttctgctcatttgcattcttttgcatagagagaaaaggtaatttaccctgacgcaccgaaaacagcaacgctcctctcagatggggattctcgcccgtggccgcaacctctgcaccccacggtctggaactcccacaaatccattaggctcgggtcccttaggagcccccaatgtatgctgggatcaacctgaacagaccatagaccaagacttctgaggttctttctgctcaggactgtatttcccagaggccaccgcaccggaattagcggttccacttcctgtctcctggggttgacgacctagctgggtaaggtcttcacgtcctaggaagaaatcggtggctgcgggaggtcttcgtggactgggactcgaacctgaccgacccggcagtgcgggtgggcgagagcgaggcgctcagaggaggaacccggggcgcagacggaatctgccagatccttaggcgtgcgtgtgcgcgggcatcaaaggatgg

SEQ ID NO: 21680 - DNA, 2300 bp, Homo sapien
tcccccactgcacccaatcctgatttcacaaagaggttctggtttggatgatgcaatcccttctcagctctgaaaggtgggactgggggaggaggatctgctaagggcaggatcagaggtccagacctaggccaagataggtatcccaagaatggaggactggctggaagccacaacttcaaggcagaaatgcctgtgctcggcattcatgcttctgccgcaggttccctgggatgcaggcgagagcttggtttcatccctactccacccgttcactgccagctatttgtgagagagtgtgtgtgggggcaaggggagtgatgggagaagggtggaagtgtgcgtgttagcaggagtagttgagaaataggaacggaggataaaatagttatttgcttttgagacacagctttaattgtggcctttttgttgttgttgttttccaggggagaagcccgaggaagattgaccagttttgtaattctagcaacatggtccatgtaagtttgtatttctctcttttccttgaaatatggtgactttcaggttaggtgactgttattatttaacctgaagcttcgtacctagaattcacgatcttacaccccagtttgtcccattacagtgaaggttggtgacaaaaaaaaaaaaagtcactgctcttcctatttgtacctctgtttcctactggctttgatgttttctttgaaaaagttattcagtctgtgctctgtgctcagaccttggtcaggaagaatattggaacagtggaggaatcagtccccacagggaaacagggtcttatgggtttgataagttacagatgattgaccacacttgggaacactttgaaactttacagactagagctttccaggtagctaaggtagaattccatagtgagtagcctcagtctgcaagtgtgacaaggtgatctgctttatgaggcttttaggaaaatgataggtgaggacagtgggcagtagcagggagaagataattcagggcatgaatgataggtgattacagattctctggctggacatggtggctcacgcgtgcaatcccagcactttgggaggccgaggtgggtggtggatcacttgaggtcaggagtttgagaccagcctggccaacatggtgaaaccccatctcttctaaaaaaagaaaaaaaaaaattagcctgttgtggtggtgcgcacctgtaatcccagctgcacaggaggctgaggcaggagaatcgcttgaacctgggaggtggaggttgcagtgagctgcgatcgtgccactgcactccagcctgggtaacagagtgaaattctgtctcagaaaaaaaataaaaaataaaaaattctcagaattggggaaatccttagaggccctggccatcctcaacgtataaatagaaaaaaaatgaataaatctaatatgtgagttctattgactttaatgcagcttataaaaatcagttgtcatgacaagaaaaaatacttttgctgtcatctcataccataatgaacttgaggattaagaacattctttaattgtatgccacctttttttttttttttttttttctctgagacagagtcttgctctgtggcccaggctggagtgcagtggcgtgatcacagttcactatagccttgaactcctgggctcaagcaatactcctacctcagcctcccgagtagctgggactacaggtacgtgataccacacacagttacttatttaatttttgcagagatgggatatcattatgttgcccaggctggtctcaaatttctaggctcaagcaatcctcctatctctgcctcccaaagtgctgggactataggcataagccaccatactcagccagcaggagacttcttgaagaatgtgcaggcactctgtgaatttccatattgcttttttcttacactacactccttcacttcctctcctttcatcttaaaacaactttcttcagtttcaccattatacatgtgtttgtggtttcagggatcagtgacattcagggatgtggccattgacttctctcaggaggagtgggagtgcctgcagcctgatcagaggaccttgtacagggatgtgatgttggagaactacagccacctgatctcactgggtaaggtcgttgagtcccagctatttttatatctattttctggaatatcagctttcttcaccgtgaatttcagggctatcttttaagaggtggctgaattccttcttcttgttcccaaaggaatggattgggatttgttgggttgaaaacaggcacctccctggag

SEQ ID NO: 21681 - DNA, 2300 bp, Homo sapien
ttactacaaaattgttattttgctttaacgtatatatgttattgtttcaccctttaggatataacagaatattataattaatacaggaatttttcaaacattacataatttcaattaccttagtattcataccttttcgaatttgtactactttggacaatatattatatattcagctattattgagttctaatttaattccatttttgtcaaagaatatgctttgtatgactcgaatcctcttacatttattgagacttgttttatggcccagaatatggcctatactggtaagtatcccctgtccacatagatgaattttactgtcattgaggagagtgttctcaaatataaatgagatcaagtaagttgatatgtagctcaaatctgctataccctgttgcttttctgtgtttgttctatcaattaccaagagagatatattgaaatatctgactataattgtggatctgtctccttttcgatctaatagatttttcttcccatacttagaagctttgcttttaggagcaaaatttatgtttgtttttttctactcgatgagctatctcctttatcattattatgcccttctttatctctggtaatagtctatgtccggagtctactttgtttttaataaagccactccagctttcttttgactagtgttaggatggtgtatatttttccatccttttactcttaaccttttagtgcttttcatttaacatattacctgtaggtagcacccatttgggtctgactttttgtttatttatttatttaattatctttttttattatactttaagttctagggtacatgtgcacaaagtgcaggtttgttacatatgtatacatgtgccatgttggtgtgctgcacccattaactcgtcatttacattaggtatatcttctaatgctatcccttccccctcccccgaccccactataggccccggtgtgtgatgttctccaccctgtgtccaagtgttctcattgttcaattctcacctatgactgagaacatttggtgtttggttttctgtccttgcgatagtttgctcagaatgatggtttccagcttcatccatgtccctacaaacgacatgaactcatcctttttatggctgcatagtattccatggtgtatatgtgccacattttcttaatccagtctatcattgatgcacatttgggtctgactttttaaaaaatccaatctgacaatctttttaaattaaggtgtttagaccatttacatttaatgtgattattgatatggttgagttaatcatcttatttgttttctgtcacaattctggaatgaaaagacgttttgctctttattattacatgtttcctccttatgtagcataggaaactagaaaaatgattttgaaagttaaatattgttagactacaacagtgaaatcaggctcttcctaggaaaagcaagcccttttttgcatttgtttatactattttaacaaagtgttaattattcatccttcaagataaggcaagtaattatctgtgtatttttatccgtttccatgtcgtcctgaatcacgtttttctctccagataacaggaacattgtctcgaagaatccaggacatttgattctgaaatctccaatgtgaaccacacttcctctcctagtatataaccaaccaattctttagttcaagcttttcaaatttatcctaagtccccttcaaatagcacagagaagtggaagcctatcgctggggtctgagacaaaggagttaaagcacctacatgttgacataattttactttaaattcttctttcttctttaaaagttctgctcatttgcattctccatggagagaaaaagtaaattatactgacgctccgagagggaaacgctcttctcacatggggatccttgctcatggcaacaacctgtgcaccccgcgggctggaactcccacgaatccactaggctcggctcccttaggggtcagcccccatagtatgctgggatcaacctgaacggatcacagctcaaggcttctgaggctttttctgttcgggactgtatttcccagcggccaccgcgccagtccacttccggtctccggggtcgacgacatagcggggtaaggtcttcacgtctgaggaagagatctgtggctgcgggagatctctgcggattggggctccagcctgactgacccgacagtgcgggtggcctagggggaggcgctcagagtaggaacccgggggtgcagacgggatctgccggatccccaggcgtgtgtgtgcg

SEQ ID NO: 21682 - DNA, 2300 bp, Homo sapien
aaagtcttatttcaggagggatgtatggtctttcataaaaatgaccttatccaaacaagaccccaaataaagtcaaaaagcctccaacagaaggagggaggatcacttgtaatttgcccatcaccagggcagaaaaggtgagccagggaagtgactcagtaaatactgctcactggttccaagtatcaccatttccttctttttgttttggttgtttttgttgttgttgtttctttttattgagactgagtctcattctgtcacccaggctggagtgcagctacgtgatctcgcctcactgcaatgtccgcctcccgggttcaagcgattctccggcctccacctctcgagtagctgggattacaggtgctcgccaccacacccggctaatttttgtatttttagtatagacggggtttcaccatgttggccaggctggtctggacctcccaacctcaggtgatctgcccgcctcagcctcccagagtgctgggattacaggtgtgagacactatgcctggtcaccatttcttctgctagtgaactttttcaggtcctgtttcaaacaccatatatgtcaacctatttaacaaacagaaagagtctctctgaaagaaaagatatttgtttagcaatagagcattgcaatgggaatctgtataccatagtgaaatatgtgcaaattcagggagataaaggaagacaagggtttttaaatgaaaaaatgaggaggattacataattgttttgaaataattatccttggctacaaagatcaataacaagtctgagactggacagggaattgttgagcagatgtccttgcagaagtattatttgtataaggttatggtggactttgtgcaaagttgtggtttttgtagtcttttgtgacagtttttgtgatcaggcatacaagcatgaaaaccttctcttcatgttctccccatgcttgatttgtcagagttttcatttttcttcttttgggacaggatctcactctgccacccaggttggagtacagtggtgtgatcatggctcactgcggcctcaaactcctgggctcaagcaatcctcctgcctcagcttcccaagtagctgaaactgcaggcacctgccaccacacccagctattttttttatgttttgtagagatgggggggtctcactatgttgcccaggctgatcttgaactcctggtctcaagcaatcctcccacctcggcctcccaaagtgctggaattacaagtgtgagccactattcctggcccatgatatgtcagttttcttaacattagtgactccgtttcgattctgacaactttcacagttctcttactaatatatgttgttgacagccttctcaaagcaaaccttccatctgagctttacccatacatatgtgtatatgatacatgactagccacatgtatgatgcaggtgccttaaagacagagcaaactacatgtgctaaatagagtgtgctcttacctttacacccaaaccacagcctcttcagtttgtcagtgtcaataaacaccaccatgaccaatccagttgctcatgtgagagacttgtgagtcattacccatactaacctttctcaaacaaccctttatgagggcaaagtggctgatgcctgtaatcccaacactttgggaggctgaggcaggaggactgtttgaggccaagagttggagaccagcctgggcaacatagctagaccccatctctaaaaaaaaaaacagccctctccctctgtctccctctccccacggtctccctctcatgcggagccgaagctggactgtactgctgccatctcggctcactgcaacctccctgcctgattctcctgcctcagcctgcccagtgcctgccattgcaggcacgcgccgccacgcctgactggttttggtggagacggggtttcgctgtgttggccgggcaggtctccagcccctaaccgcgagtgatcccgccaacctcagcctcccgaggtgccgggattgcagacggagtctcgttcactcagtgctcaatggtgcccaggctggagtgcagtggcgtgatctcggctcactacaacctacacctcccagccgcctgccttggcctcccaaagtgccgagattgcagcctctgcccggccgccaccccgtctgggaagtgaggagcgtctctgcctggccgcccatcgtctgggatgtgaggagcccctctgcctggctgcccagtctggaaagtgaggagcgtctccgcccggccgccatcccatctaggaagtgaggagcgcctct

SEQ ID NO: 21683 - DNA, 2300 bp, Homo sapien
ggctagtctgaaactcctggactccagtaattctccctcctcggcctctgaaagtgctgggattacaggcatgagccaccgtgcccagctagttgcatatattttgagcaatctgtctctaactctattttttccatgaagtcttgttaattttagtgcaccgttttgaagaactgaaggttttttaagaatgcatatagcaggttatagcagaaacacttatactcagaatgaagctggggctctctcttccaacaagcatttttgatatgctccgagtgtccctgctaggtagccaggagaccaggtaacccacttccctctgacaatggaacaattccccaaggaccctgaggggcagttctctggagtttgggcactagagtccctcttatttcctcttcttctctcctccctctagaccccataccactcaggagaggccaagtaaaaagacccagaattttgcctcttacaagcttagagatcttgaagaagtcactgaacctctgcgggacctactttcctcattctttaaatagaaaggcagtgggttttttgtttgtttgttttttgttgtttttttttttgttgttgttgtttttgttaatcgtggcgatggttatttatttatttatttattttgagacggagtcttgccctgtcgtccaggctggagtgctgtggcgtgatcttggctcactgcaacctccacctcccaggttcaagcgattctcctgcctcagcctcccgagtagctgggatagattacaggcgcacaccaccacgcccggctaatttttttttttttttttaaatagtagagacgggggtttcaccatgctggccaggctggtcacgaactcctggcctcgtgatccgcccgccttggcctcccatagcgctgagattacaggcgtgagccaccgcgcccggcctggttgttaatttttaaaactgcctttcatttttgctttgccatttatagctctgtagccttgcacaaatgacttcacttctctatgagtcatctgtaaaatggggctctttgtgaagacttaacgataccacgtgtacaaagcactgaatacaacatgcacattaagctccccgaaattgaaactcctataaaataggaatcggggattctcaagagcaggagttctgacttcagcagaggaacccagagctggtggggaaagcagacgtggctgtgacatccccagggacactaaacacatcctcccagccccatcttccccgcagagtcccgccaccggcccgacccctaacttgctccaaccacccgccgacgcccgcagcccgctgtttgggggccgccccctgcagcgccaggtccccgcgcggactacagttcccagcgtacatctcggtcggggggtccgaggggccgtcctgcctcagggataaggtccaggctgcgttcgcggctccgggcagtcacagtcatgcacgcagctcctatttttcgcgttgctaatcgcgtccgttgcagtccaacccatcctgggccgcggcccccacagggtctgtgaggagcgcttccccccgccccgggcgcccgctacgccgcgtccgaaggaggggccgaggccgggctcatctccccgggaggactccttcggcttcgtggggtgtcatgtccattgcggcccgaggctggccgcggggctctgctggagggcgctgagagccgggccccgaggccgcacggccggagactacaactcccaggaggcaccgcggcggcggcgcccacacgtcactcgggccccgccggtggcccggggaagcagcacgggcggggggcaggggctggggccgaccgggaggccggtgccaaggatgggggccgcccggctgccccgcgcgtgaggaggccgaggggcgcgccaccccggcccggggcggccgccccaggggccccgccacccccgcccggcccggcagtcgtggcccgggatgcggagccgggggccgccggtggagctgcgcggggtgagcggcgcggggaacggggactgcctgccgccctcgccctcgtcccccaccggcggaccccggcgggcattcgagagccgcgcggccaggccctcttagccctctgccgtttggggggcacgggtgaacctgccgccccactcccaccccgccccgccccgcccgtacagccaaatcggaagggacgagcctgccctttgaaagggttttttttcttgctcctgcggagggcgccccagccatggccctcaggagctccctagaccccgcagggactg

SEQ ID NO: 21684 - DNA, 2300 bp, Homo sapien
ctgtgtttttcattacaaaacagacacaccggaggtagggaaaggtgtgtgcactgctcaagaactcaaattcatgagttttacactcctaactgagcctgggtttggagatgcagagaggaaaatgtttgcacccctgaggtgttcaaggctggaccccagggataagggagaaactcactcagcaaaagcgttttacagcaaagtacaataagagatagaggcagatgctctggttgagatggaaggtgctgagttctggtttctgtctgtcacatgtgacctgccatgggacctccagctagaggatgtgctgtgggggtggagttggggagagtggggaggcctggggctgagacccaagctagagtctcagaggagggggaggagtagtaatgcataatgccattcactcacacactcattcattcaacaactatatatggatgctgactcagagccaggcactcatgatcacatgactcagagtctaatggacgataagaaacaccagttgttaattgcccattaatgtatgaagccctgtgctaagtgccttacctgcataagataattcagtctctgcaaccgctctgaggttaacttgccttctatcctcatgtcgcacagacgaagccgaaggaggaggatcgaggaacttggcccaggtcccacagctaaggaggcggcaaaggaggactgaagggcagttgactcattcatcctcgatttttttcttgaaagcctcctgcatgcttcctttcctggggacttgtttgccctctcacttgttttcccccatagacagccgagctggatgagggcaagaaggagatctctcttgtttttagagttattccctcctccaggaagactttatcaccacctcagcccagggcaggtacctcccacatcccagccccgacccctctgcctgtgcctcttccacctcggccccgacccctctgcctgtgcttcccaggctagcctgctcagggctgtcactgtctggtcactggtctgtcttcccactgaactggggcccagtgagagtagggtctgaagctcacgcagtgtctgctatgtcccagcatcatccagcacagagctgggcacagaaaggatgtcagtgaatatttgtttcataaattaacagatgaatcccaaaggtggtattatttttaattcctttcctttccttttttctctttcctctttcccctttcccctttcctttcctttcctttcctttcctttcctttcctttcctttcctttcctttcctttcctttccttttttgagacggcatctccctctgtcacccaggctggagtgcagtggcacaatctcggctcactgcaacctctgcctcccaggttcaagtgattctcctgcctcagtctcccgagtagctgggactacaggtgcacgccaccacaccaggctaatttttgtgtatatatacaaaaattttgtatatattgtatattagtagagacggagttttgccatattggccaggctggtctcaaacttctgacctcaagcgatccatccacctcgacctcccaaagtgctgggattacaggcgtgagccacctcgactggccctaaaggtgatattattgtgccatgttactgatgaggatacagagttccaggtagtttaagcgagctgtctaagtcataccactagtgagaaagtaagcagggatttgaatttgggaagcttgggtccaaatcctgtgttctcattcgatatgccaaatggccagtgggctgagagccagctttccgtgaggctgatgtcttcctgctctttcccccaggctcgtcctttccttctagaaatcttcgggagctttgggcaccggggaggagagcaggcaggaggttggggagggtaaggggaatgggaacaattcggggggcgggctggagaactaggacttggttaatttgagagtgagcatgggggaagtctcgaggggtttccctagacccatagggggcagccggagtcggctgccggaggtgagggggcggagaaagggtggggaccagccccgcggggggcgatgcggtagctgcagcggcggcggcaggagtttcccacaatgcagcgcggcgcgctgtccccggtgctgatgctcagcgctgccccggagcctccgccgcgcccgcctcccgccctctccccaccgggctcgggcccaggctcgggctcccgccatggctcggctcgtcccggtcctaccccagagccgtcggggagcctgggcgcggcgctcgacagcag

SEQ ID NO: 21685 - DNA, 2300 bp, Homo sapien
cctcaccttcccaaagtgctgggattacaggcgtgagccactgcgcctggcctaaaagatatatatatatatatatatttttttttaaagctacttacgtctctccatttgcccgcaaggaaattccttgtggacagaagacaggcagagttcaaagtcatccctgtgctcacatgagaccaatgcatatctgatggcttcctccgtcctattgtttgacccagactaggcatggatggctcttcctgtaaattgtgcattcagtaaaaggctaatcaaactcaaaagaatgcagccgtttgtctcctgtctatgacctggaagccccctcccctgcttcgagttgtcttgcctttccggaccgaaccaatgtacagcttacacatattgaggacgtctcatgtctccataaaacgtataaaaccaagctgtgccccgaatacctcctgaggccgtgtcacacgcacacccttaactttggcaaaataagctttctaaattgattgacacctatctcagataccttttggtttacacagttaataaacatcttgtgtagagacattttgtagatatcccgattcctatcagatgttcacccactagtttgaacatctattgatatttcttgcatgaaacgatgctgtggtggttgccaaataggattttccaaccttctacattattagttcggccagtcatggcggcccacacctgtaatcctagcactttgggaagccaaggtgggaggattccttgaacccaggagttcaaaaccagcctaggcaacaaagtgataccccagtctctacagaaaaatttaaaaattagccaagcatgatggcgcacacctgtagtcctagctacttgggaggctgagatgggaggatcacttgagcctaggaggttgaggctgcagtgagccgtgttcacaccactgcactccagcctgggtgacagagcgagaccctgtctgaaaacaaaacacatttattagttcactttctaaagattagaagagcttttctttcccactgcctgagttatatcagaataaacttgtattttaattttattcagtggtttgtgatctatgactatcatcttgatgctcacattttctagatttagctagtgacttctgcatctatgtgacttgccctgctgttgggacactttctgccacacaaaaatattccagatcttgtaccttctcttgtatgaccctgggatcagccatttctccaggtagccctggttccttttagtggagaatgggatgtggcggccagggtttggatgttaggggtgcttctcactattggggtgtcgctgctcttaagctctcccagtggattaagctaggaaatacatgtttgcatacacaccactttttaaaaaaaatttttttttttttgagacggagtctcgctctgtcgcccaagctggagtacagtggcccaatctcgctcactgcaagttccgcctccagggttcatgccattctcctgcctcagcctcctgagtagctgggactacaggctcccggcaccacgcccagctaactttttgtatttttagtggagatggggtttcacagtgttagccaggatggtctccatctcctgacctcgtgatccgcccgcctcggcctcccaaagtgctgggattacaggagtgagccaccacacccggccacacaacacttaacttctatgtaaacaaccatgtgttcacacaattttatctccaattccattgcgacaccgacaccacaagggtcattctaacctccgatctatgtttgtacatccatcctctgacggtgcaaaccctgattctacattttgaaatcatcccgactttatggtcaggaaagcgaggcccagaggggctgcttccgggcagcaggatgaggatctgtctccagctgtccgaccttagagggcttcgagaggacagagccagcctgcggggcactcacctttgtgcacctgcccgggcgaggcgggctcagtgcgcacgcgcccaggggcctttaaagcgcccgccgcgcgtctcttcccctagctgcaagggtcggtgcttggcctcgcccgcaacaccctcctggaggatgctggtgagaggcagggaccaggggtccggctcccggctcgggcctatcgttaggcgctgggcccccaggccctctcctttgcagagtctcgctgcctccctcgacgcagagccttcaagcgccgcagtccccgacggcttccccgcgggccccactgtctccccaagacgcctggcgaggc

SEQ ID NO: 21686 - DNA, 2300 bp, Homo sapien
gaagtggaaacattattttttttgtttttgttttcagatatgctcatagaagcagatgtgttagcattgtgttgtctgtcagcctggactgagtagatgcctgtttgggctgcagtctccatcaaggccagtggccaccagttaaatggactagattgaggatggcttatgtatcatttctttatctcagttgctgtccaggtatcctattaagccacagtactttttcaaataaaatcttatgaggtacctcagtgcagaaaacagaatagttgagttgtcatgagctgaaggaccccctggtgggagtctctgaggaactctctgtagatctccttagtgcagtggagaactactgtttgttgactgacagcctgtccatcctgtcattgaagttggctcccaagcctttgccactcccagccacagcagacatcacttgtgtgtgtaagttgaacacattttactgtaaaaacaagagccatggttgctcagaacagctctagttctcccttggctgtgcctgatggaggcagaggacaagatggttcagcatgtaaccctttcctaccgcagagccatgccttcacttaatgccccaaaaggtgcagccggtatgtgaaccccatatggctgactcctgggggccccagccagggcagggtgtgtgtgtgcagaataagcagggccagggccctgccctggcatggctcagcagagccctcctccctcccacctcccaccctgctgccttcatcccccaggcgctgaagtatgccttccagacccacgaccgcctgtgctttgtgatggagtatgccaacgggggtgaggtgagccgcggctgccttgactttgccctctggggcctccttctttagggtggggcgggatggagaggagctgtgggtgagatggaagggtggagggaaatttcagtgtcatctagtgcccctctcccttgaggcaggcggcttcgtctccattttgggggggcagtcactgaggctcagagaggttaagtggcttgcccaagtttacacagctagtgagtgggtgggtcaggtccaaaccagtccagagaggtgtggagagggctgtggggcgatagcactgggaaggatggtcttaaaggccccagagaaagcccccaagggttaaaacctagcagccctccgttcccgtgtcctctcgaagtgaattcccgcagccgctcagcttccccttacagagtcgcctcacttttgtcacccactccttgcctcgcgccttctctgtgcagtggttggcacacctgctttgggatgcgtggtttgctcatctgtctgatctgggcttgcccatggcctattgttacttggtcatgacgtgtgcttctttttgcctccatgccatcctccctcctgtctcggatgtctctcccataccctctcatgggtgcctcctggcagaccctcgcccttccccccagctctgtgtcacttatgagcttctgcgctctgccttgattggtccctctagctgtcacttgctggttcatgatacaggtgtcaccacatcactgcgctggggcagggggctgggaaggtgagggcaggtgggtgggctggggcctgacctcctctccccaccccttcctcctgcagctgttcttccacctgtcccgggagcgtgtcttcacagaggagcgggcccggttttatggtgcagagattgtctcggctcttgagtacttgcactcgcgggacgtggtataccgcgacatcaaggttagtggcagggtgtgcgccaggctgacctgtggcatgcacaccacatgggactcacactggggaagttgggctgagcttctgccctcattcgccaggctccccaccaaggtccagggtggtggctgccctcattcgccaggctccccaccaaggtccagggtggtggctgccctcattcaccaggctccccaccaaggtccagggtggtggctctgtggcaagttgccccaagtagggaccttcccaagcctcccatgagcgctcctaggccactagcggagtgtcaactgccacaatacctactttatttgtatttatttatttatttatttttgaggagtcttactctgttgagtgcagtggtgtgatctcggctcgctgcaacctctgcctcccgggttcaagcgattgtcctgcctcagcctcccgaataggtgggattacaggtgcccgccaccatgcccagctaatttttgtatttttagtagagacggggtttcatcatattggccaggctggtctcaaact

SEQ ID NO: 21687 - DNA, 2300 bp, Homo sapien
ggaggccgggccaggagtggaattctactttttcccttatttgaattttttgtagtggaagattccaaagacattcaaaaatttaaaaagaaaataaatattacggacccccatgtagccattgtccagtttaaccagttatcagcgtttagccagccttgtttccttagctctgcctgtccctcttgttctggaatactttaaggcctgtcctagacaacacgtcacttcactcatccatacttgaacatgtgtcctgacagatgaagactgtaaagaatataatcatgtggtgctgccatcagagccaaccaaattagctgttcattcctgatgtgacgattgggcctaaggcagccttcctcagcctcagcactgttaacgttttgggacagatgattctgcgctgtcggggcagccctgtgcattctagggtttcagcagcacccctggcttctacccactgaagccaatactagctccccaagttgtgacaatcaaaaatgacttttgggttgggcgccacagctcacgcctgtaattccagcactttagaaggctgaggtgggaggatcgcttgagcccaggagttcgagaccagcctgggcaacaaagcaagaccctgtctctgtaaaaataaaaataaattagctgggcatagtggcgtgcacctgtagtcccagctgctcaggaggctgaagtgggaggatcagtggagcctcagaggttgaggctgtagtgacccatgttcacaccactgcactccagcctgggcgacagagccagacccccagctaaaaaaaaaaagggaaaaaaaaaaaaaagacttcagacattctcaggtgtcccctggggataaacttgccccagagagagcctgtgttcacgttgctgcaggtggctccagatttttggaaccactcctggtggttctgctgtacagtcaggtaccaaattagaacctgaattagagtcacccaaagggcttgtgagacagtgctgggcccaccccgagtttctgactcagtgggcctgggggtaggtcccaggaatttgcattgctgccagttcccaggcggtgctgaggtgctgtgtggggaccacaccaagaagcactgtttttccttctttgggcaagaatgctttctaggtgggacttcccacagcctgtggtggcacctcggggctctcgtgatgtctgtttgtctcccttgcagggacgtcacaggtgtcttgtccctagcagcctggtccttacattgtgacattcctgctgacttttcacctgtggctttgagagccactgatgatcctcgtctgggtctgctatttgctgagggtttgcaggctttcacttttcactcctgtgattttctgcatttatggctgggaatggaattgcatttcacaaggccttgctccccttcgtcggggcggagtgggcaggtgtggtgttgcccaccagcccctcacccgcagtctgtctgcaggatgaagtcgctcacacagtcaccgagagccgggtcctccagaacaccaggcacccgttcctcactgtgagttgccctccccttcccagacagtgtgaggccagcctttggacagagctcagagagagagccctaatcttctggtacaaagcacagtcttggggtaggccaggcgggcagggcaaggtgttgctgcgccctgccaagtcatccgaaccaagacatgtggtgggggtgagcaggctcggggagtgggagggtgacagcttcttcatagatggtggcttcatgtaagcatttgaactaactgaagatatcacattatttgctggctgctgtctctatgagttaggagcacttagcccagctggttgaagtggaaacattattttttttgtttttgttttcagatatgctcatagaagcagatgtgttagcattgtgttgtctgtcagcctggactgagtagatgcctgtttgggctgcagtctccatcaaggccagtggccaccagttaaatggactagattgaggatggcttatgtatcatttctttatctcagttgctgtccaggtatcctattaagccacagtactttttcaaataaaatcttatgaggtacctcagtgcagaaaacagaatagttgagttgtcatgagctgaaggaccccctggtgggagtctctgaggaactctctgtagatctccttagtgcagtggagaactactgtttgttgactgacagcctgtccatcctgtcattgaagttggctcccaagcctttgccactcccagccacagcagacatc

SEQ ID NO: 21688 - DNA, 2300 bp, Homo sapien
tcaccttccttaattttgaaattttttataaaggcgtggtcttcttatgttgtctaggctggtctggaattcctgggctcaagcagtcctccagcctctgcctcctaaattgcagggattacatgagtgagctaccttgcccatccctgcaccttcctttttctcttaagaagtctcagatcatcccaagtcagcatacagacctgcctcaatctttcccccagctgcagaatgtctcattgcacagatgcctcacaggcattctacctcacgacagcctgtgtattaaacactgctgtgatatttcatcaaatcgaaggcgctgtcattggggaggcaccctgtttcatatagtgccaagaaaaaggcgtgcccagttaaatcaagacagaccccaactgtgagattaatctgcattccagcagtgtcaaaatgtggaagagggtgcgttgtgggatggatggaaatagaagtagtttcgcgtggtacaccaggaaacgagactggggaggaatacagcccagcagggtgtcccggcttggattttgaagcccagtcccagccacacttgttccctgcctgaccttgggtaggggccccagtgtctcaggaacacaggagcagtgacacttgccctggggcgggggccatcctggaagatgctgtgaagggctggctgcactccctgtggcttatttaaatcactgggatttgcgtgattacactctctgaattttctcattcttagtgaacattttatttttcttgttggtcatatgagtattttctagatacaagcaaaatacacggggggttcaaaatgcgttgggttgaaacacctaattgcagtgtggtcaaaaatgggggatgtggacaatttggtgtaattcagcctaatatatttttcattttggtctctggtcattttcacttattagacagaacagtttgtaagtatccaaagaaaattattttgttttttttttagctgattgcagtggtatgatcatggctcactgcagcctccacctcctgggctcaagcagttctcccaccttagccccctgagtagctgagaccacaggcatgtgcccccacacctggctaattttttatctttggtctctacaaagtgggtatccatgttgcctaggctggtctcaaacttccggatgcaagccatcgtcccgtctcagtctcccaaagtgccaggattgcaggtgtgagccaccgagcccagctcaaagacagttctttctcagcaagttctaaaccatgagtgacagaactagtttattgttctttattttattattattattattattattattattattattattttattattattttgggatggagtctcgcactgttgtccaggctggagtgcagtggcgcgatctcggctcactgcaacctccgcctcccgggttcaaatgatcctcttgcctcagcctcccgagtagctgggattacaggcgcccgtcaccacgcccggctaattttttgtatttttagtagagactgggttttactatgttggccaggctggtctcgaactcctgacctcaagtgatcctccaccttggcctcccaaagtgctgggattacaggcgtgagccatcgcacctggcctgtttttattttttatttttgttttttaaaaactttttaagagatgggtcttgctttgttacctaggctggtcttgaacgcttcggctcaagcacttggtccaccttggcctcccaaaatgctgggattacaggtgtgagccacagtgcttagcctctagttaactgttcttaaaccaggctcccttctgctgggacctacttcttgtccaccagcttctctcctctacatccctgggctgccaggacctctgtccctgccatgcagactccctgctcccagtggactgtcccctccagggagtcctgcgggccagctcttgccttgcagtgtcttcagctcctttggctaatgaatgctgcttcttactcttggtttaactttacaaaacattggtaacttataaacttgagcttgtcatttgttccgaagaattcacaggagcactctctctccctcattcaaggctcagggtggtggctcattttcaaggggctgtgaaaagagagggtcactcctttttgatcatttccctgctgcctggcttcaaatggccctcaggccaggtcactttagggaaattggtgatcgctcttggtattccactttttttttttttttgagacggagtctcgcactgtcaccaggctggagtgcag

SEQ ID NO: 21689 - DNA, 2300 bp, Homo sapien
gtgagggggagagagcagggtggcagggctcagggcctgggctatgatggggatccagggctttatccccaaagagaagggacacaggtgggtggggagggacctgtgtgggagagagctggctggattcaggtggcagccagggatggagaaagcagaccatattctgctttggagacagggcgccctagagcccagcttctcaaactggtgtccgaaggccttggcgggtgggaggaggtgtctgcagggcattgactctttttagctgtgtgttttcatttagatgatattttcaaaaagttagtaggggcatgttggaaattattgggatgattcctttagaaccaagtagtgacagcagtaacattagctgccactgcatggctctgacaggctcaggacggcccctgatgtcagagtcctttatgtaattgccacctatttttcaagcactggccctgtccccagctgtgtgtgaagccatctcattgggtccccaggacaacccatggttatcagaaaaatcatctttttaaatttttcattatttttttgagacagggtctggctctgtcacccaggctggaatgcagtggcaccatcatggctgattgcagccttgacctcactggctcaagtggtcctcccacctcagccttctgagtagctgggactacaggcatgcaccatcatacctggctaatttttttaaaacaattttcagtagagatgggagtctccctattttgctcaggctgatcttgaacttttgggctccagtgatccacatccctcagcctcccaaagtgctgggattacaggcgtgaatcactgcacctggcctgcaaaaattatcttttgagataacataaacatgtgcttgggcagattggtgttaagattccattctacaggctgggcacggtggttcacacctgtaatcccagcactttgggaggccgaggagggtggatcacgaggtcaggagttcagtaccagcctggccaagatggtgaaaccctgtctgtactaaaaatacaaaaattagccaggtgtggtggtgggtgcctataatcctagctattcgggaggttgagacaggagaattgcttgaacctgggaagcagaggttgcagtgagccaagatcgcactactgcactccagcctggcgacagagtgagactctgtctcaaaaaaaaaaaaaaaaaaaaaaaaaaaaaaaaaaaaaaagattccattttacagatgcggaagctgaggttcagagaagtgacctgtgtagcctggaagtggtagagtcaggatttgagttgactagaggtgtgagtttgggcctgagtcctgctccaattccccaggtaagctgcgttggggtgcgggagagatggggtatagcatgggagcttccagccgcactgggatgatctggctcctcttgggcctgtgagagtcacatccctgcctcctgcctttaagctcccggtgcttaattagcaggaattctatagaattgcactccagaatggtagctactagccatgtatggacttttttttttttttttgagacggagtcttgctctgtcacccaggctggagtgcagtggtgtgatcttgtctcactacaaccgccgcctcccgggttcaagcgattctctgcctcagcctcccgagtagctgggattacaggcgcctaccaccacgcctggctaatttttgtatttttagtagagacagggtttcaccatcttggccaggctggtcttgaactcctgaccttgtgatcgccccccgcccaccccccccccccccagcctcccaaagtgctgggattacaggcgtgagtcatcgtgcccggactcacatatggctttttaagttttaattaattacaattaaagaaaagtaaaaagtcagttctttagttgcactagccatcattcaaacatttagtaaccacatttctgtcgttatggaaaggtctgtgggctagttctgctctggttgcggtccctctcctgcacctactcgctgtgactgtgtgcatgtggctctctccctgggcctcagttttcccatgtgaggaacggggatagtaacacaggctggctgtgaagatgaacattaatccatgcctggtgctttgtgagtgctcactgagtattagccttgatgcagacccactggtttctccttttgccactgggccctgccctggagctcccagggaggtggtggcgatgcagagcgacgtgggtcagggattccccatgcagtccaactggagggctcccgtg

SEQ ID NO: 21690 - DNA, 2300 bp, Homo sapien
gccaaggcaggtggatcacgaggtcaagagatggagactatcctggccaacatggtgaaaccccctctctactaaaaatacaaaaaaattagctgggcgtgttggcgcgtgcctgtaatcccagctactcaggaggccgaggcaggagaatcgcttgaacctgggaggcagagggcagaggttgcagtgagccaagatctcgccactgcactccagcctggcgatgcagtgagtctcaaaaaaaaaaaaaaaaaaaaagagaaagccactgcccttgactaccagtgctgcaaggagtttatacacaagcacatgggtggtttcagtgagatctcagtgtgtcataattaagtgccctaggaggggctaggattcaagttggcccaggggagacttagacgtaggggaatggcctgtgagctgttcagtgtggacaggagtgaagagggttggtcacagtaaccttgagtctagattagggcagaagggctaatgcttgaaacaaacattctgcaagagcccactctgggcaatgttggatacacactgatctctgagacagtcttggtctcttcctttactgtgtttcctgtgcagtgggggaaacagacctgtcaccagacagtaatagatgaaaatggttagggctgtgaagggggaggcattggtcagagttattaacaccgactgatggggaagaccgggaattaggaataccaagcagcaagttccaagctagaaaccaaataagaaagggctagttccagcattaggtttacgtctcagaaaacgaaagccgaaccctcagcaggatttgcctgaaacactctcacagactgaggtggacccaggattcaactctcagtcaggcatttttctcacttaccaatgcatacaattgccaagttatatggcatactggaacccaaattcaggaggcagcacaatcccctatgagagaggaggggctgggagccagatgtctcacagctgtccagtatactagctaatatacggattaggatctgtgcaaagctcttttcttgcagggtcattttttttcttttttctttcttttcttttttttttttttttttgagacggagacttgcactgtcgcccgggccggagtgcaatggcatgatctcggctcactgaaacctctgcctcccgggttcacgcgattctcctgcctcaagcctcccaagtagttgggattacaggcacacaccgacatgcccggcttttttttttttttttgtattttgagtagagacggggtttcactatgttggccaggctgtctcgaactcctgacctcatgatccgtctgccttggcctccccaagtgctaggattacaggagtgagccaccgcgcccggccgcagggtgattttaaggcctttatgggcccaagttgcattataaaatgttatatcccagattcactggaatatgtacgatgagagcaggtggcattaatatcttgcagtaatgaactaattggtaaaaaccgttttgtttacattaaaatggttcaaaagccagcgacacagcgatgattgtttccatttagcagatgtggatactgaggcacagaaaacggtcaagccttctgcccacagtcaccagaaaggaggaaattcaagtctggggttgtgtggcttcagagcctgagctcaaccatgacgagcacactgaaaaggaaacccctcctaactaactcccgctccggggtcctttaagagcgtcagaacccagaactgagtaaaacaagatcaaagcgtatgtaaatacggactaggggctgccgggaaataatcactacggctaggccctagggaaagcagacgtcggagtcctagtgcgcctgcgtagccccatctcgcctttccgccccacggcctagcgaggcccatctctaacccacacaggcccaaagttgtctaatgtgcgcaggcgccctgctgtgagcccgcctccttctctgccctgctcttgcgctctcgctctctcagagttcgtctctggctctttgtacgtcacttcctgtttgtggcgcgagagggcggtatttccgtccagagggtgggagggggcggtaagcgggggctggggggagggggcggggggggccgcgccgtgctagccgttgggcctgcctcggaggaggcgtcgccgccgccgctgccgctgccggcgccgttgccgctgccgggaaacacaaggaaagggaaccagcgcagcgtggcgatgggcgggggtagagccccgccggagaggctgggcggctgccggt

SEQ ID NO: 21691 - DNA, 2300 bp, Homo sapien
catctgtactaaaaatacaaaaattagctgggtgtggtggcgagtgcctgtggtcccagctgctcgggaggctgaggcaggagaaccgcttgaacccaggaggcgaaggttgcagtgagccgagatcgcgccactgcactccagcctgggcgacagagcaagactttgtctcaaaaaaaaaaaaaaaaaattgagcagaagccagagaagggcaagattaaccctagtgaggatagagaagagagtctcatatgtggggacttagggaaagtgtcacaaagtagatggcagtggagcagaaggaaggataggttgccaggaggagacaggcattccaggcacaggtgacatcctctaaaaactgggaggccggcaaagcacctgtgtggggaaggaggcctggaggatgagaccaggcacaacacctccagggtgcttagtaggcaccaagcactgtctcaagtgcttttattcatagaaactcatccagcccttatagcagtcctctaaggtaagtcatgtttgcaccctcccaattcacaaatggtgacaccgcggcctgactgttgaagtcacttgccgagatcacacagctaataagtggtagagctggatttgaactgtacagtctggttgcagagttgttactcttgaccactccattataccatcaaaatctgttaggggatgggacaggtcgtatggggtggtaaacaggaaggttctgggacagagggcttctgcaccccatgcgggggtgagggaggatcagtattgggggctgcggtagatagaagggaacagagtgagggaagagggcagaggagccgggtcagggaagaggcagagggctaagtaggaaggaagtttgggccagggcagtgtgggccccatgatcctggagtcgcatagcgttgaatcagcacatgaaaaagttatttcctttagttcccattcaacactgcttttaacggagacagtctccattggtgctaatatgtccttaacaccacctttctaccatctgctaatgtaagggaaaattggttttccatgtcttctctgggacgtctcatgatcaggtcgccacttctgtgacctgtctcctcccagtgtccttcctgctcgctccactgcagccacactggctccttgctttccctccagcatgccagatgagccactggctcagggcgctggacttgctgtaccttcttctggaacactttttctctgtaaaaccacatggctcattgcttccctccctttaggtctctaaatgttgctttaggtcttccctgatcactctgctgaaaattacaacccctcccttcccaggtcctccatgtcttctccgtggcactaaaggcttcctaacgtactatattaactgtttggcttgtttactctctgtctcccctgtcccctgtacccagctagctgctaagttccatggctttgttcaacttggtatccctaagtgccttacacatagtaggttctcagtgaatagggttttgggtttgtttgtttgtttgtttgtttgaagactagtcaactgcagtagtgagaaaaggagaaagagtagaataaggagttccatctgtaaaggactatgaacagtcaattgagataattcactaccttcggaccagcctttttttttgagacagggtcttgctatgttgtccaggctggtcttgaactcctggcttcaagtaatcctcccaccttggcctcccaaagtcctgggattacaggcatgagccagcatgcttggctggtatttattgttaaagtcttggccagaagtgtcttatttctgttgcactccttttccagccaaccttttggggtgtgtgtgaatggagctgtggacatttgctgtccctgggccttgtctcaggcacaagcgatgatggtggtggcagctctgtcccaggctgacttcctgccagctgctccaggctattcctgggcggtgagcccctagcccaggaacattcctctggcatgcagacagacaggcacaggagagggacaaacactcacagccggcagcagctcatgggctctctcctctcttctctttcaggctccagggagcagtgtcagggccagggagacgatggtctccgtgactatgggtgagtctgtggccttctctccagggccccctctccccactgccctttttgaggtatggccttggtgggggatgatgggatgggggagggaggactgggtcactggcaggaacagctgtactctgaggaccgtggcagggtggggctggaact

SEQ ID NO: 21692 - DNA, 2300 bp, Homo sapien
gtgcagtggcgtgatctcgtctcactgcaacctctgcctcccaggttcaagcaattatcctgcctcagcctcccaagtagctgggattacaggcccccaccaccatgcccggctaattttctgtagttttagtagagacggggtttcaccgtgttagccaggatggtctctatctcctgacctcgtgatccgcccgtctcggcctcccaaagtgctaggattacaggcgtgagccaccacgcccagccaaggacccattcttaaaggtgttacaaggattaaacgagttaataaacagagtccttagaacaaagatgcacggcaggtggttaagtgcgatgttaagtgtgcatcaaataaaacaaatcttcagtaagctagggaaacagtgggacagtcactgacttaatgctagttttatacaaagtgtgagctgggaacaagtataaggacaacttaatgggggtccatgggatctgacaacagggaatcacacagtacaggttctgaacagtatccctattcaaagggaatacgtagtattccttttcaattatctttccatttcagtgtacaatgtaatgggctgttcagtttccattgtattttacctgaacttttccttcctctcatggccagcaatgctagttttccattgaagacagcaatgcgccgggcacggtggctcacacctgtaatcccagcactttgggaggcagaggcgggcagatcacctgaagtcagaagttcgagaccagcctgaccaacatgcagaaaccccgtctctactaaaatacaaaaaaaattagccgggcgtggtggcgcatgcctgtaatcccagctactcggaaggttgaggcaggagaatcccttgaacccaggaagcggaggttgcggtgagacgaaattgcaccattgcactccagcctgggcaacaagagcgaaactccgtctcaaagaaaaaaaaaagaagaagacagcaatgcaaatttgccttctcaaattaacttactggggaaaaaaatgcactagtcattatcaagaaaaagaaaaaaactagtacttcaggactcagcaaaattggtcaaatagtaagtgacaggatgtcgatttccccggctccaattctaagtttttcctattgctgtctctgagctttctcccccagcttccctggaattcccagctacaccaatgactctcagaatcattatcattatagtcccaatccacgagctctcactgtgccagcccctctgcttaaaatctttacacacacagatttcatcagaatcctcaagacgaccctatgatattgggactatctgctctcattgtacagatgagaaaaaacggggttcaaggaagcgaagacacaggccccactgccgcacagtggagcgggacttgaaccaaaattcgacggcttccaaacccaacaatttttcatactaagcgctcaaacatcaatactaataataatagtatagtaacgaagtgagcgttatgcggaggcgctgagctaaggcatccaacgtacacgacctgacttctcactcccatttataaagccggtgatacagtcggattctaacccccattccacaggggaggaaactgaggctcaaagaaacaaatcgtaagtccgaagccgtacaacggagcccgaactgagtccagacacccggacgccacccgtccctaccgcaaccggcccagtcccaccacccccggcccgcgcctcacctggcccaccgggcccgcgcccactcgcgccgcccgccctccctcccggcggcgccaactgtcagacactcctcccccggcccgggctgcccgccccggaagcatcctctcaccgccggaagctgaactgactcgtccgcggccgctctaccccaacaggccgccaccagcgagagtgcggccataaccatcacgtgaccgcccaccgacaccagcgagagtgcagtcgtaaccgtcacgtgaccgcccaccgtcggcccggcgctcccctccgcccgaagctagcaagcggcgcggccaatgagaaaggcgcatgcctggcccccgccggcctgcagtctagccgtagtgcgcctgcgcgcggctaggaggggccgtcaggcggggatacagcctggaaggtgcgtgtggggctgggtctcggagtgggagacgtggagtgcaggtactgtgcgatctgggggcgcggcgcctcggctaccctcctcgtgttgtcttccacgctataatgcatggaatataatatatattatatggaatataatatatggaat

SEQ ID NO: 21693 - DNA, 2300 bp, Homo sapien
aggtgtgagccattgcgccaggccgagatatttttgtctgtattgttcattgaggtatccccagtgtctagcagtgttgggcacatatatagtacatgcttaagaattatgtgcagaatgattaatttgtgttttcattcccatattgcagatgcagtaactgaggcgctgggaggttaagttagttgcccaagatcatgcagtttttttttttttttttttttttgagacggagtctcgctcttgttgcccaggctacagtgcaatggcacgatctaggctcactgcaacctccgcctctcagattcgaacgattctcctgtctcagcctcccgagtagctgggattacaggcatgtgccaccatgcctggctaattttgtatttttaatagagatggggtttctccatgttggtcaggctggtctcgaacttccgacctgaggtgatccgcccgcctcggcctcccaaagtgctgggattacaggcgtgagccaccgcgcctggcctattattattatttttttttgagacggagtctcgctcttgttgcccaggctggagtgcaatggcgcgatctcggctcactgcaacctccacctccccggttcaagccattctcctgcctcagcctcccgagtagctgggattataggcatgcaccaccacgcccggctaattttgtatttttagtagagacggggtttctccatgttgatcaggctggtctcgaactcccgacatcaggtgatccgcccaccttggcctcctaaagtgctgggattacaggcatgagccaccgcacccggccgagggtgacatggttaataacaatattagccaaaaacaccatgtcaagctgagcctaccacaagaataaactcacagaatcgtcacactcagccctgatgtggatgtccccgtgtgcattttgcagatgaagctgggattggaaaggtgccataaggcagtcaaggtatccagaggtgtagtggtggggctgggattctgacacaccccaggtaatgggctgcagtaccccgtatgttatgtgagatgtgacacggggaaatgacgaagacacggagggaagaaaaataactgtaaggctgggtggctccttatggggaaaactggaagcatgaggagtggatggtgactggtcagaggaacagtgatgccaagggagggacaaagacacaaggggtaatgatgacgtaagagttgcattagcgcgatttaagaagagcgatggggacagtagccatgcgaaggtgacttgggggtatgatgagggtttaaagagaaatgaggattttataaaggagaaatggcaacaaaagcaggatgcaggtaacatatggcgatgacgaatttaaagggagcgattacgacctatggtggcaaagagggcttacagggaacgaaagcgagttaagggcgttgatgacaacaagaggagttgtgaggatttaaagagggtgatggcgacagaaggagttgtgaggatttaagtgggatgagacagaaggagaggaatggtgacataaagagaccgaggacgacataaattatagcgtggaagacaacgctataattatatatattatattccatatattatattccatataatatatattatattccatgcattatagcgtggaagacaacacgaggagggtagccgaggcgccgcgcccccagatcgcacagtacctgcactccacgtctcccactccgagacccagccccacacgcaccttccaggctgtatccccgcctgacggcccctcctagccgcgcgcaggcgcactacggctagactgcaggccggcgggggccaggcatgcgcctttctcattggccgcgccgcttgctagcttcgggcggaggggagcgccgggccgacggtgggcggtcacgtgacggttacgactgcactctcgctggtgtcggtgggcggtcacgtgatggttatggccgcactctcgctggtggcggcctgttggggtagagcggccgcggacgagtcagttcagcttccggcggtgagaggatgcttccggggcgggcagcccgggccgggggaggagtgtctgacagttggcgccgccgggagggagggcgggcggcgcgagtgggcgcgggcccggtgggccaggtgaggcgcgggccgggggtggtgggactgggccggttgcggtagggacgggtggcgtccgggtgtctggactcagttcgggctccgttgtacggcttcggacttacgatttgtttctttgagcctcagtttcctcc

SEQ ID NO: 21694 - DNA, 2300 bp, Homo sapien
agattttaggggcgcgccaccatgcctggctaatttttgcatttttagtagagatggggcttcaccatgttgtccaggctggtctcaaactcctggtctcaggtgatccacccacttcacctcccaaagtgcttggattacaggtgtgagccattgcgccaggccgagatatttttgtctgtattgttcattgaggtatccccagtgtctagcagtgttgggcacatatatagtacatgcttaagaattatgtgcagaatgattaatttgtgttttcattcccatattgcagatgcagtaactgaggcgctgggaggttaagttagttgcccaagatcatgcagtttttttttttttttttttttttgagacggagtctcgctcttgttgcccaggctacagtgcaatggcacgatctaggctcactgcaacctccgcctctcagattcgaacgattctcctgtctcagcctcccgagtagctgggattacaggcatgtgccaccatgcctggctaattttgtatttttaatagagatggggtttctccatgttggtcaggctggtctcgaacttccgacctgaggtgatccgcccgcctcggcctcccaaagtgctgggattacaggcgtgagccaccgcgcctggcctattattattatttttttttgagacggagtctcgctcttgttgcccaggctggagtgcaatggcgcgatctcggctcactgcaacctccacctccccggttcaagccattctcctgcctcagcctcccgagtagctgggattataggcatgcaccaccacgcccggctaattttgtatttttagtagagacggggtttctccatgttgatcaggctggtctcgaactcccgacatcaggtgatccgcccaccttggcctcctaaagtgctgggattacaggcatgagccaccgcacccggccgagggtgacatggttaataacaatattagccaaaaacaccatgtcaagctgagcctaccacaagaataaactcacagaatcgtcacactcagccctgatgtggatgtccccgtgtgcattttgcagatgaagctgggattggaaaggtgccataaggcagtcaaggtatccagaggtgtagtggtggggctgggattctgacacaccccaggtaatgggctgcagtaccccgtatgttatgtgagatgtgacacggggaaatgacgaagacacggagggaagaaaaataactgtaaggctgggtggctccttatggggaaaactggaagcatgaggagtggatggtgactggtcagaggaacagtgatgccaagggagggacaaagacacaaggggtaatgatgacgtaagagttgcattagcgcgatttaagaagagcgatggggacagtagccatgcgaaggtgacttgggggtatgatgagggtttaaagagaaatgaggattttataaaggagaaatggcaacaaaagcaggatgcaggtaacatatggcgatgacgaatttaaagggagcgattacgacctatggtggcaaagagggcttacagggaacgaaagcgagttaagggcgttgatgacaacaagaggagttgtgaggatttaaagagggtgatggcgacagaaggagttgtgaggatttaagtgggatgagacagaaggagaggaatggtgacataaagagaccgaggacgacataaattatagcgtggaagacaacgctataattatatatattatattccatatattatattccatataatatatattatattccatgcattatagcgtggaagacaacacgaggagggtagccgaggcgccgcgcccccagatcgcacagtacctgcactccacgtctcccactccgagacccagccccacacgcaccttccaggctgtatccccgcctgacggcccctcctagccgcgcgcaggcgcactacggctagactgcaggccggcgggggccaggcatgcgcctttctcattggccgcgccgcttgctagcttcgggcggaggggagcgccgggccgacggtgggcggtcacgtgacggttacgactgcactctcgctggtgtcggtgggcggtcacgtgatggttatggccgcactctcgctggtggcggcctgttggggtagagcggccgcggacgagtcagttcagcttccggcggtgagaggatgcttccggggcgggcagcccgggccgggggaggagtgtctgacagttggcgccgccgggagggagggcgggcggcgcgagtgggcgcgggcccggtggg

SEQ ID NO: 21695 - DNA, 2300 bp, Homo sapien
attatctgcacccaccctatatgctctgggcttagaactgataccagctggttatcattgtgtataaaagtgtcactaggtatagagagacatctaaaataatctcctctcaaaattttctattctgctgctccatttcttctgctttcagtattttttgagcaattacaatggtctgggccctagagctagaggaataaatcagacacggacatagcaagggacacatatgttgattatgtgtgattaaaatgtatacaagatacgagggcgtacacagatctcaccaactagcatgtttcaagggcttactgtgcttcctgccttccatggatgatctcattgacttcccaacaaatgtgaggttggtattattaatctccacattgttcaaagaatgaaagtgtggcttagagaagggaacctcttttcccagttccacagagctgagatctgaagtctgagctgtgggactctgagacccacccccttaaccattcagagatcccccagccaccaccctccagtgcatataagatgatacccatttcatttgttgttttgagaccgtgtcttgctctgtcgcccaggctggagtgcagtggcacaatcacggctcactgcagccttgacctcctggactcaagcagtggtcccacctcagcctcccaagtggctgggaccacaggcgtaggcatgggctaccacacctagccaattatctttttgtttgtttgtttttgagatggagtttcgctcttgttgcccagactggcatgcaatgatgcaatctcggctcactgcaacctctgcctcccaggttcaagcgattcttggacctcagcctcccgagtagcctgccaccatgccaggctaatttttgtatttttggtagagacgaggtttcaccatgttggccaggctggtctcgaactcctgacctcaggtgatccacccatcttggcctcccaaagtgctgggattacaggcatgagccaccgtgcccagccgcctagccaattttttaagtttttgtagagatggggtcacaccttgttgccccaactggtctcaaactcctgagctcaagccatcctcccgccttggcctcccaaagtgctgggattataggcataagccactgcgccctgccaatatggctaatactggtttatagatgaggccagcagggctcagaagtaaagccccatgctcagcatcactcagcaagaaagtggcagaggtgtgatctgaaccatgagctctccaatttaaagggctgctgtagaggaggaatcaaatctcccactgccaccctcccctgggggtggggtgttcagggatctgtgacccagtgggttttacttcctcctttttgcgggctatggtgtcatactccaaggggggcaggaccacaaggcaaggggactagggggtattctgtgggctgggagagagcacgcttcctggcagtgccctctcccagatgagacctgatctcttttttgttttttgttttttgttttgagacagagttttgctcttcttgcccaggctggagtacaatggcgcaatcttggctcactgcaacctccgcctcccaggttcaagcgattctcctgcctcagcctcctgagtagctgggattacaggcatgcgccaccacgcccggctaattttgtatttttagtagagacggggtttcaccatgttggtcaggctggtcttgaactcccgacctcaggtgatttgcccacctcagcctcccaaagtgctggattacaggtgtgagccactgcgcccgaccgagacctgatttcatctcatgtcataccagcaaggaggcagagcataagtaccaacctggatggggcgcgctgggagccccatggaggttctagggtcctgagaatacaggcattgagacgggctgaggaggaactccagcatccggctgcccgtgcccaccttcagtttcaccctaccctgctcccacaaggatctgagcagggagggggcctgatttccttctcccgctgagaccacagtcctctggaggctaggatctggtgatggggcaccctagctaggagcctgagcctctttataatttagtttccatagaagttatatgtgcatttaaaaaaattcaatgtaagtaaagacctacaatgaaaagcaaccgtcttgtctctgggggtgggatgggggatgcctttgcgtggggagctgttaggagacttgacagtcacctttgctgagagcctcctgcatgtcaggggctcttctatgcacattat

SEQ ID NO: 21696 - DNA, 2300 bp, Homo sapien
ccttgcagttgctgcggccaaaactcagtcatccctcactcctttactgctctcaaacccacatccagcctagaaatgccatcccctccaccttcaaaatgcatccagaccccgccctttcttcgacacttggctgaccacaccctggtcctgtccacccttggctcctgtctggatgctcccagcagcctcctccctgggctcccttgccctgccccagtctgttccccacgcacagccgccaggggatcctgtaacacctgtgtttgtttcttcgggctgctgtaacaaattgccaccaagttggtggcttaacacaacagaatgtatggccaggcgcagtggctcctgcctgtaatcccagcactttgggaggccgagacagtcgatcatttgaagttgcaccactgcactccagcctggataacagagcgagactccgtcttaaaaaaaaaaaaaaaaaaaaaagacaacaaattcattctctcagttttggagccgaagtccaaactcaaggtgtagcagggccatgcgcctccagaagctggaggggagattccattcctcacctctcccagcttctagtggctccaggcattgctgggtttatggccacatcaccctaatgtcagcctccctgttcacatgaccttctgcctgttctatctctgaggacagttgtgattggatttagggcccatccagttagtccaggatgatctcatctcaagatcctaaatctgattacaattgcaaagatcctttttccaaataaggtcacatgcacgtaagttccggggattatgcttgcgtgggacacatcttttttgaggccaccattcaacccactacaaaatccaactgaagcccagcgaagtggctcatgcctgaaatccccgcactgtgcgaggccaaggcaggagggtcacctgaggccaggagttcaagagtagcctgggcagcgtagggagatcctcatctcttttttttttcgagatggagtttcgttcttgttactcaggctggagtgcaatggcgcaatcttggctcactataacttcctcctcctgggttcaagcgattctcctgcctcagcaatcccgagtagctgggattacaggcatgtgccaccatgcccagctaattttttatttttagtagagacagggtttctccatgttggtcaggctggtctcgaactcccaacctcaggtgatccgcccaccttggcctcccaaagtgctgggattacaggcatgagccatcacgcccagtggagatccccatctcttaaaaaaatctgaagcagatcacatcatccttccctgctgggaacccacacgtgaccctgttctactcatcacagtccaggcagccctgcaggatctggccctatcacctctgtgacatctcctctcccactccccccagcccacttcactgcagacacactggcatcctcactcttctccatccacaccaggcacattcctccctcagggcctttgtactgatcatttttcccacagatgtccatctcaccccaccttgaagtttttcttcaggtatccccttctcagtgaggccttttctgacctccttattaaatatcacaaacaattccacccccacccccttccctgatcctctatggcacttactaccttctaacattatatcatttatttattatcttgtttattatcaccttttttttttattttttgagacggagtttcctttgtcgcccacgctggagtgcggtggcgccaactcactgcaacctccacctccctggttcaagcaattcgcccacctcagcctcctgagtagctgagattacaggcgccctccaacacgcccggctaatttttgtatttttagtagagatgggatttcgccatgttggccaggctggtctcgaatgccagacctcaggtgatccacccacatcggccccccaaagtgctggcattacaggcgtgagacaccgcgcctggcctctgtttttccctcgtgtctattttgttcacagctgtatccccagtgcctaaaacaatacctgatgcacacaaggcaaccagtaaatgtgtgtaaaattaacgaacagcaaatgctattgttaccatgcccattttgcagatggagaaaccaagagcacagaggtgttgtcacttctccaaggtcaaacagtcactaagtgcagaagctcagattcaaacacaggtatctggctctagcacttactgtattgtcttgccagtctcatccaatcgaaatcacttctccagtactagttt

SEQ ID NO: 21697 - DNA, 2300 bp, Homo sapien
ggcgaattgctcgaaccagggaggtggaggttgcagtgagccgagatggcgccactgcactccagcgtgggagagacagagcgagactgcgtctccaaaaaaaaaaaaaaaagcagctgggcatggtggcacgtgcctgtagtcccagctgcttgggaggctgaggcaggaggattgcttgagcctgggaagttgaggccgcagtgagctatgatcatgctgctgcactccagcctagggaacagaactctggcactaaaaaaagaaaagaaaagaaaagaaaataggcttacaataaaaagcaatcttgacctaccccaaaatcccactcccttgaagacaaccacttctgccctgttgcttctctcagtaatactccttttctgcagttatctcttgacttcctgccatgtgtgtttgggggagcttgagggaagagggtgtccctgtctcattgagagaggtgccaccctgccgtgaaaagaggtgccaccctctgtcaattaggagaggagggatgagagaggaaaggggtctccagtgtatttctccagccggggccttaaatccctcttgggagatatgggatggggtggatcggaaaataaatttttttaaatccctaccaaaatatcagctggctttttttaaaaaatcaaataccaaaatctaaatagactccaacagaaaattcaccatctcctctgaccttttcttcccatctcatgctgtgaactgtcttctgttgactttatcgctacctttcttcattctgttattcaaccatgatctctccgtttcattttataagcgttttattaatttcatttatgtatttatttttgactaggtaatgcatgtccatggtacacaaattcacaaggtttgtaaatgagaaaagacgtgaggttccttttgttctttacctgtggcctccctgccctacacggggactctagggtggaatgtagcaaagcccatccaccagccatgtactaccccccaacccggccaggctggagcgaccgtgtctggggagccgagccccgcttctcgctgcggtgagcccggactggggcacgcactgcgcagactccccgctgcagtgggcggagctcccacaggccccgccccctcctcccaccctcgttcagcctgtccagacagaagctggggcccaccggaggtagctgcagacgcctgagagcgaggccgaggcccctcaggggtaggtggggggaggctggctggggggatgggcagcggggtggcagggaggccccgatgatccctggctgagctgtgtggtgtgggggcacctgagggcggaggagccacctagaatataccccctgtcccagggctgagaaaagccaggcacaaagacctggggctccgctgacctcatccagcgctgcctttcttggggtgtctacaggttggaggagggagaagggggctgctagaggggagctgcgtgggtgctgatgggggcagggtgggcactgcagagtgaagagcaggcagcagagcgttggattttgagggatttcgaaatcctgctgaccagtgaccagcttcctctttttggggtggtgggcagtgtgccagtggcccccatgattatgaatagccccaagactaatcactcttctgtgatgtctgtccctggaaagcgtagaacaccccacacagtgcccacttttgttctgccagtttggagaccctgacacacccaccttctcacctgggctctgcgtatcccccagccttgagggaagatgaagcctaaactgatgtaccaggaggtaggtggattggggggctcagcagggtggaactgggtacagtgggggtgggggttcccaagagccacctgtcacccccgttgttgtccccatccccagctgaaggtgcctgcagaggagcccgccaatgagctgcccatgaatgagattgaggcgtggaaggctgcggaaaaggtaggagccctccgccaccctcgctctgtctcagagacaggctgggctgcccccctcgggctggctgaccacctcctcctccccacagaaagcccgctgggtcctgctggtcctcattctggcggttgtgggcttcggagccctgatgactcagctgtttctatgggaatacggcgacttgcatctctttgggcccaaccagcgcccagccccctgctatgacccttgcgagtaagtggggggtgctgcagttggtgggggaggggcctgccagaccaggtacacttaagcacacactaaacagggcctgcactcagc

SEQ ID NO: 21698 - DNA, 2300 bp, Homo sapien
acaactcccaaactctctcctgcatccccttggggacccagcagcttctgcaccccttctccagaggtctcctggtttttaggaggttgtgtgggtggtggttcagagtttggcgctggagccaggctgcttagggtcagaggctgtctctggcagtcacttgagtgaccttaggcattttattttatcatttatttatttatttttattttttgagacagagtctcactctgttgcccatgctggagtgcagtggtgcaatcttggctcacagcaacctccgccttccaggttcaagcgattctcatacctcagcctcccgatctcagcctcccaagtagctggaactacaggtgtataccaccatgcccagctaatttttgtatttttagtggagttgaggttttgtcatgttggcaaggctggtctcaaactcctgacctcaggtgatccgcccaccttggcctctcaaagtgctgggattacaggcgtaagccaccactcctggccaggcactttaaaaacttctttgtgccttgattttctcttccataaaatccctactttgtatgttgtaaggatcagataagacttctaaagaacttcatccttgtttaaatgttttgatgttacattttcttttacttttttttttttttttgagacggagtttcactcttgttgcccaggctggagtgcaatggcgcaatcttggctcactgcaaccccacctcccgcgttcaagcagttctcatacctcagcctgccgacctcagcctcttgagtagctgggactacaggcatgtgctaacacacccggctaattttgtatttttagtagagacggggtttctccatgttggtcaggctggtctcgaactcccgacctcaggtgatccacctgcctcagcctcccaaagtgctgggattacaggcatgagccaccgagcccggcccgctgttaaatattctaatctggctggagtggtggctcatgtctacaatcccagcactttggaaggttgaggcaggaggatcacttgaggccaggaggatcacttgagaccagcctggacaacatagtgagaccccatttctacaaaaaattaaaaagataaataaaaatgaacactttttttttttttttgagatggagtctcgctctgtcacccaggctggagtgcagtggtgcaatctcggctcactgcaacctccacctcccgggttcaagctattcttctgccttagcctcccgagtagctgggactacaggcgccctccactatgcctggctaatttttagtatttttagtagagacagagtttcaccgtgttagccaggatggtctcgatctcctgaccttatgatctgccttccttggcctcccaaagtgctgggattacaggcgtgacccaccgcacccagccaaaaataaatacattttctaatttggcctcaacatctcccccaagctgcttcttatccatgtccatttctcggggactgccccttcatcccagagccctaggcccgttcttagacagctcccgcctttccctcaaaccgtcggtctcacggctgcttctcctggccttttgagtgtctcatccattggcctcgccctctcctccccaacctctcccatctgtgccctgtcctggactctttccctggcttggggcttccactcttacccgctccaacctatcccttttcatacagtaactttctgacactcatatctgaccctgccctcccctgctcaaagcccttctgtggctccccagtgccctcagaacagaatccaaactccttagcctggcattcagggccttttacaacctcaccccacagtagccacagactgggacaggagttttctgaacacagacacacacacatcacatctcccaagctcaagaagcccacctttcctcactcctgccttatccccattcctgtatgcccaaggcccacgattagacccccctctgtcaacacttcacctgtttggtctttgcaagattccgccactgggcgggggagggggcccagcctggtaccccacccccactccagccagggctcaggtctccaacaacagaaccagagccactcaacagcgctggaacccattcggtggggcctggggcccctcatcccaagccaggagggtttctggggaggggtgcagcccctggcagactgacagtgtggcctgggggtttgggggtgccagggaagcaggggccaacctcataggaggagacacgagtgcggttctctttcccccactggg

SEQ ID NO: 21699 - DNA, 2300 bp, Homo sapien
caccacgcctggctaattcagtttgactgccgatatcacctcctgcaggatcctttcctgagtttgccgcctcctccctggggtggagttagatctgttgatgtcccctgtgcccagcaaaagacctaccactaaacagggcttgtgagtgtttgttgaatgaatataggaacaaaagaatgtttgcgtgaatcaatgaaggagagagactgcaatgaagtgagggtctcctcaggcccatcgggagccccgaccataccatcccttctacccctcctgggaggagggctctggctggcttctggccacaccccaatgcttggttgctgccaggcctggaaggcatttcccagagctcagcacattcctgccttccccggtggctgagagtgggcagggggcatttcagagagaagggagggaggcccccagcattccgggatcctgccatcctggcctggtcccccacgccctctgaagtaggccccaaccctctggtgtgagatgggggacaggtctgcagaggggccacccaggctggtgtgaggggcgagggtgccgacagaggccagggcttggtgtctgtgcctggctggacaatggggcagaagctgctgacatgcgctttgggggtaatcccccagcctcagcccagcccaggcctggggcctgggttcagagagcgacgagcttccgaggcagcagccgggtgggttcaagtggcatgtgggggtacctgtgctccctgtgccgccccccggggtctggtgagtcagggcaggctgggggctggaccagggtccaggggttgggggtgaggcctggtagctttggcttgggagtcgggcaggtctgggttcaactctggacccctgccaatgacctgctatggtgatattgggagagtcacttaccttctctgagccttctggtctgcaaagtggaaggggcagaagagtgtagcagggtttttgtggtccaggagaacaggggttggacctcagcttcaccacctcctggccacatagctataaattgggcatagctggacgcggtggctcacgcctgtaatcccagaactttgggaggccgaagtgggaagatcgcttgagcccaggagttcgagaccagcctgggcaacatggtgaaactttgccattacaaaaaatacaaaaattagctgggcatgatgatgcatacctgtggtcccagctatttgagggggctcagtcgggaggattgcttgagcccaggaggtggaggctgcagtgagccatgatcacaccactgcactccagcctgggcaacagagtgagaccttgtctcaaaaaaaagggtggggagcataaggagcccattttacacccttgattcaaaagcagggcttcagcactgagcatggtacttagtatgtgataggtgtccccctaaacagtaactccattagacagagaactgggggtcccctgtgcccagccttactgaaaaggggccaaaaccccccagcaagatgagccagccacctaatttgtgtgaaaaataataccaaatacttattagtaaccctcattatgtgcccggcattgtcttacattttcagtctcttttaactcgtttaatcttcaccacagccccataaggtgggtactcttactatccgcaaagagaagctgtgactggcagcaggtcacccagcgaggaagtggtcgcgctgcgatttgaacccaagttgacagggagagggagtgaaaggagtttacagtagaggcagttggccaggcccgggtcctggagccaggaaacagtggggctggggtggggtcctgattctccaagtcgaggaagccaacgtgcaaatccttgaagctgagctcatggcagagatctcggcccaggcaagagagaggcggctggtggctgtcccgtggcccccaccccttggggatagatgtagctggaggagggggatgtttgtttctccaccacccaccctctggtgacgtcacacccccgcagccaatggctggggtctctctctcctcccccctccccattccttttcccccccagcctagggctagggctgacagacgggaccaggagctctcgaggtgtctggaggctcagcggtaagagatcagccggccggtcccttccctggccaggctgagacactgtgggaatgaggttcagggtcccgggaggtgctgggagggggcctgggggctcaggaagccgtgtggtgtaggtgttaaaggtatagactttggagctggtggttcaaatcccctttcctctcc

SEQ ID NO: 21700 - DNA, 2300 bp, Homo sapien
tctccaaaggtttagcaaaagaaacaatatatacacatatgtagataaagggaacttagcacaatgttaccaactactacttttttctttttttttttttttgatacagggtcttgttctgttactcagactagagtgcagcggcatgaacatggctcactgcagccttgacctcctgggctcaaggaatcctcccaccttagccccacaagcagctgggaccacaagaacatgctaccacgcctggctaatccttttttttttttttttttgagacagagtcttgctctgttgcccagtctggagtgcagtggcgctgtcttggatcactgcaacctctgcctcctgggttcaagctattctcctgcctcagcctcctgagtagctgggattacaggcgcctgccaccacacctggctgattttttgtatttttagtagagacagggttttaccatgttggccaggctggtctcgaactcctgacctcgtgatctgcccacctcggcctcccaaaatgctgagattacaggcgtgagccaccacgcccggcccacgcctggctaattcttaaatttttttgtagtgatgagatctcactgtgttgcccaggctggactcaagtgaactcctggactcaagtgaccctcctgccttggcctcccaaagtactggattacagttgttgcctagctaacaactatcaattaaatctaggtgagagagtattcaggcgtgagccactgcatccggccatgggaggagtattataccctgtctacctctagccccatcctgcatgtctatccaccttgaactaagagcttgtcttattacaacagctattactactaacaaagaaacaacgttgctaaccaggcatggtggtgtgcgcctgtagtcccagctgcttgggggtctgaggcaggaggatggcttgaacctgggaggctgcagtgagccgagatggcacccctgcacttcagcctgggtgacagagcgagaccctgtctcaaaagcaaaataaaataaaataaaaagtaaagaaaaaaataataagcagctgggcgcggtagctcacgcctgtaatcccaacactcaggggccgaggagggcggatcacctgaggtgaggagtttgagacctgcctggctaacatggtgaaaccccatctctactaaaaatacaaaaattaaccgggcgtggtggcgcacgcctgtagtcccagctactcgggaggctgaggcaggataattgcttgaacctgggaggcggaggttacagtgaaccgagatcgtgcccctgcactccagcctgggcgacggagtgagaatctgtctcaaataaataaataaataaataaataaaatgaaaaaaaaaaaaaaaacacaaaacatgttgcaccccactctgaagatttttcatgaattaatttaatccttaaaaacaatcctgtaaactaggcgctattttctctcattttaaaggagaaacagaccagaagggattaaaacacttgccgcaggtcacacagctgcttagggaatggagcccgggatgtgattccgttggtatcgcactcccacctcactcccgcctttaaccacaattaagtccaactgtccagcattgcttgagtgtggtattgtgttcttatagatacgatcctacttaaagtatcctgtcaagaggtaggcaagacgatccccatttaactttgtgtagcttgaagaggttgatcatttttccaaggtcacgcatccagtgagtggggaatccggagtcggaatttgaacccgggcattatctgtagtgtagacccctgtcggggctggatgtgtaagaagcttaattgccgggtttggcaggtgcatgggtagttgtgaggggctcgtattttgagaggcaaaagcccccactcgccaccgttccccggagtaaaaagccacctctttccacccctcactcgcgcagctgcccgggcatgcgccctgaagcccctccttcagaatccgccccctacaagctccgcccatcaccatgcagggccaatccctggggcggagggcggggcagccacgagagtgggcggtcgctaagggtagttaggagtctggagtcgtgagccggagtcagaactgcgtctcgcgacccaggcgcgggtttccagaggacagccaacaagcgatgctgccgccgccgtttcctgattggttgtgggtggctacctcttcgttctgattggccgctagtgagcaaggtatgtaaatgaaggggcctgggaacagaagggctaccagc

SEQ ID NO: 21701 - DNA, 2300 bp, Homo sapien
gcccgcctgcacagcgacttggggaggggcatgccagcccctctggctccacggtggagtccaggcctaccataaaggaaccgcagggagcaatggtgacgatcttggagcgaggactgtagctgagtggaaggaagcggttctgttggaccggccgccctccaccccggagtcgctgccccgccccctgccagttgcacttctttaaatggcccggggcgctagggaggggtgggcggatccggcgtctcggggcacgggcggatggctccgcccagccaatcgacgccccgcggcgggcgggactccagccaatcgcggctcgcggctcggctccggggcggggctggtgggccagaggccagacggagaggccccgccgaggtgagcgaggctccaaccggtcactggtgggtcctggcactggcgggtcgcaacgctgtgggcgttccaggaggtggtcgtggcgaacctggcagctgcggtgaggagtggtcgcctggcttgggaatttaccttaggctgggggagagagaagcgcgccccggggacttgcggaggcggggtctgggtgggaccgggggagggggcctcagattcagggtgatgatagggagggtctggggacctgagactgagttcaagacccaggaggggaggcgaggttgttggggcagtattttcaagtggagggagtttgaagctgggacgttgggcttttggagaagcgagagaacagaggggaggaacttttgagacagggaacctggagattcgattccacttgggtcttccggacgggttgaattcggggctttatcgtgttctggaaaaggtgtgagaggtacggagctgagattctgagtatttggagaagcgagagaactagggtcaaggattcttgggactccaagacgcactggcgggggaaggaggttgccgggaagagttcaatgttcgggtcttggagccggacagcgagtttggaggtgaagtccaggggcgtttgaaagtcaggagactaggagaagtgggaggaagtatcagaattaggatacgtagtctcccgaactagatcggagcattgtcgtctttgagcgatgtgttcggatctgggtctctggatccaagggcagtttggaaggagaatcgcggactttcaaggaacagagggaccgggagaaagcaaatttagagccggagtctggggtgggggaggggtgttccgggcctggagctcagactcgcggccccggaggcaatggagggcggggctcggcaggcgccggcagctggacgtccaggttcccttcccccacccgcctgtgcccctgtgcgcatgccctgagggagagcggggtgaggggggtggctcgtcccctggacgggcggagccctctggggattgtagtgcgtgctcgacgtcaattcgtgtacctggcggctgttggcccccgtttcccagaagcccctgggccaaattggggcgttcctggatgctctgtaaggacccatgggggggcggggccttacagtgtcgcggtctgattgagtgggacctccgagggggcggggcttggtctgagctgagttctagcaagttttcctatggggcgcgctttgggggaatctgaaagcgtgggcagagggaatgagacaggcccctttcctactcttgggagcgctcccagtcggttaaggaagaggacatagaaatatcccgactgttgaagaagaatctcaacataggttccccaacagggctccaggagatttcgaatatagtaggcactcagtaaatctgttgagcgaataactggcaattaactcttgatcgaggccgggtgtggtggtaatcccagctactcaggaagctgaggcgggaggatcgcttgagcccaggacttcgagactgcagtgagctgtgatagcgctgctgcactcagccctgggcgacagagcgagaccctgtctctaacaaaaaacaaacacaactcttgttcattaagcacttccggtgtggtgggccctatagatacgtggcatctccttgacagaggtggtgagaagtatttttttacagtccctattttacagatgaggaaactgaggccctgagaattgactcattcagatcacttcccatgatcacgcagctgagcagtttccaatacagaattcagatttggggttccctacttccaatccaggtctctgtgctccacacttgtctttcgtgctccatgtttgaagaaattaatattgtggaagaacagttttaaggcttagaggaacttgag

SEQ ID NO: 21702 - DNA, 2300 bp, Homo sapien
tgcttcaggagggaggctgaggctgcagtgagccaaggtgcgccactgcactccagcatccacgacggagtgggaccccgtctcaaaaacaaaaacccaaatgcagtagggctttcctgagttgtggaccctataggaggcgcaggttttggaggaggaaggggaagaattgctccttcctaattatgtccttttttggaacctactgtccctttctttttttcccagggacaccttccctaggcctgggtgagctaagacacttctctctccctacctccaacccacaccacccacctacctattcccctcccatttatcctgcaaacatcaggatgacttggttgacaaactccaaccggcaagaactggtctgaggaggcttaaacctcccttcccagaggtggcctggagaaaactgcctcctccccttagggaaactcgttgtaggggcggagcattacgggtgtgggctttcaggacactagcagtgtcttctttctgccttatttttctgtcacattcctgagcatttagcaaactttcactgggacctgctacgtgtccagccctgtgctaggtgatcctgcagaccaagaggtggttgacagagatatccttggtacctgccctcggcggggcgttcctcagtccatatagtaactgacagtccaggactgggatggcggcacaggaggccatggaatcctagaatggatcctaacccaacctggactgccagggagggcttcggagaggaggaaacctttgaaatgtgttctgagaagcagcctgggaattgagggtatattttgaggatgaggaaacaagtttaaatatccagaggcgagaagattgcttgaggccaggagttcaaaaccaacctgggcaacacaagaaaacccccctcccccctcccccatctctctgtcacccaggctggagtgcagtggcacgatctcgccttcactgcaacctcaacctcccaggttcaagcgattctcctgcctcagcctcccaagtggctgagattacaagcgtgcgccaccacgcccagctaatttttgtatttttagtagagacggggtttcaccattgttggccaggctggtctcaaactcctgacctcaagtgatctgcccgcctccgcctcccaaagtgctgggattacaggcgtgcgccactgcgcccggcaaaaaataatattaataataaagatccagaggccttttattgtcatgtttgcgaacttattatgtacctggcattgttgtagacactggggtaaagcagggaagaaaacaaacagagaaaatcctttcgttttcctgatggggtgaatgggagcttgaagccattttagaaaaactggaagtgactcaatggggcaggatcggagagaaccaggagaacgcatcaagcaaggtcgtgaggggctttgtggcaaaaggaaggagtttgaagtttgtattcggggtgggtaggaagccatgaacagtagcagaggagtcatcttgatggagcggggaaggaaagagggtgtcagaagacccaggtgggaccaccagaggacgtgctgagaaaacctgaggattaagaaggggccgcgcggtaacgtatagggggcgggaggggcagcaagggggcgaggctacgatcgcctaggcaacgcgggccgcgccactctattggctggtcttccgctacgtcatcccccgcgccccagcgtcctccctcggaaccccgggggcgcggcctcctccggttgctcggccccgcccgcctgcacagcgacttggggaggggcatgccagcccctctggctccacggtggagtccaggcctaccataaaggaaccgcagggagcaatggtgacgatcttggagcgaggactgtagctgagtggaaggaagcggttctgttggaccggccgccctccaccccggagtcgctgccccgccccctgccagttgcacttctttaaatggcccggggcgctagggaggggtgggcggatccggcgtctcggggcacgggcggatggctccgcccagccaatcgacgccccgcggcgggcgggactccagccaatcgcggctcgcggctcggctccggggcggggctggtgggccagaggccagacggagaggccccgccgaggtgagcgaggctccaaccggtcactggtgggtcctggcactggcgggtcgcaacgctgtgggcgttccaggaggtggtcgtggcgaacctggcagctgcggtgaggagtggtcgcctggcttgggaatttaccttaggc

SEQ ID NO: 21703 - DNA, 2300 bp, Homo sapien
agtggtgcaaacacagctcactgtagccttgaactcctgagctcaagcaatcctcccacctgagccttctgagtagctgggactacaggcatgcatcaccacgcccagctaatttattttttttttgtatttttgtagagatggggtcttgctacgttgcccaggctagtctcaaactcctggcctcaagccatcctcccgccttggcctcccaaagtgctgggattataggcatgatccaccgtgcctggccagcccttccctttgctgagggggacagcaaagctgagagctgggaagagatttttcagagccacagctctgaagctccctaggctccagttcttaaccctctgagtgcagtcccagctatgaccagcagggtgggcgagtggaattcggtggaattagtggatttccaggtgactcagcgcctctcaacttctctctcttacttccttctccattactcccgaataaatgcttatcagcaaactggtttttactgagaggcccacagctccccattctccacaagtcaagatcctcacgtggtctccctggggaaggggagagttatggacctagagaagaactttcagagtccctccaagggagacagcagagtggggtcctgttggcctccacccttttggggcacgcagatagtcaatatcttcagcgtccccaaggcctgcaagggtggggccccatatctggaagtcccaggcccagctgggagttggtcaagtctgggctgtgggggcagggagtgctgggggatggttatccccttttctgccctctctcctggggcaactccaaattttcagccctcattgactttcccaggactgctgtccccaagtcttcactcatgtctctctgtgactccttcccattaggtactcgcagcaacctgaccccccaactttttcagtttccagcctggggacttgtggtggttaagagcatgagctgagttcaaatcccagtcctgtcagttaacagctgtgtgatattgggcaagtcactctctgggtctcagttttctcatctgtcaagtagggtgatactagttcccaccccattttgaaagctctcatgtgaagagacgacagagcaagcttggcttagtaaatcctctctgggagtgcgaacaaccaccaccacaaccacaataatgacaaccgcattgcataagagccctggacttacacacgactgtgccagtggagtcctcccggggctcccggggccaattcctctctggcttggactcacataaacttggatctcacatctttccccatttctgcccccgtggccacttgctttggcccctgagtcctcatacacctggctggggcgctcatggccccaatcagcctcggcccgaccccatggtgccccttcctaaagttctgcccgtctgtcccgtgacatgccccgcccgccccggctcatgcctgcttgcaccgcctgcgccagggtggtgagcccggtctggccagtggcgccgaagatcgcgatcttcttgacggccatcgtacgggatcgtgggggtgcaaggcctcagagtctcggcacgcgcgggaacccactggctgctgggcggtgctctctgccctactcaagccaggaacaacggggcggagctggctcgaagggccacgcctcagactctccgcccgcggctcaggtcaaggggcggggcctaacgcggatgggcggggcaggcgtcagcttgcattcgctcaccgtccagcaccgccctctctgcgcgccacttagactggaaggcggggccacagaaggccacgcctccacatagcaacaaatagagtggacggagccgagataacttgtcactcagcgccctgcctccgcgctccacctcccggagaggggcggggccaggcgagcctcacccacggcctctcgtagctcacgccccctctcccggagcctggagcggatctggggcgcactctaagccccagggcctcccagaaccagcaaggggagaaagttaggaggacagagtgtgtgtgtgcacttggatgtaagacactgtgtcacggcgtacctatgcacttatatgaccctgtgtgactcagtgacccggagggcaagcaggactgtgggtgacaccttgtgtcatcctctgagtgtgatcccgtgttacagtgtgactacacgtgcgtgacaccacgtgtggcaggcattgattctgttcttttgtgaccttgtggtgacaccgtgggtgacactgcgtcagcctgtacgatagggtgtgg

SEQ ID NO: 21704 - DNA, 2300 bp, Homo sapien
taggtactcgcagcaacctgaccccccaactttttcagtttccagcctggggacttgtggtggttaagagcatgagctgagttcaaatcccagtcctgtcagttaacagctgtgtgatattgggcaagtcactctctgggtctcagttttctcatctgtcaagtagggtgatactagttcccaccccattttgaaagctctcatgtgaagagacgacagagcaagcttggcttagtaaatcctctctgggagtgcgaacaaccaccaccacaaccacaataatgacaaccgcattgcataagagccctggacttacacacgactgtgccagtggagtcctcccggggctcccggggccaattcctctctggcttggactcacataaacttggatctcacatctttccccatttctgcccccgtggccacttgctttggcccctgagtcctcatacacctggctggggcgctcatggccccaatcagcctcggcccgaccccatggtgccccttcctaaagttctgcccgtctgtcccgtgacatgccccgcccgccccggctcatgcctgcttgcaccgcctgcgccagggtggtgagcccggtctggccagtggcgccgaagatcgcgatcttcttgacggccatcgtacgggatcgtgggggtgcaaggcctcagagtctcggcacgcgcgggaacccactggctgctgggcggtgctctctgccctactcaagccaggaacaacggggcggagctggctcgaagggccacgcctcagactctccgcccgcggctcaggtcaaggggcggggcctaacgcggatgggcggggcaggcgtcagcttgcattcgctcaccgtccagcaccgccctctctgcgcgccacttagactggaaggcggggccacagaaggccacgcctccacatagcaacaaatagagtggacggagccgagataacttgtcactcagcgccctgcctccgcgctccacctcccggagaggggcggggccaggcgagcctcacccacggcctctcgtagctcacgccccctctcccggagcctggagcggatctggggcgcactctaagccccagggcctcccagaaccagcaaggggagaaagttaggaggacagagtgtgtgtgtgcacttggatgtaagacactgtgtcacggcgtacctatgcacttatatgaccctgtgtgactcagtgacccggagggcaagcaggactgtgggtgacaccttgtgtcatcctctgagtgtgatcccgtgttacagtgtgactacacgtgcgtgacaccacgtgtggcaggcattgattctgttcttttgtgaccttgtggtgacaccgtgggtgacactgcgtcagcctgtacgatagggtgtgggacgtgtgaggtgtgctacatggaagcgtgagactaattagactgtgacagtgtgtgacaccacatgtctcgtgtaaggatgtgtgacaccgggaccccattcgagtgtgtggctgtgggtgtctgtgttgagctgctcattgtgaccccctgtgactatgatgtgtgaggtgcggcggtgcagcatgtgcggggcgactgctatgaaggttcgagtgtgtagagtgtgtgacactgtggctgtgaagctgtgcgtgatgtgtgggcctatgacactgtttgtgactgccggggagtgtgcggctgtgtgtgacaggtgcatttgtgtgtgacgccgcgtgggcggtggttaccctattggatttgtgtggtggtgggtgacaccgttccagtgtggacgccgcgtgtgacggcgtgagggtgtgaccccgtgagaccccacaggagggagtgacggcgcgcaagcgcgtggatgcgggggtgagtttgtgcgccgaggcccccgcgagtatggcagcgtggcgagcgtgaccccgtgggagtgtgcagcgcgtgacgccgccgtgccctcgcgagtgcagccgtgcaccccacgccgcggccgggtgtgactgcgcgtgggcctcgggcggcggggcgcggggaccgcgggcgggagggggtcccgggggcgcgctgagcgcggcggcggcgcgagagagggaggcgcggcggcgcatgcggatctggctgagccgcgggccggcggggccgagctgagccgggctgggccgggccgggccgggccgggcagcggacgccgacagggagggcggtcggtcgcggcgagcagcggagacagcgacgctggcggccgcgggcccaggtgagctgctaggggggccgacagcccctcccccaag

SEQ ID NO: 21705 - DNA, 2300 bp, Homo sapien
aaccgagtatctttaacttggcctttctgtgcctcagtttccctccctgttaaacggtggttacagctgttttcttcagtggaagacacttagagatggggaggcccttagcactcctgttagccctctggccaggccgaggatcagctctggccataacgcgattgaatgggaaggaagggagcaggtaatagggaagccgggaaggggtgtcctgcgagcctccccccaacacccccccccccccgcaaaggctggtggggcgctgggctgcggtggcatcagaggctttaacccttcccaggccgcgcctctctccctgcggtccagacactgcgcccaaggagggggcctgggaaggacaaggcctgggggtaagacccacgcgtggcgcggaagctagaccgggtgggggggttgtgggctcgtcctgccctcgaccctttgcctccctccagccggggagacccggggctccagccatgccccgtgcgcgcggaggagggatgctcgccaggtggggacatacttgggggaggggctgtcggcccccctagcagctcacctgggcccgcggccgccagcgtcgctgtctccgctgctcgccgcgaccgaccgccctccctgtcggcgtccgctgcccggcccggcccggcccggcccagcccggctcagctcggccccgccggcccgcggctcagccagatccgcatgcgccgccgcgcctccctctctcgcgccgccgccgcgctcagcgcgcccccgggaccccctcccgcccgcggtccccgcgccccgccgcccgaggcccacgcgcagtcacacccggccgcggcgtggggtgcacggctgcactcgcgagggcacggcggcgtcacgcgctgcacactcccacggggtcacgctcgccacgctgccatactcgcgggggcctcggcgcacaaactcacccccgcatccacgcgcttgcgcgccgtcactccctcctgtggggtctcacggggtcacaccctcacgccgtcacacgcggcgtccacactggaacggtgtcacccaccaccacacaaatccaatagggtaaccaccgcccacgcggcgtcacacacaaatgcacctgtcacacacagccgcacactccccggcagtcacaaacagtgtcataggcccacacatcacgcacagcttcacagccacagtgtcacacactctacacactcgaaccttcatagcagtcgccccgcacatgctgcaccgccgcacctcacacatcatagtcacagggggtcacaatgagcagctcaacacagacacccacagccacacactcgaatggggtcccggtgtcacacatccttacacgagacatgtggtgtcacacactgtcacagtctaattagtctcacgcttccatgtagcacacctcacacgtcccacaccctatcgtacaggctgacgcagtgtcacccacggtgtcaccacaaggtcacaaaagaacagaatcaatgcctgccacacgtggtgtcacgcacgtgtagtcacactgtaacacgggatcacactcagaggatgacacaaggtgtcacccacagtcctgcttgccctccgggtcactgagtcacacagggtcatataagtgcataggtacgccgtgacacagtgtcttacatccaagtgcacacacacactctgtcctcctaactttctccccttgctggttctgggaggccctggggcttagagtgcgccccagatccgctccaggctccgggagagggggcgtgagctacgagaggccgtgggtgaggctcgcctggccccgcccctctccgggaggtggagcgcggaggcagggcgctgagtgacaagttatctcggctccgtccactctatttgttgctatgtggaggcgtggccttctgtggccccgccttccagtctaagtggcgcgcagagagggcggtgctggacggtgagcgaatgcaagctgacgcctgccccgcccatccgcgttaggccccgccccttgacctgagccgcgggcggagagtctgaggcgtggcccttcgagccagctccgccccgttgttcctggcttgagtagggcagagagcaccgcccagcagccagtgggttcccgcgcgtgccgagactctgaggccttgcacccccacgatcccgtacgatggccgtcaagaagatcgcgatcttcggcgccactggccagaccgggctcaccaccctggcgcaggcggtgcaagcaggcatgagccggggcgggcggggcatgtcacgggacagac

SEQ ID NO: 21706 - DNA, 2300 bp, Homo sapien
acttcagcttctctgcgactctgctgtcatctctccccacactctgctctcttccctctctccaactctgcggccccctggtctgtctgtcgtctgtggggctgtcttttcctggtggcatttgccactcctctgcctgtctctctctgggctgtccctgaccggactcctcctgtcactttccctctctctgcctcctctctttcgtcgtctgctgctccctgagtttctttctggctctgccttgctccatctcttttctcgtctttttttattctctctctcgctctctttctggtgtctcctctcactttctcgtttgttttgttttgtttttgtccctaggtatgtctgtctttacttctctgttatctttctctctggacttgcctttttttctctccgtctatatctctttctttctaagtgcctgtctctgcctctccctttctcttcctctgtctgtctctctctctgcccttcttcagccccgtccctgcgtccctggctttgccccactaattcctccctctctcttacatattttccacgcccttcttcccctacccagcccagtgccctcacagtcctactgccagcgccgcaccccccaacccggggcctttccccagcccttatctccccatccccaggaaccaagaaaaccagttacgggcccagcaatggatgcaaaagctacatgaccaacttgagctgcagcacttcctccgagactgccacgaggtaggaactccaggtgtgctggggacggagacatcccctttagtcgggagggaagtgcttctcggccgaggtgggggtggggacgccccgtctaagtgggtcgcggagcgatgctcgctctaagccgccagggggcgcgcggagccgggtctcagtgcgcatgctccgcaagtccctgcccgcccacgccgactccgggaaacgaaggaggggccccgggcgcccctggcaaccgcgcgtgtccgcgcctacgggtcccgcggggacgcgcgctgatctcacctttctctcctgagatttgtgagaatcgctctaccccaggagaggggcggggcgggcggtggggataagggccgagggccgtgggggggccagcggccctgcgccctcctgcagccagcgatggctctgaaccaagccctcgcccctttaaaggtgttcagtaatcaagccccttcccttagggatgatctgcacacattagggacgatctcccctaatccgagatggtccaggcccccttccttattagtgacggttcaggagacctgctgtcttcccctccttcccttgcattccatagaaacgattctagactttggccacattagagatggcctagtaaacattttcctaaaccctaaacagagctaggcctggccctgagcccctccatctgtgtgacccaggatcatcccctcctccatcatcaccccgtacctaagtttcttccaaccaaagctggttcaggaaccaggtctaacccctaaacccctcagcctcaattaaagacgattcgaccctcccccctatgttgaacacccatgggagattgttctctccgcacacggaataaacaagggcctccataccgtgcccccctcccccataactggggtaggccgggacttgagccactggaggaaccccctgttccccctcgcccccactggagattgtgagatgttccaggtcgccctcccatatcccctgtccacatgtggtggccaggagcccgagcttcttcccattagagatggttcaggaggcccccacccagcccctcaccataatccccactcccttagtgaggcagtccaagccccaggcgctccctcccggcattagatttggtccaggagcaccccccatccctcatgagattgttctggatcaggcagcaatcatctgagatggcgcagaagccccccacccgaagccttggggcgagtggtggttcctcctgcacccccacctggggccccgcaaagaggcgggcagggaggcaggcagggggcgcacgcgggcgggcgcgcggccgccgcgcgggggcgagggagggggcgcgcggccgccggagcctcagccttcgccgccgctgccgctgccgtcgcagttgaggggcgagcacccgcccgcccgctgcagggacgccccgccaacgccactgccgcttcaggtctcgggggcgcccaggggagggggttggcgcgcaccccgcggacgcagacaggggagggggctcgggcgcgtgcccgcccgtcgtggccgcggga

SEQ ID NO: 21707 - DNA, 2300 bp, Homo sapien
aattcaaaggggcgagaggtttggtcttccattcagcagacacgtcccaaacacctgtggtacctaaggcgagcatctgagagaaacagctgcagaagtgggcaggggcctggcacttccagctaagaagtggaggctcctctgcccagccagacaggtccatgggagaaggaaccctggtttcactgggtctttctgtcccccatcccccaggaaggccaccctggctgacattgtggaacagctgcaggagaaagaggcaggcccagggctgcctgctggggtaagttgagcctcggatgggtggggataggaggacccctttttcagagcaggaggcaggatctcagaaacagccagtgcctagccctggcaggacccattccctacctggaccctgcagagacagcatggactctcagggtccccagaatctgaaaatgtcccccttagaaagacggggcacctacctaagagacccctactgcccctccacacacacacacacacacacacacacacacacacacagacacacacacacagacacacacacacagacacacagacacagatacacacacagacacacacacacagactcttcccacatctgtcctggactccgtatttcttcagctcagtggggtcccaaatttcttcatagcctcatacacacacacacagaaggaagccccaggtttctcctgcagacagtggggacacgccctgcttgcacccccacctccagagatctggctgcctctttccaccaccgagagagattccaaaccaatgagtcctaacagactcactcccaagacccatggggccctaagaattgggcctccaaccctgaggtcctcccatactcgcctccgagacaaatggccctgtagacagatgggaccccagacccatgactcccccaaacagatgacccccacaccctctccatggacagcacccctcttccccctcccttcacacagccgtcgctgcctcagccacgcgagcttcccccaggtcgcctgcccaacgggcttgagctgcccgagcggacacctcggccggaccggccccgggcgcgggaccggcccaagccgcgacggcggccgcggcccagagagggtggtgagggcgggggaagccggcgctcgcgctccgccccggcccagggcggctccgcccccgcgcctccgccaccgcccactcacacagtgcagcacgagggcttcctactgcgcaagcgcgagctcgacgctaaccgcaagtcgtccaaccggtgagcgtgtgggcggggctttggaaggcgggtctcaggctcagggtgaccattgcgtggagcggtgggactgaggagggggtgtggctcaacttcaggccctccagcaggtggcggtagtaggtggggccagagctggggggtggtggtggcttaaatcaagaaagccaaccaatgagcaggagggggtgtggtttaacgtcaggccctccaacccgtgggggtagtaggtggggccagatgaggggtggggctcaactttgatgattccaaccaatgaacaggaaggggcaggacctaaggttagtgcatctaatggatgatgggtagagcttaggtgggaacagaaggaaaatgttctgaaagtgagtaaattggaacctaacctcttagcaaccaacccaggagttgatcagctaaatagcaaagagggaggcatctagttgagaaggtttcaatggcttgtcgtggagcttggagaggtcactcaaccaatgagtggggtgggtctacccttgaagtttcaaattgggggagggtccgaaaacgggcagagcccaaactaatgagggtaggggttgggaagggggagtcatctcttacaggtttccaaatgagggtctagccatgatgtgcctgctcttggggagtccagctcctgcttgtccaccctctttttgtccaactgagaggcagaatctggggacaagtggagccaaaaaggggtatcaccggccagtaatggagtgagtcccaagatatgaagtgggcaggacagattcagattttgctagtggaatctgtaggtggtctttcttcctcgtacctaatgccaaggtaggaataaacaagggcacctagtatgttttgctttgggagggattcctccaggatcgaggctttggatgactggagagacaggaattctttattccagacagtagaccaatagactttccttgagaaagctccatgagtggggaggattgagtggagcaaaggcttatggaggaga

SEQ ID NO: 21708 - DNA, 2300 bp, Homo sapien
cacctgtaattccagcactttgggaggctgaggtgggcagatcatttgaggtcagaagttcaagaccagtgtggccaacgtggcgaaaccccatctctactaaaaatacaaaaagtagccaggcatggtggcacgtgcctgtagtcccagacactcaggagactgaggcacaagaatctcttgaacctgggagatggaggttgcagtgagctgacatcgagccattgcactccagcctgggggacagagcaagactctgtctcaaaaaaaaaaaaaaaaaagtctcttatcatagggttactgtgagaattaaattgctccatgtttaattgatacatgataaactgatacttagcacagggcctagtaaatatcagtgctctagtagtgcctgcccatattattatcattgtttgtgtcatttatctctgtagtaggaagtatatacaatcctattgcataggtttaagggaattaatccactaaagtgtttggaacagagcctggcacatattgctatgtaactgcatcatcatcatcatccctttttaatagatgagaaaactgaatttcagagagggtagtctgatctgaaattcacctattattccagcttctctcttccaaatacggcctctgtgccctgtttcttcccccaggaggagatgaacggctggctggaggctgtagcttcctcggtggcggaacacgcagagatcgcccgctggggccagacactacccactacttcatccacagatgagggcaaccctaagagggaaggcggagatcgcagggccagcgggcgcaggaagtgacttcccacccccaggacctgacacatctcgtctcccctcttttccgcactgtgggcacaaagacactttttcttccgcaggggcgggagcccctagttccaacactgaggacgcgtgacatggtgggcaccggaaaggaggggacttctcctgcaccccaagaagtggtggggagattgctgcccctatagccatatctcggccccttcccactcaccacccccaccccaggtgctgggggtcccttatttttatgcaataactgagcttgatgggggtgggcagggggccagttgagccaagcccccagccccgatctgcagatcctgccccaagaagctggggtggtgggggcagtaattcctgcccccctctctgccctagggatgggcacgggggcgctggtgaggtcccctggaccatccagggtgctagggggcagggaggggacaccccctccccgcctttacctcacttccaatgctgccttgatctctgtctgggaggggggagtgaaggggccctagccccctgcactccgccgcctcagagccatgcggttaattcctgacttagtttatttttgcaaaacgtcgatctcctcctcccccgccccgcatccgcgaaggcttttaatgggaggggcgtcaaagctcaaaactgttttcctctctcctcccccctccagttgtaaatgccacttcatgaggggaggggcgaggggaagcccacccctgcatgcttctggctggagcacctccctggggagtcgggggattgggttgtgggcagtccccatggccgcctggagaagccgctggggcccgggggtgtggggcggtgtggcgggcgcacactgtatgtacctataataaaccctttggctttgacggtctatggtcctttgtttgggttttctgggctgcgcccgggaggattgaaaggagggctgtggtggctgtaggggtgggtgcggggtggggagaggggcacgggggtaccgtggctgcggagaacatccagatgtacccttttatgtggacttaatttcggggtctaaacacacgccccttgacgagaacctagagggatggagaatatttcgttatgcttcgtaataaacttccccaaaggagactccgggtccgccccgtcaagttcaggaaaggcggacccctttaaggaggcggaaaagttaaccgcgatgggcaggcgctctgtccaatcgctagtgactcctggagtctctggcccaatgagcagcctatggaggcggggtccgggtgcacacccggaagtgggtgcgggccagccggctcgcccgggggccatggcagcagcggctactgcagccgagggggtccccagtcgggggcctcccggggaagtcattcatctgaatgtgggaggcaagaggtgagtgtgggagactcctgaggtcccatcctcgggggcgggaagcggggtgggagtatccgcctc

SEQ ID NO: 21709 - DNA, 2300 bp, Homo sapien
agttccctatcagatgcttgggctgatgcttggaaaggaagttggacacagcatttcccatgagacaatgggccagctaactcttgaggctcagaaggatgtcctggagccccatgggagttgtagtccgggtttggtttctttgtagggggggctttggaagacctgggattcttcgtatggaggggagaaatattaataggaagttattgacagtaatgcccatgatagccagcccactggccatggaaggtatgccccagtggttattggaactaggcttttctgattggtagaagtaacagagtagggaaatttcatctacagctttatttccctaactgcagtcagcacctgctaccttcatgaaagttgccagatataaagatctgtagtagtacttttccaacttagttttatcctgttttccgaaaaacaatcatttatttatttatttatttatttaattttatgagacagggtctggctttgtcacccaggctggagtgcagtggtgcgatcttggctcactgcaacctctgcctctcagattcaagccatccttccacctcagctctgccactgagtagctgagactacaagcactcgccaccatgcccggctaattaaaaaaataataatcattttaaatgcaagctttatattataaatacaaagtaaacatgaaaataaaacccaaacatagcagtgttattaaactctggcctgtagcagtggctcacacctgtaatcctagcagtttggaggccgagacaggtggattacttgagacctggagtttgagaccagcccaggtgacacagcaagacctcatctctactaaaaataaaaaaaaattagccaggtgtggtggtatgcacctgtggtcccagctacttaggatgctggagtgcgaggatcgcttgagcccaggaggtcaaggctgcagtgaactatgatcactcattacaccccagcctgggtgacagagcgagatgctgtctcaaaacaaaacaaaacgaaaaacaactctggctagatgctattgcttgccaagggtgcagtcttccatttattaaaagtgaaaattagggccaggcacattggctcatgcctgtaatcccagcactttgggaggctgaggtgggtggatcacctgaggtcaggagttcgagaccagcctggccaacatggtgaaaccttatctctgccaaaaatataaaagattagccatgtgtcgtggtgggtgcttgtaatctcagctacttgggaggctgaggcaggagaatcacttgaacccaggaggcagaggttgcagtgagccaagattgtgccattgcactccagcctgtgcaacgagcgaaactccaactcaaaaaaaaaaaaaaaaaaaaaaacggaaaattaggtaatactgcagattcattaatatcacagcagcactaaactcagtcttcctctgtgctgggctcaagggaactgaaagggaagtaacttgctatgtggttcagtgtcatttcatgctgtgtcactgcaccacttaaaatcttcacccggagactatgtcccacacatggggaaatcaatcaccgtcatattttaagtgcttgctgtgtgacagccacgattacaatgactgttactctacctcttattctcactgtagtgttcccagtgaagcggcggaaccggcacagcctagtggggcctcagcagctaggaggacggccagcccctgtccgacggagcaacacgatgccccccaaccttggcaatgcagggctgctgggccgaatgctggatgagaaaacccctccctcaccctcaggtacgtttctatctcgtggaaggttggggcagctgtggggtccctgtgaccctcttctgatccctactcttcccctcaaggacaacctgaggagccggggatggtgcgcctggtgtgtggacaccataattggatcgctgtggcctatacccagtttctagtctgctacaggtgcttggggagggagtggcaggaggtcccagccctgttgatgggaagggcatgcggtgagggttggtgatgtcccctcgatcctacaggttgaaggaagcctctggctggcagctggtgttttccagcccccgcctggactggcccatcgaacgactggcgctcacagcccgggtgcatggtggggctttgggtgaacatgacaagatggtggcagcagccaccggcagcgagatcctgctatgggctctgcaggcggaaggcggtggctccgagataggtatgaccccaagccttttcc

SEQ ID NO: 21710 - DNA, 2300 bp, Homo sapien
cagctttgtggaacgctgccaggaactggtgcggagtgggccagacctccgacggccacccacaccagccccgtggccctccagcggtctcggcactcccctcacacctcccaagatgaagctcaatgaaacttccttttgaacaacgcagctgccatgatgccttgggatgccctggtcctgggggactcaggtgcctccctgattcctgtgggaaccccgggttcagggccagggcctccttggaataaatggttattgttactaggtccccaccttccctcttttctggaagccaaagtcaccctccccaataaagtcctcactgccaacatcttgcttattcttagcaggtttgggactccccaggaaaggggtggggaagatgtgggacccaacccgatatatgcaaaatcaggaacatctacctctcttgtttaagcaaagggaggccaggcatggtggctcacatctataatcctggcactttgggaggccagtttgcttgtgctcagaagtttcagactagcctgggcaacataacaaaaccccatctctacaaaaaaatacaaaaattaagcaggcatggtggtgcatgcctgtggtcccagcttcttgggaggctgaggtgggaggatcgcttgagcctaggaggccaaggctacagtgagccatgatcacaccactgcactccagcctgagtgacagagtgagatcctgtctcaaaaacaaaacaaaacaaaaaaggtgttgcaggggaggaatgtgttggcttttactctgccttcaggcatggctggatccggggcttcaaacactaattcagaatatctttttttcttttttcttttcttttttaaagtctcactctgtcatccaggctggagtgtagtggtatgatctcagctcactgcaacctccacctcccgggttcaagcaatcgcaatcctcctgcatcagcctcccgagtagctgggattacaggtgtgcaccaccatgcccagctaatttttttatttttagtagagacagagtttcaccatattggccaggctggtctcgaactcctgacctcaggtgatctgcccacctcagcctcccaaagtgctgggattacaggcgagagccactgtgtccggcccagaatatctttttatctcctaacttcacttacctctggaatacatcttcaatcaggttttctctctgtggcaaggtgactctaagcagctgcttagcaactctttcttccctagcaacagcaaaaatcacaagactgattttcattggcttgaattaagtcaggtggccattcctgaaccaattactgtggccagtgtgatgaaggccttccattattgcagcctggatcatgtgtcctgctgtatttttagtagaggcagggtttcaccatgttggccaggctggtctcaaactcctgacctcagatgatccacctaactcggcctcccagagtgctgggattacaggcgtgagccacctttcctggctggccttgggattttttttccccaaataatgcccgttcctacggcacttccttgaggagattttctgcatcttttttccttgtgccaataaaaaagggacagaaagtggggacagactaggagtagagaatactagaacatgctaattctagaattccatagtttctggaatgccagagcttctgaaacatagtagagaggggtctcgaacattaggacatctcggacacaaggatattctggagtgctcatggattaacaatattagagttctcccctgcttatcagagaatccagaatatagaagtttctgacaaaaaggacctgaaaaatcactgattctagaataggggagtgtcaaggggagttcatacccatgaatctccaccggtaggaatatcttgcatgccaggatgtctggaatgctgagaattataggatacagaaaggaacctggattactaggaaatctagagaatgggagagatcctggactatccgcccttccagagcactggaaggtttgtttgcgttccaagaaatccataatggcaggagattccggattatcagagaatctggaacacaaatgggagacgtaaaaggtgagtgcctctgaaaccggggtgttctgaaatagctgtgcacctcaaaccctaattttgtttttgtttgtttgtttttgagacagggtcttgctttgttgcccgggctagggtgcagtggtgcaatcatggctcactgcagcctcggccttctgggctcaagtgatcctcctgcctcagcctc

SEQ ID NO: 21711 - DNA, 2300 bp, Homo sapien
ggaaaaagaggtgattaggggcagagtgaagctctgagggtggtgccttagggagagaaggggcttgtatttcagagaatatagggtggagccttgaatttataatgatcttctcaaagaattgatcccttctcaaggccctaggcttcaggggttccaggctcaccatctgcaaaagcttgctccccgaagctctgtccctcagtgaacccagccaggctctgcccctgacccacaggatctgctcccagggggtcctgggggctcctggctctgccccctcctgcacctcacttattgccatccccagagggtatcagacccccttccttgcctgagtctttgaatgctcccaagagctttgagtctcaagctgggcttgagaccctgagtttgaaggcttgaagcctggaaccccggtgtggacggggtttaagggcccctgtggcttgcagctcctagtggtggagactcttaggcaaggaagggatcggtactctcttttatatagttttatgtatttatttattattgagatagggtctcactctatcgtccaggctggagtgcagtgcagtgcagtggtgccatctcaactcactgcagcctccacttaccaggctcaagtgatcctcctacctcatcctcccgagtagctgggactactggctcatgccaccatacccggctaatttttggatttttttttttttttttttttttttttttttttgagacagagtcttgctctgtcgcccaggctagagtgcagtggtgtgatcttggctcactgcaacctccacctcctgggttcaaacgattctcctgcctcagcctcccgagtcgctgggattacaggcgcccaccactgcacccagctaatttttgtattttttagtagagatggggtttcaccatcttggccaggctggtctcgaactcctgacctcatgatccacccgcctcggcctcccaaagtgctgggattacaggcatgagccaccgcgcccggcctaatttttggatttttaatagagatggggtcctatgttgtactatgttgctcaggctcacctcaaactcctggactcaagcgatccacctcggccttccaaagtgctgggattacaggcccgcgccagggcacctagccggaactgggaactctctaaggagaaagtctgcaattctgggtggtgggaggctgctcttgggagcattcaaagactcaggcaaggaagggggtctgataccctctgggggcggcgataagtggggtgcaggagggggcagagccaggagcaccctgggagcagagtttgtggatcaggggcagagcctggctgggttcactgagggacagagcttcggggagcaagcttttgcagatggtgagcctggaatccctgaagcccagggtcttgagaagagatcaattctttgagaagatccaatgtgaacttgggaccctcagaggggcaggacctgggggctggtgcagggttggtgctccatttgcagaatcctcagtctctctcgtggaaaggggtacccgtggggggcttccagcttctacgccagcgagggagctaaattctgaccgaattctcccagaactgggagcagagagctgaggactgccagatggagtccagcttaggggaccctgcccccaaccccgctcccgtatccctcccatttttaagcacccctacgcctgggacctctgttccacgagaaggttcacggagccagtatccgagtcctaatttccccccaccgcgtggggaactcgaggtcccccgcgcccctagtccggcacctgtccctgctgcctcctgattggccgcgcggcgagcgctggcggcgccgggctgtgattggcgggaagttcgcagcccgtggctggactgtggagaaagtgagtcggcctcgggcgggggcgggggcgggggcaggggcggggccggggctagcctgacccgctggacagaccgcccgcccggagcgggactcggcgcccgacacgatgccgaggcctggcaccagcggccgccgccccctcctgctggtgctgttgctgccgctcttcgcagccgccacctccgccgccagccccagccccagccccagccaggtcgtcgaggtcccgggggtccccagccgcccggccaggtaagccccctgcttccttgtgccccttccacccaataagtctggtggtccaggaggaccacggctttcggattcaggggaaactcgaacccactgcttcgatgtggagatgcaaagagggccct

SEQ ID NO: 21712 - DNA, 2300 bp, Homo sapien
aagggaataggaggagaggggcagggagctccccatccctcccctcatcccagtgggagagctggatgcatttggtagagaagtacttggtcccctccttccccacttagtccctggctgtctccgaagccttctgcagggtccgaagctgccagcccaaaaagtgtgcaggcccccagcggtgcctgaacccagtgcctgcagtgcccagtcccagccccagcgtgaggaagagacaggtgtccctcaactggcagccactgacgtgagtgggcagtccctcccctaccaaatcctccctcaggaactcctagctttgcccccgtttccgctcctcctcccttcccctctccctctctctcccccctccctccccggctctttcttttgctatcagcctgtctgtccgtttctatttcatcccttgcctgcctatctcaggctcttcccatctctgcattatttctgtctctttctgtttctttctagttacctgtctcttttcctctctctctttctccctgtgtctcactgcctgcctctatgtctaagtctctctgccccttctctctttctctcccccaacccccatcatctctctttctctcagggtctttgtttctctcccactagaggcctggtccccataaataggtgttgtggggggagggttgggcagagccgctactgaaagacattttcctggcatggaggccctttggtggggaggtcagtttaacccggtgacagcagcttttccgtcctctcccacccaggctccaggaggccagagctctactgaagcggcggcggccccgggggccagggggccggggactactgagaaggaggcccccacagcgtgcccccgctggcaaggccccgggtaagcacatccgcctttcctccgcctggggcgaggggggttccgggccagataaagccgtctggttcccacggtccagccgccgcctacccgccccccgttgtagctcagcacccacccccaggacgaggccccctctagggaccccagcgtccggccgtgcgaggtgagcccgggacaggaccagacacaggccagaggcactgacccgcgggggtggggccgggaagccaggcgtccgggctccccgcggccgaagagggagggcgctggcccgttagaaagctccgccgaaccagcccagacaacaaaagcgattgtgcgggttggcgcctgcctgggcaccaaatgctcaagattgtggggcggctgggggccaaaggcctcctcctgtttcccgaatcttccccctgccctcctcccgctccagctcttgacccctagtctagaacacccctcatctcaaacaccctcaaaaccctcctcttgctgtagccttcagcccagatgtgacccctccccctaaagtcttccagatgtgagcctcgggccagatgttagtacccccgcccacagcctccctttatccattgtgacttctcccgccaggtgtggcgttctggccagatgtggctacatcttcacatgtatcccccccacctccagcctcctgcccaggatctagacgcccaattcctttatgtgcccaggtgtagcgacccttctcccatccctcagatgtcccacctggctgtccagatgtaccatgatagccccctatcaagatgaagcccctttctctgtgccccgggcagaagaggatcaactcttagctgtctccccaaatgtggcccccactactcttaatggatttcctctttatggattcagctctgtctggggggaaacccgcccgcccccacctgttcccttccccgccgctcccctacaggcccggtccacttgttggtgcgcggatggggacagagggggcgccccgctcacccctgcgagtctagcgcccagcctgcgagcctctggctaagcgcccagccccacgcgcccccgcgcggccgccggggagggagtggtgaggagggggggcctgagcgggggcgcgggcgacctcccccgcgggcgggcgggcgggtgcggccgggcccctcgggcgggctggggcggcggcgcggcggagcgcggcgctgcagccatggcgggcggcgtgcggctgctctgggtgtcgctattggtgctgctggcgcagctagggccgcagcctggactgggccggctcggagagcgtctccgcgtgcgcttcaccccggtcgtgtgcggcctgcgctgcgtccatgggccgaccggctcccgctgtaccccgacctgcgcgccccgcaacgccaccagcgtggacagc

SEQ ID NO: 21713 - DNA, 2300 bp, Homo sapien
gccacgcagcagcctctgagacccgcaggcctcagactggacagcatccatggctccacctccatctgtagccacagccacccctccattcgtagccacagctaccccggagctcccaagttagtttttgtctcctgagcgtcaacgcccagtcccaccctgtccctgaactttgaccaagtccttggcttctgagacactgccttcagcttagccccaccccaggcatgcccctccctgagacacctccctggcattctatcttctgcttaaaactaaatctcacaagggagctatttcctagcctccaactctgtccctgtagacccaaccggaccctgccctcaaccctgttcctaccaccatcccaaatgtgggaaaacgctcttggccccacctgtagcctctaagacattctactctttggccaggacaccaccccatcccagcctccagctcaaacccctgacactctccagccaagccctgcccctagccaaggccagagtctgggctggccatcgttttcttcccgctctcttgtcctctctctgtctctcttacctattcccagagggtttccgggagatctgcccggctggtcctggttaccactactcggcctccgacctccgctacaacaccagacccctgggccaggagccaccccgagtgtcactcagccagcctcgtaccctgccagccacctctcggccatctgcaggtgagctggctctggcagaagtgggtgccatcttcaaggggctgccccagccccatagtgaaaggaggcaagagaggatttgggctccactcgttgataccccttctttatcaggctttctgcccacccatcgcctggagccccggcctgaaccccggcccgatccccggcccggccctgagcttcccttgcccagcatccctgcctggactggtcctgagattcctgaatcaggtttgctagaaagaactgagggcattgggcctgcagcagtggctcacgcctgtaatcccagcattttgggaggctgaggagggtggatcaccaggtcaggagttcgagaccagcctggccaacatggcgaaaccctgtctctactaaaactacaaaaattaactgggcgtggtggcagatgcctgtaatcccagctacttgggaggctgaggcaggagaatcacttgaacccaggaggcagaggttgcagtgagctgagatcgtgccattgcactccagcttgagcgacactccatctcaaaaaaaaaaaaaaaaaaagaattcagggcattgatgggggtattacaggtgggattctggggtaaaagactccaaggtgaagattccaggttacagcaaataggaatggtatgggcagagataagcgtttgaagggttgggtggtagttagatcaggagctggagtcacagttgggctcttctgtgtcaatcgagcaagccatttaacctctgagactcagttttctcattggtaaaatggggatggttgttgagatgcctctgaagtgtctgacacctagtaagtgctcagataaatacttatggtagataattatttttcattatctaatattagataattatttctcaggtagggcactaagaatgtatctcaggcggagggttggagagcaaactattcaaagccagagaccttggggtggcatgatgaggggattcggccaaggatctgatgagaacgttccaggataaaaaagatggagatcagaagaagactgggcttgcttggggaggagacatccatgaaggtgttttatggatgtctccgggggtgggggttttactgggatgaaaggaacggaggattcagagatgggggaaccctggctgactggaccccccaggtccctcctccggcatgtgtcagcgcaacccccaggtctgcggcccaggacgctgcatttcccggcccagcggctacacctgcgcttgcgactctggcttccggctcagcccccagggcacccgatgcattggtgagcaagacggagggcgcggaaggaggcggggcggggggctttgcctggtcaccttgtcaccagccccctccgtgtcctcagatgtggacgaatgtcgccgcgtgcccccgccctgtgctcccgggcgctgcgagaactcaccaggcagcttccgctgcgtgtgcggcccgggcttccgagccggcccacgggctgcggaatgcctgggtgagaaatttgccccacccggctccaggcccaccccagggtctcgctcctgctctcactccagagcctctcca

SEQ ID NO: 21714 - DNA, 2300 bp, Homo sapien
gagaacaggggctgagggatggggacctcactccagagtcttctctcctttcaacaaaataaggcagtcctccccacccctcctccctttttgaaagatactcttgtgcttatgggaaccctgaggagggggtcacctgaggcagggcaggcaacatggagttggtgccttagcccccaccttagtagctggagagaccattgaatggggacacgaggaaggtgtctgtcttcctgggaagagggagcagcctgaggcaagtccagaaggcaggctcaagactggaatgctggggtgggtggtgatggccatgggaatggattcaggccccttcctcagcctcattggtcccctctgccccagatgtggatgagtgtgcccgaagccccccaccctgcacctacggccggtgtgagaacacagaaggcagcttccagtgtgtctgccccatgggcttccaacccaacactgctggctccgagtgcgagggtgaggccggggagggagggaggagtgtggatgggtgaggggggagttggaccacttcttcaaggccaccctctcccctgccccccagatgtggatgagtgtgagaaccacctcgcatgccctgggcaggagtgtgtgaactcgcccggctccttccagtgcaggacctgtccttctggccaccacctgcaccgtggcagatgcactggtgagaccaggccctggctgtgaccttgggcctgcatcatgacccccgacccttgacccagatcacaactatgacctggccgtaacctcctgacctggacctcagtccctcagtccccagagcctgtgactcctgaccctgacctggaccacaactcttgaccctgaatgtgactcctgagacccaacttgacagtaacatttgaccctaaccatcacccttgatgatagtccctgcccataccctgatagcaattgtgaccctcatgactctggccctgaatgtgacctataactcctgaatttgactgtgacatttgaccctaatcataaccactaaccatagcactgaccataaccttgactgtgtgactcttggtcctatctctttcacagcccctgcctcttctcagaatcccttctctggaacctggttgggttcataatccctgaccctggcccctgacttgaggcagaattctggaccctgactataacttctgatcctaactggattcagattccagtcactaactctgacccatggctcagccgaatcccatccaatgatcctagtttataatacttgactggtcccttgccctagttgatttctgatccctgtctgatccctctcctgactccaaaatcctggcacaggtagttcctagaaacctagacccacaggacttgcaaccatggtccccggaacccgagaaccttggtcagccctacccacctctgccatagagccctcccccagcctccaactcatgagacttcccaccacctcccccagacaccctactccaaggggattggtcgggtgtgtcccgagactggaccctttctgaacacccccaccccccacagatgtggacgaatgcagttcgggtgcccctccctgtggtccccacggccactgcactaacaccgaaggctccttccgctgcagctgcgcgccaggctaccgggcgccgtcgggtcggcccgggccctgcgcaggtgagcagcatagggacccgccagagagtctgggagtagggcctgggttccagggcaaagccggctggaaaggtggaggcgggaccaaggcgctgtgggaggagcttagaaacctggcattggtgggggcggggttactgcgatgtgggcggagcttgtctgggaggccgggtcccgtgactccgcccaatctcccgcgtaccctagacgtgaacgagtgcctggagggcgatttctgcttccctcacggcgagtgcctcaacactgacggctcctttgcctgtacttgtgcccctggctaccgacccggaccccgcggagcctcttgcctcggttcgtacccgggctgatcctggccccggaaagggtgggcttagggcaggaaaaggcgggacggggagaagagggcgaaaaggggaaaacgagtttttagccggggtattccagcaggatcagggggcagctggtgggagtctcgaggcagtgagggggggcggggcgtggagatgaaagggccgagtctgggtatttggaccgtgattgtaaagaagctgttctaaacccgtcggggggcggtgtttgcagggagggaagtagcg

SEQ ID NO: 21715 - DNA, 2300 bp, Homo sapien
gaaaccccgtctctactaaaaatacgaaaattagccaggtgttgtggtgggcgcctgtaaattccagcaacttgggaggctgaggcagagaattgcttgaacctgggaggcagaggttgcagcgagccgagattgcgccactgcactccaacctgggggacagggcgagactccttctcaaaaaaaaaaaaaagaaaaagaaaaagaaaaattagccaagcgtggtggcaggcacctgtaatcacagctactcgggagctgaggcatgagaatcgcttgaacccgggagacggaggttgcagtgagccgagatcgtgccactgcactccagcctggggtatagagcgaggctctatctcaaaaaaaaaaaaaaaaaaaaaaaaaaaaaaaaaaggagagtttggcgttcatcaagcaacatttggaaactacagagaactagcaaggcaaagacgcccctcccatccctaagtcctgtaccactatggttgttgacattttgatatatttcctttcagccttttctattctctgtgagctttttaaatgcgtgtgttgtgtgtgtgcacgtgtgtgttttacataactgtgtgagcaaattgtttatacagccctgttttttcccctcttaaaatgtaagctgttcccctgttaaaacatctttggataaacacaatctctaatgtttgcactatgtttattcaaaagggcagcattgccagaggttgaagctgtttccaatttcctcccattataaataatcccctcatggacctccttgtgtgtcccagaggagggattcttgggccaaagggtgcggaccctttggcagagctcatggtcaaaaatctcggcagagtttcagcctgacccgaagctaagatgacctcatacggttaaagtgagattggactgctatttatttcctgaacgtttgattcatgactcaggcttgtcaggggatcttttttttttttttcttctgtatgtgcttggttgcaagaaacagaaatccattcacactagctcacgtcaaaagggcaagagaatcgcttgaacgcgggaggcggaggttgcagtgagccgagatcgcgccactgcactccagcccgggcgacagtgcgagactccgtctcaataacaaacaaacaaacaaaaaaagggcggggggtgttgtatccttcagcaagtaaagctcatattcagcttggactagctgtctgcggagcatgttgttggggtatatctaggctatgttgattgttgaaatactgaattatttccgtattggttggtaaatcattctgtctcaagtcgctccaatgacgtcctccaccaaggccactctagctgccctggtccctctcccaggacttcccagacctctccacaatgcaggaagtaaagggtcaatatcgggcacagaagtgaaccatgctgctcggtcagtgcccaaagtattggttgtgaaattcattttttcttttcttttttttttttttggagacaaattctcactatggaactcaagcgatcctcctgccttggcctcccaatgtactgggattaaggtgtgagccactgcacctggactgcttgtaaaatatttgatgattcgcctagatgcaagtaccagaacagctgactcaaatggcttaaattgtaaggggaatctgtggctggaaaatccacacttgtgctggcttcagccaaagttgacacaatggctcagccatgtcaccaaggactttcttttctttctttccttctttctttcttctttctttttttctttcttttctctctctttctttctctctctcttttttttttttttttttgacgtagtctggttctgttgcccaggctggagtgcagtggcacaatcttggctcactgcggcaacctccaattccccggaattcaagtgattctcctgccttagcctcccgagtagctgggactataggtatgtgccaccacgcccagctaatttttgtatttttatttttttatttattatttttttaatcattcttgggtgtttctcgcagagggggatttggcagggtcacaggacaatagtggagggaaggtcagcagataaacaagtgaacaaaggtctctggttttcctaggcagaggaccctgcggccttccgcagtgtttgtgtccctgggtacttgagattagggagtggtgatgactcttaacgagcatgctgccttcaagcatctgtttaacaaagcacatcttgcaccgcccttaatccattcaaccctgagtggacacagcacatg

SEQ ID NO: 21716 - DNA, 2300 bp, Homo sapien
tcccagtgactgacaatgtttatagttgtgtctctacctgattttatatacgtgagtgacacacacctgtctgtgcaactctgcctgtgtgactgccattgtgtctgaagtcacattgtatctgtgtgactggggttgtgtgacagtattgtgtatgacagtggttgcgtatgcagaaccatgtctgagtgtgtgactgaggttgtattaatataaatgactgtatctagcagtgtgtgtgataacgagtgattgtgtgtatttctagccttgcatgtgtgatttgggttatgtatttgacttggtgtctgaaaccctggctatttagagggattatttgtgtgtgactaaagctgtggatgtgtctccgtgctggtgccaggaaattatgtttgtaggggtgtgtatatgattatggcttccatattattgtgtttgacctgcatgtctgaccctgggtgactatagatgtctgtgtctatgtcatcatctgtgagagtgtggggtctgtagctgtgtgcctgtttttgtctctgtgtgtatgtgctggactacctgtgttagaatgtgtgatttggtgatgagattggcccctgactgtgcacatggctccgtcaggacctgtgtcttctgtgtaaacccagctataaatgccacatcctggtcactgcatttatgtgcatacactggactgtgtacttgtgacatgggaaactaaaactgtgtgcttatgtctctatgtgtgagatatgtgtgtaggtggggcttgtgactttgtgcacctgtccacacggggctgtgattctatatggccacatacttgtctgtgtgacttgtgtgcctgcatgaagaaaggctatatgtttcgctgcattggagtgacatggtacagctgtgtatggacactgggtgacgggattatgaccatgataggtggctgggtcacatggacattgatgctgtggccatgcctataggaccaccatggctgtgtcttgagggaggccatccttggggacagttgtttgtgggtggttgcatgctgtggccatcagtacctctgtatgtggttgtgtatagaggactgtccctatgagtgtggctgtcacaatagactgtgtgactgatgctgtgaccagatttgagcacctatgactgagtatgtgtgaccacgtgacagtgtgtggccaaaaacagtgtgttggtgtgactggtctggttgaggctgcatgtggtctccgtgggaccaaatgtgtgtctgtccgtgtgcatctgtgaccagatgtcagtgtgcagcagtggagatacgtgtaacaagtgtatatagctgcgattgtgtcgtgtgggactgggtcagcaaatgggtgaactctgggtgtgattctatctgggtgggcctgtgacgtcagtatcttgggcgggtgcctgaggaaacatagctgtcactgggtgtggccacgcatgtgcggctctagtgggttgtctgggccccgttctttgtatgtggctgagaatgtggaagtgaccaaatttcagtgggtggtgtgaccaggtgtctgcggtgggaactgagtgggccaggacatgctgcatgtatgtggacaaatgtctgtagtagagactgtgtgtgtccgaacatgaatatgcggccagatgtttacagtggcagctttctgggtttgggactgtttctgtgtatctgcgatctgaggtgtgtagctgtgattgcgtctatgtgtaaccaagtgtgtaaagctgtggccagatgctagggacacctgtagatatgagttggctgcgtatgtgtgtagccctgcacatgcatctggagggcaaggccactctcacagcatccccttgggcagtgaggctctcctgaggccagcacatccccaacatatgccccccaaacatacctactccttcctgggcccttggaaccaggtggctgatctccctggtaacagttgctaggacaactaggactctcatcagggagcccaagatggagggggctggccgaagtccaaagtcggggtgaagtatcagactgagccccaacccagacaaacttctcaccttctcctcccctactcgggcagggcggaccccggaggcctgagcggcacctgcccccagccccctgtggggccccggggcccccagaaacctgcaggacggagccaggtgagcgaccagcctgggacagggcagggctgaatgggtatgtggtcttgcctaacacgaccagaggagctgtccctgcggtcacacaggcttaatcacactcatgagtggac

SEQ ID NO: 21717 - DNA, 2300 bp, Homo sapien
ctttggggaggagtggggggaggtggctgcctgacttctcaggaaccctgggaacatgggcaccgtggatctgttcaggaggggcgaaggccgcttctctgttgtagagagagtagagggctacttgtctgttggaggctctgcagggaagtaaggggtgcttactcggggaataggcagctgcttgtctagtccaggctctggaaggagtggaagctgctcactcttgggggagtcggggcttgtgttgatggtggagactggagggagtggaggctacacgttgtttctgggttatgcagagggctctatgtccacactggctgcctttgctctccccccacccccactcccaggcattctccgacgcccacgtggaggcagtgatgatcctgggggagcctttcgccacccagggcccttatgactttgggtcgggggaaacggcccgccgcatacaggacctcatcccggtgctgctgcggcaccggctgtgtcccccacccgaggagacctatgccctgcaccgcaagctggcaggggctttcctggcctgtgcccacctccgagcccacatcgcctgcagggacctcttccaggacacctaccaccgctactgggccagtcgccagccagacgcagccactgccggcagcctccccaccaaaggggactcctgggtggatccctcatgacagcctccatgggggattcagtccccagagcaggccgtaccctgctgtagtgcctcttatcccttccccgtctgccctgggtcagaggagcccccttgggcttcccagtcttgcctggctctcctccttggcccaggagctcaggatccctggggctggggaactcccaacttcgtgccctagatcctgcacctccccactcgaaagtgggtatccgaaaactaagccagggaagcggttaacttatctttgccaacatttgagggagccttgggccgctgcatgtcgttatgcagatcagactcatcagggggagccctcacctctgcctcaagcctcccgtggaaggcgagatggtcctggaggcagtcctcacctctgcctccctcgctcctccaacagctgccttctcccgggttccagcctctcagtgtgttggagaggtaggggtgcggggtgggggggagctgaatcttcaatcggaataaaagcagccctccccttcccccagctcttttctctgcgctagggttggggggagagggggaggagctcgccagcggcctccaggtgcagatggccagcccccctgcacccccttgtctgaaagcctcagccctgcctgtgccatctgttgccgggaacctccttctcgccttccccacccccccccacgtgctgaccacctgctctaagggctgtggcagctgaggcctcccacacacacagtgcctcttggctgcgggctccctcccctcactcctggcaacctcgcctttactaatgggctctaatgtccctgccagctgctttgccaaacccacaggattggcgtagggggcggcgggggcgccgtagcggccagaaccgcgccctggtcccaccccggcgcccccgttcccaaagccgaaccgatcgcgcatcaggacgccttggtctgttcacaccccctccccttccttgcaaaaagtgcctcgtcaccgctcctgcccgcccccgccgggctggggaaccatggggttagcgggaagatttgggggtgtggggcggcaaggcgcctctagaagcaactctttcggacgcggagctggaggggatctgaggtcaggtgtcacggagggaaagggagcccaggccaggacggaccgggggaaaggactcggcgatgttcataggcatgctcagctcgggactggccaatgggcgtggcggggcggtggccgcgccggggaaggcgggatggtgtctgcgtgtgggcggggtcttcaggccaaggggcggggcggggcgggacctttctgcatatacggcaggcggcgggccaatgggcggggtcggggcggggagccgaggccgagggacgctcccccgcccccggaacggaatcctcccgggagccgaggaggctcgcgcgcgtgcatcccgcaccatcccccggccccgggccctggccggcgtcagaccgagctgccgccgccaccaccgcagcagcagcagtcggggagccaggcccagccagggccgcgggaggcgggggcgcccgggccctggatgtcccgcagcgcggcggccagcgtgagaagggcgggagaggggggctcgggt

SEQ ID NO: 21718 - DNA, 2300 bp, Homo sapien
agcgcggccctgcccgcgggtgaggcgcccacccactcctctgctgacctcccaaaggggctatgcccagagagagaaagcaggagggggagcccagaggagagcacgggcagggtgtgctggcgttgtgagcgggagtgtcagagacagaaaggacaccaaggcggggagagcccagggagcatgagcaggtgtgggaaaagccttatggattttaacagagccttagagagacgggagcccagggccaagatacagcagcagactctcagagggtgtgcatgcagggagcgggattgtaggtgcggcagagcagaaaaggacagtcctggggatggcacgtgaggaggcgcctagagaaaggagggtgggttgtgtttgtgtaagagacggagagggagagggaaagccaggcccagaagtgagattcagatgcagtgagcaacgtgagagtcagtatgaaaaggagacagaatagaggcaggcgtgactctgaaagagctgccagggactggggtgcaggcatgtgcaagagacagagcccagaaaaggcttcggaagaccccggggaaccctgtggtgctatgaaggacgagggaaatgtgtagacagatgatacgatgcaggtcagaggcctggagcaggagctgcaaggggcagcgggggagacaggagagggacagatgcaggtcagaggcaggagcaggagctgcgtgggagacaggagagggacagatgtgggtcacaggcctagagtaggagctgtgagggacagcgcgggagacaggagagagagggttggcaggagaaggcatccaccagtgggcgctcggggcccttccctggctgacacacctcccccacaggcctgtttgccgagcagagcctgcaggccttgcagcaggagctggcttgggagtgtgactaccgtcgtgaggcggcttgtgcccagaatttcaggtgagctgagtgccctgagcttccctccttccctccctcccaggctgggtgggaagtagctgccccctcagcttctggcagctggagctgtggggtagggcaaactctctctttctttcaatcattgttcatccatccttccactcatccatcacttcgcttaccccctttgtcctctgtgagcttgggcaggtcacttcccaagcggcagtcttctcctgtgtcagatgggccgcatatccactgtggtccgacacaggcacttaattaattacacaatgacacactcttacctctgctggactgacggagagcaaggagcccacagcactgggaggtagagagagtgggctccacagcatcccttctgcactgcaggttgtgggagaaggtggtagaagcattttgagaacaggttggcatcatcacataagcccttatattcaagaactctgcaagccaacgattgccctccctgctgaacactctagggacccttttgccagtatccatcatcagactgttctagaacgcttgtctgcaacagccccaaactggaaacaacccatatccatcaagtttatccagcagggtggacaaataagcaacggtatattcatctgtggaatattacgtagcagtgaaaatgcatgaactatggctacgtggaacaatgtggttatatcttggaagcatcctgatgtgtagcaattaatggcacctcagtggggtcctccacagtgtggctcacacatttattgacagcctaaaacgtgccaagctctgtagacagagagtgaaagctcagtagaaggcagtggttagaggcacacaccctagactcagatgcgggatgaaatcctgggtcagcccttaacaggttacgtggcctgcatccatacaatctgtacagtggcctccagagagcatcccctcactgtggagtgaggatgaaaggggagtgtgccgattaaatgccccacatggctccggttcatgaggagcagttcaaacatcagagatttttatcaacaaggacaaaaatacaaaccccaaaggaggagctcaaggaagagagtgtgaagtggggtgatgggccagagacccccccgtcccccacaggattcccgggtgcccttaggataaaaccccacaccaccctcctgttctccctcactctcctccagccatcccacggatcctcaaccagagaccttgctcatattctctgcctcccaaatcttacatagacatacttcttttatttttttgagacagggtctcgctctgttttccaggctggaatacagtggtgagatcacagctcactccagcctcga

SEQ ID NO: 21719 - DNA, 2300 bp, Homo sapien
ctcactgtaacctctacctcctgggtccaagtgatcttcctgcctcagcctcctgagtagctgggactataggcatgcaccaccatgcccagctaatttttgtattttttgtagaaacagggttttaccatattgcccaggctggtctcaaactcatgaactcaagtgatcccgccccgacgtcccaaagtgctgggattacaggcatgagccagcactcccagccaggtttcttttttgcgtggtgtaactgtcctaaaattgattctggtgatgcttgcacaactctgtgaatatactaataatcattgaattatataacttaaatggtgaattataacagtatgtgaattatttctcaataaaactgttagaatgagcctccaaagagcttatttatgtggattatagttatcaatgtctaccatattagaaattaaaactgagaaatttttaggccaggtgcggtggcttacgcctgtaatcccaacactttgggaagctggggcgggaggatcccttgaggtcaggaatttgagaccagtctgagtgacatagcgaggccccatttttacagaaagtaaaaatattagccaagcatggtggtgcatacctgtagtcccagctactcaggaggttaaggcaggaggatcacttgggcccaggaggttgcagtgagccatgattgtgccgctgcactccagcctgggtgatagagtgagacactgtctcaaaaacacaacaaaaatacagagatatttttaaaacacaagagtacacacgtacacattccatcagctgtcagtctgatggtgtcctcacatgtcctggagcctctggagaactccagtgaatgttcttagacgcatgagagcagaaaggggaaaataacatcttaatgttacgataaaaatagtttgatctctcagacccctctgaatggtctcagggaccctcaggggtccctggcccacatttcgagaatcgttgcccttctcatgtccccacctggtcactcccctcaccaagggtgacctctgtcttggctcctggaccctggatttgtttggccttgttttgctctttatatcagtgtaactgggtgatgatttcatgcacccggctgctttcactcagcattacatttttgagacccacctgggctgttgtgtgtagtgatagctcatctattcaatactgtagtagttactctttgactctcctgcaatttgttttaacttatgtttatttttctttctttcttttcttttttttttttttttcccgagacagggtattgcttggttgcccaggctggagtgcaatggtgcgatcacagttcattgcagcctcaacctccagggctcaagcaatcctcctgcctcagcctcctgagtagctgggactacaggcacatgccaccatacacccagctaattagagacagggtcttgctttgttatccaggctggtctggaactccttgactcaagccatcctcctgcattgacctcccagtgttgggattataggcgcgagccaacaagcctggcctccgtatttcgttttagccattcctgttggtgtgcagatgatatatattttttttaatagagaaaggatgtcactgttgcccagactggtctcagactcctgtgttcatcccgcctgggtctcccaaagtgctgggattacaggcgtgggccgccgggcctggccgcagtgatgatatttgtggttataattctaatggttgttctctccccagagggtggttctgggctggactccagccccttcctgtcggaggccaatgccgagcggattgtgcagaccttatgtacagttcgaggggccgccctcaaggttggccagatgctcagcatccagggtacagcatgaccctcgactcctgacccctgacctcccttctaccccagccctacccaccaacaggccccaacttcagatactcacacggggtccctcctcacctcttcgcttacttcccccctggttccactgtctcccaagacaacagcttcatcagccctcagctgcagcacatctttgagcgggtccgccagagcgccgacttcatgccccgctggcagatgctggtgagtgcccagtgggggagggcggtgagggaggcaggctccatctcctctgacctgcctgaccttcctggcttcactgccccactccctgcctctgagcctcactttccccatctgtaaaatgggaatcaccagagtacacacctcctagcattgctgtggtgattaaaacagggaaca

SEQ ID NO: 21720 - DNA, 2300 bp, Homo sapien
gcctcgttcaggctcccacggcacgggcagcgcctcatgcccgctccttcggttcgggcttcggccgacccggcccctcctatccctttaaatcccgcgaggggtgtggctggggagccccgactcccgggttccggcccgcggagctccagcccgccccgccgcgcaagggttaaccgatactcccctcaaaggggaaagccccgaagccccgccccaccggacgtgacggaacggaacgagacggagccttgtccgactccgcctcccaaggggagggggtttgcctctgagcatccgaagcgcggccaggtatgcatctagggcaccggggtcctggtggcgcgccagtgggccccctccctccacccctgtgactaaaccaccctccctacacggttgaatgacaagttcaaccttccctaaaacccccggtgacgagtccagccgcgcgcccattcttcacgcaggggcgggacggactttcaaagacttggagttcccacgggtgtgggttcgagaccttcctctgccagttcccagctccgctaccctgagcaaatgacttacgctccattggattttccgtaagaaatctctgtcatgtatagagtacttgttctgtatcagaccctgacacgatttcagttcattctccaaggctgaacaatagggatgccagggctccattttacacgtgagaacagaggctcagagatctgccggcctctaccctttgcttgcagctacggggctatctgacatgatctcatgtatgtgaagcatgtggccccgggcctggcactgtcagttgtagcccagtaggattatttattgtcctaggtgattttgatatattttgcccccaaggctgagctgccacccagctcctgagtcagccgttcacctctgaagggggagaggaggtggtttgtcttgaaattgagtcaactgggggagacattgggcacaggtccaaggctctaaaatgagtcaccttttcacagaccaatgagagaaatcgaaggcaggagcccacctagtacctcatacaggttgggaaggagaagtccagagagggatgagggcttttctgaggtcacacagtacgggaatagagacaaagaggcctgattcccgacaagaggggttggggcagcggggttctgtgggggaagcatcggcatccctccctctcccagtggtgggaaagatgccccaaccagatgcctctattccagactgtgagaagtgggtgagtcagcctgttgtggggagagcaggctttccaacgcgcgcgcgcacacacacacacacacacacacacagagaaagaaagataggatgggaggtggttttctgggatgccaaggttcctgactcagcactgggaatcttggctgagtgtgttctgggaaatgtcaggcctacaggaagcagagggctcccagtcgcaccattccgcaggtgggcggggagcggagagaacagggtgtgtgagggaacagagactcagtgtgcaagtgggggggagggtatgtacacgagagagttgaaggcgtgagcgggaaacagttggcaagcaaggcaagggatttatatgcacaaggaaggaggttgggtgccagaatgtgggtgtttgtgcaaagtggaggggctccatgtgcaagggaaatgtttgctgggaagaatgtgtattcaaaggaattgtgttgagcctgccaggggtaaaaataagaaggggggttggcaagatattcgtgcagaagagaggcgtcaggtttgtaagggagactttgcaagaaagtgtagggaacagaagggtctgtcgcgtacaaggcactttgaggtgagtggaagggcagacagggcacgcttgcgctcccgcgatgcctcagcaatccccccagatgggcccccgatgcccaccttaattccaggctccatcgctagggcctctctctggccccttcccccgcgcacagatggagaaactccgtgccagtcagcgagttgctgccgcgccattggttggctggccgaagggggcgggcatacagaggctcccggaagcacaggagggccccagcaggttgcggactcggaggctgagagcagtgggtgcttagcaacggggggaggtgctcagtaacggggtggggatcgggcggggggacaccggaggaattgcgggtgcctacagggccaacagaggggaaggcggtgcatagcaacgaggggggtttcagagaagtggagaggtagcccctgaggaactgtgggtgtctagtaacgggggc

SEQ ID NO: 21721 - DNA, 2300 bp, Homo sapien
ccgcccgatccccaccccgttactgagcacctccccccgttgctaagcacccactgctctcagcctccgagtccgcaacctgctggggccctcctgtgcttccgggagcctctgtatgcccgcccccttcggccagccaaccaatggcgcggcagcaactcgctgactggcacggagtttctccatctgtgcgcgggggaaggggccagagagaggccctagcgatggagcctggaattaaggtgggcatcgggggcccatctggggggattgctgaggcatcgcgggagcgcaagcgtgccctgtctgcccttccactcacctcaaagtgccttgtacgcgacagacccttctgttccctacactttcttgcaaagtctcccttacaaacctgacgcctctcttctgcacgaatatcttgccaaccccccttcttatttttacccctggcaggctcaacacaattcctttgaatacacattcttcccagcaaacatttcccttgcacatggagcccctccactttgcacaaacacccacattctggcacccaacctccttccttgtgcatataaatcccttgccttgcttgccaactgtttcccgctcacgccttcaactctctcgtgtacataccctcccccccacttgcacactgagtctctgttccctcacacaccctgttctctccgctccccgcccacctgcggaatggtgcgactgggagccctctgcttcctgtaggcctgacatttcccagaacacactcagccaagattcccagtgctgagtcaggaaccttggcatcccagaaaaccacctcccatcctatctttctttctctgtgtgtgtgtgtgtgtgtgtgtgtgcgcgcgcgcgttggaaagcctgctctccccacaacaggctgactcacccacttctcacagtctggaatagaggcatctggttggggcatctttcccaccactgggagagggagggatgccgatgcttcccccacagaaccccgctgccccaacccctcttgtcgggaatcaggcctctttgtctctattcccgtactgtgtgacctcagaaaagccctcatccctctctggacttctccttcccaacctgtatgaggtactaggtgggctcctgccttcgatttctctcattggtctgtgaaaaggtgactcattttagagccttggacctgtgcccaatgtctcccccagttgactcaatttcaagacaaaccacctcctctcccccttcagaggtgaacggctgactcaggagctgggtggcagctcagccttgggggcaaaatatatcaaaatcacctaggacaataaataatcctactgggctacaactgacagtgccaggcccggggccacatgcttcacatacatgagatcatgtcagatagccccgtagctgcaagcaaagggtagaggccggcagatctctgagcctctgttctcacgtgtaaaatggagccctggcatccctattgttcagccttggagaatgaactgaaatcgtgtcagggtctgatacagaacaagtactctatacatgacagagatttcttacggaaaatccaatggagcgtaagtcatttgctcagggtagcggagctgggaactggcagaggaaggtctcgaacccacacccgtgggaactccaagtctttgaaagtccgtcccgcccctgcgtgaagaatgggcgcgcggctggactcgtcaccgggggttttagggaaggttgaacttgtcattcaaccgtgtagggagggtggtttagtcacaggggtggagggagggggcccactggcgcgccaccaggaccccggtgccctagatgcatacctggccgcgcttcggatgctcagaggcaaaccccctccccttgggaggcggagtcggacaaggctccgtctcgttccgttccgtcacgtccggtggggcggggcttcggggctttcccctttgaggggagtatcggttaacccttgcgcggcggggcgggctggagctccgcgggccggaacccgggagtcggggctccccagccacacccctcgcgggatttaaagggataggaggggccgggtcggccgaagcccgaaccgaaggagcgggcatgaggcgctgcccgtgccgtgggagcctgaacgaggcggaggccggggcgctgcccgcggcggcccgcatgggactggaggcgccgcgaggagggcggcggcggcagccgggacagcagcgacctgggcccggcgcaggggccccggcggggcggccggagggggg

SEQ ID NO: 21722 - DNA, 2300 bp, Homo sapien
accactgggagagggagggatgccgatgcttcccccacagaaccccgctgccccaacccctcttgtcgggaatcaggcctctttgtctctattcccgtactgtgtgacctcagaaaagccctcatccctctctggacttctccttcccaacctgtatgaggtactaggtgggctcctgccttcgatttctctcattggtctgtgaaaaggtgactcattttagagccttggacctgtgcccaatgtctcccccagttgactcaatttcaagacaaaccacctcctctcccccttcagaggtgaacggctgactcaggagctgggtggcagctcagccttgggggcaaaatatatcaaaatcacctaggacaataaataatcctactgggctacaactgacagtgccaggcccggggccacatgcttcacatacatgagatcatgtcagatagccccgtagctgcaagcaaagggtagaggccggcagatctctgagcctctgttctcacgtgtaaaatggagccctggcatccctattgttcagccttggagaatgaactgaaatcgtgtcagggtctgatacagaacaagtactctatacatgacagagatttcttacggaaaatccaatggagcgtaagtcatttgctcagggtagcggagctgggaactggcagaggaaggtctcgaacccacacccgtgggaactccaagtctttgaaagtccgtcccgcccctgcgtgaagaatgggcgcgcggctggactcgtcaccgggggttttagggaaggttgaacttgtcattcaaccgtgtagggagggtggtttagtcacaggggtggagggagggggcccactggcgcgccaccaggaccccggtgccctagatgcatacctggccgcgcttcggatgctcagaggcaaaccccctccccttgggaggcggagtcggacaaggctccgtctcgttccgttccgtcacgtccggtggggcggggcttcggggctttcccctttgaggggagtatcggttaacccttgcgcggcggggcgggctggagctccgcgggccggaacccgggagtcggggctccccagccacacccctcgcgggatttaaagggataggaggggccgggtcggccgaagcccgaaccgaaggagcgggcatgaggcgctgcccgtgccgtgggagcctgaacgaggcggaggccggggcgctgcccgcggcggcccgcatgggactggaggcgccgcgaggagggcggcggcggcagccgggacagcagcgacctgggcccggcgcaggggccccggcggggcggccggaggggggcgggccctgggcccggacagaggggtccagcctccacagcgagcctgagagggccggcctcgggcctgcgccggggacagagagtccgcaggcagaattctggacagacggacagactgagcccgcggcagctggccttggagtagagaccgagaggcccaagcaaaagacggagccagacaggtccagcctccggacgcatctagaatggagctggtcagagctggagacgacttgtctttggacggagaccgggacagatggcctttggactgatccgcacaggtccgacctccagtttcagcccgaggaggccagcccctggacacagccaggggttcatgggccctggacagagctggaaacgcatgggtcacagactcagccagagagggtcaagtcctgggctgataacctctggacccaccagaacagttccagcctccagactcacccagaaggagcctgtccctcaaaagagccaagtgctgatggctcctggaaagaattgtatactgatggctccaggacacaacaggatattgaaggtccctggacagagccatatactgatggctcccagaaaaaacaggatactgaagcagccaggaaacagcctggcactggtggtttccaaatacaacaggatactgatggctcctggacacaacctagcactgacggttcccagacagcacctgggacagactgcctcttgggagagcctgaggatggcccattagaggaaccagagcctggagaattgctgactcacctgtactctcacctgaagtgtagccccctgtgccctgtgccccgcctcatcattacccctgagacccctgagcctgaggcccagccagtgggacccccctcccgggttgaggggggcagcggcggcttctcctctgcctcttctttcgacgagtctgaggatgacgtggtggccgggggcggaggtgcca

SEQ ID NO: 21723 - DNA, 2300 bp, Homo sapien
caggggagagccacacccaagctgggggtgacggtggacaaagtaaacaagagtgttcagggggctccttggggatgtaggggtcacaggggagaccaggtgggctcccggctaggccaaggatcctttggcgtttggggtcacacagcccttttgcgaatctgatgcaagctgggggaatcgctttgctccctagaaaaatgtacatacaaataggctaaggggtggtgaaggtttgtgaccctttaagacagccacaggccccagattaagaaatgtggggtagaaagtgcaccctgcctgtctccctatcccagtgttcttcagattccagaggattagacagatgtcagaccgtcgctgcaacaatgtatgtgaacacgcacggcaggctccttagtcctacaatttcaggggttcctgggccccataaagtcggtcagtggccctccattgtagacccccaggagtggagacagtgcaggaaggggaaaggagagaattaagaaggggtgcctggagtgaattagtaacctggctgtcagagggaggaggtcagtggatggaagaggttcccggagatgaaattgctggtgggcaactaacagtaaatgggtagagaacttcctaagcaaaggcggaggaataaggagttttgcgtgatgtggctcaagggcaggatgggtcccactcaccccagacctgtcctcgggatcgctggcacctccgcccccggccaccacgtcatcctcagactcgtcgaaagaagaggcagaggagaagccgccgctgcccccctcaacccgggaggggggtcccactggctgggcctcaggctcaggggtctcaggggtaatgatgaggcggggcacagggcacagggggctacacttcaggtgagagtacaggtgagtcagcaattctccaggctctggttcctctaatgggccatcctcaggctctcccaagaggcagtctgtcccaggtgctgtctgggaaccgtcagtgctaggttgtgtccaggagccatcagtatcctgttgtatttggaaaccaccagtgccaggctgtttcctggctgcttcagtatcctgttttttctgggagccatcagtatatggctctgtccagggaccttcaatatcctgttgtgtcctggagccatcagtatacaattctttccaggagccatcagcacttggctcttttgagggacaggctccttctgggtgagtctggaggctggaactgttctggtgggtccagaggttatcagcccaggacttgaccctctctggctgagtctgtgacccatgcgtttccagctctgtccagggcccatgaacccctggctgtgtccaggggctggcctcctcgggctgaaactggaggtcggacctgtgcggatcagtccaaaggccatctgtcccggtctccgtccaaagacaagtcgtctccagctctgaccagctccattctagatgcgtccggaggctggacctgtctggctccgtcttttgcttgggcctctcggtctctactccaaggccagctgccgcgggctcagtctgtccgtctgtccagaattctgcctgcggactctctgtccccggcgcaggcccgaggccggccctctcaggctcgctgtggaggctggacccctctgtccgggcccagggcccgcccccctccggccgccccgccggggcccctgcgccgggcccaggtcgctgctgtcccggctgccgccgccgccctcctcgcggcgcctccagtcccatgcgggccgccgcgggcagcgccccggcctccgcctcgttcaggctcccacggcacgggcagcgcctcatgcccgctccttcggttcgggcttcggccgacccggcccctcctatccctttaaatcccgcgaggggtgtggctggggagccccgactcccgggttccggcccgcggagctccagcccgccccgccgcgcaagggttaaccgatactcccctcaaaggggaaagccccgaagccccgccccaccggacgtgacggaacggaacgagacggagccttgtccgactccgcctcccaaggggagggggtttgcctctgagcatccgaagcgcggccaggtatgcatctagggcaccggggtcctggtggcgcgccagtgggccccctccctccacccctgtgactaaaccaccctccctacacggttgaatgacaagttcaaccttccctaaaacccccggtgacgagtccagccgcgcgcccattcttcacgcaggggcgggacggactttca

SEQ ID NO: 21724 - DNA, 2300 bp, Homo sapien
actccaggcccctgcgcaagctgtatactctcatcacacagcatttgcacgacttgctcaacagcactcagggttccccttctccaagaagctccccctgactccccagcctgggtcagacacccctctgggctttgtcatgacagccctgaccactctgggttgtcactgtctggaaaggtggagggatctgtctctctcactagactgggcatttgctcttttttttttttttttttttttttgagacagagtcttgctctgtcttccaggctggagtgcagtggcgcaattttggctcactgcaacctctgcctccagggttcaagcgattctcccgcctcagcctcccgagtagctgggactacagttgcatgccaccacacctggctaatttttgtatttttaatagagatgcggtttcaccatattggtcaggcaggtctccaactcctgacctcaggtgatccacccgcctcggcctcccaaagtgctgggattacatgcatgagccaaagcacccggactggactgggcacttgtgaggacagctttcttcattgctggaggcacaccaccatggaagagatctaggtgggggacctaagtagtcagcctgtttgatcttgaggacacgggaaccccccccccaccccaagagatctgtgaagtgtctagggcagagcctgggtggtgggtggggcatggagaccctaccggtccttgtgtagtttcagaagcctcttcacatcttctctgcccttggggaccgggccggccttatcaaaggcctccttcaggagctggctcttctccaggccgaagacatgacggggagcaggccctgtggcagcgggtggaggaggcagtgggagcggtgggggaacaggggtctgctgactccagggaggggatggtaaagctgaaaagtccaggggacttgggggtagaggaggagatggaatgctgctggcttggggtacaggggtttttggaggagaaattggtggttttaggggaggagagcatggagaagtcattttggggtctacaggaggtgttgagaggttcagaaagcggggagggaaggatcctccaacggagaacggtctcagggatggagattttaaaggtttaagagctgagttccagaatctggggactgagcagtgggtgtgaaaggaccagggctaatatttgaaaccacgggagcaggaattgcgaggctgactcaagtcataaggcacctgacggttaacagggtggggtccttaaatccggaaccggatctgtggtaccggttgggttacctcgggagtcttaggtggagagttagtaggagttaactcattctttggggctggatgtggaaactcatgagtgagtttgggatatgaaggctcagatctagagtgaggtgccttaaggatgcgacttagggacccagggctaaagattcggagaacttaggttcagtaccccctcacatcccaggcccgagttcggaacctttgagctgacctttgagtcagaggtcaagaggtcaaaaaggacacctggcagggaaaatggcctagttgtggagaaggtcctggaaccagagcaacaaaaaacgtctgtgggttggagaagactcagagatcagaggccggtgggcgccgcgataaccactggaaaaaggaaaggagtcaggaagtaaagtgcacctcccactcccggaaaatggcggcccccgcacactgcctttcccatatcacgtggtattacacgcaacagttcccgcccattttgcgatcacgtgacagaaaacgcagctctggcgggggtaagaggcgggactccaaaaaggattgcctccggaagacaccgcagcgcgagacgcgtacagactcgtgaccttcactgattggtccgtagacccgggcgccacggaaggaggtgggctttcagggagtggggcggggtttttctacctaggcgggaacccaaatatcgttttgattggcaacagctgagcccagaaacgagacttgctctgattggtcaagctactgcgtttccgcgcggcgattggctggcagaaaggcagaggcggggccaggagagaaagctttgtggtttggtctcagggaagtagcaggcgccggttgagagaactacggccctgtcggaaggtaacctccggtgcaaacgaccatcggcggcaggcgagcggtacgcttggcgtccgggccttcctgggcccgtctgaggaaacttgctgctcgaggccaggctgcctaggacctgtcccttttttc

SEQ ID NO: 21725 - DNA, 2300 bp, Homo sapien
acaatagccttcttcctacaagattgttgtgagaattaaatgttatcaagatttatatgaaagcacacagaccagcccatgatacagagcgttagccaccattatggtacatgttcattgtgggctgatcactgaaaaagccggtgaccaagaaagccccagtccttgccctcacggagttcaaaggccactgggaggagagagagccccacgacagctcagaggaatcagggcttgatgggagatggtctcagcgtacggcaagtcagcggcagccacgtgaagggacaaggcaaggcttcctggaggaagggtcctgtgacctcaaaccttgtaagatgagcagcagtgaccacgttaaagggcagagtgtaagatgaactaatggagtgttgaagacaggaagtagtttgtgtaaaggccaaggagttaactcgaagtttggctggacaaacacttagaaagagaggcgggtgcaggggacggaagaggggccagcccgtgcgggacagtctggactccggactatcccgagaactcaccatccttcttgatcttctcattgaggttgttgatataaatagtgtggttagggcgggtctcgggaactgccatggagtgaagtgttgaggtaagtcttaaaggaggaaaaacgtgactttagccctgggtttctccaaatcctttgtcccaacgtcggctgctcaaggatcttcctccgaaaaggaagtcaggtaaggcgggagtaggggcaaggacggaggcaaagcgcgacaacaaagcgtgcgtaggacccgcttctccagcccgcgtgcggagagaactctcgagagatttactacgacttccaggatgctctacgcgacccggtgggcggagcaccctaaatggcgattcccattggcccaagcatccgaagggccgtcccggagaaaaaacccggatgtgggagccagtatagaaaaaagggacaggtcctaggcagcctggcctcgagcagcaagtttcctcagacgggcccaggaaggcccggacgccaagcgtaccgctcgcctgccgccgatggtcgtttgcaccggaggttaccttccgacagggccgtagttctctcaaccggcgcctgctacttccctgagaccaaaccacaaagctttctctcctggccccgcctctgcctttctgccagccaatcgccgcgcggaaacgcagtagcttgaccaatcagagcaagtctcgtttctgggctcagctgttgccaatcaaaacgatatttgggttcccgcctaggtagaaaaaccccgccccactccctgaaagcccacctccttccgtggcgcccgggtctacggaccaatcagtgaaggtcacgagtctgtacgcgtctcgcgctgcggtgtcttccggaggcaatcctttttggagtcccgcctcttacccccgccagagctgcgttttctgtcacgtgatcgcaaaatgggcgggaactgttgcgtgtaataccacgtgatatgggaaaggcagtgtgcgggggccgccattttccgggagtgggaggtgcactttacttcctgactcctttcctttttccagtggttatcgcggcgcccaccggcctctgatctctgagtcttctccaacccacagacgttttttgttgctctggttccaggaccttctccacaactaggccattttccctgccaggtgtcctttttgacctcttgacctctgactcaaaggtcagctcaaaggttccgaactcgggcctgggatgtgagggggtactgaacctaagttctccgaatctttagccctgggtccctaagtcgcatccttaaggcacctcactctagatctgagccttcatatcccaaactcactcatgagtttccacatccagccccaaagaatgagttaactcctactaactctccacctaagactcccgaggtaacccaaccggtaccacagatccggttccggatttaaggaccccaccctgttaaccgtcaggtgccttatgacttgagtcagcctcgcaattcctgctcccgtggtttcaaatattagccctggtcctttcacacccactgctcagtccccagattctggaactcagctcttaaacctttaaaatctccatccctgagaccgttctccgttggaggatccttccctccccgctttctgaacctctcaacacctcctgtagaccccaaaatgacttctccatgctctcctcccctaaaaccaccaatttctcctccaaaaacccctgtaccccaagccagcagcattcc

SEQ ID NO: 21726 - DNA, 2300 bp, Homo sapien
ttttttttttttttttttttttttgtagagaaaaggtctggctttgtcgcctaggctgatcttgaactcctgtgtttcagtgatcctcctgcctcagcctcccaaagtgttgggcttacaggcctgaaccaccacgcccggccaaaaattgggttcctaagcagaattctatacgggtggcctcaaccactttacttgctatgtgaccctgggcaagtcacatcacccctgtctcagtttctttttcttttctttcttttttttttgagacggagtttcgctcttgttgcccaggctgtagttcaatggcgcaatctcggctcactgcaacctccgtctcctgggttcaagcaattctcctgcctcagcctcccgagtagctgggattataggcatgcgccaccatgcccggctaattttgtattttcagtagagaaagggtttctccatgtcggtcaggctggtctcgaactcccgacctcaggtgatccgcccgcctcggcctcccaaagtgctgggattgattacaggggtgagccaccgcgcccggccccagtttcttagttgacgaatgggaataacaatagccttcttcctacaagattgttgtgagaattaaatgttatcaagatttatatgaaagcacacagaccagcccatgatacagagcgttagccaccattatggtacatgttcattgtgggctgatcactgaaaaagccggtgaccaagaaagccccagtccttgccctcacggagttcaaaggccactgggaggagagagagccccacgacagctcagaggaatcagggcttgatgggagatggtctcagcgtacggcaagtcagcggcagccacgtgaagggacaaggcaaggcttcctggaggaagggtcctgtgacctcaaaccttgtaagatgagcagcagtgaccacgttaaagggcagagtgtaagatgaactaatggagtgttgaagacaggaagtagtttgtgtaaaggccaaggagttaactcgaagtttggctggacaaacacttagaaagagaggcgggtgcaggggacggaagaggggccagcccgtgcgggacagtctggactccggactatcccgagaactcaccatccttcttgatcttctcattgaggttgttgatataaatagtgtggttagggcgggtctcgggaactgccatggagtgaagtgttgaggtaagtcttaaaggaggaaaaacgtgactttagccctgggtttctccaaatcctttgtcccaacgtcggctgctcaaggatcttcctccgaaaaggaagtcaggtaaggcgggagtaggggcaaggacggaggcaaagcgcgacaacaaagcgtgcgtaggacccgcttctccagcccgcgtgcggagagaactctcgagagatttactacgacttccaggatgctctacgcgacccggtgggcggagcaccctaaatggcgattcccattggcccaagcatccgaagggccgtcccggagaaaaaacccggatgtgggagccagtatagaaaaaagggacaggtcctaggcagcctggcctcgagcagcaagtttcctcagacgggcccaggaaggcccggacgccaagcgtaccgctcgcctgccgccgatggtcgtttgcaccggaggttaccttccgacagggccgtagttctctcaaccggcgcctgctacttccctgagaccaaaccacaaagctttctctcctggccccgcctctgcctttctgccagccaatcgccgcgcggaaacgcagtagcttgaccaatcagagcaagtctcgtttctgggctcagctgttgccaatcaaaacgatatttgggttcccgcctaggtagaaaaaccccgccccactccctgaaagcccacctccttccgtggcgcccgggtctacggaccaatcagtgaaggtcacgagtctgtacgcgtctcgcgctgcggtgtcttccggaggcaatcctttttggagtcccgcctcttacccccgccagagctgcgttttctgtcacgtgatcgcaaaatgggcgggaactgttgcgtgtaataccacgtgatatgggaaaggcagtgtgcgggggccgccattttccgggagtgggaggtgcactttacttcctgactcctttcctttttccagtggttatcgcggcgcccaccggcctctgatctctgagtcttctccaacccacagacgttttttgttgctctggttccaggaccttctccacaactaggccattttccctgccaggtgtcctttttgacct

SEQ ID NO: 21727 - DNA, 2300 bp, Homo sapien
cagtgagctaagatcgtgccattgcactccagcttgggtgacaagagcgaaacaatgtctcaaaaaaaaaaaaaaaaaaaaagaaattgcatttcaaagccaggtgcagtggctcacacttatagtcacagctacttaggaggctgcggtgggagaatagcttgagcccagttgttcaaggctgagtgagctgtgattgtggcactgcactctagtctgggtgacagagtgagaccctgcctgtaaaaaaaaaaaaatctttcaggccagacgcggtgactcactcctataatcccagcactttggaacgccgaggcgggtggatcacctgaggtggggagttcgagaccagcctggccaacatggacaaaccctgtctctactaaaaatacaaaaatagccgggcatggtggcacatgcctgtaatcccagctactcgggaggctgaggcaggagaattgcttgaactcgggaggtggaggttgcagtgagctgagattgtaccactgcaatatgagactccatctcaaagaaaaaaaagaaaaaaaaaaaaagatagcatagcaatggctgtgggcctggatacaagtcttagcctctccacttctccacttcctggctctgtaagccttagacaagttccttaactccacacttccatttccatgtaacaaggggttataggccaggcattggtggctcatgcctgtaatcccagtgctttgggaggccaaggcgggaggatacttggggacaagagttcaagaccagcccaggcagcacagtaagacattggctctagaaaaataaaaataaaagaaatcatccaagaatggtgacttgcctactattctactcgagaggctgagaggggaggatttcttgagcccaggagtttgaggatgcagtgagctatgatcacatcactgtacttcagcctgagcaacagcaagatcctgtctcaaaaaattaaattaggctgggcttggtggctcatgcctgtaatcccagcactttggaaggccatggtgggcagattgcttgagcccaggagtttgagacgaggctgggcaacatgacgaaaccccggctctaccaaaaaatacaaaaaattaactgggcataatggtacatgtctgtggtcccagctactcggtaggctgaggtgggaggaatgcttgagcccaggaaataggggctacagtgaaccaggatcatgccagtgcactccaacctgggcaacagagcaagactctacctcaaaataattatttaaaaaaatggattaattgggcataggtggcttgtgcctgtagtcccagttactcaggaggctgaggtgggaggattgcctgagtctaggaggttgaggctgcagtgagccgggatggcaccattgcactccacctgggcaacagggtgagaccctgtctcaaaaaagaaaaaaaagggaggggttataatcactcctcctgacatgatacagagtatccatttgagttcataacataaatatgtacttggtgaatgctctgtaactattggcttttttattgttcccattttacatataaggaagctgaggctttgtgaggagaaatagcttagcccaggtcatccagtgggaagcgtctggtgcagaggaatagtgatcatggtgggactttgcctagcctaaggttcagcatacaatattcagtcagtactcaagggctgggctgtttctggtaatcaaagggctgccttgttctcctgccccacagcacaggaaattccaaggtggttttctttacaggctcctccgcttctgtggccagaggggacagcggaggagcccaggtacctaagccaactcaagagaagatggaattgaatatttcaaccaccttatctaggcctctgtgattgttgaggagggggctgtcactgggaaagttgtgagctgctttggaccttatctgggaatttccttgggcttacagcctttaccctatccttgaaatggttctggtttcatagcaacttctaggtggtgtgggcgaagtttgggactggtttagggcggggacaagaccaagaacacaagtttccttgtactacgggagagagggaggggaggaaattggagaccccagcacccccttgctcactctcttgctcacagtccacgatggcccggtccctggtgtgccttggtgtcatcatcttgctgtctgccttctccggacctggtgtcaggggtggtcctatgcccaagctggctgaccggaagctgtgtgcggaccaggagtgcagccgta

SEQ ID NO: 21728 - DNA, 2300 bp, Homo sapien
acaggcatgcaccaccacacctggctaatttttgtatttttagtagagacagggttttaccatattggccaggctggtcttgaactcctgacctcatgatctgcccgccttggcctcccggagtgctgggattacaggtgtgagccactgccccccagcctattttcactttatttaccaattttaggacctgatatggtcccacgttctgttctagacaccaagatacaacaacaaatgatcctttttattctaatggagggaaatgaacaaaaagcaaggcataaaaaatagcagcagccgggcacagtagctcacacctgtaatcccaagtaaggccaagttgggaggatagcttgagcccaggagttcgagaccagcctgggcaacatagcaagacccccatctctataaaaaaaaatttaaaattaactgggcttcatggcatgtgtctgtggtcccggctactcgggaggctgaggtgggaggattgcttgatcccagaagttgaggctgcagtgagccgtgatcatgctactgcacctcaacctgggcgacacaatgagaccctgtttccaaaataataataataataaaagcaaatatgcgctgctgtgagaattaacagagacttacttgggtgttcagaaagggcctctgaacaggtggcatttaagctgagattcatatgacaaggatggagcagttatgtggagatcagggagaagggagaatgcaaaggccttcagcaggcacaagcttgccatcttcccagaccctagcttttaactcctcttccccaggttcagggagattactatggagatctggctgctcgcctgggctatttccccagtagcattgtccgagaggaccagaccctgaaacctggcaaagtcgatgtgaagacagacgtgagtgtcatgggggctggcaagaaatgtggggggaggacccttaggttgtggggatgggcaaaaatgctcccacacttggctccctggcagcctaggtatgtgcgctgggagaaattctttccctgcctcaattttctcaccagtaaaatgggtccagttgggaggtgcaaagattagagggctctaggctaatttgcatagcacttgtgtggccagacctgggccctgcagctgcagcctttgctaaaaccactagatcctttgtggtgtgaccgctggttttctttccactgtttcccctttctctttttcagaaatgggatttctactgccagtgagctcagcctaccgctggccctgccgtttcccctccttggctttatgcaaatacaatcagcccagtgcaaacggctcgtctccgtggtctttggggtggggtagggtagggtggggactgtacaaatgaaatgtttctctaggttgctgaatctaaccaattaacccgctgcctgtggtaacgtcagtggttgctaggcagagtttcactgatgaaagccctgtgcagtaggagcgctcctaagcttaggtttcggacacaagcaaaggaaaacctaagcagcccaactaggggattgtagtgtcctctctagaccagtgggagggagccaatcggactacgcggaggatataaatcgcacagtaaaggttttcttggaagattatctggaaagggaggtgggaagtaacctgcgcctatctgcccagttttcctccttttcgcctttgagaacagtaatcgctcccgccagctcaagatcagctcctcttccagcctctttctgtcaatcctgcccgtgcccccttctttgcatttgtatcccctcccccaagtccgctccgatccaatccggagactcgactctgccccccgtactccagactaaatccgttcctcggctcagctaagcagctctgcacgtcccttcccacttgctcagccaatcgctgggctcggccccgcccctttgggcttggtccttctcacgccaccaatccgcgcctcttgtcccgccccctgcccgcgagtccgccaatcccgcccttcggaaagcgtcgcctggtatccagctgccggagcgggtcgcgccggaggggggcggaggcggaagtggcggtgccgggcccggggagtaggaaggagccggggctgtagccggagtggagcggctgccagccgaggagcaggcgcggccgcggcgccatattgcggccctcagcggccgcgaccgagtcatggctgagacctacggtgagggtggtggacgaagctggggtcctgggtctgggcccagggaggatgcggcctgtgggaatgggcggggc

SEQ ID NO: 21729 - DNA, 2300 bp, Homo sapien
gcttttaactcctcttccccaggttcagggagattactatggagatctggctgctcgcctgggctatttccccagtagcattgtccgagaggaccagaccctgaaacctggcaaagtcgatgtgaagacagacgtgagtgtcatgggggctggcaagaaatgtggggggaggacccttaggttgtggggatgggcaaaaatgctcccacacttggctccctggcagcctaggtatgtgcgctgggagaaattctttccctgcctcaattttctcaccagtaaaatgggtccagttgggaggtgcaaagattagagggctctaggctaatttgcatagcacttgtgtggccagacctgggccctgcagctgcagcctttgctaaaaccactagatcctttgtggtgtgaccgctggttttctttccactgtttcccctttctctttttcagaaatgggatttctactgccagtgagctcagcctaccgctggccctgccgtttcccctccttggctttatgcaaatacaatcagcccagtgcaaacggctcgtctccgtggtctttggggtggggtagggtagggtggggactgtacaaatgaaatgtttctctaggttgctgaatctaaccaattaacccgctgcctgtggtaacgtcagtggttgctaggcagagtttcactgatgaaagccctgtgcagtaggagcgctcctaagcttaggtttcggacacaagcaaaggaaaacctaagcagcccaactaggggattgtagtgtcctctctagaccagtgggagggagccaatcggactacgcggaggatataaatcgcacagtaaaggttttcttggaagattatctggaaagggaggtgggaagtaacctgcgcctatctgcccagttttcctccttttcgcctttgagaacagtaatcgctcccgccagctcaagatcagctcctcttccagcctctttctgtcaatcctgcccgtgcccccttctttgcatttgtatcccctcccccaagtccgctccgatccaatccggagactcgactctgccccccgtactccagactaaatccgttcctcggctcagctaagcagctctgcacgtcccttcccacttgctcagccaatcgctgggctcggccccgcccctttgggcttggtccttctcacgccaccaatccgcgcctcttgtcccgccccctgcccgcgagtccgccaatcccgcccttcggaaagcgtcgcctggtatccagctgccggagcgggtcgcgccggaggggggcggaggcggaagtggcggtgccgggcccggggagtaggaaggagccggggctgtagccggagtggagcggctgccagccgaggagcaggcgcggccgcggcgccatattgcggccctcagcggccgcgaccgagtcatggctgagacctacggtgagggtggtggacgaagctggggtcctgggtctgggcccagggaggatgcggcctgtgggaatgggcggggctttgtagatcagggggcggggtctggtgtgatggaggcaggacctaagtggatgctgggaggggtttagtgggtctgaggctgagcttaatcgatttaggtggagcctgagggtctggtgcgtgggttaaatagatctggggcgggatttgagggagctggtcctgaggggttcagggaggccctgagggaagaggtgggccttaatggatctgggcggagcctgagtgaaggggcggggctgactgcatgaatggcaggagtcgggcttatgggctagagggaacactgaatggaagctcgggaccctggggctgatctggctggagagagctctggaatgggtttggggatgggctgtccttgagttaggggcaggacttagtggcaaagggtgggacttatgcatgagaatggagccgggttctgggcagagggagggaaggagaggtcgggaagtggaaaatcagtagggatgcaccataggaggtggtgattggaggcaggggaagtgcaggtttaggagtcagagggagccgcattcactcaacaaatatagaagagaagggagaagagtgcaaagaccctgaggtgagaaccagcttgtcattttcagggaatagactgaaggtcaggagctatagtggagtgaatgagtcagagggtggtaggaggtgaagaggaacaagggctatatcgtagtccttgtttaaatagctttcaagagactttagcgacaaaatagctaagatctgggactctggagcccttggcctaggttt

SEQ ID NO: 21730 - DNA, 2300 bp, Homo sapien
aagcaaaggaaaacctaagcagcccaactaggggattgtagtgtcctctctagaccagtgggagggagccaatcggactacgcggaggatataaatcgcacagtaaaggttttcttggaagattatctggaaagggaggtgggaagtaacctgcgcctatctgcccagttttcctccttttcgcctttgagaacagtaatcgctcccgccagctcaagatcagctcctcttccagcctctttctgtcaatcctgcccgtgcccccttctttgcatttgtatcccctcccccaagtccgctccgatccaatccggagactcgactctgccccccgtactccagactaaatccgttcctcggctcagctaagcagctctgcacgtcccttcccacttgctcagccaatcgctgggctcggccccgcccctttgggcttggtccttctcacgccaccaatccgcgcctcttgtcccgccccctgcccgcgagtccgccaatcccgcccttcggaaagcgtcgcctggtatccagctgccggagcgggtcgcgccggaggggggcggaggcggaagtggcggtgccgggcccggggagtaggaaggagccggggctgtagccggagtggagcggctgccagccgaggagcaggcgcggccgcggcgccatattgcggccctcagcggccgcgaccgagtcatggctgagacctacggtgagggtggtggacgaagctggggtcctgggtctgggcccagggaggatgcggcctgtgggaatgggcggggctttgtagatcagggggcggggtctggtgtgatggaggcaggacctaagtggatgctgggaggggtttagtgggtctgaggctgagcttaatcgatttaggtggagcctgagggtctggtgcgtgggttaaatagatctggggcgggatttgagggagctggtcctgaggggttcagggaggccctgagggaagaggtgggccttaatggatctgggcggagcctgagtgaaggggcggggctgactgcatgaatggcaggagtcgggcttatgggctagagggaacactgaatggaagctcgggaccctggggctgatctggctggagagagctctggaatgggtttggggatgggctgtccttgagttaggggcaggacttagtggcaaagggtgggacttatgcatgagaatggagccgggttctgggcagagggagggaaggagaggtcgggaagtggaaaatcagtagggatgcaccataggaggtggtgattggaggcaggggaagtgcaggtttaggagtcagagggagccgcattcactcaacaaatatagaagagaagggagaagagtgcaaagaccctgaggtgagaaccagcttgtcattttcagggaatagactgaaggtcaggagctatagtggagtgaatgagtcagagggtggtaggaggtgaagaggaacaagggctatatcgtagtccttgtttaaatagctttcaagagactttagcgacaaaatagctaagatctgggactctggagcccttggcctaggtttgaatctcacttctgcccagctgtgtcactttgggcaagtcagttaacctttctggcctgttacctcatccggaaaatgggaataatttttagtctacctccctcatagagttttcctgaggatgatgtgagctgttgatgtgagtaaagacctttagaactgttcctggcccacaacaacacacaattgacccatgtaacaaacctgcacatgtgggctgggcgcggtggctcatgcctgtaatcccagcactttgggaggctgaggcaggcggatcacctgaggtcgggagtttgagaccagcctgaccaacatggagaaaccccgtctctactaaaaatacagaattagctgagtgtggtggcgcatgcctgtaatcccagctactcgggaggctgaggcaggagaattgcttgaacctgggaggtggaggttgcggtgagccgagatcgcgccattgcactccagcctgggcaacgaaaagtgaaactctgtctcaaaaaaacaaaaacaacgacaaaaaaacccctgcacatgtactccctgaatctaaaataaaagttgaaaaaaaatatatagaatgtgcctggcacatggcaagtactacataagagttatctgttactgttacctattggtttgtttctgcctatgtctgtttctctccctctaactgtgatggttagagagagagattggattggaatccatcttttttccctgtatctttctc

SEQ ID NO: 21731 - DNA, 2300 bp, Homo sapien
aagaccatcaaaaaaataaaaaataagacacacatgaaagagacacagagagaaaaacagacgaatggaaagatagggacacagggagagacaaaaatggagattcataaatagagacagctggccagctaagtgagatagaagctgagagaggcgaagagagagggacttcaaggatgcaagaagagagaggaattgcatggtgacccgaccaaggccaggttttgggggatgggccagcagtgaaggggggggcctccgaaccaccagtctgtctctgtagaggggggcattctcggggcagaccccagccttgggggtgactgggtccccctggccccacaggtcagtgacgcggagttattaccgaggggcggctggagccctgctggtgtacgacatcaccaggtgggtgcccggggtgggtggggtagggcatgggtggttcctctcctgcactgcctccctcccttctcccttctccacagccgggagacatacaactcactggctgcctggctgacggatgcccgcaccctggccagccccaacatcgtggtcatcctctgtggcaacaagaaggacctggaccctgagcgggaggtcactttcctggaggcctcccgctttgcccaggagaatggtgagggctgtgtcgtggaccaggtggtggtgggggtggacagtccacagggaccatgggtttactggctctcagtggctgtacccagcaggggaacgtggaggttcagaagtctgggttcaaatttgagtgttggctgggtgtagtggctcacacctgtaatcccagcagtttgggaggccaaggtgggaggactgcttgagcccaggagtttgagaccagcctggacaacacagtgagatcctatctctataaaaaatttaaaaaattagctgggtgtggtggctcatggctgtagtcccagctacagtggaggctgaggcaggaggatcacctgagcctgagagtttaagactgcagtgagctgtgatcacgccattgtactccagtctgggagacagagcaagacactgtctccaaaaacaacaacaacaacaaaacaacaacaaaactaagtgttgccatcagtgagctatgtgattacactggttctcagtttcttcatctggaaagtgggatcacagtgtttctgccccacagtgtgctgtgatgattaagggagattgtggaaagtccttagcacccgccacagagtgggtgctagattaatgttggccgctaaggtttcgcctaccgtcaggaggccgcacagggtattggttttttaaattaattattttatttattttttcctcctaccgcaccttcctgggtattggtttaatgtagagattgcaaccctagatggccctaggtgaaaggcacttttttttttttttttctgagacggagtcttgttctgttgcccaggctggagtatagtggcgcaatctcggctcactgcaacttctgcctcagcctcccgagtagctgggactacaggtgtgcgccacaacgcctggctaatttttatatttttagtagagacggggtttcaccatattggccaggctgatctcgaactcctgaccttgtgatccgactgcctcggcctcccaaagtactgggattacaggcgtgagacactgcgcccggtgaaaggcacatttttgaatacaggagatgggatggggtagatccttgagtaacaggtactggtgttaaggggagtgcagcatactgacaacccacaccaaaaggtttgcaagggccaaccacaatggctcacacctgtaatcccagcattttgggaggccaaggtaggagcatcacttgagatcaggagttttagaccagcctgtgtaacagagtgagaccctgcctctacaaaaaaaaaaaaaaaaaaaaagcctgggtgtggtggtatgtgcctgtggtctggggtactcaggaggttgaggcaggaggatcacttgtgcccagaagttcgaggctgcagtgatctgcaatcacaccactgcactccagcctgggggacagagagagactttgtctcaaagaaaaaaacaaaaaaggtttgcaagtataaactcatttgaaaacattgtgttggccaaaccacccacatctggtggcttgagatctgcctgtgttcccctgttttgcaacctccaggtttaaaggaggttttgccatcagagaggtgtgggtgtgaattcagctctgattttctgactgtggggccttgtcatgctgctgatgggtagactctggttgg

SEQ ID NO: 21732 - DNA, 2300 bp, Homo sapien
ggagtgcagtggcgtgatcttggctcaccacaacctccacctcccgggttcaagctattctcctgcctcagcctcccgagtagctgggattacaggcatgtgccaccacacttggctaattttgtatttttagtagagatggagtttctccatgttggtcaaggttggtctcgaactcccaacctcaggtgattcgcccgcgctggcctcccaaagtgctggaattacaggtgtgagccactgggcctggccttgggggccttgtttcctgattggacgtggtgtggggtataccaagcatgatgactcaggtgcctgttgcggagggagggaatttgttactgtgtggacagtttgtgacaatctgtgttctaagctcacgtgtgtaaacacgctgatgtccctgtgtttgtgacatgtgtacatgtttccagtacctgcatatgggatgatgtctataggatataatgtgtgctggttgtgtgtgatgctgacagccgtaactgctctgtggccttggtcattgtattggtgaggctggtattgtttgggacatcaaggccaggggatgggaatttggacctataggtgggcctccggtgtgtgcatgtctgatgcctgagagtcagaggcagtgactcactactgcgtgtgtgcctgtgcatgtgtaccccgaggtctgtgtgtgttttggtgtgaatttggctccttttaaacacccatgtgtggccaggcgtggtggctcatgcctgtaatcccagcacttcgggaggccaaggcagatggatcacttgagcccaggagttggagactatagcctgggcaacacagagagaccctatctacaaaaataaaaaacagaaaaagttagccaggtgtcgtggtacacacctgaagtcccagctattccggaggctgaggtgtgaggatcactttagttgggaggttgggcctgcagtgaactatgatcatgccacagcacttcagcctgggcaaaagggtaagaccccatctcaaaaacaaaactaaactagaaacacccttgtgtggccatgaaccctgtgtgtgccctgaggactgcgggcttttgtgcaatcctcacgcatgtgtggataccagtatgcatgcccttgtgctcacgcgaaccgccctacgccctcaggtggcctgcaggggactggtgcagccccgaggacactcccagttgctcgtcgccctcccatctccacgtcggccttcaccgacccggcgggagccttgagtcccagctctccagagcaatggtggagcgggcagggcattcaaaatgaccttatctccttagtctcctaaagtgttcccagctggccatgcaaatgtcttctctgtgtagcgttccgtggatttttttttgtttcattttttaattttgtgtaaagataaggtctcactccgttgcccagactttccctggttctttattctgattcccacaatcgtcccgagggggcaggccggagcgggtcttgaaaatacacatttgcacatcccttctagtccgcgttcccttttctcaagggcaacccgcacttttttgcctccgttataaaagatacttatgtaaattactgacgtgcgaatttacatacatttctcaactaactgcgtagccatttctccgtctctcacctccgttcctggacggcgagaaggaggaggagctgaccatgtaaatgaagtcacgcgcaccgcgctgccgaactcggtgccccgcgctgggcggggggcgggtaggcctgtccatgtaaatcacatcatttgcgtgccccgccccgccgacgccacttgattccaacatgcaagaaacgccccctcccagacccggcccctcacactgcgttccccctcccgcgcaaagggggcggggcggaggatgcaaatgaacctcgtgtaggccacggaccgctgtttcctttctccttggtaggggggttgtcccgaacttcctcgccccgctccgccccgccccgcgcggctcgggcctgcgcaggcgccgtcccctccgcggggcgcggtcacgtgcccaccgggcgaggcggggcggggcgtcgcgcgcggtgggggcggggtatggcgcgctgtgcggcgcagggcggctggcacaaacggcggcgccggggccggaggaaaaagctcggtgaggaggtcgcggggcgagaagggagcgggaggagactaagccggagccggggcgccggcgcgaaccgggcggggtgtgggggcgcgcgccggggcctgccggggcgaccccgggaaggggg

SEQ ID NO: 21733 - DNA, 2300 bp, Homo sapien
agggaatttgttactgtgtggacagtttgtgacaatctgtgttctaagctcacgtgtgtaaacacgctgatgtccctgtgtttgtgacatgtgtacatgtttccagtacctgcatatgggatgatgtctataggatataatgtgtgctggttgtgtgtgatgctgacagccgtaactgctctgtggccttggtcattgtattggtgaggctggtattgtttgggacatcaaggccaggggatgggaatttggacctataggtgggcctccggtgtgtgcatgtctgatgcctgagagtcagaggcagtgactcactactgcgtgtgtgcctgtgcatgtgtaccccgaggtctgtgtgtgttttggtgtgaatttggctccttttaaacacccatgtgtggccaggcgtggtggctcatgcctgtaatcccagcacttcgggaggccaaggcagatggatcacttgagcccaggagttggagactatagcctgggcaacacagagagaccctatctacaaaaataaaaaacagaaaaagttagccaggtgtcgtggtacacacctgaagtcccagctattccggaggctgaggtgtgaggatcactttagttgggaggttgggcctgcagtgaactatgatcatgccacagcacttcagcctgggcaaaagggtaagaccccatctcaaaaacaaaactaaactagaaacacccttgtgtggccatgaaccctgtgtgtgccctgaggactgcgggcttttgtgcaatcctcacgcatgtgtggataccagtatgcatgcccttgtgctcacgcgaaccgccctacgccctcaggtggcctgcaggggactggtgcagccccgaggacactcccagttgctcgtcgccctcccatctccacgtcggccttcaccgacccggcgggagccttgagtcccagctctccagagcaatggtggagcgggcagggcattcaaaatgaccttatctccttagtctcctaaagtgttcccagctggccatgcaaatgtcttctctgtgtagcgttccgtggatttttttttgtttcattttttaattttgtgtaaagataaggtctcactccgttgcccagactttccctggttctttattctgattcccacaatcgtcccgagggggcaggccggagcgggtcttgaaaatacacatttgcacatcccttctagtccgcgttcccttttctcaagggcaacccgcacttttttgcctccgttataaaagatacttatgtaaattactgacgtgcgaatttacatacatttctcaactaactgcgtagccatttctccgtctctcacctccgttcctggacggcgagaaggaggaggagctgaccatgtaaatgaagtcacgcgcaccgcgctgccgaactcggtgccccgcgctgggcggggggcgggtaggcctgtccatgtaaatcacatcatttgcgtgccccgccccgccgacgccacttgattccaacatgcaagaaacgccccctcccagacccggcccctcacactgcgttccccctcccgcgcaaagggggcggggcggaggatgcaaatgaacctcgtgtaggccacggaccgctgtttcctttctccttggtaggggggttgtcccgaacttcctcgccccgctccgccccgccccgcgcggctcgggcctgcgcaggcgccgtcccctccgcggggcgcggtcacgtgcccaccgggcgaggcggggcggggcgtcgcgcgcggtgggggcggggtatggcgcgctgtgcggcgcagggcggctggcacaaacggcggcgccggggccggaggaaaaagctcggtgaggaggtcgcggggcgagaagggagcgggaggagactaagccggagccggggcgccggcgcgaaccgggcggggtgtgggggcgcgcgccggggcctgccggggcgaccccgggaagggggatgtgggtgcggcgcgggggaggggacgcgcgccggttacgttgggtgccggccgttgtgggggttggggtgggggcggggagcgcgcgccgggcggaggccgagtggagggggaggggagggggtccgagcggcccttaggccctgcccctgtcgcctactgcgctcagaaggggcctcagggcctgccccgggttgggggcgttggggtgccctggatgggggcacctttatctctcgtcctgtctccgggtgcgtgcaccctcctccgtcctttcctctgtcgccgcggaccctctccccgagggcccctcccgtcggtcagtct

SEQ ID NO: 21734 - DNA, 2300 bp, Homo sapien
gtgcaatcctcacgcatgtgtggataccagtatgcatgcccttgtgctcacgcgaaccgccctacgccctcaggtggcctgcaggggactggtgcagccccgaggacactcccagttgctcgtcgccctcccatctccacgtcggccttcaccgacccggcgggagccttgagtcccagctctccagagcaatggtggagcgggcagggcattcaaaatgaccttatctccttagtctcctaaagtgttcccagctggccatgcaaatgtcttctctgtgtagcgttccgtggatttttttttgtttcattttttaattttgtgtaaagataaggtctcactccgttgcccagactttccctggttctttattctgattcccacaatcgtcccgagggggcaggccggagcgggtcttgaaaatacacatttgcacatcccttctagtccgcgttcccttttctcaagggcaacccgcacttttttgcctccgttataaaagatacttatgtaaattactgacgtgcgaatttacatacatttctcaactaactgcgtagccatttctccgtctctcacctccgttcctggacggcgagaaggaggaggagctgaccatgtaaatgaagtcacgcgcaccgcgctgccgaactcggtgccccgcgctgggcggggggcgggtaggcctgtccatgtaaatcacatcatttgcgtgccccgccccgccgacgccacttgattccaacatgcaagaaacgccccctcccagacccggcccctcacactgcgttccccctcccgcgcaaagggggcggggcggaggatgcaaatgaacctcgtgtaggccacggaccgctgtttcctttctccttggtaggggggttgtcccgaacttcctcgccccgctccgccccgccccgcgcggctcgggcctgcgcaggcgccgtcccctccgcggggcgcggtcacgtgcccaccgggcgaggcggggcggggcgtcgcgcgcggtgggggcggggtatggcgcgctgtgcggcgcagggcggctggcacaaacggcggcgccggggccggaggaaaaagctcggtgaggaggtcgcggggcgagaagggagcgggaggagactaagccggagccggggcgccggcgcgaaccgggcggggtgtgggggcgcgcgccggggcctgccggggcgaccccgggaagggggatgtgggtgcggcgcgggggaggggacgcgcgccggttacgttgggtgccggccgttgtgggggttggggtgggggcggggagcgcgcgccgggcggaggccgagtggagggggaggggagggggtccgagcggcccttaggccctgcccctgtcgcctactgcgctcagaaggggcctcagggcctgccccgggttgggggcgttggggtgccctggatgggggcacctttatctctcgtcctgtctccgggtgcgtgcaccctcctccgtcctttcctctgtcgccgcggaccctctccccgagggcccctcccgtcggtcagtctcgggacctcccttccgtctgggcgtgtgtccgcccccggccggcttcctcccgtcgggctcgggtcgaccccaccgtcccgctccgccccgggtcctccctcccagcttccctccggtctatttttctgtctctgggcccctcgttctctttgtttttggactccccagtttcctctgtcttttgacccccccgcccccaccctgactctccctggaacccccacgtttctcgttgtctttctggaacgccgaggcaggtccctcctattttccaaaccccctcctttcccactcctccacaccacccttttctactccagccctccttcttctgtctttggttaccgcgtcccacaacctgcaccacagtcctctgtcttagggtcatctacccagcccctggcctccagcctctccctatcactgcctcttatctgtcagcggactcccgcacctccagattctcagggtcctctccccgacttggcctcaggttttggggggcctctatagtcaagtctgtcctggtcgtcttccccactcctgcccataccatcccggctttcccctgcctgcctgtctctagtttctctcacatccctttttttttttcctttctctagccaccctgaagggtcccttcccaagcccttagggaccgcagaggacttggggaccagcaagcaacccccagggcacgagaagagctcttgctgtctgccctgcctcaccctgccccacgccaggcccggtggccccc

SEQ ID NO: 21735 - DNA, 2300 bp, Homo sapien
tggggttcatggcctcctggtgtcagtctgtggccccagaccaagcacggggatgtagataggcacacagttcacctggccgttctctgttgctgtctgtccctgtccacatccttccctgtgctcctgtcgtccatccctgtttgctggcccatgtttctagtccatccatcctgtctccaaggcaggagaagcagaagggggagggtggctgtgatgagtgagccctgggctgagggaaggaaaggggtgctgcccgctgggccgagtgcttggccctggactgcattgtgccctgggtccccactgtggcatctgcatcgaggacagtctcctgggggtggtactgggtggctgcctgttggcccaggtggagctcatccccatgtctcccacccttcactgtcccagtccctgccctccattccccctgtcctgtgtgtcacttcctccctacccatgtctgtctcttcctctgcctttatgtgtttgttcttagtccctttttctttttgctttagaacaatagttcttaatggtattttggagcctgggtctttttgagaatctgtcagaggccacagatcctctcttaagacaaatgctcatttgcttggagtttccgggcagttgtcaaggcctcatggcctccagctgcctgttcaggaacctggggtcaggagcccagcacaggacagtggtccatagggcctttccgggctgctgacaggatcattgtcttcatgggtggtgtgggggcctggccttgagtccaaggcttggtgtcctttggacaaggccctgtggggagtgcccactgctcaacacagtgatgcctggctggctgatggcacgggcagtgttgtgccctgcaggcgtgaggctgagctcctgatgtcctctgcctcctcctgcagatcccatcttgggttctgcttctgtgtggctttcctctcaggctggagctggctcagggaccagggctcccccggggccaaggcctgtttcctccccaccccagctggaacttgttctacttccctctccctcccgttacttgatagctgagccagagccggcccctccctgggcttggctcctgtgcgggcgggatcagtggcctccctggctcagcatcttcaccccaggttggctgtcgtcctcgtcagggggagaccagaagggctgagtggcccagatgggacactgctctgagcctcaatttgctgatccacggaatacgaaaaccaggttacatccccagtgagtctggcagtttggggaggggagagtaggagaagatctcttgtgttttggtgcctctggtgcccactttctatgtggttggggacagggccccagcgaggattggggaaggggcgtgtttggacttttttagccctaggtgaccttgattgtcctagggaagtaaggacaggccaggctggactgagaacataggggaggagccctcccctccccagtgagacagcaactccaggctttcccgcttttagatgggccccatctggactctctcctgtactccagagtaaggctgtggggtgctcaggtgggctgcagcagttgccgtggggacatggatcaccagtgtggctagagccagtagaaacgtgcttcttagtcgttctgagtggagctcctgtgtcatccttccttcccccaactccctggttggggacaggtgctccgttgacctgtaggtgggagagagttgactcccactggcagcaagggctaccagaggggaccccagggagagtccagcttgcttggtttgctccttgaagagcagcttggaggtgggacagtcacaggcttctgactggggtgtgtgtgtagtgggggtggggctcttggcaggcagattgtcaccaatagcctttaagtctttggtctcctggccctggtcccacctgtccctcccctaggtgggaggggtggagagcaagtttcctgaggccttcccctgtgagggcaggaagtagatactttccttggggccagaggatgctttcacccccaaggtgtgtatatgtgggggaagggtggggccctaaagagcaggttcctgtttctgtgtgagtcccatgtgcttggtgggaggcgctgtgtgagaatgtacagggcaggaggaaacatagcagggctggggtgcagaggaggcccagagcagtgcactccagtctgcaggtactgcactgggcactggggagaccaacctggccccaggggcttccctgtggctgccttccagggcagtactaggtaaacaggtg

SEQ ID NO: 21736 - DNA, 2300 bp, Homo sapien
ccaggggcttccctgtggctgccttccagggcagtactaggtaaacaggtgcctgtgctgatgccatgttgctaggagtggaacggacaatcagccggagtactcaaggtgacccttggtctctgaatcctgaataacaaagagggtcagaaggaagagtgtcccaggccagtgctgaggccttgtggtggcgatgagctcagcctgttgaggcatggagcagagtgatgggagaggcacatgaggttgggggcctttgaggctgtggttgggaatttgtattttctcaggatggagtgaagacctggagaggaggggctctggctgctgtgtggggatgaattgtgggaagagggtgcagcactggaccccttccctgccacccatccacgtgcatcatcagtgtaatctctgattggattcctaattggggaggtcttgcccatctctagtcagtaactcactgtttctaagcctcctggaccatggcccaattcttctcccagtgaggtggttgctcagagtgccgacccttccatagggagtgagcagtgcaaagaaggtgccccctcctgaaccttgaagtgtagccattagggttttccctggggggccttctcactaattgtactctggtgctgccagagagaaggttgtcagcttcccactgctaggtggcagtagatggtggcagccctctctttccagggcaaggtctggtggatgaggtgcacatggttaatgcagagcagcttaacatccaccacagagggtgagccctgggataatgtgttgggaggcgtcctggggagggtgaggattgaagcagcccagtctgctgtggcgtgcgtgcttggcaagcatcctgttgtggcagtggccactgatgtttgatcgtgaatgtttatcttgggactgtcttgctgggccgggcccataggtgtagctgagcattcgtggggaatggacgccagcagagttgtaccagggcagagaggtcagggcagagaggtcaagacagatggtccgggctggggagaagttgaagggtccttgtgccagtcctcccctttttgtgtgctacctcatcttgccactgcagtgactttgggcagagggtgggacagggaccttttaaaatttttaaatggcatttcagcctgtgctccagttctccatgtggcaggcactgtgctggctgtcttcccagacacttgttatcttgttcacttgttccacaacaacctgtgaaatagctgtgagctccattggatccatggatgaggaacctgagaccaggaagtcacctgcctgatgccacagctcatgtggcagcactgagacttgaaccagggaattgtgtctgcagaagtggctgggccatttcctttacctctcagccacctttctgccagctccctgatgacaaacatcccggggccctggccacagcattgtagggctgggtcaggggagtggcaactgtcaggcagaggaaagaaccctgtagacagagaaaccaagccctgcaatgagtcctgttagatctccaggagttggggctccagaacctcccaagttatgttctcagagagattaattgctaccgctgtaaacagcagtgtttattacccctgctgtacacatcaggcagttgaggcccattcaggtgttggaactggctagggttacccagcaaattatccttggagttggaattaggtctttctattcagactgtagcttttggctcctgttcggaggtctatgggacagataatttagtggggattctttgtagtccagggcagcagttcttaacattgctgcatggtagaattacctgggaagctttaccaatttcaggcccttccttaggccaggtacttcagaacctcagagctccccagggggctccactccacagccaagggtaagaattcctggtctagggctgtgaggccacctccttgcacacctgaaaatgtttaaattggtattattctactgaaatggctgaggtggggtttggggtatcttgaaacaaatcaaactctgttactaattgagccctagctgggtgccaggccccaggtatgtgtgttgggagggagtgggctcttgaggcccaggagctgaggtttctgatagacttggggatgggattttggctgaaaaagaaagtcttttggggcaggagcttggaacccttgacccaaggagtcatggggaagatggggcaaggaggggtgggaaaataggtaattcatggctgcttctctaagatgtgcctgcctagc

SEQ ID NO: 21737 - DNA, 2300 bp, Homo sapien
cactgtgctggctgtcttcccagacacttgttatcttgttcacttgttccacaacaacctgtgaaatagctgtgagctccattggatccatggatgaggaacctgagaccaggaagtcacctgcctgatgccacagctcatgtggcagcactgagacttgaaccagggaattgtgtctgcagaagtggctgggccatttcctttacctctcagccacctttctgccagctccctgatgacaaacatcccggggccctggccacagcattgtagggctgggtcaggggagtggcaactgtcaggcagaggaaagaaccctgtagacagagaaaccaagccctgcaatgagtcctgttagatctccaggagttggggctccagaacctcccaagttatgttctcagagagattaattgctaccgctgtaaacagcagtgtttattacccctgctgtacacatcaggcagttgaggcccattcaggtgttggaactggctagggttacccagcaaattatccttggagttggaattaggtctttctattcagactgtagcttttggctcctgttcggaggtctatgggacagataatttagtggggattctttgtagtccagggcagcagttcttaacattgctgcatggtagaattacctgggaagctttaccaatttcaggcccttccttaggccaggtacttcagaacctcagagctccccagggggctccactccacagccaagggtaagaattcctggtctagggctgtgaggccacctccttgcacacctgaaaatgtttaaattggtattattctactgaaatggctgaggtggggtttggggtatcttgaaacaaatcaaactctgttactaattgagccctagctgggtgccaggccccaggtatgtgtgttgggagggagtgggctcttgaggcccaggagctgaggtttctgatagacttggggatgggattttggctgaaaaagaaagtcttttggggcaggagcttggaacccttgacccaaggagtcatggggaagatggggcaaggaggggtgggaaaataggtaattcatggctgcttctctaagatgtgcctgcctagccccagtaaacctacctccctccatccctgccaggccatggtggcgtgttacccaggcaacgggctcgggtacgtaaggcacgttgacaatccccacggcgatgggcgctgcatcacctgtatctattacctgaatcagaactgggacgttaaggtaggggtgagggtgagggtgagggtggcgctggggctagggctggggcgggggtggcgtgcgtccactccattttccactctcagcccagattctggcattctcctgtttctcttctcaacacacagcgggcagtgcgatctgccggctcttcctgggaaatggcacctcctcctctctagcggactgtgtggtgggaactcccctctttccgggaatggtgctgtctgcccagccccacccggccttgtaatgaacactttcccccttttcctgtctttagtagcttcctgcccatctccatggtgatgcagtctctgggttgtcattcactttgagagcccgaggggtgggagggagtgatgcaggcagacgctgcgcctcctagtgggctcccggggcaccgtgggaggcagcggctcctggccgtaccagctagcctcatcctttggcctgcccccaggtgcatggcggcctgctgcagatcttccctgagggccggcccgtggtagccaacatcgagccactctttgaccggttgctcattttctggtctgaccggcggaacccccacgaggtgaagccagcctatgccaccaggtatgacctgtacttctggagacgcacccaggtgctccccctgtgacaatgtcctgtcagagcctcagagtgactagggagcgacgaagtattgagagggggcctaggtgggagcagaaccgggtggctcaaaaggatggccgcctagtgtgtgtggatatggtagctggaattgcagaaaactaatgtccaaccaccctggtctccaggtacgccatcactgtctggtattttgatgccaaggagcgggcagcagccaaagacaagtatcagctaggtacctgcttccctcccttcagtccttcctattctgtgggccctcttgggcctgatgccaccccatccccctcatcagcctcttgttaaatcccaccactcatttttcttcatctctgcccaccttccttagcccactctcctggtaccccaacagg

SEQ ID NO: 21738 - DNA, 2300 bp, Homo sapien
gggtcctaagagtaatggaagtgacaagggctcaggtgtgagctcctaggaatcacaggcacagagcacaggaatgccaggggtgtctttagaagtgtatttgagccaggcgcagtggcctgtagtctcaacacctcgggaggccgaggcaggcggatcacctgaggtcagtagcttgagatctgcctggccaacacggtgaaactccgtctctactaaaaatacaaaaattagccaggcctagtggtgcatgcctgtaatcccagctactcaggaggctgaaacaggagaatcttgaacctgggaggtggaggttgcagtgagccgagatcccactgctgcactccagcctgggcaacaagagtgaaactctaagaagggaaaaaaaaaaaacagaagtggtgtatttgagagtcggtgtgtatttaggaatcagaggtacagggtacagcgttcaggggacccagaggtggcccggagattgaggaatacacacttacaggccaagtaaattggactcaaaggtgctaggggctcaggagggtgcacctgttgtccaggtgtgttgccatgaaaatgctggtgcacgaaagttgctaagtaagacaggctgaggcagacacacaaaaaaagccagggggagccagggcacagctccactagggctgggggcggggtggagacgtcgggttggggaatccacggaatgagcagcccggagacgcccactcctcccacatcgggtctccgccccgctccacccctaagaccccttggaaatcaaatagaggtgaaggggtgcaggcgtggagaattgcaggcatgtcgcgggtatcgctgcgctgctgttgtggcttctggtgctggcgccggcgtggtgggggtagggtgggtgccgcgctcagatgcgggggtccctacctccccggcccaggccgctcccattgctggggaacttgcagctgcagtccggaggcctggaccgcgcactccattcccgacaggaatgggggaacggaattctggattcgtgaaggtggggctggggactagaactcctcctgaatgaagacagctgagggtttgtactctatgatcctgaggaaggacaggaaggatgagtgctccggactgctgagtactaggaaaggagaatagggagtggagagcctggggccgggacactgggtcgtaacgaaggagcccagagcaggaaatcaggttgtgggaagaggggagcagggggtctgttctggttcagggtgggcaggctgagtactgagggcccaggagacgactctgagggtgcaggaggctgggaagctggacttccaggtcctaagggaagaaggaagtgggggcctggactcctggatctcagggaggaaggagctggggatttgaattcctgggcctgaggaatgagggtctgagacgaggactcctgggtctgaaggaagagggagctgggggcaatggctccgatgaggaaccctatgggcacccgctgagcaccggctacccgtagctctccggccgctggggccgggtgttcacagtgcggctgggcccgcgccctgcggtggggctgtgcggctacgcagcgctgcgggacgcgttagtgctacaggcggatgcggtctctggccgcgggtccatggcagtcttcgaacgcttcacacgcggaaacagtgaggccccggcgctggacttgccggcccggacgctccaggctgggcgggtaaatggtagaggcgggcaaatgggggcggggcctaatagagactccagctaatgaggtgcaaacggccgagagagggcggggcggcgctaaagcgtaaggttagaatggaggttcatcctgcagccaacaggagaaaagagcctaagagtcaaagcccgagagccagcctaggtcagggatggagcccagcaaaggcggggccaatgtgtggatagggcacttggaggtctggtaaagaagcaaagggaacgaagccggccgcaggagtcggaggcccctaaagggatgtagccagtgacccggcgcttcctggatagggcgtggccggctccccggcccgcctcctttcccgtccccaccacaggaatcttgttttctaaccggccgtgctggtggacactgcgcaattttgcacttggagcgcttaagaagttcgggttgggtacgcggaccgtcgaggcgcgcgtcctggaggaggcggcttgtctgctagacgaatttcaagccaccattgcttcggcctggccgggagagcggaagggcctggtgtgggaga

SEQ ID NO: 21739 - DNA, 2300 bp, Homo sapien
caagactccatctcaaaaaaaaaaaaaaaaaaaaaaaagagtaacgaattcagagggctcaccttattttacaataaagtagtgtaggcatatactgatcaatgaaacagaaaagaaggtctagaaacagacacttatataatcaactgatttttgattaaggtgccaaagctattcaatgggagaaaggaaagtcttttaacgaaagtgttggaataactgaatttccttaaggaaaaaatatgcttttgctcttatttcacgctatatttaaaaattaactcataatgactcagacttaaaagtaaaagctataactatgaattcttcaaaagaaagcataggagaaaatctttgtgaacttggggtagacaaagatttttaaaatggaaaaatcgatcatagttctttatttggaaattaaaataaaaatgccataagcaatgacacaaaaaatggcatacctagcattacatttggcttacatttagtgtaagatctacacagtaaaacccgctaaacattgctgtgtcatgttgaggaattttttccttccttcccttccttccttcctccctccctctttcttttcttttctcttttctctttctttctttcctttctttctttcttttcttccttcctttctttctttttctttctttcctttctttctttccttcctttctccatctcttcctcctttcctccctccctcccttttattttccttccttccttccttccttctccctctctttttttttttttttaagacagagtctccctctgtcatttaggctggagtgcagtggcacgatcacagctcactgcagccttgtcctcccaggctcaagccatcctcccaccttagccttccaagtagctgggactacaggtgcacatcaccatgcccagccaatttttgtattttttgtaaagacagggtttcaccattttgccaaggctggtcttgaactcctgagctcaagcggtcctgcctgccttggcctcccaaagtgctgggattacaggtgtgagccaccgcacctggccaatcttttctttttctttcatgaaagttgtactatttatggagtacatgtgatgttttgacacatagacaaaatgtgtaataatcgaatcaaagaaattcggatatccataacttcaggcatttatcatttctctgtattaggcacattccaattccactctcagttattttgaaatatactataaatcattgttaactacattcaccctattgtgctaccaaacactagatcttattctttccatataactgtatttttgtacccattaaccatctcctttttatcctcccttctccactaccctttttagcttctgctaaccatcattatacctctacctccatgagttcaattttttttagctgtcccatagtagtgagaacatgtggcctttgtcttcctgtgcctggcttgtttcacttaatgtaatgtcctccagttgcaactgtgttgtaaatgcaggatctcattcatttttatgactgaatagtactcctttttgtgaattttctttatccattctatccacattttctttatccattcatctgttgatggacagtcaggttatttccaaatcttggctactgtgaatagtgctgcagtaaacataggagtgtggatatatcttggatatactgatgtcttttctttggatatatacggtgggattgctggatcatagggtcattttatttttagtgttttggggaacctccaaactgttttccatagtggttgtactgatttagatttccaccaagagatatgtatgagagttcccttttctccacattcttgccagcatttgttattgcctgtcttttggataaaagccatttgaactagggtgagatgacatcttattgtagttttgatttgcatttctctgatgataattatgttgagcactgatatggtttggatctgtgtccccaccaaatctcatgttgaattgtagctcccaatgttggaggtggggtctgctggagggtggttggatttctcatgaatagtttcatactgtcctcttggtgctgttcttgtgatagtgagttctcatgagatttggttattcaaaagcgtacagcacctccccgctcactctctcttgctcctgcttccgccgtctaagatgccttactccctctttgctttctgccatgattggcagtttcttgaggcctctccagaagcagaagctgctgtgcttcctgtacagcctacaaaactgtaagccaa

SEQ ID NO: 21740 - DNA, 2300 bp, Homo sapien
cctcacccacctccacttgtccaaagttggtgacccagaggacaggtgcaaccctaaatggtccaaccaccacagcctgtcctgtggccatctggggcccctctcagggtctggctgaggctcatctcagacccacataggaccaatatcagcacctgcctcatgctcatgtcacagcccactgggaccaacctcagaccctatatggtgccacccttacgccctcctgaagcaggacactcttatgccctcaatgacacctgagacaacacacagagccctcttggcaccaaacatgacttcaatattctcctggtgtcaagttcagtgccaacttgtttcccatcctcgcatacacctgggggcagtcccaaagccaacacgatgcctttccctccctggccatacctgatgctgatatcagaacccaccaatgtcatcagtgtgtccactgctgatgccagtcccagcactcacctcctgctaaggctggcctgcacttgactcccagggtgatctaggccagtcaatgaaggggggtgaggagaaagttcacatcccagctccctcacttactccctgtgtgacctcactcaagaggatttatggagtctagatctgctcatcttcaaaatgaggatgatcatgatgaaccaacctcattgttacaaagattcaaccagatcatacacacctagacttaatcttcccgtatacgaccatgctcaccaaagggtaactgtcctgtttactaaggaagaatttccctgagggaaggacaggagggctactcatcccttctccactcacacccaccccaggatctgcctctgtgcctaatactggagtttaccccaatctcttctgccactgttccctctgcctgctaatagtagtagcccctgacaaagcaggaatcattcttaaaggagacttaactcaccctcgaatgtgatcttctcttcccaaacactccctttccactggcaggaaaaccaaatccagaaaggggaactaagtacacagagcaggagagatgggagttcagggccactcacacatgtcccctgcccactgtctgttttctgtcctctgtagatctttatataaaatgagaaacataaacaacaatcataatattaatagggatgatacaatcaatctagtgggtttccctgaggatctgggttggaaaccagcggacaacccttgggacacttgagatttttccaccatttgggggttgttattactatttctccagacctagccaatccctctgccaaccgctaactccaggtactcttctccaggtgtggggaaagttcccctgaaatatggctctggtcttcctccccttcccaatcagagatgggcagtggaggttctatggcacccatcctggcctcactctgaggttccaatgaggattctgggcatcaagagacagctctgggcaaaagcaaaatcaagtcagcccctggacccagtgctgggctgctgggctttctgggagaacccgctgggcttgctacacactcctcctcccagaaactccacacccacagccctgggtcttcctagccccgagactttcaagtccatatgcctggaatcccccttcctgagacccttaaccctgcatcctccacaacagaagacccctaaatgcacagccacactttgtcttaccctaataaaacccagacctttggattcctctcccctggaacccccagatccacaactttggggtgcattctcactctcagaccccaaatccaaagcccaagtgctcccctatgcaaatattccaaactcctcagttctacagcttatctgttgccccctcctaaatccacagccctgcggcacccctcctgaagtaccacagatttagtctggaggccccctctctgttcagctgccctggggtccccttatcctcccttgctggctgtgtcccaagctaggcaggattcatggtggggcatgtagttgggaggtgaaatgaggtaattatgtaatcagccaaagtccatccctctttttcaggcagtataaaggcaaaccaccccagccgtcaccatctatcatcccactaccaccatgctggcctcagggatgcttctggtggccttgctggtctgcctgactgtaatggtcttgatgtctgtttggcagcagaggaagagcaaggggaagctgcctccgggacccaccccattgcccttcattggaaactacctgcagctgaacacagagcagatgtacaactccctcatgaaggtgtcccaagg

SEQ ID NO: 21741 - DNA, 2300 bp, Homo sapien
ggatcttcctgggctcgccactaactcactctgaaagcctgttcccaagacactgcccactgggacaagtccctcccacatgatttcagacaccattctctcactccatgctctagggtaatcaacaagtccaaaattcattgacctctatgtccacaaatactagagttctcccaacctgtctctccccatcccctccctggccaggtcatggcaacctgctgatcactcagtgcacttcttagtgccaaccccactgagaaacaaactcctcagatttctgtctcccacctttttaagaaacaagaaggaaaaggaggagccaggcccaggtgcaggctggtgaacaggattagagggattgatatctgccaagctggtgctaatcttcctttccacctcttcccctccaaaatcaacaaacaactttcctctctctgccttgttctctgacctttgttccctccacacaggtctcagagctcagcatcctagaacagtttgagcaagatgtcagtcctgggggtgccaacctcacccacctccacttgtccaaagttggtgacccagaggacaggtgcaaccctaaatggtccaaccaccagagcctgtcctgtggccatctggggcccctctcagggtctggctgaggctcatctcagacccacataggaccaatatcagcacctgcctcatgctcatgtcagagcccactgggaccaacctcagaccctatatggtgccacccttatgccctcctgaagcaggacactcttatgccctcaatgacacctgagacaacacacagagccctcttggcaccaaacatgacttcaatattctcctggtgtcaagttcagtgccaacttgtttcccatcctcgcatacacctgggggcagtcccaaagccaacacgatgcctttccctccctggccatacctgatgctgatatcagaacccgccaatgtcatcagtgtgtccactgctgatgccagtctcagcactcacctcctgctaaggctggcccgcacttgactcccagggtgatctaggccagtcaatgaaggggggcgaggagaaagttcacatcccagctccctcacttactccctgtgtgacctcactcaagagggtttatggagtctagatctgctcatcttcaaaatgaggatgatcacgatgaaccaacctcactgttacaaagattcaaccagatcatacacacctagacttaatcttcccatatatgaccatgctcaccaaagggtaactgtcctgtttactaaggaagaatttccctgaaggaaggacaggagggctactcatcccttctccactcacacccaccccaggatctgcctctgtgcctaacactggagtttaccccaatctcttctgcgactgttccctctgcctgctaatagtagtagcccctgacaaagcaggaatcgcccttaaaggagacttaactcaccctcaaatgtgatcttctcttcccaaacactccctttccactggcaggaaaaccaaatccagaaaggggaactaagtacacagagcaggagagatgggagttcagggccactcacacatgtcccctgcccactgtctgttttctgtcctctgtagatctttatataaaatgagaaacataaacaacaatcataatattaatagggatgatacaatcaatctagtgggtttccctgaggatctgggttggaaaccagcggacaacccttgggacacttgagatttttccaccatttgggggttgttattactatttctccagacctagccaatccctctgccaaccgctaactccaggtactcttctccaggtgtggggaaagttcccctgaaatatggccctggtcttccacccctttcccaaccagagatgggcagtggaggttccatggcacccatcctggcctcactctgaggttccaatgaggattctgggcatcaagagatagctctgggcaaaagcaaaatcaagtcagcccctgggcccattgctgggctgctgggctttctgggagcacctgctggcttgctacacactcctcctcccagaaactccacacccacagccctgggtcttcctagccccgagactttcaagtccatatgcctggagtcccccctcctgagacccttaaccctgcatcctccgcaacagaagacctccagatgcacagccacacttccatctcaccctaataaaacccagacctttggattcctctcccttggaatgcccaaatccacaactttggggtgcattctcact

SEQ ID NO: 21742 - DNA, 2300 bp, Homo sapien
tttgactcactgaatctctctctctctcatctcaattttgttttgtttgctttgttttgtttttgagacagtctcgctcttgttgcccaggctggagtgcagtggtgcgatcttggctcactgcaacctccacctcccgggttcaagcagttctcctgcctcagcctcctgagtagctgggattacaggcgcccgccaccatgactggctaattgtgtgtgtgtgtgtgtgtgtgtgtgtgtgtgtgtgcatgtatttttagtagagacagggtttcaccatgttggccaggctgatctcgaactcttgacctcaggtgatccacctgctttggcctcccaaagtgctgggattacaggtgtgagtcactgtgcctgtcctcatctctattttgatctcactctggttctgtttctatgcacctcgattttgtctcaatcttgatttctgtctccatcacataatacctggcataatctgccatgctctgaatttctctgcctcaagtcctctgcaattatttttcctctttagcttgcttctactttttagttcaagttcctccactcctggcttcctatctggaggtggaatggtgaagggagctgttctaagagtatttgctctctcccttcccgtctgagtaggaaaaccagactcaccatcaccacacacatgccaccaccctgaatgggtgttaaatgctggggtgtgaggatcagaatgggatggggaggtgaaatctaagagagtcaaaggagatgggctgagctgagtctctactccaagaaagacattctagcagcagatccaagagacagaacgtggcactgtgtgtgagtcactcagttttcgtagaatttccactgcttctggacacaggatgcctcagctcagccagccaaaccccattcccaaaacttacagataccttgagggattcagtttccaagtctgagaatacagtcgtgtgaaaaggacattgaattttgataaatagtatatgtgggtaggatataatatccaggaagttcatttcaggccaataaggctttgaaaatatttggtgcggaaaaggtagtgaatcactttttagattattaaggaacacaatcactaattgcgctggaggagatgttctcctccagagactggggttcagaggtgatccctacaccttagagttttaaaacacacacacgcacacacaccaacacacaatacagcaaagttctttttttcttttttaaatttgatacagcaaagttctgatacaccaacacaagtaatctttgattattgttatttaacatcttgagtagaaaacaagaactttttgaacaaaacctgttcaattgatttatttctcttgttttctaaatcttcagcttactttccttattaacattctagtgttccattacacagtagggtagctgtagttaacgataatacattgcatatttcaaaatagttagaagagaggattttgaatgttcttaccacaaagaaatgataaatgtctcagtaatggatataataattacccgaatttgattgttatacatcgcatacatgtataaaaacatcacactgtaccccacaaatatgtacaattattatgtcaattaaaaaaatttaataactgtttaattagggttatacttaattaagtaacgaacaaagagttttccttgttgtctatcaagactttctaaaacaacatggtctgccagctgtggtggctcacgcctgtaattccagcactttgggaggctaacgggggggcgggtggtggatcacttgaggccaggagttcgaggccagcatggccaacatggtgaaaccacatctctacaaaaatacaaaaattagctggacatggtggtgtgcgcctgtagttctagctacttgggaggctgaggcatgagaatcgcttgaaccctggaggcagaagttgaaatgagattataccactacactccagcctgggtgacagagtgagaatctgtctcaaaaaataaaacaataaaaaaaaataaaacaacatggtttccctgtttgatagatggggaaacaagtcccagaggttaagtgactttcccagtgaagaaaagacagagctgccacttgtacccagattgtctggatcctaaaatcaatagcctaaaaagataataatttgcctcttacaccccaccaagaaattctgttcaattctgttgagctgagagggaagaacagggagactggaaatatgaagaaaggggaatggccccagaggatttccctgtgtgaat

SEQ ID NO: 21743 - DNA, 2300 bp, Homo sapien
ctgataaaggaggggacactggagatagaccctgagcattgaaggcggccagcccccccacacctgtgggtatttctcatcaggttggacgagagactgagaaaagaaataagacacagagacaaagtatagagaaagaacagtgggcccaggggactagcgctcagcatacggaggacctgcactgacgccggcctctgagttcactcagtatttattgatcattatttttactatcttagtgaggggagtgtagcagggcaacaggttgggagaaggtcagcacagaaacatgtgagcaaaggaatctgtatcatgaataagttcaaggaaacgtactgtgcccagatgtgcacacaggctagatttatgtttctctttacccaaacatcttagtttagcaaagagtaacagagcagtattgctgccagcatatctcgcttccagccaccgggtggttttctcttatctcaatagaatgaatgggaatggtcagctttacaccaagacattgcattcccagggatgagcaggagacagaagccttcctcttatcccaactgcaaagaggcctccctctttcactactcctcctcagcacagaccctttatgggtattgggctgggggacagtcaggtctttcccttcccatgaggccatatctcaggctgtctcagtggggggaaaccttggacaatacccaggctttcttgggcagaggtccctgtggctttccgcagtgcattctgtccctggttaatcgagaatggagaatggtgatgacttttaccaggcatactgcaaacatattgttaacaaggcacatcccacacattcctaaatccattaaaccttgattcaatacagcacatgtttctgtgagcacagggttggggctaaagttacagcttaacgcatctcaaagcagaaacaatttttcttagtacagatcaaaatggagtttcttatatcttccttttctacatagacacagtaacaatctgatctctctttcttttccccacaagcgtctgcaggcttccaaagagaggggctaggagatgcaccaacacagaagcacaaatacaccagcacacacagatacacacaattggttcacatattgctaggttacagtttgctatgcgacaaaggcagtggaccagatttgattgaattgaacaattccttcttttcatcagcttctcaattttttttttgagacagagtattgctctgtcacccaggctagtgtgcagtggcataatcctggctcactgcagcctccacctcccaggttcaagtgactctcttgcctcagcctcccgagtagctggaattaaaggtgcccaccaccacgcccggctaatttttgtatttttagtagagacggggttttgccatgttggccaggctggtctcgaactcctaacctcaagtgatctgcccaccttagcttcccaaagtgctgggattacaggtgtgagccactgcacccagccagcctcccaattttgaacacacactaccaccacctccacaacacacaaatgtaaatgcactttcatatatgaaactgtataaatacaaggaagctccacacgtgcaaggatatacacataagcacccccagattcaaccacagaaacacacgcctgcacatttgcataaatacaaacaccactttacatataaaaatcatataagcacatacacggatgcaagcaagcatggagaaatgcacggaagcataaacaaacagacaaagctaagtaaaaaagtgtgcatgctcacctgtgcttacaaaaatacacatactcatacacaaacacccacacgttcacatgcttaggtggactttgatatctctaccactgtatccctgccaacatctagagagtggataagggataggcattaggtcgctgggttgcctaagcaggaagtctgggttccctaacacctttttctaagctaatgctccttgacgataatgagaaaggaggcggggaatggatgaagtttcataactgagtgaagaggcaggttcaggataaaaggcccagttagaggctgcagtggggtgcagggcagtcagactggaaccatggagctcagcgtcctcctcttccttgcactcctcacaggcctcttgctactcctggttcagcgtcaccctaactcccatggcaccctcccaccagggccccgccctctgccccttttggggaaccttctgcagatggacagaagaggcctactcaaatcctttctgagggtaagacacagacgaatgggg

SEQ ID NO: 21744 - DNA, 2300 bp, Homo sapien
cattttatttaaccattcatctgttgattccctatttttgctattgtaaatagcatttggaccacatttcaagtacttaattagtggccacatgcagcaagtgactatcacattggacaatgtagccccaacccactgtatgaccttgggtaagacttgcaaactgtcattgcttcaatatctccatctataaaatggggatggcaacaatacctcactaagagtgtaaagactgagttactgtgtgtaaagcacttcacgcctccccatcggtgcttcaccctggggctgcaatgagcacccaatcttagtgtcagatgacacagcacagcaagaccgaggcccttggttcaggaaagtccatgctgccacctcttcagggtcaggaaagtacagtttccacctcttacaaataggactgtttgtctgctcctcctgggtcaaagtaacttcgggttcaggtcctggatccagcaaagggtttgcttaacattgcaagaaagatgttgcctcatggtcaaaagtcaggcgtaggatgagacaggcagacacgcacacattcacacccacgttttgcaaagatggactgaccctgtcagaggatgtgtgggtgaaggtgcacagtgaggatagagacatatgggagtccagtagacatcaatcaaactggactcagtttgcacacacctggagctcaagagtctccagggggaaaacagagacacaaagtcagacagagagagagccagagaaatttcctgcaccgtgaagatagtcagaggcagggaagaaactccttagcactagttagagtgatcagaaaccaagaggacctgatcgctgtacctgccaggtctcagtttctgtctccttccaactgaccacctcttcctctgagactcaccagttctgcatctcttgctcctccttctgtttctccgaccacttccacctgtggctgtcacagaagggcggatgaaggaggggacactggagatagactcagcatctgcaggcttccaaagagaggggctaggagatccaccaacacaccagcacaaatacaccagcacacacagatacacacaattggttcatgtattgctaggttacagtttgctatgctacaaaggcagtaggccaaatttgattgaattgaataattccttattttcatcagcttctcctttttttttttttttttttttttttgagatggagtattgctgtgtcacccaggctggagtgcagtggtgtaatcttggctcactgcagcctccacctcccaggttcaagtgattctcttgcctcagcctcccgagtagctgggattaaaagtacccaccatcacgcccggttaatttttgtgtttttagtacagatggggttttgccatgtgggccaggatggtctcgaactcttgacctcaattgatctgcccccctcagcttcccaacgtgctgggattacaggtgtgagccaccgcacccagccagcctctcagttttgaacatgcactaccaccacctccacaacacacaaatgtaaatgcactttcgtatataaaactgtataaatacaaggaagctcatacacatgcaaggatacacacataagcacccccagattcaaccacagaaatatacgccagtacatttgcataaattcaaacacccctttacatgtaaaaatcatataagcacatacagggatgcaagcaggcatggacaaatgcatgcaagcacagacaaacagacaaagctaagtaaaaaagtgcaagctcacctatgcttacaaaaatagacatacatatacccacaaacccacacacccacacattcacttgctcacctggactttgatatctctaccactgtatccctgccaatatctacagagtgggtaaagggataggcatcaggtcactgggttgcccaagcaggaagtctgggttccctaacaactttttctaagctaatgctcctggatgatgatgaaaaaggaggtggggaatggatgaaattttataacagggtgcagaggcagggtcaggataaaaggcccagttggaggctgcagcagggtgcagggcagtcagaccaggaccatggaactcagcgtcctcctcttccttgcactcctcacaggactcttgctactcctggttcagcgccaccctaacacccatgaccgcctcccaccagggccccgccctctgccccttttgggaaaccttctgcagatggatagaagaggcctactcaaatcctttctgagggtaagacacagacgaatggggt

SEQ ID NO: 21745 - DNA, 2300 bp, Homo sapien
actaactcactctgaaagcctgtacccgcaccgccactgggacaagtccctcccacttaatttcagacaccgttctcttactccacacttcagagtaatcaacaaggccaaaattgcttgaactctatgtccccaaatactagagttctcccaacctgactctccccacccccaccctggccaggtcatggcagcctgtctgaacactcagtgcccttcctagtgccaaactcactgagaaacaaactctccaaatttctacctctctcctttttaagaaacaagggagaagaggaaggacccaggcttgtggccagcccaagtgcaggctggtgaccaggattagatggattgatgtctgcccagctggtgctaatcctccttcccacctcttcccccacaaaatcaataaacagctttcctctctctgctttgttctctgctctttgattcctccacacaggtctcagagctcaacagccaatttgagccagttagagccagtcctgggagtgtcaacctcacccacatccacttgtccaaatttggtgacctagaggagaggtgcaaccctggaaggaccaaccatcagagcctgtcctgtggccatctggggcccctctcaggatctggctgaggctcatctcagacccacataggaccaatatcagcacctgcctcatgctcatgtcacagcccactgggaccaacctcagaccctatatggtgccattcttacgccctcctgaagcaggacacacttatgccctcaatgaaacctgaaacaacacacagagccctcttggcaccaaacatgacttcaatattctcctggtatcaagttcagtaccaacttgtttcccatcctcgcatacacctgggggcagtcccaaagccaacacgatgcctttccctccctgaacacacctgatgctgatatcagaacccgccaatgtcatcagtgtgtccactgctgatgccagtctcagcactcacctcctgctaagcctggcctgcacttgactcccagggtgatctaggccagtcaatgacgggggatgagaagaaagttcacatcccagctccctcacttattccctgtgtgacctcactcaagaggatttatggagtctagatctgctcatcttcaaaatgaggatgatcatgatgaacaaacctcactgttacaaagattcgaccagatcatacacacctagacttaatcttcccatatacgaccatgctcaccaaagggtaactgccccgtttactaaggaagaatttccctgagggaaggacaggagggctactcatcccttctccactcacacccaccccaggatctacctctgtgcctaacactggagtttaccccaatctcttctgcgattgttccctctgcctgctaatagtagtagcccctgacaaagcaggaatcgcccttaaaggagacttaactcaccctcaaatatgatcttttcctaaatactccctttctactggtgggaaaaccaaatccagaaaggggaactaagtactcagagcaggagagatgggagttcagggccactcatgcatgtcccctgcctactgtctgttttctgtcctctgtagacccttatataaaatgagaaagataaacaacaatcataatattaatagggatgatacaatcaatctagtgggtttccctaaggatctgggttggaaaccagtggaggtctttgtaaattacaacccttgggacacttgagctttttccaccatttgggggttgttgttactatttctccagacctggccaatccctctgccaactgataacacaaggtactcttctccaggtgtgtggaaatttcccttgaaatatggctctggtcttccacccctttgccaaccagagatggtcagtggagtttccatggcacccatcctggcctcactctgaggttccagtgaggattccgggcatcaagagacagctctgggcaaaagcaaaatcaagtcagcccctgggcccagtgctgggctgctgggctttctgggacgacctactgggcttgctacacactcctcctcccagaaactccacacccacagccctgggtcttcctagccccaagactctcaagtccatatgcctggaatcccccctcctgagacccttaaccctgcatcctccacaacagaagacccccagatgcacagccacacttccatctcaccctaataaaacccagacctttgcattcttctcctcggaacccccaaatccacaattttggggtgcattctcactc

SEQ ID NO: 21746 - DNA, 2300 bp, Homo sapien
ttgtccacagttggtgacccagaggagaggtgcaacagtggaaggtccaaacatcagagcctgtcctgtgcccatctggagcccctctcagggtctggctgaggctcatctcagacccacataggaccaatatcaacacctgcctcatgctcatgtcagagcccactgggaccaacctcagaccctatatggtgccactcttatgccctcctgaagcaggactctcttatgccctcaatgacacctgagacaacacacagagccctcttggcaccaaacatgacttcaatattctcctggtgtcaagttcagtgccaacttgtttcccatcctcgcatacacctgggggcagtcccaaagccaacacgatgcctttccctccctggacacacctgatgctgatatcagaacccgccaatgtcatcagtgtgtccactgctgatgccagtcccagcactcacctcctgctaagcctggcctgcacttgactcccagggtgatctaggccagtcaatgaaggggggcgaggagaaagttcacatcccagctccctcacttactccctgtgtgacctcactcaagaggatttatggagtctagatctgctcatcttcaaaatgaggatgatcatgatgaaccaacctcactgttacaaagattcaaccagatcatacacacctagacttaatcttcccatatatgaccatgctcaccaaagggtaactgtcctgtttactaaggaagaatttccttgagggaaggacaggagggctactcatcccttctccactcacacccaccccaggatctgcctctgtgcctaatactggagtttaccccaatctcttctgcgattgttccctctgcctactaatagtagtagcccctgacaaagcaggaatcgcccttaaaggagacttaactcaccctcaaacgtggtcttctcttcccaaacactccctttccactggcaggaaaaccaaatccagaaagtggaactaaagacgcagagcaagagagatgggagttcagggccactcacacatgtcccctgcccactgtctgttttctgtcctctgtagatctttatataaaatgagaaacataaataacaatcatagtattaatagggatgatacaatcaatctagtgggtttccctaagaatctgggttggaaaccagtggagttcttcgtaaattacaacccttgggacacttgagatttttccagcatttgagggttgttattactatttctccagacctagccaatcccctctgccaactggtaacatgaggtactcttctccacgtgtggggaaagttcctctgaaatatggctctcgtcttctgcccctttcccagccagagatgggcagcggaggttctatggcacccatcctggcctcactctgaggttccaatgaggattctgggcatcaagagacagctctgggtcaaagcaaaatcaagtcagtccctgggcccagtgctgggctgctgggctttctgggagcacctgctgggcttgctacacactccacctcccagaaactccacacccacagccctgggtcttcctagccccaagactttcaagtccatatgcctggaatcccccgtcctgagacccttaaccctgcatcctccacaacagaagacccccagatgcacagccacacttccatctcaccctagtaaaacccagacctttggattcctctcccgtggaatgcccaaatccacaactttggggtgcattctcactcccagatcccaaatccaaagtccaggtgctcccctgtgcaaatattccaaactcctcagttccacagtttatctgttgcccgctcctaaatccacagccctgcagcaaccctcctgaagtaccagatttagtctggagttcccctccctgttcagcttccctggggtccctctcctcctcccttgctggctgtgtcctaagctgtgtgggattcagggttggggtgtagttgggaggtgaaatgaggtgattatataatcaaccaaagtccatccctctttttcaggcagtataaaggcaaaccaccccagccatcaccatctatcatcccactgccaccatgctggcctcagggctgcttctggtgaccttgctggcctgcctgactgtgatggtcttgatgtcagtctggcggcagaggaagagcagggggaagctgcctccgggacccaccccattgcccttcattggaaactacctgcagctgaacacagagcagatgtacaactccctcatgaaggtgtcctaagg

SEQ ID NO: 21747 - DNA, 2300 bp, Homo sapien
caggccggagtgcagtggcatgatcccggctcactgcaacctctgcctcccggattcaaacaattcttctgtctcagcctcctgagtagctgggattacaggcgcatgccaccatacctagctcatttttgtatttttagtagagacggggtttcaccatgttggccaggctggtctcgaactcctgacctcaggtgatccacctgcctcggcctcccaaagtgctgggattacaggtcatgagccaccgcgcctggccaattgtaaggattattatgacgagggctaatttgaatgggcctgtgtcgtctgcccaccccactcccatcctgatttccctctccctggctttgcacctgcctgcactggctgctgggatgtacctcctgcatgcggatgagaaaggagtcgatgaagtcccgtggggaattgggatccagcgtgcgctggttgtgctccaccttcttggcgatgaagtcctccagcccttgcagctccttaaaggcctgttgctgtggtcctggcaggtgtttcatcaccgaagagaacatctcatagagctggggttgcagagagaggatgggaagggaaggacagctgtcacggggcaggagctgatgggaatggggatttgtttcatagcaaggaaggaacggagttaaaggcatctgtccaggtgtttaggtatttcagtggggttggatggaaacttatatctaagttttcacgtggattaggtgccagggccacggtctagtaatttaggtgagaagaactgaggcatatatccaggtttcaggtatgcaaatgaggctggattggagcacacatctaggtgttcagatattcaagtgaagttgagttggaagacacctgtccaggtgtttagctcttcaggtggggctggtatgaggtgagtggcacctgtctaggtatttaggcattcaagtggacttggttggagacagctgtccagatacttactgggtctggattgggggcttttgttcaggtgttcaggtattaaagtggggctggtgaagatgttgaagtggaggggatacctgttgaggtgtttacctatccaagtgggatgcactgggagcacctctgtaaggtgtgtgattggaaagggttggggaacacttatttgggtgtcagggaataatctatctagatatttatgtgtttagggtattggttagggcacctgtccatgttttcaggcatttaagtgggtgaagtagagggcccttggccagatattccagtgggctaatctgtgacatttgtgtagatgtgaaatgattatgatgggctggattttgcagcaccaggtgttcaggtatgcaggaggcgggttgacgcagtcacttgtccaggtgttaaaatattcagaagaactgggtagggagcacctgttacaaattacggtaagttggggatgggaacatgtgcccaggtgagagagctgagctgagggtatgcatcctgccagcaggctctgttttggggatcatctgttgagctatccaggtgtccttggagactgggtattgggcatccctcctgggttctggtgcaaccgtccagttgtccaatatcggggactgattttgaggggacactgtctggaggggggtgggagtttggggcacctgtctccaggtaggggagcagttggcaggttgtggtaggggcgtcactggcgggctgcagccagttacctgccccgtggaggttgccgtgaactggaagcttcccagcatcatgcgcaacagtgacaggaactctttgtcctcatagtcaaagcggtccccaaagacaatggagctgatgacattggagactgtgcggctcaggaagaaggtgggatcgatattggcgcctgcaggtgtggcgggagaagggggttggggagagagtcaactcagaggtctgaggagagtcagaattccaggaggcagggccctgttgagccgaatcccagcgccagactccagggctggaagtgcgggcccctttccccacctagtccccatccccaggcagaaagcgcgggttcccgccctcgcactcggggtcccctactcaccgtgcgtgccccggagggcgtcgatgaggaagcccgcctcctcctggatgcgttcctcgatgccgcgcttgcccacgccaaaaccccttagggtggcgatggagaagcgccggagctgcttggcgcgctccccgttgctgaacgccacgcctggggaggtgaacgcgggggtggagagaggtcagggggcggcgggagcaggagc

SEQ ID NO: 21748 - DNA, 2300 bp, Homo sapien
taaatcccagtttccccaatcaggtggtcccattaggcccatcttttttttctttttttttcttttttttgagtcaaagtttcactcttgttgcccaggctggagtgcaatggtacaatctcagctcactgcaacctccacctcccgggttcaagtgattctcctgcctcagcctcctgagtagctgggattataggcaagcaccaccacgcctggctaattttttttgtatttttagtagagacagggttttgccatgttggtcaggctgtctcaaactcctgacctcaggtgatccacccacctcggcctcccaaagtgctgggattacaggcatgagccaccacgcccagcctcattaggcccctcttaaccaagttctagggtgagggataagttgcttacagggttggcgtggatacagcactacaccctccccttaaaagtagggagtagacgccaagggaaactagagctatataatcccatcatcaagccttcagccctcttccaggacctgccccaaccggcctatccaggactgaaacaacagcatgggccccacctccaccccaccatatgcctgggacctagggtgtcaaattccccaggacctccaaacacttcctcctctgcccctctgagaacagcaatcctggtgcacacccacgaacctgtgggggtacccacacctccacctggcctcccagacccttgaccgcaggggctctccacccagcctagcccctggcaccagagccctggcccagctccaggttttgcattctgcccttgtgacctggccaggaggtgggtaactagggccagtttcttcttcttttttttttttttttttttttgagaccgagtctcaccctgttgcccaggctggagtgcagtggcatgttcttagctcactgcaacctccacctcccgggttcaagcgattctcctgccccagcctcccaagtagctcagactacaggcgtgagccaccatgcctggctaatttttgtattattagtagagacagggtttcaccatgttggccaggctggtcttgaactcctgacctcaggtgatccacccacctcggcctcccaaagtgctgggattacaggcgtgagccactgcgcctggcctactagggtgagtttctaaggcaggagctgagagtagacatggctagtagggtgctcaggagggcaggaggagggctgtttatgagccagtggtgggagagagtgtcattctagtctgagaggctttttccctgtggcttccagctctgcccttttcttaaacactccttcagcctcagcttggcttcagtcccaccaagtgcagtctgactcgtggagacatgagagatagagagagtgagagaccagagagatcaggagacagtgactgagagggacttacagggagatcagggagagaagcagagagaaggagaaagcccagagagcataagaaatgaagacccagagacaccaaaggagggagagacagagacacagagagacaaaaagattcagaggcagagactgtagaggcagaagcaaagcaagacacagagcatttcagagacccacggcaagagacagggaacagcatggagaactatgaaaaaataggcttccagagaaagagaaaactccagctctggagggaaagggacttagccagggccactcggcccatcagtggcagaaatggacttgaacccagagaaaaagaaacaagtgccccaaataccaaaggaacccagcccccatccctggcccatcattttgcgacagccccatgactaccccaaaaccaggcccaggctccaactggcaaagcaaaaaaaaaaaacaaagaaagaaagaaagctttgccccatcccaggagggcccccaggcgcagccccctcccacggcacctttccagctggctgtgagccctagggccgcaggaaaggtatggcaagatgatgggagggatttaaagttcacagcgagaacaagaaaagtggggttaaggaggagggtgtgggcagaaacaacttaagaacaacctctgccccaccaccccccaagcacacccagagctgcaggctctagcgcatcccagccagtgtctcctgcagctcagcaggtaaagggccccggtgagggaggcagagaaggagggggtgtctcccaagagagggtgggtcgccagctccaatctctgtctctgagactggctaggaatcttttttgctgtttcctctgagagctctcatgtccctgttctgagcactgggattt

SEQ ID NO: 21749 - DNA, 2300 bp, Homo sapien
accctcagtctcccttgctctgccttctcccccaccccacctccacatgctagaaaccaggtcctcttctcaccctctctcccaggtgagcctggtcactcacagagctgcagaatctgctgtctgtctgccaaggactcccaactctgtgtccacagcaaggatctgtgctaaaccacactggccttgctgggcctccagcgccatacactccctcttatggcttgtaacaggtgtttccccacctggaatgtttgctctcctctctcctccaaagtcctgcccctccctgaggtgagaaatcagttcccccacctcccccacagccccagcactctgtgctgaaatcatcatcaaaaaccctggtctcctccaatccctcctgctaccctctcagccacccaacatgctattccccctgcaggaacactcttccccatgatctttctcgagtcattcttcagatccatgtatcccctcctccaggaagccctccctgatactcaccactctccggccagggcaggcacttactctgggctcccacaggccccctggcctcccccatcccagccccgaccactctgggcagtcaaggtctggtgactaacctgcctcctcaactggactgtgggccccatgggggtagggctgtctctgtctctactgcctccccagcatcacccagtcaggcctggatgcaggcctggcatcaactctgcataaaggagcggaggtcaggagttccctggggcctcagtgcctggcactggtggaggggctttctgcatgccacactctggatcttctccagctactccttattctggaagctgcagcatgttgaaataaaaactggaactaaatggagatggaatggacttcacatttggacacatgggtgtgtaaagaggaacgtgacttctccaaagtaacgcatagaggccgggcgcagtggctcacgcatgtaatcccagcactttgggaggccgaggcaggcagatcatttgaggtcaggagttcgagaccagcctggccaacatggtgaaacgccatctccactataaatacacaaattagctgggcatagtggcacatgcctgtaatcccagctactccggaggctgaggctgaagaatcacttgaacccaggaagcagaggttgcattgaaccaaaatcgcaccactgcactccaacctgggtgacagagcgagactccgtctcaaaaaaaaaaaaaaaaaaaagtaacacactaacctcctgacccacccagagtgggtcttaccttctagaaagatagaaaagaatagaaccaggccaggctgactctggcagctttagaacaatagtaatggcaggagtggccggcgatggacagctgggggtgggactgaaatagacagcagccagggaatagtgggttgaagggagaaagggagttatttttctgtagtctttgaaattttatttttctctttccttttttggagacaaggtcctgctcttttgcccaggctggagggccatggcgcgatcatggctcactgcagcctcgaacttgagcgatcctccctcctcagcctcccaagtaggtggaacttcaggcgtctgccaccacacccagctaatttttaaattttttaaattttttctagagatgggggccttgctatgttgcccaggctggtctcgaactcctgagctccagcgatcctcccaccttggcctccgaaaggcctgagccaccgtacccggctgaaatttgtaatcaacccataatcatctattacttatgtaactgaattcctatgaaaagcataataaagtggagatcataaaggtgccgacttcgggctgttgtaagatttcggtgccacacctagcacagaaaaagcatggagagcagaagggcagtgaacgccagctggcacacgttggctacgtgcaagtattcgcctaaacgctgcgcaggtattcatcatatgatccccataaacctctgagggctgcactcacatgtcatccccgatctgctgatgagaagttcagttataggcccaaggtcacatatcccgagccagcgtaaaagtggaatccagggaggaggaggaggaggaggagcaggaggaggaggaggaggaggaggaggaggaggagaagaagaagaagaagaagaagaagaagaagaagaagaagaagagaaaggattactgtccgtctctctctggttctctgcacacccctcacctccagggttttcagtctgtctctggaccattctccttctctccccctgccc

SEQ ID NO: 21750 - DNA, 2300 bp, Homo sapien
ggctggagtgcagtggcgggatctcggctcactgcaagctccgcctcccgggttcacgccattctcctgcctcagcctcccaagtagctgggactacaggcgcccgccactacgcccggctaattttttgtatttttagtagagacggggtttcaccattttagccaggatggtctcgatctcctgacctcgtgatccgcccgcctcagcctcccaaagaatctaatattttaaaactccagcatatgcaactcaaagctcatctaattatacacttaagagttatgtatttcattgtatataagataccttgaggaacaaaaagtatctgtaaacaaatactgagctctagctactgatatgcatgctgatgtatttgggagtgaagtgtactggtatctgcaactgactttgaaatgcttaaaaaaaaatcaatggataggcaaaatgaacagatatgtaatgaaaaaagggccaggcacagtggctcatgcctgtaatcccagcactttgggaggctgaggtgagaagatcacctgaggtcaggagtttgagaccagcctggtcaacatggcaaaaaccccgtctctactaaaaatacaaaaaatagccaggcatggtggtgcacgcctgtaatcgcagctacttgagaggctgaagcaggagaattgcttgaacccgggaggcagaggttgcaatgagccaagactgtatgctattgcactccactctgggcaacagagtgagactctatctcaaacaaaaaaagaatagataggtaacaaagaaaggataataaaatggtggaatctgatgggtatacaggtgttcactgtatgtttgaaattttaatatttttataataaaatacgaaatcaaaatgcaaagcaaacaaagtaactgccctgctgaaaacccctccagacagcttccgtttgcaatagaaataaaatgcagtcttttccaagaccttgcaagatggcccctgcagacttcatgaatcttatctcctacattcaatctttgaaaatataacaaatatttattgagtgcctactgtgtgtcaggcactgcactatatgttggggatacagcagtgaaccaaacctacaataattcatgcacaaatggttctaacattcttccttctcaagaagcccattcccctggcaggccttctcacttcctgaaattgttttcatctcatcttcatctgcatgtggatatgagctcaggaaggccagagcccttctctccatcgctcatagctgcaccctcgggtctagaacaaggtcttgtttatagtaagacctcaataacagttagttgcagaaatattagctaacatctatttagtgcttgttacatgtgcacctgcgtctgctttaaatggtgtgcacagatgtactatttaatcctgaaaactagccccattttacaaggctaacagaggcacagaggaattaggctgtgaattcaagcagtctggcttcagccatcacggtcctaaccgctctgcaaactgcctctaaacgaatgaatgaatgactcaatcattctaactggcccaagtcaaaatattaactctgccactcagccaagttgacctggggccaaccgatttatctccctggacttcagattgtttatccttaaaggtcaagtccttcctctcagttcgtgaagatgtaagatgctggagaaaattgactcaaagacaccccatacacgcacgcacacaggaacccacatccgaacaatgagcgaggtaggagctggggagagtggcgcggggtcaccgccagatgcggggtgtggcaacctccaggcggccaaagtctctgacttccaggttcttctgtttgcttactccctatccgggggcccaaggcgctgtctccgccgcccaagccccgcgtaaacctgggtgacctcggagacatccgttggagcatgagttcccgacatcaggcggcggcggtggtccgggagaaacccggcggcggggagataagcctgcccaggaggcagggggctgggctagctgccccgccccgcgcctgacttcgttggggagggagacgcccggctcccgcccctaactagcccagccgcgcggagcgcctgggagaggagaaggagccgacctgccgagatggaggcgaccggcacctgggcgctgctgctggcgctggcgctgctcctgctgctgacgctggcgctgtccgggaccagggcccgaggccacctgccccccgggcccacgccgctaccactgctgggaaacctcctgcagctac

SEQ ID NO: 21751 - DNA, 2300 bp, Homo sapien
cgacagagtgagactctgtctcaagaaaaaaaaaatgccacaataaggaattgtcccctttatggcaggccttttacagggcggtgaagatgcagcagttcccaaaatatacccagtcccttcccccgcagagcccacaggccagtgggaggagacagatgtgagacacataatcatgccaataaatatataatgacaacccaggcaaagtgttgccaaggaaagggacagcatgttgggagtgaacaatatgaggacctagattgggctgggggggccaggcagtgatgcgatggagaagggatgatagagttggggacaaagtgctgcaggaggttgctccaagtcctctgagggggctctttgggtgagaaagcgagagaagcctggggaggcgaggggagggtcacagaaacataaggagtttagggttctgctgaaaggtttggggcagaggtgggaaagggtttggtttgagattgggaagaagccttctgactgttgagtgggagacaggttggaaggagcaacagaagccagcagcccatggccgggcacagtgacccacgcctgtaatcccagccctttgggaggccgaggcgggcagatcacgagttcaggagttccagaccagcctggccaacatggtgaaaccccgtctctaccaaaaatacaaaaattaacctggcatggtggtgcacacctgtaatcccagcaactcaggaagctgaggtgggaggatcacttgaacccaggagatggaggttgcagtgagccgagatcgagccattgcactccagcctgggcaacaaagcaagactgggtctcaaaaaaaaaaaaaaaaaaaaagacacagcccagggagacaacggtgaagggccctaagtggccagtgacaaggagctgggagcttgccctgagggcagcaggaggccatgggcaagcagagaagggacagggtaggatttgactttcagaaacagtcctctggttgctaaatgggagaaaggagtgacagtagaggcaggagaaggcaggatcagacgggggtgctgggaaggggcaggtagaagagacatcaggaggccaaacagataggactttatgatgcaccgtaggtataccagtacccaaacacaggtggccaagagcagagggatagacgcccagcctcctcctcacagacatccaggcatgcagagccctccacgtgccaaacacacagggccgaggaatggaagtgcagcagagccgatacgcaggcagcagatctgcaataaccaggacacacagtcccaccagaaggagagagcagtggaatgatcagggctcactgcagcctcgatctcttggactcaagcgttcctctcactccagcctccctagtagctgggaccacaggcacacgccatgatacctggttaagttttaatttttaaacttcttgtagagatgggggtctcagtgcattgaccagtctggtctcgaactcctgggctcaagcgatcctcccaccttggcctcccaaagtgctgggattacaggagtgagttactgtgcccggccaacaactattcttattcccattttacagatggacaaactgaggctcaggaggccagtcacttgcctgtagcccacagttagtggtagcactgggattccaacttgggtccccttcatgtcgcctgtatttggtgtcccatttaggcgtccatgcaggttttggcgtgtctgaagatctgtgtctccccaagtaagtgtcccccatggatgcccacccagccgtgtcctcctgtctctgaggtttctccaggaatcgagctcctggcctggcttgtctgagtgtgtctgtgggccagtagcatgcccctgcccgtctgggtccctctgcgtgtctctgcttgtcctagcctgtgtgtgtcagtgacgtctaagagtgtgtgtgcgtgcgtgcgtgcgtgcgtgtgtgtgtgtgtgtgtgtgtccttgtccgaggagccgagagagtgagggggaatgaagggccaaggaggcctggctggggctgggctgggggtggaggcggggagaggggcgtcacggcctgagctgagaggggagtggagttctggaggaatgtttaccagacacagagcccagagggacagcgcccagagcccggatagagagacacggcctcactggctcaggacagggggcacagccaccagggtccccttccccctcctcagctccctccctggcccctttaagaaagagctgatcctctcctctcttgagttaacccctgattgtcc

SEQ ID NO: 21752 - DNA, 2300 bp, Homo sapien
ttcctgccttggcctcccaagtagctgggattacaggtgtgtgccaccacacccggctaatttttatatttttagtagagacagggtttcaccatgttggccaggctggtctaaaactcctgacctcaagtgatctgcccacctcagcctcccaaagtgctgagattacaggcatgagccactgcactcaaccttaagacctactgttctaaagctctgacattatgtggttttagattttctggttctaacatttttgataaagcctcaaggttttaggttctaaagttctaagattctgattttaggagctaaggctctatgagtctagatgtttattcttctagagttcagagtccttaaaatgtaagattatagattctaaagattctatagttctagacatggaggttctaaggcctaggattctaaaatgtgatgttctaaggctctgagagtctagattctctggctgtaaggctctagatcataaggcttcaaaatgttatcttctcaagttctaagattctaatgatgatcaattatagtttctgaggctttatgataatagattctcttgtataagatcctagatcctaagggtcgaaagctctagaatctgcaattcaaaagttccaagagtctaaagatggagtttctaaggtccggtgttctaagatgtgatattctaagacttactctaagatcttagattctctgtgtctaagattctagatcagatgctccaagattctagatgattaaataagattctaacggtctgttctgtttcaaggcactctagattccattggtccaagattccggatcctaagcatctaagttataagactctcacactcagttgtgactaactagacaccaaagttctaataatttctaatgttggacacctttaggttctttgctgcattctgcctctctaggaccatggttaagagtccaagaatccacatttctaaaatcttatagttctaggcactgtagttctaagactcaaatgttctaagtttctaagattctaaaggtccacaggtctagactattaggtgcaatttcaaggttctaaccctatactgtagtattctttggggtgcccctctccttcttagctatcattgcttcctcctccccaactgtgggggtgtgcccccttcaagcctgtgcaatgcattagggatgcctcctttcccgcaggggatggacgatctcccacctttcgggccatgttgcccccgtgagccaatccctcaccttctgagtacagagtgtggactctggtgcctccagaggggctcaggtcacataaaactttgtatatcaacgagcttctgtctcctcttgtctccttttagctgtgatgtggccccattccctggcaattcagttcccccatcagaaaaaagaagggcttggtagggtcttggaattctgtcctcactagagagggtagaaatgaacacacagatagacaaaaagacatacaagcaaagagatgcaggttctcagaaacccccagtgaggaactggcatacagatccaggatcacagacacacacacacacacacacacctgttccgccgcaaactaacagacacatgaattaatggacacacccaggaggacctggtcacaaatacagagactgaaactcagacgcatagagtaacacagacacacagaattacacagacacaagcatatttacaaacatgctcaggcagatacccgccacgaataggaagagacacagacctagagtcaagtgacacaaatactcaagagacatgtagagtacaacaggtactcacaaccccgaacgttcagactgacatagaaacacaggcacagaacacctccgatcatcacggacccacaaagggcctccagcgaagaccagcccaccgtgtctggcacgcactcgcgagcgggcgttcgcgggtgtggccggcagcaaatggagaaacccttggcagcgcccggacgccctccagtggcggctcctgagaaccggggacagttcaatccgggccacaaacttttttagaacaaatcattgtgggaagctgggaggagagagagagagaggaagtcggacgtgggcgaggggcggggtgtctggactggaacctctgggcccacgtgagtgtctgtcccgctgctgagtgggtgctgtgtgtttgggttgctgtagtgttcgcttgtagtgcaactatcctgtgttatctttattattcgatgccgcctgcctctgcggaccgtagtgggcacatctaca

SEQ ID NO: 21753 - DNA, 2300 bp, Homo sapien
tagagtacaacaggtactcacaaccccgaacgttcagactgacatagaaacacaggcacagaacacctccgatcatcacggacccacaaagggcctccagcgaagaccagcccaccgtgtctggcacgcactcgcgagcgggcgttcgcgggtgtggccggcagcaaatggagaaacccttggcagcgcccggacgccctccagtggcggctcctgagaaccggggacagttcaatccgggccacaaacttttttagaacaaatcattgtgggaagctgggaggagagagagagagaggaagtcggacgtgggcgaggggcggggtgtctggactggaacctctgggcccacgtgagtgtctgtcccgctgctgagtgggtgctgtgtgtttgggttgctgtagtgttcgcttgtagtgcaactatcctgtgttatctttattattcgatgccgcctgcctctgcggaccgtagtgggcacatctacactgcagcggggtgccttacccaaagcagatcggaattggggccgggcgcggtggctcacgcctgtaatcccagcactttgggaggccgaggcgggcggatcacttgaggtcaggagttcgagaccagcctggccaacatggtgaaaccccgtctctactaaaaatacaaaaattagtcgggcatggtggcggggacctgtaatcccagctactcggaaggctgaggcaggagaatcgcttgaacacgggaggcggaggttgcggtgagctgagatagaggccctgcactccagccagggtaacaagagcgagactccgtctcaaaaaaaaaaaaaaaaaaaaaagaacaacaaaaaaaagaactggatgcgtctgatctgacgcacgcctgtttgtttacgactgcggggtgtgcctttgtctgagtagagatagtgtgtggcttttgcgggcttaacgtgtggctcaggaggcagtgggagtctgcatcatgtatcccgattgcgtcttactcgagttttgttttgagttagaggcgacaggtggtgcagcgttagacactgggaagctctgtggcttttgtattcctgagcgcgaaggttaatgacggatccgtggggttgagcttgtcggtacagacgccagacagcccgatttacgggaacagccgattagaggattcgggagagcggtcggtgaacttctggatgtctttcgggaggggaaggctctatggtcgcgtgcagagcgcccgttccacgtcaggtacccgaccatagagcaaggcggccgcggactacccaagggaaggggaggccgtgtcctttacaacttgcctcccgttgttagtctagtttctatagccaaaccttcgggactctctcaactcaaaattttgcttttcctaaaggcaactgggttccttccagattacgaactgtgtatccacttaatctctatttcgtatacctcctcctacagcgaaatttgtgaggcagtcctctgaagcacggccaatctggtgaacttttcctaaaatgagccatcgctaccagctttagtgagctaagacaataactgcgattggtgggcagattgttttgaaaccgccctaacggcaaggggcgggctcctggtgaattcatctctttccggtttcttaaaggcaacaggaaggaggggtttctgccgaccctccatttgattggttctagtggttttacccgctcggactcctcaaggggcgggagatgtacaccaatcggaatgtgtgttacagagacacttagtttgatgaaaggactgcgcaggaaaggccgtgggacactcattctgagatcttaccgttgattggaccaaattgttactcccttattttcattggaccttacggcagccggcgcgcgagagttacccaatcagcaagcgctccgcctcctgccttttcccgccctccgctccggcctcggcttcgacgtaggccaacgcttcctccccagtagctcctaggccttctcgtggccgttgttttgaaaacggcgctctgattggctaggtttccgggcccgcgcccgttgccccacgcactgaccaattggcactcatgtaacatcggacgaggcacgagtgaggggggaggcggtggcggcggccattttgagccgctgccgccattggagtgggccccccccctttcccccttcgcctcctgacaggaaaggtttaagggggacagagccctgggaggccgggccgggctcgggggccaccccgggggcccgggccatggatgtgcgccgtctgaaggtgaac

SEQ ID NO: 21754 - DNA, 2300 bp, Homo sapien
cggggcaccgttggaccaaagagcaaggcagaatgtgaggtgagtggggccagaatgtattggtggccaccttgctgccaagacagaggagacacacacacacacacacacacagacttgctgcgagagtagccttggggcaagtggccactttgtcccagctcctcagggttggactcagagctgaaaagctgctctgagtgtgaggtgaggggtgttggtgtgacctaagttgaagtcggagaggctacctaaatctcagaaagattgcatcttcttcttaagtgaggccagaataggggaaaaggaggcttttcttacagcagaaaaggacactaggcgcttcttggggagtgcactgtgccaccaagtgttctttttttttctttagagacagggtctcgctctgtcacccaggctggagtgcagtggtgcgatcacggcttactgcagccttgaccttccaggctcaagtgatcctcccacctcagcttctcgagtagctgggaccacaggtacatgccaccatgccaggctaacttttttagccactgagcctggcccaccgagtgttcttgaaggaggttgagtaagttccacctctcacccagagctatcaaaagataaatggcctttgggaagatttgattccaagagctatactagtgtcttttttcttaaaacaatatttttcttgtatgtgtaagttatttatgcttgttctagaaaattaagaagtaaaaaatttaaattttcataatgccatcatctacaaataagtttacttgcagagttttggagttcatctgttctttttaatgtctaagtgcctgttttatgctcacaaacatttatcattgagattctatggtataagcattatgataccctgctcttttcacttcacattattttgtgagctttatcccatcacataaaaacctctctttgaacatcattttttcttttttaaaaatccttcaagggaatgaacgtcattcttaatggccttacaaactcgccactcccccctagtcgggcatttaagatgcatctgtgtttaccaaattctaaatgtactgattagatacaattcatgtccttgtgtgtgcagctctgttcctatttcatacttaaagaaagttgtaccacttctacccactccatggggccagtcccagtacacagccttccctgggctattgcagggggcggggaatgggtcacataatcctgtaaatgggctgggtttggtggcaaatgcctataattccagcactttgggaggccaagaagggaggaggatcccttgagtataggagtttgagaccagtctgggcaacataaggagactctcatttctaccaaaaaaagagagaaaaagattagctgggtgtgatggtttgtatctgtagttctagctactctggaggctgatgtagaaggattgcttgagcctgggagttcaaggctgcagtgagctgtaattgggccattacacgccagcctgggcaatagagtgagaccctgtctcaaaaaaacaaaatactataaatgctaatgatgacagcacttggttttttgtttttgttttcccccgaaagtcctgggattataggcgtgagctaccgtgcctggccagcacttgacttaatgctcaccctgtcccaggcactgtgctcagagtctgacaagcctgatctttttgaatcccgataccagtactgtgaggtagatggtattactgcttccgctttgtagaggcagccacagctcagaggtccagagtcacactcacagtcaccaccgagccaagtggtgccataccaccatgccgcaacaccttccctgtcttgttcttgtagattctgatgatggtgggcctgcctgctgctggcaagaccacatgggccatcaaacatgcagcctccaacccttccaagaagtacaacatcctgggtaccaatgccatcatggataagatgcgggtaaggccagccactggactctccttactcacctccaacctactgagtgctgccctgcaactaaaatcactcacccctcaccaattcctgcccgcaggtgatgggcctacgccggcagcggaactatgctggccgctgggatgtcctgatccagcaggccacccagtgcctcaaccgcctcatccagattgctgcccgcaagaaacgcaactatatcctagatcaggtacttaatgatgaccattgtgtcctcaggagaagggaggggaccccttgcatgcctgagaatctccctctggtccctttcttttt

SEQ ID NO: 21755 - DNA, 2300 bp, Homo sapien
acccaagcaggccacatcttcagaatacatttttttttttttggtccatttgtatatacccctttacagactgttttccccatctgtggcttctttcttgggtccctattagagccactaaaaaattgtttaaatgcagttaaaaactccttactccgtttctgctgagttcctgagtttccatagggagggtacctgtataggtgcctgggtcttacttctagaggttcaggctcaggaagtctcaaatgaagtttgagctgctcactttttaagtagtgtcctcgtgattcaagtatacaggctgagtctatggaaccctgaatccaacagaggtaggccccattcccaaagggcccgacatgaaggaggtgttcggtaaatggaagccgatgttgttactgctctcaaccacatatgtgctagagcaccgctctgccagcaccagcccaggacacacctgccatcacttagaggaagggaaggaaacattaggagcaaaactgcacttgcgaaaagcagagtctcctgatgtgtagagcttgctggttagaagcttgtgggtgaggctgatgtttcagagaaggactgagggaataaaagaaccaatgttaataagaacaaactacaaaactgtccaaaggagctggttaattagtagcatagctaatctataggtattacacagccattaaaaaagaatactgcacagaaaaacttcagagaaagtttcacgttacatgaaaaagcctcaggaggatgtgcataatacaattctttttgtgtaaaaaaatcacatagatatttctaaaagtgcacggaagaaattcattcttcattctctctgggaagtagggctggcactaagggaacacaggggtttttcctctaaactttatgccttatactgtgaatttttttaccaagagtatgtattagcttttagaatagggaaaagaaattgtaaggtccagtaccaagaacaaataggattaaaaagcaaagtcccaaccattaggaatcctttgccctgtgcctgtctgcagccacttacctaagtcaattcatttgctgagggtgactcaagaatcttctaagtaaagaagagctgtttcctgagtttctctgcttacaaggagcactgatatccttttctcagtccctggcctacataatacccctcagaggaaaaaaccaactcttaatgtaccatctcttgcctcttctgttaccttacccttagacaaatgtttatgggtcagcccagagacgaaaaatgagaccatttgaaggcttccagcgcaaagctattgtaatttgtcccactgacgaggacctaaaagaccgaacaataaagcgaaccgacgaggaagggaaggatgtcccagatcatgcggtcttagaaatgaaaggtaggaaatgagtgcttcccagaggaacgtcaatgcagggtcctggagagaagaagctctttactcagtttgtccttccctggctccccagtgatttcttttttgatcttactctttctttgcttctgctttgtcccttccttgtctaccacagctgtgaatggaaaagctacccatctgtcttatgttggggttttcaggctggatggggctggggcagcacaagggaaaggatgtatgggagctaaagctgaaagtcctgtgtgctcaccctgcctctggtcccagatgggctgactgtgggcaggcctcagtttgtttctctgtaaatatagggatggtgatgccatctgtctgacccattccctggggtgaggcctgagggagctgtgcactgtgtctaggtgggtcttagccacctcttcagaaaacggaggagtctttgttagcccctgacacttagcaggctgaggggttggggctttgtctacctctttctctctctctctgtttttttttttttttttttttggagagggagtcttgccctgtcacccaggctggagtatagtggtgcgatcttggctcaccgcaacctccgcctcctgagttcacccagttctcctgcctcagcctcccgagtagctgggactacaggtgtccaccaccatgcctggctaatttttgtatttttagtagagatggggttttgccatgttggccaggctggtcttgaactcctgacctcaggtgatccacccgcctcggcctcccaaagtgctgggattacaggcgtgagccaccgcgcccgcccttctgtctatgtctttcttattcactattccagttttcttcaccttctcccttctggaaggccactcttctggg

SEQ ID NO: 21756 - DNA, 2300 bp, Homo sapien
tcctctctggcgcattctagggtcccttttagccaccaaccttggttccttctcacgttctgatgccctacccgagattctgagactagtcagtttccctcccttgtttttgttgcccatctccccttcacaaggctctgagctcccaccagggaagattggggctgaattggcttctcctgtggcccagcattgtctctcacaaggagccaggaacacagcatgtatgagggaacgaagacataaggttgctaaggaaggggaagatgggccatggggatgcaatctggagtcttttaccctggctcactcctccaggaagccctccctgcacaccaccccaggctctcacagctgaccacttggtgctggcaggtctttgttctctctggagtgggagctctgtgagaacggggtccaggactgccgtggccatactatgtccccagcactgtccaggacagctgaagaacacagcaggtggctcacacacactggctgaaacatgaagctcctggaatccccatgagccccaaacacagaacaggcaggaactgtcctccgtgctgcacacaggccaggcctgaggcaggtggtctgtggatgcccagtgatgatgccaaacaaaccagccctggtctctgccccatcagtcccacccatccctccacctagaggcctgttccatgtcctttactcaaaaactcctggagggattttagactgtgagaggtagagaacaagagaagcactttaaaaatgaactagtggattttaaaccagggacccttgtttaagcgtgcatttttagcaccaaaatcggggccaggcacatgaatccctcagttaagttgtttaatgaatgagtaaataatttccctttaaagaggcccccaccccaattaacggccaactgcagtaacacttcagggtttcaaccctgcttccttcctgctaggaggtgccatgtcatttattcaaagaaaacaaaacgaaaccaaacaaaacagggcaaacacatttcttaataagtgcagtttgttaaaatcatgttaaaacatatgagtcaaggggaagtaaaaataaagggtatcactgtaggaaaagcttttgggtctggcacctgggagaccactggagaggaggcagtgggagaaacttcaagttctgaagggaaggagccccccaacctccccttcttccctctcacccactgaatcccaccagaaactaccaagacgcccggaataaaaggtttcaagttcaatagtcactctctccaaatacaaaaagcagttacaattcaactgaacacagaagcttgtgtgcaaagttatggggaactggggcatcgtataaaaagttgggttaaagatgattctgtggtttggttttgttgtgttttgttttgtggctcttcctcagtcacctgaactcaggaaagaaatgcttatcttgatgaaatatcaacagcccacccacagtaaaaagacaaattctaaaaattaaaaaaaagcgcataattaccaaaaaaaagtcactgcttcctccccctccccattttgctttttaaacttttttttttttaagttttgattttttttttaatcctgaaaagtagacagtaaaacagctcctgggagaatttacaaccaactgcatgagggtctgggaagctgaggggctggagcagggttgggagagtgaacaggaggggattctcccctcagtcactgtagcctcactgtatgatcaagggaggtggggattatttagtcaaaaaggaagaaggtaggaagaacaggaggtggaaggctggggaggtggggacaaacagaaaataaaaggtcattgttgcctgtttgaatccagaaaaaaatgcctggccctatggaggggaaggaagcccctcagaggggaggcagtgggctggagggaggcagccctgggatgaccccatccccagcaccacgggatctggcgggggcagaggaggggccgaggcaggcgctggtggaggaagccggcaggggcctccgggagcctctgggtcacactggctactgtgtacttgtgccaccctgtgtgttcccggagtagctcccgtagtcgtagttcccgtagtatggcggccactggccctggttctgatagtactggttccactgctgggcatactggggaaagaaaccaagaacaccaagttgtcctgcatccaccacacatttagcctccccaccagccccaccctcacctagggcagagacagctgcagtgacaacagttgaacacaggtcccc

SEQ ID NO: 21757 - DNA, 2300 bp, Homo sapien
tttggggctcatggggattccaggagcttcatgtttcagccagtgtgtgtgagccacctgctgtgttcttcagctgtcctggacagtgctggggacatagtatggccacggcagtcctggaccccgttctcacagagctcccactccagagagaacaaagacctgccagcaccaagtggtcagctgtgagagcctggggtggtgtgcagggagggcttcctggaggagtgagccagggtaaaagactccagattgcatccccatggcccatcttccccttccttagcaaccttatgtcttcgttccctcatacatgctgtgttcctggctccttgtgagagacaatgctgggccacaggagaagccaattcagccccaatcttccctggtgggagctcagagccttgtgaaggggagatgggcaacaaaaacaagggagggaaactgactagtctcagaatctcgggtagggcatcagaacgtgagaaggaaccaaggttggtggctaaaagggaccctagaatgcgccagagaggaggtggcagggcctttagtctggaaagtccccttcccttcatgtccatatgctgggctacagcgccctctgctggcctctcctggtaatgcctaggaatctgggttggtaaatagggacctccttggctttcttccacaactccagacctcaagggaatgcaaatggggaagctcttcctctgttctcagccagtttttctcacacgtctcatctccagtcccttgatgcccactcccttcagaataaaggaggtcaagccacttactatggcttatgaggccctgcatggcctagcacctggtaacatcgctggcgccctctctttctgctccccctttgaatatcaaatcagtgtttattttgttctgaggagccataagtcctttttggaacccacaaatgatgccatgaaccactgcattggagaatacagaggtacatggaattttgcataaaaattcatgaggttctcaaaacctccacagcccaatcatggctttcaagttagagctcctttcctatgccctgaccgtagtgaagtgcttgcagcaaccagaaccgtccgtacgtgccatcctcctcaagactcttccctaccttcctcttaacccagctcctactcgttcttcaggtcttagcttgagggtaccctcccagaaagaaggcttccttgaccctccagcctggggtggacagctccctcagccctctggatccatcaaagccctggccactgagtgacatgtctgtctactctgctggtaacacctaaatagagccccacccatcccatagggaaataaggaccagagttgtcttgtttcacacctgtagatttcctccaggtcctgggaacacaaaatgggaagttctatctcactatccatctcatgccagccagagacagggtatgatgacggaagtaagccaggctggtggctcacgcgcgtaatcccagcattttgagaggctgaagcgggaggattgcttgaggccaggagttggggactagcctgggcaacaaagtgggacccctggctctacaaaaaaattttaaaaattagccgggcgcggttgtgcgcgcctgtagtcccaagtactccaaaggctgaggcaggaggatcacttgagcacaggaatgtgaggttacttgaactgtgatcgcgccactgcattcgtctaggcgacaaagcgagaccctgtctcaaaaaaaaaaaaaaaaaaaagagtcaaggcttagtaatattcctgaattcctgaaggagttaagaaaggaaaaggacaagcgggggtctaaacgagagcacgaaccctcagcgtatgacggctccaggctccgggggaaagtcctttagccatccatcccaaaattaagcacgctgggagctggagtcacagcagtgataaaacgaacaatgattctggttcctactgactgacaggagaggtttaagggtctctcactctccggggagcccctttccttcctggctgcggagggcggagcccgagagaggcacgcatgcgcaatgcaacgtctgccttaggcccggaacttcggtgcctgggcgcagcggtgcacccggacccggaacattctcaggcgaaagtgtctcttgcgtgcgtgggccggaggttagtgtgcggggcccgccgggcggttgaaaagtccgagagaatcaggatggaggccgtggcgacggcgacggcggcgaaggaacccgataagggtgagatcttggtcacgcgcaggcggcgggtg

SEQ ID NO: 21758 - DNA, 2300 bp, Homo sapien
tgggaggtcaaggtgggtagattacttgagctcatgagttcaagaccagcctgggcaacatggcgaaatgctgtctctacaaaaaatacaaaaattagctgggtgtggtggcgccctagctactcagaaggctgaggtgggagaattgcttgagcctgggaggtggaagttgtgtgagctgagatcccaccactaagctctagcctgggcgataaagccagatcttgtctcaaaaaaaaaaaaaaaaaacacagatgtggaaatgaggatgaaaacagaaggaagatgggccgggcacagtcactcaagccggtgatcccagcactttgggagggcgaggtgggggtggacctgaggtcaggagttccagagcagcctggccaacatggtgaaaccccatctctactaaaaatacaaaaaaattagccacatgtggtggcaggcaactgtaatctcagttacttgggaggctgagggaggagaattacatgaatctgggaggtggaggttgccaaaaaaaaaaaaaaaagaagaaagatgaatgaggtgggggtaggtgacagaaactgaaaaaagcaggaaagatagaaagatggagataaaggaagagatggagagagatccagagccggggtgggtgataatccaagttggggagaaggagggatagaaactgaatctgctagaggctgggcacagtggctcagacctgtaatcccagcactttgggaggccgaggcaggcaaatcacttgagataaggagttcaagaccagcctggccaacatggtgaaaccccggctctactaaaaatacaaaaaaaattagccaggcactgtggcaggtgcctataatcccagctactcaggaggctgaggcaggagaatcacttgaacccgggaggcggaggttgcagttagagttaatcgagatcacaccactacactccagcctgggcaacagagcgagactccatctcaaaaaactgagtctgctagaggatgccacaaacagctgggggtaagattgctggcaggagtggggaagctgagcaggacagggacagtcacagcctatggtgctgcagaggccaggagtccgagcagtttctttgccctggactctgaagacacggctaggaccagtggaggggagggaccagggcaggtttaactgttatttgagggacagagtcactcgtgcagaaacaggcagccaggggtgatgcagggaactcaagttttggggtagtggggaagccaggcccacctgaggggttgctgcatagaggagcactcgagagaggatggatctagggccttccaccaccaggaggctttcccagggatacacgggcagatgccccacctgacctgatcccttgcacacacatgccaaatccacgtggatgtacacacatacacgccccacagtgaaggcgtgtccactgccagccagactagggccccacaaacaggcacacaacctagagacacacaacttctgctgcattgtcctgcatgctgacacccagacagacaggtgtctgtgggcatatgctgggcctcacaggacatgtgtgtgtacataggccatgtacacgtccatgggcaggagcttgtgcatcgtgcctggacacagttgtacacgagctccagaccgtcagagcctcagaggccaggatgtagccaggtctgcccatgcacacacatgcttggatgcatgaatacatgaatacacaggaagatagaggccgggccacatacacacactcaggtgcctgcacgagtaatcacatgcacatgacctcaggtgcctgcatgagtgcttgcgcacacagcttcaggcacctgcatgagtattcacgtgcatgcctcaggcgcctgcattattcacacgcacgcctcaggcgcctgcatgagtactcacgcgcacctcaggtgcctgcatgttttcctgtgtttttgaatgtgtgcatacacacacttggactgtgtatgcacatcatcccacaagcatgatcacacacatacccacatggacactatctgctcagtcgctcaccccatgcccaccctgtctctcctctgtgcagggggcgagtacttcagtgatgagcagatgcggttccgggcccccctgctatatgagcagtacatcgggcagtatctcacccaggaggagctcagtgcccgcaccccaacccaccagccccccaagcccgggtcccccgggagacctgcttgcccgctctccaacttgctgctccagtcctacgaggagcgggagctacagcagcgt

SEQ ID NO: 21759 - DNA, 2300 bp, Homo sapien
atggggtttcaccatgttggccaggatggtctcgatctcctgacctcgtgatccacccgcctcggcctcccaaagtgctgggattacaggtgtgagccaccacgcccagccctgactgtgatactttttagctgtgtgaccttgaggaagtggtttctccccctaggtttgtttcctcctctgtaaaataggtcctaaccacattcctctctcatgtagcatcatctctcaagtcgactaaggctggcaccaaggggaaccactctgtttgctctggccttccttgccccaaatgcaagagcccctaaaatgcagagtaaggatcaaaggcacaggctttggactcagatagtgcctctgctgcctcttggctgtgtgaccatgggcagttaacaccctctttctgaatgtcagtttcctgttattctttgaaaaacagcaataacattaagctccctgcattcccacacagactctcctaatttaagcgctgtgtaaccttgggcaagtgaattcctctctctgagccaggtgtaagacaagacagagtgactctagaacccattccagtattatagtgggaaattagatgacccaggtcaagccatgtggcaccaattctgcatacactggtcactcaatcatgtatacgtctaagagtgctggctgggcgcagtggctcacgcctgtaatcccagcactttgggaggccgaggtggattgattacttgaggtcgggagttcgagaccagcctggccaacatggtgaaaccccgtttctactaaaaatacaaaaattggccaggcatggtgccggacggctctaatcccagctacttgggaggttgaggcatgagaatcgcttgaacctgagaggcagaggttatagtgtgccgagattgcgccactgcactccagcctgggtgacagagtaagactctgtctcaaaaacaacaacaacaaaaaaccacaaaacagcgctatttaccagatgctatctaaagcactttacaaagatgaagacatttaaacctcacaaccttatactattattatacccgtttaatagatgagaaactgaggcaccgagattaagtaatttgccccaaggtcacatagctgcagactgggattcaaactcaagctgtctcattccagagactgtgctttttttttttcttcccccaagagacagggtctcactctgtcccccagacggaagtgcagtagcacaaccatggctcacggcaggctggaactcctgggctcaagggatcctcacgcctcagcctcccaatatgttgagatcacaggcatgagccaccacacccacccagctagagactgtgctcttaacccctaagtgattcttctacttatttttattattagttttccacccttaactcccttccccagctggttagggaaagtgaagttcattctgggtaggaatggctgtagtggggagaaaaggaattaaggtgttttcttttctttttttttttttttttttgagatggagtttctgtcgcccaggctggagtgcagtggcgcgatcttggctcatagcaacctctgcctcccaggttcaagcgattctcctgcctcagcctcccaagtagctgggattacaggcgccgcccgccaccccgcccagctaatttttgtatttttagtagagaccgggtttcaccatgttggccaggctggtctccaactcctgacctcaggtggtccacccaccttggcctcccaaagtgctgggattacaggcgtgagccaccgcgcccagccaaggtattttctagtttaggaaaagtttggggatggggatgagggaacaggccatgaactgctggatcaactggggcaactgcttccagcctcccatagtgggggtgtgaaaagagactggtgagaaaggcagaggaaacccctcccctacggcccccttcgatcctcctcctcctccccagtctccctccccacccagccccagtaagccctattcttggcccggaggttactcagcaaaccccaaaggaaaggcagagccttggctggggaagacagatagggaggaagacagagaggagggagaggaagggttggagggtgatgcagagagggagaggcggggagatgtcagagacggagacgaggcaacaggaccgtggaggagaaaaatagaaagggagagaaaatagtcggagagacaaaaaccaggagacccatgcgtggacagaaagactaacggagacgaaaagaaagaggcagatggggagacacgtgcgaga

SEQ ID NO: 21760 - DNA, 2300 bp, Homo sapien
gggctccagccatactgtccccaccagacagtccccccccagggccttggcacttgctgttccctctggctaggagcactcttcctctagatggccacatggcctactcccttccttccttttagcatttgctcaaatgtcaccttcttaatgaagcttccttgatccccttcttgctaaagcggtatccccaccctcaccctacccagctctgttttccctcacagcaattaccaccatctgatctaccctataatttgcttatttactacattcgttgtctaggatatcagcttcacgggggcaggaatttttgtctgccatccatgttcatgtctgccgtgtccccagctagctagaacagagtctagcacaggagaagggatcagcatgagatgagatggggctggatctccaagggctttgactaccagactgaggagctgaactgtgttctgaggacatgggcaaagctatggaaggagagaaagatgcttccagatgccaggtggaaggtggattagagaggggcaagaaagaaggccctgggcccaaagagagcagggcagggacatgagggaaggcaggaggtgtccctgacaaggcccatgatggttacctggggactggaggagcaatgggctgccctgacatggggtcatggaggaggataacacagagaggaaattcagcagaggtctgattagaagggccttgaatgttgaagaggttggactttatactgagggcactggggagctatggaaggatccttagcaggggagtaacatggatttggaaagatcactttggctgctgtgtggggatagataagacggtgggagcctagaaaggaggctgggttggaaactctgggacagaaacccagagaggaaaagactgggcctggggtctccagtgagtatcagggagtggggaatcagcaggagtctggtccccacccatccctcctttcccctctctctcctttcctgcaggctggccccggctccatttccaggtgtggtcccaggacagctttggccgctgccagcttgcaggctatggattttgccatgtgcccagtagcccgggcacccaccagctggcctgccccacgtggcggcccctgggcagttggcgagaacagttggcacgggctttcgtgggtggtgggccgcagctgctgcatggggacaccatctacagtggggccgaccgctatcgcctgcacacagctgctggtggcaccgtgcacctggagatcggcctgctgctccgcaacttcgaccgctacggcgtggagtgctgagggactctgcctccaacgtcaccaccatccacaccccggacacccagtgatgggggaggatggcacagtggtcaagagcacagactctagagactgtcagagctgaccccagctaaggcatggcaccgcttctgtcctttctaggacctcggggtccctctgggcccagtttccctatctgtaaattggggacagtaaatgtatggggtcgcagggtgttgagtgacaggaggctgcttagccacatgggaggtgctcagtaaaggagagcaattcttacaggtgtctgcctcctgacccttccatccttcaggtgtcctgttgccccctcctcccactgacaccctccggaggcccccatgttgacagaccctcttctcctaccttgtttcccagcctgactctccttccgttctgggtccccctcctctggtcggctcccctgtgtctcatcccccggattaagccttctccgcctggtcctctttctctggtgacccacaccgcccgcaaagccacagcgcatctggatcacccgctttggtggcgcttggccgccaggaggcagcaccctgtttgcggggcggagccggggtgcccgccccctttcccccagggctgaagggacccccctcggagcccgcccacgcgagatgaggacggtggcccagcccccccatgccctccccctgggggccgcccccgctcccgccccgtgcgcttcctgggtggggccgggggcggcttcaaaaccccctgccgacccagccggtccccgccgccgccgcccttcgcgccctgggccatctccctcccacctccctccgcggagcagccagacagcgagggccccggccgggggcaggggggacgccccgtccggggcacccccccggctctgagccgcccgcggggccggcctcggcccggagcggaggaaggagtcgccgaggagcagcctgaggccccagagtctgagacgagccgc

SEQ ID NO: 21761 - DNA, 2300 bp, Homo sapien
gagctgtctacctcacccacacagcatccagaaataaataaataaataaatacattttccccagctccagcttaaaggacagaaagatcatttaaaagtgaaacctctgccaggtgcagaggctcactccagcctgggcaacagagcaagattctgtctcaaaaaaaaaaaaaaaaaaaagtaaataaataaaataaaaaagaaaatacaaaaagtagctgggcccaggcgaggtggctcatgcctgtaatcccagcactttgggaggctgaggcagaaggatcacatgaggccaggagttcgagaccagcctgaccaacatggtggaactccatctctactaaaagcacaaacattagctagatatagtggtgggtgcctgcaatcccagctactaaggaggctgagacagaagaattgcttgaacctgggaggcggaggttgtggtgagcagagatcatgccactgcactccagcctgggcgacagagggagactctgtcaaaaaaaaaaaaaaaaaaaaaaacccggccggtcacggtggctaacgcctgtaatcccagcactttgggaggctgaggcgggtggaccacctgaggtcaggagtttgagaccggtctggccaatatggtgaaaacccgtctctactaaaaatacaaaaattagctgggtgtggtggtgcacgcctgtagtcccagctactcgggaggctgaggcaggagaatctcttgaacccgggaggcagagattgcagtgagctgggatcgcaccactgcactccagcctggatgacagggggagacgccatctcaaaaagtaaaaaaccaaaattataacgagggtacaacatttcaataggataacatttatattaaacaattcaatggaatacttcactagttgatatatgcattattaatggggtctccctatattcgaacttctggcctcaagagctcttcccgcctcagccttccaaagggctgggattacagttatgagccaccgcgcctagccaatggtagcttgtaaatactttgtatctattggcctggctgggtggctcacgcctgtaatcccggcagtttgggagggagaactgggaggatagctagagcccaggaggtcaagacaagactgggcaacatagcaacatagcaggactccatctcttaaaaaaaaaaaaaagaattagccagccgtggtggtgcatgtctgtgataccagctacatgggaggctgaggtaggaggatcccttgaacccaggagttaagaggctgcaatgagctgtgatcgagccaccgtactccagcctgggtgacagagtgagacccttttaaggagccttgatgggacctgatgactggcttgatgtgggaaatgatggcatctaggatggcatccagggacaacatctccatttcttgattgataaatcaatcaataggaaagaggattttctgcaaataagggaatcttagttcctcatttctcttcgctaccccaaccgctccttgctcagaatcaagcagtaacagtgaacttggtagtagctccgagaaggaagttggacttatccaacttccttccttccttgtccttgagaaacctaggggaactctaaaacggaagcagaacccactccccaacttctccactctctgaatgaggagtgatttttttgctttgttttccagttacaaggccggggatgtacacgaggtcctggaaggaattcccccttggtcctggttcaatctctgatttgtgatcccggaccacagagagctcttcggtggggtaggcgcagcacggagcagttagggatttgcttttttggtaaagaaggtatctgggagaaactgcactcaaacttcctcagccacactcaacatggcagcttcctagccacgcccaaaatggcggaaccctttgccgtagctggagagacgctattttcccaaaatggagcggaggaggaaaatgtccatcacagcttcaccccgccccccgcagacggctagcaccaattagtagcgcgcagagcgagtacaaagctaggggaggagcctgctgttgccccagcaacaaccacggaaaccaagacgagcgcggtcgcggaagtatcgcggcttacatatctcgcagccaggcgggtcctgggagaggcgcgagccaggcctggtcggcgcccgcggagaaaagaagcagtcaagcccatgaactacaaccccggttgccgctttctcctctcctaaccgttaagtgcgctaaggtaggaatgacgcatgcgctgcgct

SEQ ID NO: 21762 - DNA, 2300 bp, Homo sapien
aaactggctgagccaagtgcacttgcagacgccatctgttctccctgggagtggggccggtgccagcgccagcatctggactcttggcaaggagccctggagccctggagcgagggaactccggccccacaaaggccagggaatcctccagtctggtgagacggagggcttctgggaagggaggcctatacaaggctccatgaaggaggtggaagcttgcaagacgatgatagtcttgtaatcagtccgatggagatggatgtaaataataatattaataaacaccatcaaatgtgttcagagtgctttctttgccaggctttggataaatgttggatatctgttctttttattttttatttttctatttcctaggcagcacctaaaccaaaataggttcagagaggctcccaatgttggacatttgttgttgcagcaactctaagtactctacatatgttatcacataagaggcaaggagcattatccccattttgtaggtgaagaaataggggttcagagaggtgaaggcattgtctagaggccacacactcagtgacttaaagagcctggaaaggggccaggaatggtggctcacacctgtaatcccagcactttgggaggctgaggcgggtgggtcacctgaggtcgggagttcaagaccagcctgactcatatggagaaaccccatctctaccaaaaatacaaaattagccaggtgtgatggcgcattcctgtaatcctaactactcgggaggctgaggcaggagaatcgcttgaacctgggaggcggaggttgcggtgagccgagatcacgccattgccctccagcctgggcaacaagagtgaaactccatctcaaacaaacaaacaaagagcctggaaaggaaaccaggtctatgtgggtccaaatgctgactcatgaacatcactgtaccacgtgacaatcagagcatcaccccctactggaccccactcctcagccttctttccctagaaactcctaacccacctgcctctgcttcctcctcacccattggcttagcaagggccacaggaacacagcccggggttacaatatgctgggcttggtaccagctgtttactgtggccaagtgagcatgcaagtgagcccgtttattttcttttctttttttttttttttttttttttttgagacggagtcttgctgtttcccaggctggagtgcagtggcgcgatctcggctcactgcaagctccgcctcccgggtccacgccattctcctgcctcagcctcccaagtagctgggactacaagcgcccgccaccaagcccggctaattttttgtatttttagtagagacagggtttcaccgtgtcagccaggatggtctggatctcctgacctcgtgatccgcccgcctcggcctcccaaagtgttgggattacaggcgtgagccactgcgcccggcccgtgagcccgtttctttatctgcaaaacagggattaaaaacaagccaacaccccttcagcactcctccgcaaaaaaacaccccaaaacaaaataggccaggcgcggtgactcacacctgtaatcccaccgctttgggaggccgaggctgcagtgaacccaggagtctgaggctgaagcgagcaatgattgcgccactgccttccagcctgggcgatcagagcaagaccccgtcttttaaaaaataataataaaaaaaaaatctgccgggcgcggtggctcacgcctgtaatcctaacactttgggaggctgaggcgggcagatcacctgaggtcaggagttcaagaccaacctgaccaacacagcgaaatctcatctactaaaaatacaaaaattagctgggcgtggtggcttgcccctgtaatcccagctactcgggaggctgaggcaggagaatcgcttgaacccgggaagcggaggttgcggtgagccgagatcactccactgcactctagcctgggcgacagagcaagactccgtctcaaaaacaaaacaaaacaaacaaaaaaaccaaagtaaaatagcagcgacaacaacaacaacaacaagaaaaacccggagctgagaggaagaatgaatgcgatgatgaatgtaaagcgtttaacacagggcttgggtacagtctgccctcaatgaaccaatgatgtacccctaggcaatttacctaacctcggcttgccagtttcctcccgcgtgaaacaggacaataaacgattatgcctcttagggttgtgctgaggaatacatgtgtatgtaagtttatttgcaaagcacttagaacagggcg

SEQ ID NO: 21763 - DNA, 2300 bp, Homo sapien
ttgtctagaggccacacactcagtgacttaaagagcctggaaaggggccaggaatggtggctcacacctgtaatcccagcactttgggaggctgaggcgggtgggtcacctgaggtcgggagttcaagaccagcctgactcatatggagaaaccccatctctaccaaaaatacaaaattagccaggtgtgatggcgcattcctgtaatcctaactactcgggaggctgaggcaggagaatcgcttgaacctgggaggcggaggttgcggtgagccgagatcacgccattgccctccagcctgggcaacaagagtgaaactccatctcaaacaaacaaacaaagagcctggaaaggaaaccaggtctatgtgggtccaaatgctgactcatgaacatcactgtaccacgtgacaatcagagcatcaccccctactggaccccactcctcagccttctttccctagaaactcctaacccacctgcctctgcttcctcctcacccattggcttagcaagggccacaggaacacagcccggggttacaatatgctgggcttggtaccagctgtttactgtggccaagtgagcatgcaagtgagcccgtttattttcttttctttttttttttttttttttttttttgagacggagtcttgctgtttcccaggctggagtgcagtggcgcgatctcggctcactgcaagctccgcctcccgggtccacgccattctcctgcctcagcctcccaagtagctgggactacaagcgcccgccaccaagcccggctaattttttgtatttttagtagagacagggtttcaccgtgtcagccaggatggtctggatctcctgacctcgtgatccgcccgcctcggcctcccaaagtgttgggattacaggcgtgagccactgcgcccggcccgtgagcccgtttctttatctgcaaaacagggattaaaaacaagccaacaccccttcagcactcctccgcaaaaaaacaccccaaaacaaaataggccaggcgcggtgactcacacctgtaatcccaccgctttgggaggccgaggctgcagtgaacccaggagtctgaggctgaagcgagcaatgattgcgccactgccttccagcctgggcgatcagagcaagaccccgtcttttaaaaaataataataaaaaaaaaatctgccgggcgcggtggctcacgcctgtaatcctaacactttgggaggctgaggcgggcagatcacctgaggtcaggagttcaagaccaacctgaccaacacagcgaaatctcatctactaaaaatacaaaaattagctgggcgtggtggcttgcccctgtaatcccagctactcgggaggctgaggcaggagaatcgcttgaacccgggaagcggaggttgcggtgagccgagatcactccactgcactctagcctgggcgacagagcaagactccgtctcaaaaacaaaacaaaacaaacaaaaaaaccaaagtaaaatagcagcgacaacaacaacaacaacaagaaaaacccggagctgagaggaagaatgaatgcgatgatgaatgtaaagcgtttaacacagggcttgggtacagtctgccctcaatgaaccaatgatgtacccctaggcaatttacctaacctcggcttgccagtttcctcccgcgtgaaacaggacaataaacgattatgcctcttagggttgtgctgaggaatacatgtgtatgtaagtttatttgcaaagcacttagaacagggcgcacggtccttgttgctgttattattattggctattattgcgcaaaggggaagggaggcggggccaagccaggaaggccctggagaatccggggtgccccctcctccggcagagcttgggcctgggctcacgaggaaggggctgcagttctccaaggattcccgcctgctcccagacccccgggagtcgtaggaacccgttcctggacgctgacgtcggctttcagggatccctcgccggacgccgcggagggacagagcctgggaagccgtcgccccgccccgtccccgcccccgcgcgcagcgggcccggggcgctgagacccgcgtagagcaaagcgcaaggtcccagcgccccttggatcctcggtggcagggtccgggcaagtgtcattgcgagggttcaggaagccccggcctgtgatcgtgagcggtgagtgagggacgtaggtgggtgggggtcacagtcccttccctgggtcctggagttggggatgagagggcaaagctttggcgaggaaatcggctcagtcaa

SEQ ID NO: 21764 - DNA, 2300 bp, Homo sapien
ggggttacaatatgctgggcttggtaccagctgtttactgtggccaagtgagcatgcaagtgagcccgtttattttcttttctttttttttttttttttttttttttgagacggagtcttgctgtttcccaggctggagtgcagtggcgcgatctcggctcactgcaagctccgcctcccgggtccacgccattctcctgcctcagcctcccaagtagctgggactacaagcgcccgccaccaagcccggctaattttttgtatttttagtagagacagggtttcaccgtgtcagccaggatggtctggatctcctgacctcgtgatccgcccgcctcggcctcccaaagtgttgggattacaggcgtgagccactgcgcccggcccgtgagcccgtttctttatctgcaaaacagggattaaaaacaagccaacaccccttcagcactcctccgcaaaaaaacaccccaaaacaaaataggccaggcgcggtgactcacacctgtaatcccaccgctttgggaggccgaggctgcagtgaacccaggagtctgaggctgaagcgagcaatgattgcgccactgccttccagcctgggcgatcagagcaagaccccgtcttttaaaaaataataataaaaaaaaaatctgccgggcgcggtggctcacgcctgtaatcctaacactttgggaggctgaggcgggcagatcacctgaggtcaggagttcaagaccaacctgaccaacacagcgaaatctcatctactaaaaatacaaaaattagctgggcgtggtggcttgcccctgtaatcccagctactcgggaggctgaggcaggagaatcgcttgaacccgggaagcggaggttgcggtgagccgagatcactccactgcactctagcctgggcgacagagcaagactccgtctcaaaaacaaaacaaaacaaacaaaaaaaccaaagtaaaatagcagcgacaacaacaacaacaacaagaaaaacccggagctgagaggaagaatgaatgcgatgatgaatgtaaagcgtttaacacagggcttgggtacagtctgccctcaatgaaccaatgatgtacccctaggcaatttacctaacctcggcttgccagtttcctcccgcgtgaaacaggacaataaacgattatgcctcttagggttgtgctgaggaatacatgtgtatgtaagtttatttgcaaagcacttagaacagggcgcacggtccttgttgctgttattattattggctattattgcgcaaaggggaagggaggcggggccaagccaggaaggccctggagaatccggggtgccccctcctccggcagagcttgggcctgggctcacgaggaaggggctgcagttctccaaggattcccgcctgctcccagacccccgggagtcgtaggaacccgttcctggacgctgacgtcggctttcagggatccctcgccggacgccgcggagggacagagcctgggaagccgtcgccccgccccgtccccgcccccgcgcgcagcgggcccggggcgctgagacccgcgtagagcaaagcgcaaggtcccagcgccccttggatcctcggtggcagggtccgggcaagtgtcattgcgagggttcaggaagccccggcctgtgatcgtgagcggtgagtgagggacgtaggtgggtgggggtcacagtcccttccctgggtcctggagttggggatgagagggcaaagctttggcgaggaaatcggctcagtcaaggtttggaatgagcaggcaggaggcttggggaccttccagggggatcgtaggacgagaagaagaatattctttctggttgtgttgcgtgtgtacgtgtatgtgtgtgctggggttgagggtgtttatgggggcgaggtgtgcaaaggattctggagagctggtgcatgtgtgggagttgtgtggagtcataggtgtgtgggtggagtagggcaggggtgcctgggcctgatgagtggggcaggcatgccagaggtcatgagaataggagagagtgccggggtgcatgtgtgcgtgtgtgcacaggtgtctgtggtttgtgatgcagtggggagtagggttgtgcacggagtcaattgggataaatgtgtaagaaggttggggacctgaaaggggtgttttctgggagctgatgttttggggcaaatattcaaggagtcctttgggagatgaatgtgtggaggtggaggctgggcttgcctagatggggctgtgtggcaggggacttcggggggcaggtctaggggacagaggatg

SEQ ID NO: 21765 - DNA, 2300 bp, Homo sapien
tgagtctcctttgctagcttgtcacatgtctctgactgctcaagttggaaggcctagggcttggtcctgggacctcttctcttttccatctacactcacttcgttcaggcaatagcctgaaataccatctatatagccagagagttccaaattgcctatgtccagcttgggtctctcttctgatttccagacttgtacagatctgggcagaaaccttagttatgcctgaatctttttcctcgcactcaaaccaaactatacgtaagttttgtccgtattactttcaaactacatccagaatctcatcacctccactactcctgctctggctggagccaccatcacctccctgttttcccccatactccccacaatcaacacagcagccaaattttgttaaaatgtattggggctgggcgtggtggctcatacctgtatgagcactttgggaggaggattgcttgagcccaggagttcaagaccaacctgggtgacatcgtgagacgctgtctcaattttttttttttttgagacagagtcttgctttgtcgctcacgctggagtacaatggcacgatctcggcccactgcaacttctgcctcccaggttcaagtgattgtcctgcctcagcctcccgagtagctgggattacaggcgcccgccaccatgcctggctagtttttgtatttttagtagagacagggtttcgccatgttggccaggctggtctcgaactcctgacctcaggtgagccacaggtcttggcctcccaaagtgtggggattacaggcgtgagccaccgcccccggcctcccgtctcaaacgttaaagagaaatattcttggagttaatctacttctgagagttatttagctaggaaaaggggatatttgctctataggtaagacttgccctaatcttttttttttttttttttttgacttgccctaatcttagggatatttacttgtgtggagagatgcagtgaggtagcggtggggatgtatttctcaacccagcgcaatgacattatcttcaatttgaggagtatttacgtgggtgaaagatccgccacagtccacagtatgcaaatagacaggtttgcttcagtccgggatgcaaggacctagagggtgtgtgtgtggggggtgggggtgggagggtggaggaggaatcgagttaagggggatatttaccctggcgaggtgattttccctattctgaaatatcaattcttgggcggacagtctgcccctcctctcattctcagagatagttacaaagatggaactatcttctcctttctagtcgtgagggagagatgtgtgtatccctgcgtatttagtagtattcaatcggacaagaaatcatgcatcaacgcaggagtgacatttaccagctggtatcgtgaggaggtgggcactcggttgcacagtacacggtagtccctctccaaaagaaagacctgggtgaagttcttaccttgcaggaaggaagcagagccatctggccgcgacagcaggttctgttcgcaggcaaagtgccggaggctgcagccaggaccccgagggctggaccctgttccattttcagcacggattttggcgtcagtatgcgtctcctcctccatcgcgccgagcccacgtgcggctgcagttgtcacttccgcctggcagcgcgcgccgcaaacaggctgcgtaaccagtgcgcacgcgccgggctgggccatcctcctgggcgtccgcacgtggcttagcgtttaccaacaatctggctccgcccagtcccacctcctaactctggcaacgccattggacatttgggaacagaaggcaggccttggcattgatccgctttactctgggcccccgggccctaaatccctgaggccctggtcaggttgccctcttctttgcctgttacaggagtaactacaatgaggcgattggagaaaattttgggtagatagatttttttttctccaaatctctgtgcattctatctaccacagaacgggaagaagatggttttcttgtcagatggtgctggagtttgcgtcaggcacataaagaggcagccccgaatctagcctacgtgagtgccggaccgctgagtggttgttagccaagatggcggtagcgatcgctgcagcgagggtctggcggctaaaccgtggtttgagccaggctgccctcctgctgctgcggcagcctggggctcggggactggctagatctgtgagtacctgggccccaggcggttttcccaaaggggattagggatgtaaaggctatcttcag

SEQ ID NO: 21766 - DNA, 2300 bp, Homo sapien
aaaagtagggacttcttccctccccactccccaccaaaaatgaagtaggggaagcaagaggaaaggtaatcaagagattgagacaggagagaaagatttaatcagccataaatgacctttccctagcctgccccagtcctgcccacctcctgccccacttgcccagccaatgggcccctgggactgagatcagctgtggaggatatgaactgctcaaaaaaaaaaaaaaaaaaaaaagtgaaaaggtctccagcccaaaggcaagagactgccctacccacaccttgctcctgcagcccttctgtatttacctgtttcaagtgactccgttcctagatacctactacgtcctactcctggcccatcttcttcaccctcctcccgtttgttcccctacccagagcttctttctacagattccatcttcccctccttatggattggggatcagaggatcagactcaacctcacaatatcttttcagatttttttccccagggcctcaccaatccaggccttcccaaggtcacccctttcttctccccatctccaaggttagtttctgtcccttccctccaccctcactatcaacattcctattgcccttaggatgtgccaggtccagtccttagcattttacatattgatttttcacagccctatgaggtggccactgttaatattttagagaggaaaattagctccatagatccagagaagtgcagtccgttggccaaggctacacaagtggaaagcggcagagcaaggacatgcatccacccatgtaaccactactctcctatctgtcaactgtagttcaaagctcttctgcaacccattgcctctccccgtctaaagataggcttccacctaggttttttgcagtgtaatcttgcccttagcagcatccacctgaagggattgtgacccttttgacaagaaacaaagccttctcaagtgtttctaagaaatgtgggcaaagtgccctgtctgtacctctctccctccttttttcccctcattaattcaacaaatattaatcgtctcctctgtacagtgtccagaacacacgaattctctgtcttgatattcgatcaagagacacaggaatcaaacaaattttttacacaattcattttaaaatcagaattgtggcaaaggagcaaagaaatacaaggccctatgcagcctgtgacagggacctgttctcttctttcttcttcttgaagagggatctttgcccagaagaaagtccctcccttacaaagtcagtttcattctccaaaccctgagggagaaggtcttgcggtcttcccctgttcctccaaggagcctcccctgaataccagtggcagctaataaggaacccccatctctctcttcaagtcgtctccctcagggcccacaaagaagttgcaaacgggttttttcctctcctaaagaagtggaagttcttttcgtctcctaaggaagtggcagatcttcccttcggtgtcttctccaaggagtctcccactctttttcccttttgtgacagcccttccttcatatccttcagggaccccacactctgaagatagcctttacatccctaatcccctttgggaaaaccgcctggggcccaggtactcacagatctagccagtccccgagccccaggctgccgcagcagcaggagggcagcctggctcaaaccacggtttagccgccagaccctcgctgcagcgatcgctaccgccatcttggctaacaaccactcagcggtccggcactcacgtaggctagattcggggctgcctctttatgtgcctgacgcaaactccagcaccatctgacaagaaaaccatcttcttcccgttctgtggtagatagaatgcacagagatttggagaaaaaaaaatctatctacccaaaattttctccaatcgcctcattgtagttactcctgtaacaggcaaagaagagggcaacctgaccagggcctcagggatttagggcccgggggcccagagtaaagcggatcaatgccaaggcctgccttctgttcccaaatgtccaatggcgttgccagagttaggaggtgggactgggcggagccagattgttggtaaacgctaagccacgtgcggacgcccaggaggatggcccagcccggcgcgtgcgcactggttacgcagcctgtttgcggcgcgcgctgccaggcggaagtgacaactgcagccgcacgtgggctcggcgcgatggaggaggagacgcatactgacgccaaaatccgtgctgaaaatggaacagggtccagc

SEQ ID NO: 21767 - DNA, 2300 bp, Homo sapien
gtgatctctcggctcactgcaacctccacctcccgggttcaagcgattttcctgccttagcttaccgagtagctgggattacaggcgtgtaccaccacgccaggcgaatttttgtgtttttagtagagacagggttttgccatgttggccatgctggtctcaaactcctggcctcaggtgatccacccacctcagcctcccaaagtgctgggattacaggtgtgagccaccatgcccggcccaaaagtttttacttctttggaatggggtcatctaattggacccagagtaaacaggcgatcttgaacccccaagtcactccaagcgagtgacttatcagcatctgaggaacctaccagccttcctgtgcttagaaaccttgtgatgtggccaggcacggtggctcacgcctgtaatcccagcactttgggaggccaaggcaggcggatcatgaggtcaggagttcaaaaccagcctggccaacatagtaaaaccccatctctactaaaaatgcaaaaaattagccaggcgtggtggcgagcacctgtaatcctagttactcggaaggctgaaccctcccgagtaggaggatctcttgaacccaggaggcggagaggttgcagtgagccgagattgcaccactgcacaccagccttggcgacagtgcaagactccatctcaaaaaaaaaaacagaggccgggtgcagtgcctcatgcctgtaatcccagcactttgggaggccgaggcgggtggatcacaaggtcaggagatgaagaccatcctgcctaagtactctactttagtagaaatagtgaaaccctgtctctactaaaaatacaaaaacattagccgggcatggtggcgggcgtctgtagtcccagctacttgagaggctgaggcaggagaatggcgtgaacctgggaggtgaggcttgcagtgagcggagatcatgccactgcactccaacctgggtgacagagtgagactccgtctcaaaaaaaaaaccttgtgatgacctcaccaggggcagacaccttgaaagtggtcgtccttttttttttttttttttttttgattagcggtaagatctcactatgttgcccaggctggtcttgaactcctggaaagtgatccttccctcttggcctcccagagtattgggattacaggggtgagccactgtcccaccacagttttttttttcttatggccagctcttatacagaaataacagatacaccccattcttcttaagactcaccacagcgccccttgctgcctctagacccataaatacctagggtgaaatcagcttgctccaggtgaacaggtgccagctaggacctaggcgggagcagcttttacactataagaatgacaaggcttcgcaaatatacagagtcagaaacttggggaatgtgtgcagaaggggattttaaggatgttacaccaatgagggtggatgtaacactagctcaggccaaatttactggcatgagtgcgctttctagagcttctggatttcatgggttaccttgtgcagctggacgtagttctaatagcttgcttgggtgcctaaccggaacttggatccaacagtggcctaaagttaatgaggcagagagaccagaactgccctagcataagatgggtgaggggagtcccaaggcttggggagacagaagtgttggattggaatgatcgtgttccaccagcatgtccaccctccaaccatgttccccaagaaggcaccccttagtggccaatcccatgagagttaatcattctgtatattgaactttccctattcccattcctgtgtggtttctctctcctgattggacccggactgaggcacatggcaaaggcaaaaagaaaggcaccttgtgaagcttcctaatgcttccaggaggagcagcaccccctgcccccagaagctagatgagctcagggggcctggagtccctctcccccagccccagagtggagtgggcttgcagactccctcaggaggtgctcgggcccctgcccccagcccctagctgtcatttcccactccaactattattccattaatattcaccacttcctccccactctcttcctccagctgttcccacaggctccattattcaaactttgggggaggaaatcagggctggacagatcatcaactgctgctgctgacagactgtgttcctgccatgatggggacaggcctgccccaaaccagggtggagtgaaggggtcagcccaggcttagtgggagccccttagtcttaccccatgtcttgggagg

SEQ ID NO: 21768 - DNA, 2300 bp, Homo sapien
aggctggtctcaaacccctgacctcaggtgatctgcccacctcggcctcccaaagtgctgggattacaggcgtgagccaacgcgcccagccccaagtcccttttaccatagaaagtaacatagtcacagtgcccagggattcacaggtatggggagagggttcgttattcagctgccacacccaccttcctaaacctgctgcccttccagtttcctcacgtgcacagccacgcccgtctgcttttagtttctcaatctgttggcttaaccttcaaaacaggcccaggatttgagcacttctcaccattccctctgccccatccccattcatctcttgcctagactgctacagcagcctcttttactggtcccctgcatccacccttgccctctaaggcaagggtccccagtccctgggccaaggaccagtaccagcccctcgcctgctaggaactgggccgcacagcaagagatgagcagcgggtaagtgagcattaccgcctgagctccgcctcctgtcacatcagcagtggcattagattctcataggaggcaaaccctattgtgaactgtgcgtgcgggggatctaggttgcctgctccttatgagaatctaatgcctgatgatctcaggtggaacagtttcatcccaaaaccatccccaccccacccccgacccccagtctatggaaaaattgtcctccacgaaaccagtccctggtaacaaaacggttagggaccgctgctctaaggtacattctccacctggcagaaataatctttacaaaatgtaaatccgattttgacactcccttcttcccactgtgaatagaataaaaccctaccaggcctgcaccgtcagcccctgcccacctctcaacccagtctcctatctctgtctgcaagctggttcccacctcaaggcctctctgctctagaggctacctctccctgcagcgcttttcccctagatctttgaatggctctttccttatcattcacttctacttcaatgtcacctcttcagagaggcctttgctgatggccctacacccagtcacttttttttatctgcttctcatcaaaattgccttgctgattcctttgtttcttattcatcctctcccacatccatcctctcccagcccagaatgttgacttcctgagagagggactgggtctgtcctgctcaccatggtaacctcggcatctagaacagtgcctgccatcacgtggtaggtgctcagtaaatattcttggaactaatgaatgaataattctatccacaagacttcacaatggctcttcatgctgcgatctagctttcaactccaaactggtcttgagatctcacctcagtctctaaccttgacatctaacctcttcacccactctcttacctgaccctaatttttaaaaatgacgtggtcagcttttcagccccctcattccctgtttttaggaggtagtgagtggaagctggaagaataagaaagcttggggagactgcaattgcagtcaggaaagaaaggtactctgccgggaagaacaccccatcttctcctagggaaagattgtggagtcctggggtttgttttgtttttcaattttttgttttaagagacagcgtctcgctctgtcacccaggctggagtgcagtggcgcaatcacagctcactgcaacttcgacctccccggctcaagtgatccccccgcctcagcctcgtgagtagctgggaccacaggcgtgcaccaccacgcccggctaacattttattttttgtggatataaggttgccctatttctttgtggagataaaggctcccctatgttgcccaggctggtctcgaactcctggcttcaagcgatgctttcgcctcggcctccacaaagtgctgggttcacaggtgcgtgagcccgacctgtgtctcgttttgaagctcagggagagggcgctgtgagcaatccctaaaccctttaagagtaaaaagtgcgtgcacctttaagaggacggttagaaaacgcggggcgtggccacaggagaataagttcgcgctgaaccaggagcgtgggataagaccggccccttccggttacgaaaccttagcaagatggcggctccctgggcggtaagtgaccggagttcctagagccccaaatttgaagtccgctctacagcctccgcattcagggcctctgttggcggccacgagagcagaaagccgtgaggcagcaggctaagcctggcaagccccgtactgggagtgcaaacctgtggctagtgggggccaggaaggatc

SEQ ID NO: 21769 - DNA, 2300 bp, Homo sapien
ctctggcttgcccatagcttggtccttgcttgtcctcttggcacgggtcatcctagggctttcccaccagtgtgcctttgggggcaggaatggctcccaggggcaccaagacagcaatcccttagctggagtgcctgtgtccaggctgctggcctagggccaagcagccaattctgctgaccctggacttgcctatgggtatattatccctgttgagggtgagggcttctgctgtggaaaagtctgggaagcactgcaggcctctctcggccttggacccttccttcagacccaaggtgcatatatatacatatatataatggtagatcacgaggtcaggagatcaagaccatcctggccacatggtgaaaccccgtctctagtaaaacacaaaaaattagccgggcatgctgccgcgtgcctgtagtcccagctactcgggaggctgaggcaggagaatggtgtgaacccaggaggtggaggttgcagtaagccaagatcacgccactgcattccagcctggcgacagagcaagactccatcttaaaataaacaaatgaacaatatatatatatatgtattttgttttttgagacagagtctcgctctgtcatccaggctggactgcagtggtgcaatcttggctcactgcaacctccgcctcccgggttcaagcgattcccctgcctcagcctcctgaacagctggggttacaggtgcacgccaccacacctggcgaatttttgtatgtttagtggagacggggtttcaccatgttagccaggctggtctcaaacccctgacctcaggtgatctgcccacctcggcctcccaaagtgctgggattacaggcgtgagccaacgcgcccagccccaagtcccttttaccatagaaagtaacatagtcacagtgcccagggattcacaggtatggggagagggttcgttattcagctgccacacccaccttcctaaacctgctgcccttccagtttcctcacgtgcacagccacgcccgtctgcttttagtttctcaatctgttggcttaaccttcaaaacaggcccaggatttgagcacttctcaccattccctctgccccatccccattcatctcttgcctagactgctacagcagcctcttttactggtcccctgcatccacccttgccctctaaggcaagggtccccagtccctgggccaaggaccagtaccagcccctcgcctgctaggaactgggccgcacagcaagagatgagcagcgggtaagtgagcattaccgcctgagctccgcctcctgtcacatcagcagtggcattagattctcataggaggcaaaccctattgtgaactgtgcgtgcgggggatctaggttgcctgctccttatgagaatctaatgcctgatgatctcaggtggaacagtttcatcccaaaaccatccccaccccacccccgacccccagtctatggaaaaattgtcctccacgaaaccagtccctggtaacaaaacggttagggaccgctgctctaaggtacattctccacctggcagaaataatctttacaaaatgtaaatccgattttgacactcccttcttcccactgtgaatagaataaaaccctaccaggcctgcaccgtcagcccctgcccacctctcaacccagtctcctatctctgtctgcaagctggttcccacctcaaggcctctctgctctagaggctacctctccctgcagcgcttttcccctagatctttgaatggctctttccttatcattcacttctacttcaatgtcacctcttcagagaggcctttgctgatggccctacacccagtcacttttttttatctgcttctcatcaaaattgccttgctgattcctttgtttcttattcatcctctcccacatccatcctctcccagcccagaatgttgacttcctgagagagggactgggtctgtcctgctcaccatggtaacctcggcatctagaacagtgcctgccatcacgtggtaggtgctcagtaaatattcttggaactaatgaatgaataattctatccacaagacttcacaatggctcttcatgctgcgatctagctttcaactccaaactggtcttgagatctcacctcagtctctaaccttgacatctaacctcttcacccactctcttacctgaccctaatttttaaaaatgacgtggtcagcttttcagccccctcattccctgtttttaggaggtagtgagtggaagctggaagaataagaaagcttggggagactgcaattgcagt

SEQ ID NO: 21770 - DNA, 2300 bp, Homo sapien
tactccccatatcacacggggtgtatattcccctgtgatatggttcctgatatccaagagatattataatcctctcttggattatgctacctctcatatcgcatggggtgtacacacactttgtgatatcgtttgtcatatccaaggagggagaggattatattaatcccaagatcacggggggtgtacaccctcctgtgatattgtttgtaatattaaggggggagaggataatattactcccaatataattaacaccctgtgtgtactcctccttgtaatattgttcataatatccaatgggggagacgatgatattactttcaatatcgcagaggatgtacatccctttgtaacaatgtttgtaatataaaaggcaagagaggatgatactacttccaaaattgcaggacatgtacaccccccggtgatattgttcctaatatccagtggggaagaggatgatagtagtcccaatatcgcaaagggtgtacacaccccctgggatattgttcctaatataaaaggaggagaggatgctattattcccaatatcacagaaggtgtaaaatcccctgtgatattgttcgtaatattcaggaggggagaggattatattactcccaatatcacagggtgtgtacacagggaggggcaagggccagaagcgggcgggaatccccatgtttgggcggacccagtttctaatggccagcatttgccaatcaaagcttaccagagaactctaaaagccagggctttcctgctagacaagactcatttctggaactgctttaaaaagaaacaaaacttcccaaggaccccttttcctctctgtctgcctaaaataatgttttaaaaactcctaaagcagctgaattcagcccccttcctgggggaatgtatagacggaactcccacctttcccggcatcccaaggccagagtatgtgaaactcctgggtctctatgtgtgtctgagcggctgctctgccaacactccacacagccctgtgtcctggacccaaggcccttatgacctgagctcaagaggggatctcctgatccatgggttgcaaagatccatgggagaagcatggtttctggggcggggtcacacgctcagtcactgtttccctcggatgccggagatggttcctttggctctctgccaatacagggtgaatcatcatccatccctcttttctttgttctcccgggtcaagttgtttgcctagtcagtcccaatgtgagaacctgaatatttcagttgacgcgctgacttcaaaatccccgggcttcgggaggcggagcttgcagtgagccgagatcccgccactgcactccagcctgggcgacagagcgagactccgtctcaaaaaaaaaaaaaaaaaaaaaaaaaaaaaagtccccgggcttttcttttcactcagtggaaggcagctgcttctaattggccatcttggcccgcccccaccacgtgaccttctgtaaaatgcctccactctccaggaacgctctcattatataactttgcctgaaaccaacagcacgctcattgcacatatcatgggctcatttatttcacttataaagaacctggccaaggaagagatagtgcctaaagtggccagtattctgaccgatatgttagaaaaatggtgtgccgaccaattcatgacatgtgtcccaaaactagcaacggaaattgtattcgccgtgttgaggtctctaatccagatgatgctcatctatgtactggaaaaggcagagtcctttcctgacaagctgctgaaactcttcagaaacatctcatatttcctgaagaagatgatgtctggacaagcagcacaggtcgttcagatttaactttctattcatatatccagcacgatattcgcacaattgtcacgaaaccttaccagttgatgagtcctgcacatttcctttaatttcaggaggaagagggtaatccggatgagttttctgacctactctgctgctgtgattaaacaaccaccaggaaattttgacgacactgttctcctgagctcctccctttcctccgggaacaaaacaattgaatttacaaaaataaagtgttatttgactggagtgaggtctcatgtctgcttatgcggtggctcgctgctcagaacagggtgagtctctgggttgtgtgctgaggaggggaggctctcaatctggagaaaacccactgcaggggacacctccatggggtctgagggactgaggatgaggagccggactgggtctagggaaggaggaggtttcagaggg

SEQ ID NO: 21771 - DNA, 2300 bp, Homo sapien
aatggcatttccaaggcaaacaccttgtttgaaagctgctgctctggttaaagaagggtcatgaaagtctttttttttttccagttatttgggtgaagtatgtttttgcgagcaaatttacctttccctctgcgttctccacattttgggttgtgattttatgacaatatagtttgtatattcaacttatacatatttatagtgttcagtaagagccttttaaaataaaacaattgaacacattggttattttcacaagactctaaccaaaatagtatatttttaggtaaaaacccaggaaaattaactcaaaagtagcctatatggccgatgaattcttgctgcattttatgcaaattatcaggccaagtgtaataagcctaaaattgattttgcacacaaatgggtcttactgtaatttctctttaataggaaaaatagggggctacagaccaaccaggatcttcatgaggaccagtgagcacaggagtaggaaaggggtcactagcatcactgagatgcaggtggtggccattcctcatagaaaacgagatttttggggaacctcccatagtgctgagctccatagtgcccacggggatgacagaatctgagaatggctgggaccaggacttttgtcatcaaaagccagctggagggtataggcagtaaaattggaatgcagcaaagggaggctgacctgcaaagcactaggagggatctcataaaacctgttacccttagaggcaagacaggtggaaaaagagtaagtatgtcacttagtagacataatcaagaggagcagaaagccaaggtcagctgtccgccatagaatgtcatgatcccttgctcagtgaagacctgagacagtcctcacaccactatatgtttttctttttataacctttattaaaatacagtttattttttcatttacttggcacatttgtataattgtgaaattgttttcttagtagttttagttacatatactcagtataatgttagcttttaggaacccctctttagtaaaaataaaacaaaaacgtaagcaattttaattggtaggagttgcagagcccacagcaaaggacagagctgtggaaaatgtctgactcttcccagcacggagtcgggccgtggctcctttcacatgtccccagacctcagctagaattgaatgctctaaaacagacaggccagatgattatttaaaatgttttggaaacagtttttgacctgcaaatatttagtaatggcaatatttcacatgtctcatgtggacaaaatgtctacattgtgaagatatttttcttttactttactaataatttttaaaactgactttattgttttaagttttgtaaagtcacatgaactaaaaggcaattgagttaacgtttcaatttttctgataaagacttgattgaagtgtttatttttaagccaatgaatgagagatttatcatatattttgaagtgaaacgctatatacacatgactcatctaaatatacagactgaggtcaattttatagatttagaactttttttatttgttgggcttttaatattttttaaaagctttacatcctttatttttgataatttgtgatttccctggtgcaattatttggagcccacagcagttgggatctgtgtatgcagcagagggtgcccctccaagcctctggctctctaaggcctccttccatttcaagggtaattaaaataaggctgattgttagggattctggtgtgatgaaccccagccctctcccacttctgggggctaagtgtttacatgccatcgccctttgttcccctactgggcctcacatcaccttcttcctcttctggactcaaatctctctctgcttccccttcctaaggacacttgggatttcacgagggtctagctagataagccgggagaacctcccactgttaagataattaacttcctcacattcacaaaagctcctttgccacagaaagtcactctcacaggctacaggtcatagttcgcagttacaggaacttgaaaatattctgccttcaagtccaccagcttttgtaaaaagcatctgtttcctgtcctgtgtagttgagcacactaaagtcttgttcccttagtcattcctccttctgctgcccctgtggggagggtcttgctgcctgtacccacctctgacatttgcactcttagacaacatagccgctaatttgttggaaaggcgttaaattaaaaaaaaaaaagtgctatttaccgcctccctctttgacagaagactgtctgtc

SEQ ID NO: 21772 - DNA, 2300 bp, Homo sapien
aagattcctcaatggggaaagaatggtagcctcttcatattgtgctggaacaactggataaccacatgcgagatagtgtagttagacccctacctcacagcccatacaaaagttaactcaaaatgtttcaaaaacctaaatggaatagcaaaacttatcaaaccattagaagaacatataggagtaaaacttaatgatcttggattgggcaatggtttcttcaatatgacatcaagagcataagtaacaaaattaaaaatagataagtgaacttcatcaaagttaaaaatgtttgtgcttcaaagaacaccatgaagaaagtgagaagacacagaatatgagaaaaattttgcaaatcatgtaccccataagggacttgtatctaaaatatataaagaactattacaactgaataataaaaagataacccattttttttaaacagcaaatgatttgaataaatagttctctaaaaaatattaaaattgtcagtaaatacatgaaaaaatgctcaacttcatcagccaccagggaaatgaaaatcaaaactgcaatgagctatcacttcacacctactagaatggctataagttttaaaaaatattaaatagtaagtgtttacaagaatgtagagaaaatggaaccctcgtatattgctgatgggaatataaaatagcacagcaaactggaaaacagtttggctgtttctcaaaaacttaaacatagaactaccacatgaccccatatttatactcctatatgtacccccaaagaaatgaacacagaaacccaaacagatacttccaagtgtaagttcattgcagcggttttcacaatagcaaaaatgtggaaaccacccacatgtccattaagagatgaatgaattaaaattgaggtataaacatatattgggatattactcagccataaataggaaagaagctgtaatatatgctacgacgtggatgaatcttaaaagtgttaccctaagagaaataatccagaaaaaaataatacacgtatataattccttattatatgagacatgtaaactaggcaaattcacagagattgatagtatcagaggctaccagtgggtggggcagggggaagtggggagttattgattaaaagtatgaagtttccatttggtataatgaagattttctggtaaaaaattatggtgatggttgtacaacattgtgaatagaattagtatcatttaattctacacttaaaattgctaattcagtacatttatcttatgtattataccatatctaaagagatctttgggaaacaaacactcgccctgatcagatagtcctcatactcatgtacacacccttcctgaccttctgtaaaaagggatacaaagatttagggacatgagacagttcaggcaactgcagatccacaaaatatatgtatttgcaaagagaatgagagttaagctgggggcacagaccccagacatggagagggtccccctgaaaccttcaccaaggacagcagaacccagagcctcccacctccttccatcaaagtcctctcttcccaggacacacaggacacctccctccacacctaggagctggggatcctcccgagacctccaggcctgggtctctgtccctgggtcagaggccaggctggtgacactgaagatagcgggtgggtccttcccagccatcacccagtgagcccctttctagcccccagagccacctctgtcactttcctgctgggcatcattctgccttcctggagcactggagagcatgaggagacccagggcccagctggttttgtgtgtcacaaagggaaataatctaccggctgtgacagaaccaaggccagaacacagcagaggtcagtactggggagagtgggtcgtcctgttatgaggaccccatcagcgttgcttctcaaagttttgcctagggaaccaaatataggcaaaaaggaaggagaaaggagggacaagggaggcaggactgagaggggaggggacagagagacattgtaggcagagccccgcccttgcccataaacgggaagtgctcctgcctgagaggaagctcagcatagaggaaggaaggacagcagagacaacagtcacagtaaccctgtctagagcgttcctggagcccaagctcctctccacagaggaggacagagcaggcagcagagaccatggggcccccctcagcttgtccccacagagaatgcatcccctggcaggggctcttgctcacaggtgaggggaggactccctgggagtgggtgggaggagggag

SEQ ID NO: 21773 - DNA, 2300 bp, Homo sapien
ggtgaatagtgtacactgacacacacatattttgctttgccagtccagctgagtctgtcagggccgcttacagactccctgctgagtcctataaacagttgtgaccatggccttgatcagctagtgagactcatatttattcagtaagattaattaacaaaggcttgagtcaacaccgttagagggtaattgacattgtggacttcccaagtagaaagcaattaagcacctgtggcacatcaatggttagtcttaagatcacatgagtaaacaagctggctagacaaactactctgccttcctttgttactactttaatttgtttaactaaaggtaaagggaccaccttcagtcagatctattaccaaagttatgcaaactttttggtcttccaagaagatttgtgtctatctctataactatctctaatatttttcccaccagcctgattgaactccaacagagctcttagccaacaacctcagccattggaaaataaatcccacgttgtgaagggccctgggaacactcatgagctcatccacaggagtccgcagcctgtcccaggcactggggtgcaaccaagatcacacaagtccctgttctcacagagctcatgctctcatagggaggaagacagacatgcaagggtatctagaatgtgaggtcaagtattgacaagagccctggagggaacacagcagcgaaaggtcagaaagggaagacccagggtctctagaggtgtcagggaaggggtctcccaaggatgccctaatgtgagcaggacctgaaggcagtagggagggagccaggcagacccctggggaaaaggactccaaacagggaaatgccaaggtcagaggcactgaaggaagggaggtcatgctgctgaccttggcccagtaggacacgcacgcacgcgcgcgcgcgcacacacacacacacacacacacacacacacacacacacactccaaggctgagggatgaagagacctgtccaggacctagggccccatctttccacctcaatgcatagggcccagtattaactgatgctctctccccactcctagcctcacttttaactttctggaacttgcctaccactgcccaagtcactgttgaagctgcagaaggcaaggagattcttccactcacccacaatctgccttaggcttggctacaactggtacaaaggggaattacaggatatgtactaggaactcaagtaattaccccaggacctgccacagaggctgagagacaatataccccaatacatgtctgctgatacagaatgtcaccaacaatgacacaggatcctacaccctacaagtcataaaaacagatcttgtgaatgaagaagtaactggccagtttcacgtacacagtgatgtctcatgagctctgggtgttgggggtcagttctgcttcacacacacaggattttcaggcctgggctgtgcctgtgtccccctctacattacatcccatttgggggtttggacatttagtgcaagacacacacaggggagacaaacttccacagatcagaatttctttcctgcatccagaccctgcaggcacttgctacagaggaaggacagtctgatggggttggggggaggctcagtaaggggaggtcagtgtcagttccccctcctgggtcccctccccatggacgttccttgtaggaccatgtcagatcctggagtgaggggacccctgggaagcccctgttcagaaactcagccctggaaacccctgtccagtcccctgtcccaggatcctgactccatgtgaccctgggaagcctgtgccggggctgggttgaggcatcttgggcagggctgactgggaacaaggatttaccagctgtccaagggccatggctcttgcagctggtagccagccagggctcagcccccagagcctcatctgggcaagggcaaagcctcgtccttcacatgagacttggtatggagaagacaggtaagctccctaggacattagccgactgccctggggaacttaggagactccaagggaaggtcagcatccccaggggaggaatagagaagagaggatgttcccagcagctcattgtccaccagagatcaggcccagggaacactctgttggaggcaaataatcagagacggtgtattcaggcggttccttggtaccaacctttaggtcaggtgatcgtgaatattttaaaagtaattcacagacaacatggcaagccactgaccatttatcattgttggcagaaaaatcggagatctgtacgtttgg

SEQ ID NO: 21774 - DNA, 2300 bp, Homo sapien
gtttgtattactatctcatcactaaaattctaaaatgaaagctgtaagatttttatttgtttgtggatatgtgtttaggtgtgtttttgcatatgtacatgtattatggtctatattgtgtctacatgacaaaatccaccttagttggccagaaacgccttaataaactctatttgcattaccttagagaaatgagcataagaacatggcttttaccctagtagcatcgggagggaattcagggtctttctaacagtgaggggcaaacccaattcattccctgacatcattcactgacattccctccaggctctaacatatgtctttctcacaaacacaccaaaactgacacaaactccggatattcgatcccaggtggatcttccaccagggcagaatgaccacaagaaagtcagggagtgattccccagcctcgagatccccagtatttgggacatctgcctatggtccctgcagacatttcaccaggggatccaggggaacttctcctgcaggaggggacaggataacccaggatctgcctttgtttccatctcagagggactgagggtcacggggcctcccctgctctaatacaggaaccaggtatcccttgcagcctgcaggtaggagctgccccagctcctgggccctgtggagaggcctggggcaggtgacagacagggacacagatgacctggaggcggaactcccagtgttgtgatggaggaacacagaacacaccgaggaccacctcccaggccagtgccctctctctaaacccccagagacacctccctgggcccttcttttgaaaccttggggacggatggctctttctgaggcagcccatccgcctgcaggacagttctcccaaatcaggaccaggagtgctctggacaactctcgtcctctccctgagctcatcctgcactgcatggagttggacatcctggggacccacagtgaacaggaccaaggatgacctgaccctgcagtctggaggtcagagcccacctctgcccaggggccagggccaactcataccacgtggaccctggtcagcatccctggggaagcccctgacttttaccacagggttcctcttgctctccaggggcaacattgcacgcagacaacacaggaaatggattcccctggacaggaatctggctttgctaaggaggtggaggtgaagcctggtttccatactttgctccagcaggcccttccagtccctcccatgtgcctgctctgtctctcctgatccttcctggagcctctgaggatcctgctctgccaggattctctgctcagttctccactttctcctggtatcatgcatggggaaggtacagtgacaacaggacaatcaccttcacagaggacagaggccacccgggatggtaagggagaacatgcacaggccctaagccacagctcagccaacagaaacggagagggaggatctccctgaatccctcctcaaggacagcagaacccagagccacccacctccctccaccacagtcctctcttcccaggacatgcaggacacctccctccacatccaggagctggggatcctcctgagacccccaggcctggatctctgtccctgggtcagaggcaaggctggtgacactggagagagaggactggtcccccccgtagtcgccccccattttctatcccacagagccacctctgtcaccttcctgctgggtatcatctcacactccctgagtattggggagcatgaggagacctgggggcccagctgggtctctgtgtcacaaaaggaaacagttccccaagtttgggagaccccagagtacctctgtttgtggtgacattcccaaagggtcagtgcagaggtgacaagtcaccctctctggggacaggggactccaccaaccctgcttctcaaagtgtggttaggaaactgtaatgtacacagaagagaaaggggaaggagggacaaaaaaggcagaaatgagaggggaggggcagaggggtgacctgggaagagccccgcctctgcccctggccctgggaagtgcttctgcccgggaggaggctcagcacagaaggaggaaggtcagcagccccgacagccgacagtcacagcagctctgacaagagcgttcctggagcccagctcctctccacagaggacaagcaggcagcagagaccatgggccccccctcagccgctccccgtggagggcacaggccctggcaggggctcctgatcacaggtgaggggaggactctctgggagtggtgggaagagggag

SEQ ID NO: 21775 - DNA, 2300 bp, Homo sapien
ggcagcctatccccctggtggacagttctccaaatcttgatttgctgttctctggacaactcctgtcctctccttgagctcatcctgcactgcatggagttgggcagcctgggactctccatgagcaggacctggggtgacctgatcctgtagcttggaggtcacaccatgtggaccctcgtcaacatccctggaacagcccctgactttgaccacagatctcttgccttccaggggtgcacatcgcacacagagaacactcaggaaattgcagttgattctcgaataaggcaggggttaagggtgctgaggaccccgtagaaaatctttgtataacttttggcttcccaacaattgaaccactaaaaccctactcttgaccagaagccttattgttaacataaacggtaaatcaatgtattttgcatgtttatttatattatatactgtactcttacaataacataagctggggaaaataaaatgttactatgaaaatcataaggaagataaaacatatttactattcattaagtgacagtggatcatcataaaggcttttatcctttttttgtctccaggttaagtaggctgaggaggaggaaaggagagggtggtcttgctgtctcagagatggcagaggtagaagaggtggaggggaggcaagaggaggggacacactcagtgcaacttttaatttaaaacatctgcatgtggctgggcatggcagctcatgcttgtaatctcagcactttgggaggctgaggtgggtggatcatttgaagtcaggagtctgagaccagcctggccaacatggtgaaaccccgcctctactaaaaatacaaaaattaaccaggcgtggtggcgggtgcctatagtcccagctacttgggaggctgaggcaggagaatcacttgaacccgggaggtggaggttgtagtgagctgagatcgtgccactgcactctagcatgggcaacagagtgagactctgtctcaggaaaaaaaaaaaagcaaaaaacaaacaaacaaaaaacaaaaaacaaaaatcaaacaaacaaacaaaaaaacatcgacatgtaagtggacctgtgtgttcaaatctgtgtgttcgaaggtcagctgtaattcccctggacatgaacttggccttcctaaggtggtgaaggtggagcctggtttccattccttgctccaacagacccttcttgtctttcacgcgttcctgctgtgtcccacctcttccttcctggggcctttgaagaccccgctctgccaggggtttctgtgcagctccccattccctcctggcaccacccatggggaaggcggggtgaccacaggactgtcagccagacagagtcttccaggtcaggtagaacatggaaaggacctgagccacagcacatccaaaagacagggagagggagggtttccttgaagccttccccaaggacagcagagctcagagccacacacctccctccaccacagctctcttcccaggacacaccagacacctccctccacacccaggagctgtagctcctcctgagacccctgggccttggtttctgtgcctgggtcactggagacagagggctggtccctccccagtcatcccccagtgagcccctttctatcccccagagccacctctgtcaccttcctgctgggcatcatcccagcagaaacccaaggcccagctgggtttctctgtcacaagggaaataatccccctggtgtgacagacccaaggccagaacacagcataggtcagcactgggaaaggttggttgtcctcccaggggacaggggtccatcagccttgctactcaaagctttgtatcgggaactgaatatagacaaaagggaaagaggaagagggacaaaagaggcaggaatgagaggggaggggacagaggactcctgagcagagaccccacccctggaccatgtgatcttggaaagtgctcctgccctgggaggaggctcagcacagaggtaggaaggacagcagagctgacagtcacagcagccctgacaagagagttcctggagcccaagctcttctccacagaggacaagcaggcagcagagaccatggggtccccttcagcctgtccatacagagtgtgcattccctggcaggggctcctgctcacaggtgaggggaggacttcctgggagtgggtgggaggagggccagagagactggctggggtctccttgggaggacggggctctgagaggggacaaagggcttctgttgaagtcctttgggagaggacaccagacagg

SEQ ID NO: 21776 - DNA, 2300 bp, Homo sapien
caatcttctactcccagatccccgcacacgcttagccccagacatcactgcccctgggagcatgcacagcgcagcctcctgccgacaaaagcaaagtcacaaaaggtgacaaaaatctgcatttggggacatctgattgtgaaagagggaggacagtacacttgtagccacagagactggggctcaccgagctgaaacctggtagcactttggcataacatgtgcatgacccgtgttcaatgtctagagatcagtgttgagtaaaacagcctggtctggggccgctgctgtccccacttccctcctgtccaccagagggcggcagagttcctcccaccctggagcctccccaggggctgctgacctccctcagccgggcccacagcccagcagggtccaccctcacccgggtcacctcggcccacgtcctcctcgccctccgagctcctcacacggactctgtcagctcctccctgcagcctatcggccgcccacctgaggcttgtcggccgcccacttgaggcctgtcggctgccctctgcaggcagctcctgtcccctacaccccctccttccccgggctcagctgaaagggcgtctcccagggcagctccctgtgatctccaggacagctcagtctctcacaggctccgacgccccctatgctgtcacctcacagccctgtcattaccattaactcctcagtcccatgaagttcactgagcgcctgtctcccggttacaggaaaactctgtgacagggaccacgtctgtcctgctctctgtggaatcccagggcccagcccagtgcctgacacggaacagatgctccataaatactggttaaatgtgtgggagatctctaaaaagaagcatatcacctccgtgtggcccccagcagtcagagtctgttccatgtggacacaggggcactggcaccagcatgggaggaggccagcaagtgcccgcggctgccccaggaatgaggcctcaacccccagagcttcagaagggaggacagaggcctgcagggaatagatcctccggcctgaccctgcagcctaatccagagttcagggtcagctcacaccacgtcgaccctggtcagcatccctagggcagttccagacaaggccggaggtctcctcttgccctccagggggtgacattgcacacagacatcactcaggaaacggattcccctggacaggaacctggctttgctaaggaagtggaggtggagcctggtttccatcccttgctccaacagacccttctgatctctcccacatacctgctctgttcctttctgggtcctatgaggaccctgttctgccaggggtccctgtgcaactccagactccctcctggtaccaccatggggaaggtggggtgatcacaggacagtcagcctcgcagaggacagagaccacccaggactgtcagggagaacatggacaggccctgagccgcagctcagccaacagacacggagagggagggtccccctggagccttccccaaggacagcagagcccagagtcacccacctccctccaccacagtcctctctttccaggacacacaagacacctccccctccacatgcaggatctggggactcctgagacctctgggcctgggtctccatccctgggtcagtggcggggttggtggtactggagacagagggctggtccctccccagccaccacccagtgagcctttttctagcccccagagccacctctgtcaccttcctgttgggcatcatcccaccttcccagagccctggagagcatggggagacccgggaccctgctgggtttctctgtcacaaaggaaaataatccccctggtgtgacagacccaaggacagaacacagcagaggtcagcactggggaagacaggttgtcctcccaggggatgggggtccatccaccttgccgaaaagatttgtctgaggaactgaaaatagaagggaaaaaagaggagggacaaaagaggcagaaatgagaggggaggggacagaggacacctgaataaagaccacacccatgacccacgtgatgctgagaagtactcctgccctaggaagagactcagggcagagggaggaaggacagcagaccagacagtcacagcagccttgacaaaacgttcctggaactcaagctcttctccacagaggaggacagagcagacagcagagaccatggagtctccctcggcccctccccacagatggtgcatcccctggcagaggctcctgctcacaggtgaagggaggacaacctggga

SEQ ID NO: 21777 - DNA, 2300 bp, Homo sapien
ttgtaatgcgggcctgactctgagctacttagtggctggaagaaataatagcccctccattcccaaaataaatctcaaaataaaatctaatcttattttatatccctttttttttttttttgagatggagttttgctctgttgcccaggctagagtgcattggcgcaatctcggctcgctgcaacctctgcctcctggattcaagctactctcctgcctcagcctccctagtagatggaactattggtccctgccaccacacccagctaattttcatgtttttaatagagacgtggttttgccgtgttggccaggctggtctcgaactcccgacctcaagtgatccgtccatctcggcctgccaaagtgccaaagcgtaaaccaccgccccgagtggctggcattgtttattatgtcgctgatattgtcccaaatttggccattgggagttccttctagttggtttctgtgacttttgacacaaccccatcatttttcaagcagttccttacttctggccccacagaatgtttacttctggccccacaaggctcctcttgtgctttcttgcccagccctggatcagctatttctccagggacccctggttcctttcatgggaaaatgatgtttacagaccatgggcacccatatgcccattgctagtaggtgccggtgcttctatgccctctagtggtcggagctgggaaataacacacccacactagtgtactgttacccacatttcacaaattaggtaaatgaggcacagaaaagttagacaacttgaccaacatcacagagaaaataggtagtagaactggaaaacaaaaataatgacagatgcacaagtcctaacaagcaaaagtaacttcttcacacatgcatgttagcagaaagccacaagcccaatattccagcatagacactctctttggaaaataaccagaattccacagcaataaacacaatgataaccatcacgtactcaacacccgcctggacactgggctcccacatattcccaacaactctgcaaggaggattttaccatcctccttttacaaatcagggaatcaaggatcatagaagccaagtgacttgtccaagtcaacatagttaagtgacagaaccattagctgagcccaggtctatatctggatataaattccatgcttatgccactatataagcatttcccaaaactgattttaggtgaaacataaataaacttttaagtttaactgtgtttattttaacgcatgacaggaaaaaaaattaagcacacatcaaatctctgatttcatggacaatattgcataagacaaaaatattttgtcttcagttcctggcctcaagccatcctctcacctcaacctcttgagtagctgagatcacaggtgtgagccaccaagccctgctaagacaaggatgttttgtaaactaaatttaattacaaaaaaagtatgaagtaaataataataaaggtggtaaagctgtagagaaaatcataaagttggtctagaaatgtctggggtctggatgacataatactacagcaccatgcagcttcattctcagttactcccaggaaattagagtcacataacactgcagaaagaacaattcagaatcttagacccgggctttagccctggatgtgtccactcctaggaccccaaacatctctgtgacctccttgctggaggtaaatccaaccttcccagacgtgtgagaacactaggaacatcctgcacacatagaggggtttctctgtcacagagaaaataacaccaggtttgaggaccccagggactctctgtgtggtgctgacagacccaaggcccagacacagcagaggtccgtgctggggagggcgggtcgtcctgttatggaacaggggtccaaacaagcttgcttctcagagcatcttctggggaactgaatataaacagaaagggaagaggaggagggacaaaagagacagaaatgagaggggaggggatagaggattcctgaacagagaccgcacccatgacccacgtgaccctgggaaatgcttctatccctgagaggaggctcagcacagaaggaggaaggacagcagggccaacagtcacagcagccctgaccagagcattcctggagctcaagctcctctacaaagaggtggacagagaagacagcagagaccatgggacccccctcagcccctccctgcagattgcatgtcccctggaaggaggtcctgctcacaggtgaggggaggactccctcggagtggatgggaggagggagca

SEQ ID NO: 21778 - DNA, 2300 bp, Homo sapien
ctcattaccgatgaggttcactttaagcgcttggttcaggtggtgtctgccaggtttctctactgtgaagttactattcatctcattgtaattaataagtatcttgtggacaggtactttggaaatatgcaaatagccagtttgttcttagcatacttttaccaattaatttctagaatccagagataattgtagccgataaacaattcttactgtggtgttagccagtgattttctgcttccatcattgcttctacactgattaactggaacgctgctgtaagaaagagctagttcttctttctcatttatttatgtattcacttatttatatatatatcagcatggactctcaagtatttatcggttggactacattactattattattgattatgttgctatattgtccccaaattggccattgggagcttcttctagttggcatttgtgatactttccacacatccccatcatttttcaagttgtgccttactctcaggccccgcaagatgctccagtctcctcttgtggtttcctgccccagccctggaatcagccatttctccagggaaccctggttcctttcatgggagaatgatgtttacagaccatgggcgcccatatgcccattgctagtaggtgccggtgcttctatgccctctagtggtcagagctgggaaataacacacccacactagtgtactgttacccacatttcacaaattaggtaaatgaggcacagaaaagttaggcaacttgaccaacatcacagagaaaataggtagtggaactgggaaatgaaaataatgacagatgcaccacaagttctaacaagcaaaagtagctttttcacacatccacatcagcagaaagccacaagcccaatattccggcgtagacactctttgaaaaccagaattccacagcaataaccacgatgacaaccaccatgtactcaacacccgcctgggcacggggctcccacagcagctcacttattcccaacaactctgcaaggaggattttaccatcctccttttacaaatcagggaatcaaggatcatagaagccacgtgacttgtccaagtcaacatagttaagtgacagaaccattagctgtccccaggtacatctggacataaagttcatgtttatgccactgtgtcagcatttccaaaaactgattttaggcgaaacgtaagtaagctttttaaaaactttaatacttatgcgtttattttaatatacattgagaaaacatttaagcacacatcaaatctgtaatttcatggacaatattgcataagacaaggatgttttgtctccaactcctggcctcaagccatcctcccaccatagcctctcgagtagctgggatcacagatctgagccaccgatccctgctaggacaggatgttttgtaaactaaatttatttagaaaaaaggatgaaatatataataataaaggtggtacaagctagagagaaaatcataaagtcagcctagaaatgtctggtgtctggatgacataaagctacagcactgtgaagcctcattctcagttactcccaggaaattagagtcacataatgctgcagaaagaacagctcagaatcttagatccgggctttagccctagatatatccatttgtaggaccccagacatctctgtgacctccttgctgggagtaaatccaaccttcccagacatgtgagaacagtaagaagaccctgcacacacaaaggagtttctccgtcacagagaaaataacaccaggttcagggaccccagggactctgcatggtgctgacagacccaaggccaaggcagagcagaggtccacgctggggagggagggtcatcctgttatgaaacagggatccaagtaagccttgcttctcagagcctggtctggggaactcaaatgtagacagaagggagaaaggaagaagagaaaatgaggcaaaactgagaggggaggggacagagaggtgacctgggcagagcttcacccatgaccctggaaagtgctcctgccctgggaggaggctcagcatggaaagaggaaggacagcagagcctaagtcacagtagccctgactacagcattcctggagcccaggctcttttccacagaggaggaaagagcaggcagcagagaccatggggcccccctcagcctctccccacagagaatgcatcccctggcaggggcttctgctcacaggtgagtggaggattcctgggagtgggcaagaggagggatcacagagaatggctggggtctcctgggg

SEQ ID NO: 21779 - DNA, 2300 bp, Homo sapien
tgtaaaatcacagtgctgattattacaaatagtatataacataatatcacttgcataaattaaaaactcaaacagaggtcgggtgtggtcgttcatgcctgtgatcccagcactttgggaggccaaggcagacagatcacttcaggccaggagttctggaccagcctggttaatatggcaaaaccccatcgctaaaaaaaaaaaaaaaaaaaaaaaaaaaaaaccaacaacaacactacacacatcctgggagaacacacacacaaaccaaaagatacatattaaccaccttagaatgagaattgcctataagaaggttagggaatgaaagtggggaattggtggaaaataacagtgtaggagggggtacaaagatcactgaccttggcctcagagacccaggttggaatctttaccccttcatttactagctgtccaatttgttgaactcagagcctactaccttctttataaaatgaagtataatacatctcatagggtcattgtgaagatcaataaaattattaccataagtattaggcaaatgctaagctctttataatcgttggttaccctgttcctctaccactatccctccctcccacacacacttcctctcactctctctccactacctaaaggatcaagttcaacctctttagctggcctttaagcctcccccgaccacaccccaccccaccccagataagcgccacccaacctttccaattttatctaggacagctcccctgcccagcagtccagctagaggtcacgtcggccacccttttctgcctgcaatgcctcagacacacatgctctgtaacccagaaatctgtggccaagaaaggtgccaagacccgcagaaaagctgggacacaggaaagagaaacgaaggctgacaacagatctcacgggggtgagggagattaggccaatcagagaagacagcacacgccagcctcagatgcagaacaactggacctggacctaacaagctgagtacaagtggagacgcaaccagaaaagattgaagtgaaatcctcaagcaaaaaaaaaaaaaaaaaaaaaaaaaggatggagcagtagtcagaggggatgccacccctacaaaagacaaacaaattgatggaatggaaccttgcagggagagagaggaccagcagagagagggaggcgtaggaaaatgaggagtggggcacaaaggtggggctctcagggagaagaggagtcgattttagagggggagaagaaaaggacacagagctggctgtacagagaaaaggggccaaggcagagaagatggcgggatggtgtgagacggagttcacagaaatacccagagaaggcgacgattacacagaggagcccccagaggggcgaactcttgaggaagatgaacgcggagggtggagccagccagaaattcagaaaaactagaggcgtccccggtagcgaaggaagccgggaaggggccaggctatcagggcatgaagcacgggagaaaatgggtccgaagagggagagcgtccgagagaaaaggaaaatcagagattaggaaaatcacaaccgacacaaagacaagaagagacacaaggaaaggggtgcaatctgaggaaggagggcccggtaagcaacccggtaatcacagcgctgggagagaacgcataaaagaagggtagctcaggagttgtggggcaccggaagagacataacagaaaacgcaggcctccactcagcaaaaacaagccacgcgcgaagtcgaggtacaaggcaagggaaggccagaaacgaggcaacccgtgcacagaccgggcttggtcaacgccccaggggcggggccaggcgggccgttcctggggggcggggccagcctcggtccaataaggggtactcgacgccccattggccacctgcctcgaaagggggaagacagtctgggcgggcaggacgtgcggagggagaggcagcggtggcgcgaggctcaactcgaagcgctattggtgggactgatagtcttgtgcgccaagaagctggcagaagggaaggggcgggacatcagttcaggatctcaaaccgcattggtcgtctgcctcggctgagagaggcgatgcttgaagttcattggtctttgtgagacagggtaagaaaagcagcgcgagcttggcggttcctctggccactttctcacagtgtctttgggcgtcttcttgactgaatctgactccattggaggctgtggtaaccgtgaactagctgcacgaacacggtccctcctgcctttccgtcctcctccctct

SEQ ID NO: 21780 - DNA, 2300 bp, Homo sapien
gttttgagatggagtctcactctgtagcccaggctgtagtgcagtagtgcaatcccggctcactgcaacctccgcctcctgggttcaagcaattctcctgcctcagcctcccgagtacctgggattacaggcctgtgccaccacgcccgtctaatttttgtatttttagtagagatggggtttcaccatgttggccaggctggtcttgaactcctgacctgcctcaagcgacctgcctgcttcggcctcccaaagtgttgggattacaggcatgagccaccgcacccgccacctgccccactttcaagttattttccttcactccttcattcattccacaaatggttactgagcccctgtcatgtgctaggccctgatctgggccaaaaaccttctccttggggcactaatgtctctcttgcgctcacaccttattcaggtttttgtgtaaacatgtgaagtcactgtgtccagcgcttcctgctcctgtggccactaccaacaattaatttcatgcatgtccccctccccccttcccgtgccccagggagcgagtggggaaccgggaacgcgccaaggggcccgcgaggcagggaaggggagagggggcgcgagggcgggaggggcgcgagggggaggagaggggatgcctgggttagggagtccggctaagagggaggaggacggaaaggcaggagggaccgtgttcgtgcagctagttcacggttaccacagcctccaatggagtcagattcagtcaagaagacgcccaaagacactgtgagaaagtggccagaggaaccgccaagctcgcgctgcttttcttaccctgtctcacaaagaccaatgaacttcaagcatcgcctctctcagccgaggcagacgaccaatgcggtttgagatcctgaactgatgtcccgccccttcccttctgccagcttcttggcgcacaagactatcagtcccaccaatagcgcttcgagttgagcctcgcgccaccgctgcctctccctccgcacgtcctgcccgcccagactgtcttccccctttcgaggcaggtggccaatggggcgtcgagtaccccttattggaccgaggctggccccgccccccaggaacggcccgcctggccccgcccctggggcgttgaccaagcccggtctgtgcacgggttgcctcgtttctggccttcccttgccttgtacctcgacttcgcgcgtggcttgtttttgctgagtggaggcctgcgttttctgttatgtctcttccggtgccccacaactcctgagctacccttcttttatgcgttctctcccagcgctgtgattaccgggttgcttaccgggccctccttcctcagattgcacccctttccttgtgtctcttcttgtctttgtgtcggttgtgattttcctaatctctgattttccttttctctcggacgctctccctcttcggacccattttctcccgtgcttcatgccctgatagcctggccccttcccggcttccttcgctaccggggacgcctctagtttttctgaatttctggctggctccaccctccgcgttcatcttcctcaagagttcgcccctctgggggctcctctgtgtaatcgtcgccttctctgggtatttctgtgaactccgtctcacaccatcccgccatcttctctgccttggccccttttctctgtacagccagctctgtgtccttttcttctccccctctaaaatcgactcctcttctccctgagagccccacctttgtgccccactcctcattttcctacgcctccctctctctgctggtcctctctctccctgcaaggttccattccatcaatttgtttgtcttttgtaggggtggcatcccctctgactactgctccatcctttttttttttttttttttttttttgcttgaggatttcacttcaatcttttctggttgcgtctccacttgtactcagcttgttaggtccaggtccagttgttctgcatctgaggctggcgtgtgctgtcttctctgattggcctaatctccctcacccccgtgagatctgttgtcagccttcgtttctctttcctgtgtcccagcttttctgcgggtcttggcacctttcttggccacagatttctgggttacagagcatgtgtgtctgaggcattgcaggcagaaaagggtggccgacgtgacctctagctggactgctgggcaggggagctgtcctagataaaattggaaaggttgggtggcgcttatctggggtggggtggggtgtggtcgggggaggctt

SEQ ID NO: 21781 - DNA, 2300 bp, Homo sapien
gacaaggtctcattatgtttcccaggctggtctggtctcgaactcctgggctcaagcgatcctcctgccttggcctcccacagtgctaggatcagaggcatgagctgctgcgcccgacattctgtattctttcaattcaaacattcttttctttcaatccaaacactttcccacccacacacacatcctaggttccaacctactcatgtcctcacataccccttcagcgagtcctacatccccttttcacaagcaccctgttccgtcccaacagtgtttcctggcatcctcttcaacaatgctcaccccactctcatgcattcatccaatgcctaccagtagttttatgcccctttcaattcttagttcaatttcaattcttagtctcatctatgccctgcaaagcaactgcctccttgcattcctttagtcttattttgttcttgtacccctttaaatcagaaccctctcttgcacccccaataattaccttattctcatggattccctgctccactttcttttttttttttattgacagggtctcgctctgtcgcccaggctggagcgcagtggcgtgatcatggctcactgcagcctccacctcctgagctcaagcaatcctcctgccgcagcctccccagtagctgggactacaggctggagccactatgcttggctcccctgtcccactttctttctttctttttttttgttttgagatggagtctcactctgtagcccaggctgtagtgcagtagtgcaatcccggctcactgcaacctccgcctcctgggttcaagcaattctcctgcctcagcctcccgagtacctgggattacaggcctgtgccaccacgcccgtctaatttttgtatttttagtagagatggggtttcaccatgttggccaggctggtcttgaactcctgacctgcctcaagcgacctgcctgcttcggcctcccaaagtgttgggattacaggcatgagccaccgcacccgccacctgccccactttcaagttattttccttcactccttcattcattccacaaatggttactgagcccctgtcatgtgctaggccctgatctgggccaaaaaccttctccttggggcactaatgtctctcttgcgctcacaccttattcaggtttttgtgtaaacatgtgaagtcactgtgtccagcgcttcctgctcctgtggccactaccaacaattaatttcatgcatgtccccctccccccttcccgtgccccagggagcgagtggggaaccgggaacgcgccaaggggcccgcgaggcagggaaggggagagggggcgcgagggcgggaggggcgcgagggggaggagaggggatgcctgggttagggagtccggctaagagggaggaggacggaaaggcaggagggaccgtgttcgtgcagctagttcacggttaccacagcctccaatggagtcagattcagtcaagaagacgcccaaagacactgtgagaaagtggccagaggaaccgccaagctcgcgctgcttttcttaccctgtctcacaaagaccaatgaacttcaagcatcgcctctctcagccgaggcagacgaccaatgcggtttgagatcctgaactgatgtcccgccccttcccttctgccagcttcttggcgcacaagactatcagtcccaccaatagcgcttcgagttgagcctcgcgccaccgctgcctctccctccgcacgtcctgcccgcccagactgtcttccccctttcgaggcaggtggccaatggggcgtcgagtaccccttattggaccgaggctggccccgccccccaggaacggcccgcctggccccgcccctggggcgttgaccaagcccggtctgtgcacgggttgcctcgtttctggccttcccttgccttgtacctcgacttcgcgcgtggcttgtttttgctgagtggaggcctgcgttttctgttatgtctcttccggtgccccacaactcctgagctacccttcttttatgcgttctctcccagcgctgtgattaccgggttgcttaccgggccctccttcctcagattgcacccctttccttgtgtctcttcttgtctttgtgtcggttgtgattttcctaatctctgattttccttttctctcggacgctctccctcttcggacccattttctcccgtgcttcatgccctgatagcctggccccttcccggcttccttcgctaccggggacgcctctagtttttctgaatttctggctggctccaccctccgcgttcatcttcctcaaga

SEQ ID NO: 21782 - DNA, 2300 bp, Homo sapien
ccgtctcaaaaaaaaaaaaagtttattgcaaaagcttgagtatcttcagttgtggcttcaaatccgggctcaggctttaaccttatgtgaccctggacaaatgacttgactctaaggctcagttgactggtctataaccacctcacagagttgtcaattatgaacctgtaaaaactaacatgtacaaaaattaacaccagggacacagtgctgagaaactgtgttctctaaaatcacagactgccagaatttttaaaaatctttaaaatcataacaatagtgaaaatgggacatctcattcttacctggaaagtctaagtcactttgacacagagaagcagtcatgatctcagagaagcggtttttagagacaacattgtacatttatctaaactttctaatgtccaaggaagcagaatcctgggtctgctcctcgcccaggcatgatgttagctccgttgcataaatacatgcctgctttgccttatgtccatcaaaactctgctttatataaattttacctaagcttcactcttcccaaaatcctatattcaccctgtctcttcctttggtcaggcactccagagttcctctggagagctttaaaaaaaaaaattaaattcaatgaaatgacttaaatgaattaagtgtaaatgattcagaactggtattagaaattattaaaagtgggggccaggcacggtggctcacacctgtaatcccagcattttgggaggccaacgcaggtggatcacctgaggtcaggagttcgagaccagcctggccaacgtggtgaaaacccgtctctataaaaatacaaaaattagccaggtgtggtggcaggcacctgtaatcccagctacctgggagcctgaggccggagaatcgcttgaacccgggaggtggaggttgcagtgaaccaagatcacatcattgcactcccgcctgggcgacaaagcgagactccaactcaaaaaaaattaaataataattacttaaattataaaaagtgaatataaattacccaagtacctggagatttccagttagacatgcatatattacccactttgaatacatatggaaatatgtatgtgttggttctggaaaaacaattgagataatgaaaatattttctcaagttttagaaacagtatgagataggtttcaacaacattctacatgaatgtaaaaccttgatttaaatatatgatcttatgctagaagcatggttggttttaatttttctaacagatacgagtcttggcttattaataattaacacattttgcagccacagtatcagtgtggggtaaaattctaatatttgctcttatgttttaaattctcagtctttccaacataagaaaatagctacacacatttcagtgtttcctttttgcaacaagttaacataattttattggaccacgttatttagttgttgggccttgtaaggattaaatgagatcatgcatgtaacactacagtaacagccacatgataaatgtccaaataatatttacctgtgcctggcacagagcaggcactcaaaaaatattttttagagcatgtgacgcgccatgaaccagaggagccactttaaatggacaaacggggatctcatttttttttttttttttaatggtgagacaagccctgagaaggcaaatggactgcctaaagctacacaggtcagcggggcaggtaaatctaaattggcaaagtaagggctgagcgaacagactccgacactagaaggcagagctgaactaacttctgctaaggtcccgcctctgccgctttgtcccgcccttatcttctcccctcctccagcgcctcattcccttttcgctcgccccggccgtgctgaagcaacttccgccctgagaagggtggggcttccgtctcccgctctcgcgactcctggcggtgaaggacggaagatgatagccacatttcttcctcgcccttcccctaggttccctgtcacagttccgcccttactactcccacttccggccagggaacagccacttccacccggaaaaggggttgttccgccgtggggcgccagctgtggcccacccatcctgccccgtactttcgccatcatagtattctccaccactgttccttccagccacgaacgacgcaaacgaagccaagttcccccagctccgaacaggagctctctatcctctctctattacactccgggagaaggaaacgcgggaggaaacccaggcctccacgcgcgaccccttggccctcccctttacctctccacccctcactag

SEQ ID NO: 21783 - DNA, 2300 bp, Homo sapien
agctacctgggagcctgaggccggagaatcgcttgaacccgggaggtggaggttgcagtgaaccaagatcacatcattgcactcccgcctgggcgacaaagcgagactccaactcaaaaaaaattaaataataattacttaaattataaaaagtgaatataaattacccaagtacctggagatttccagttagacatgcatatattacccactttgaatacatatggaaatatgtatgtgttggttctggaaaaacaattgagataatgaaaatattttctcaagttttagaaacagtatgagataggtttcaacaacattctacatgaatgtaaaaccttgatttaaatatatgatcttatgctagaagcatggttggttttaatttttctaacagatacgagtcttggcttattaataattaacacattttgcagccacagtatcagtgtggggtaaaattctaatatttgctcttatgttttaaattctcagtctttccaacataagaaaatagctacacacatttcagtgtttcctttttgcaacaagttaacataattttattggaccacgttatttagttgttgggccttgtaaggattaaatgagatcatgcatgtaacactacagtaacagccacatgataaatgtccaaataatatttacctgtgcctggcacagagcaggcactcaaaaaatattttttagagcatgtgacgcgccatgaaccagaggagccactttaaatggacaaacggggatctcatttttttttttttttttaatggtgagacaagccctgagaaggcaaatggactgcctaaagctacacaggtcagcggggcaggtaaatctaaattggcaaagtaagggctgagcgaacagactccgacactagaaggcagagctgaactaacttctgctaaggtcccgcctctgccgctttgtcccgcccttatcttctcccctcctccagcgcctcattcccttttcgctcgccccggccgtgctgaagcaacttccgccctgagaagggtggggcttccgtctcccgctctcgcgactcctggcggtgaaggacggaagatgatagccacatttcttcctcgcccttcccctaggttccctgtcacagttccgcccttactactcccacttccggccagggaacagccacttccacccggaaaaggggttgttccgccgtggggcgccagctgtggcccacccatcctgccccgtactttcgccatcatagtattctccaccactgttccttccagccacgaacgacgcaaacgaagccaagttcccccagctccgaacaggagctctctatcctctctctattacactccgggagaaggaaacgcgggaggaaacccaggcctccacgcgcgaccccttggccctcccctttacctctccacccctcactagacaccctcccctctaggcggggacgaactttcgccctgagagaggcggagcctcagcgtctaccctcgctctcgcgagctttcggaactctcgcgagaccctacgcccgacttgtgcgcccgggaaaccccgtcgttccctttcccctggctggcagcgcggaggccgcacggtaagcgggggctccgagctggaccgggcgcgaggtggcagggccggacgccgaagcctcagagcgcgtgcctgagggccccgaggcgcccggcgcgggcccgtcccgccccctagagccgcggccacgtgcgagcggcaggcccggacatgcccggtcagcgccgtccgggaaccgagcgtgggccccggggggcagcggcggggtgcgtggggcgtccggagtcccggggctggggagtggggtcgcgcaggatcctcacacgcaggggccgggctctgttagtgcgatccagagaggccgtgggcgtcggtgagctccttcagacccgcaggagccggagcccggcgttgaaggggccgtgggaagtaacggggggtaccacggtttaggatgcgctggagcgaaaggattggggtggggtccgtgctcttggcagtcgtctctgccaggcctgtgttcacatgcttgactttctccctcagatgcctggagttactgtaaaagacgtgaaccagcaggagttcgtcagagctctggcagccttcctcaaaaagtgagtttggggactgaggttcaaaacgggtggaggctgtcgccttggcctgcccatctgagccccagtgtttgccggtcctggcaggggaggcttgtttggggcctccgtggctcctttcagcgtgag

SEQ ID NO: 21784 - DNA, 2300 bp, Homo sapien
tgtgcacctgtaatcccagctacttgggaagctgaggcaagagaatcacttgagcccaggagtttgacgttatgattatgccactggacaccagccttggtgacagagagaggccctatctctaaaaaagaaaaaaaaaaaagtggccagccacggtggctcccgcctgtaatcccagcactttgggaggctgaggtgggtggattacctgaggtcaggagtgtgagaccagcctgcccaacatggtgaaacctggtctctactaaaaatacaaaaatatagccaggcgtggtggtggccgcctgtaatcccagctactgaggaggctgaggcaggagaatcacttgaacctgggaggcagaggttgcagtgagccaagatcacgccactgcacttcagcctgggtgacaaagcgagactccgtctcaaaaaaaaaaaaaaaaaaaaagtaacacaggaaataaaaccaagacaagatgagctctctgtgtctctgtgtgtccctccccagacccaaccctggcgtcccccagaggtaacccctcccaggaactgggcgtttgccactcccctgcacgggtctacacctctgctacaaacgtgtgtccctaagcagcggacgccttttgaaaacaagtcaactgtatcatgctacgatattttttctgatgtttgtgctgtttctgagacggccttatgacaccttcccctattctgtagcattctgttggctcactttgccacagtgtatgcacccattctcccacaaatggacttttcatttgcttctcaatgtttgctaccaaaaatctccctgcaataaatttattttatatatccccttgtatgtgtgtgagggtcccctaactgctcacaaatatctcagcaactccgccctccccactcagacctcatttccctcctaccagacatgctcaaaggaaactgggagcaacacaaagatgactttgaatctctgtccaccacccctagactgtatgacacccgcaagtgacaacctcccctctctggcctcggtttccccctctgtaaaatgggggatggcctaccttgccagtcatggcaggtcaatataaaacaacttctggctgtgcacagtggcacatgcctgtaatcccagcactttgggaagctgaggcaggaggattgcttgaggccaggagttcaagaccagcctgggcaatatagcaagatcccatccctcttaaaaaaaaaaaagaagaaaaatatatgttgttgttgttattattgttattattagagacagagtttcgcttttgtcacccaggctggagtgcaatggtgtgatctcagctcactgcaacctccacctcctgggttcaactgattctcctgcctcagcctcctgagtagctggaataataggcatgtgccacaacatctggctaattttgtatttttagtagagatggggtttcgccatgttggccaggctggtctcaaactcgacctcaggtgattctcctgtctcagcctcccaaagggctgggattacaggcataagccaccatagctggcctgtttttttaaaaaaagaattccagtaaagagctgatcatggttctcactccttgaataccaggaacaccatctcgtatcacataatgagacagggagacattctggtcctcatctcacagatgaaaaatgtcaagcttcgaaggatcaaagtgcccacctagtcacacgggtagtcagccacaggtcagcctgccttatttattcttcatgagtatttatagtgactaacatttactgggcgcctactgtgggccatttctgtgcatgtgacaacccctttaagtccttgtttctaatcccaagaagcaaggaaatggggtcagggaagggacaaggtttgcccaagtccaggcagggggagaggtcaagctcagaaccatcacctgcccatgacacatgcccaggactcaggttccctaggcttccttccaaaggctcagcagtgacgagccagcccttgaaccagcctcttcccccacccaagcagccacctctcaggggaattgtggccaccacaggtgcagggagcagtttctctccactcacagcctgaagcatacccggcaggggctgtccccaggcccaacaagcaaagggcccagtagcgagggccactggagcccatctccggggggctgggcaggaagtagggtggggtttggggtagggatctggtaccctgggactgctgcaactcaaactaaccaacccactgggagaagatgcctgggggtcca

SEQ ID NO: 21785 - DNA, 2300 bp, Homo sapien
accaggtatgtcctctctccttcccaggggcttcttcactttcccgcatcccccctctccccaggatgtatcagcccctgtcaggggctctctctctccctccccacccaggagagtcctcaccctcttcccaggagtgctggaactgcaggggccagggctggggaaatgtgtcaccatccccagtccctgacccacccaccctgtctctccacaggccctgggtgccaggccctgtggatgcacaaggtcccagcatcattgatggtgagcctgggggaagacgcccacttccaatgcccgcacaatagcagcaacaacgccaacgtcacctggtggcgcgtcctccatggcaactacacgtggccccctgagttcttgggcccgggcgaggaccccaatggtacgctgatcatccagaatgtgaacaagagccatgggggcatatacgtgtgccgggtccaggagggcaacgagtcataccagcagtcctgcggcacctacctccgcgtgcgccgtgagtggcccagccctggcccctactcccactgtcccgctggggacactcggtttatctttgaagtggggatagagccagtaccttcaatgtgggtttcaaaccggcttggacagagggacggacattctcctctgcagagtggggtctctggggggtctggggccttgcaggaggtgggcggggccaggaggctagggagggcaagaggggccagggctctgagccatactacctccttgcagagccgccccccaggcccttcctggacatgggggagggcaccaagaaccgaatcatcacagccgaggggatcatcctcctgttctgcgcggtggtgcctgggacgctgctgctgttcagggtgagccccctcggacctctgagtcagccgggcgagggcctgggccgagggacccccaatacccaggtagccctctagagcctgaggttccccatccaaaacttgggagaatgaaagcacccaccatataggggctgtgggagttaaatgaatgaatataaagaagggacttgaactggcgctgagcccagggggtgtcttcaatttagtttccccttctgggctgtcctcacgtccacctccccccaagaagagtctcattcttctccctaagagtgtcctcactcccctcctgccctcacccaggagtgtggttaccctccaggtgtagccaagaccagggaaggtggggcctggtcctcccagaatctctgatctgtaccagcctctccttaggcactacagaaagtgtgactgttattgttattattcatggagaatagtaagggagtggagactcaagaagacgctagcttgggaggccgaggcaagaggatcacttgaggccacaagtttgagaccagcctgggcaacacagcaagaccctatctctacacacacaaagtcttaaaaaaaaattagccaggcatggtggcacacacctatagtcccagctactcaggaggctgaggtgggaggattgcttgagcccaggagttcaaggctgcagtgaaatatgatgttgccacagcacttcagcctgggcaactgagggagaagaaagagagagagagagaaagagagagagagagagagagagagagagagggcgagagggagggagggaaggaagggaagggaagggaaggaaggaaggaaggaaggaaggaaggaaggaaggaaggaaggagaacactggttgtagactcagagagaactgttacataaccagtatgtggccttggggacatctcttaccctttctggaaaagtacttcctggcatccaggagggtctgaaagatattcacctccccctgctcactgaggcacccaccccacccacccctacagaaacgatggcagaacgagaagctcgggttggatgccggggatgaatatgaagatgaaaacctttatgaagtgagtgaagggtggggatggggtaggggcagttgtgttaggggtgggggtgttccctctgggggtggctgggggcagggaccccaggtgtcagggtgctgatgttcgctgcctcatttccatcccagggcctgaacctggacgactgctccatgtatgaggacatctcccggggcctccagggcacctaccaggatgtgggcagcctcaacataggagatgtccagctggagaagccgtgacacccctactcctgccaggctgcccccgcctgctgtgcacccagctccagtgtctcagctcacttccctgggacattctcctttcagcccttctg

SEQ ID NO: 21786 - DNA, 2300 bp, Homo sapien
ccttagtcatattcccccagtggggggtgggagggtaacctcactcttctccaggccaggcctccttggactcccctgggggtgtcccactcttcttccctctaaactgccccacctcctaacctaatccccccgccccgctgcctttcccaggctcccctcaccccagcgggtaatgagcccttaatcgctgcctctaggggagctgattgtagcagcctcgttagtgtcaccccctcctccctgatctgtcagggccacttagtgataataaattcttcccaactgcagaccttggcaggagtcgtggatcttacggaaaccgcctctcccacatgtccctcagacccaggagtcccagcccaagccactccctgcccactccccacacctgggaccaggtagccagtctgggctgccctcctgggagaacaagatgtctcttgggaaggtccccagaccaactgaaggactggtttggccctctttgcagggcctcaccctagggtcatatccttaagcaagaagggggacaagatcaagatggctgtggctaccaaattacttacactttttttttttttttttttttttgagacagagtctcactctgttgcccaggttggagtgctcactgcaacctctgcctcctgggttcaagcgattctcctgcctcagcctcccaagtagctgggattacaggcgcctgccaccatgcccagctaatttttgtatttttagtagaggcggggtttcaccatgttggccagactggtcttgaacctctgacctcaggtgatccacctaccttggcctcccaaagtgctgggattacaggcgcctgccaccacgcccggccgctttttttttttttttttttttttgaggcagagtctgactctgtcgcccaggctggagtgcagtggcgcaatctcagcccacttcaacctccacctcaagcgattcttgtacctcaggctcccgagtagctgggatgacaggcatgtgctaccacacccagctaatttttgttttagtagagacagggtttcgccatgttggccgggctggtctcgaactcctgacctcaagtgatccaccatgcttcggcctcccaaagtgctgggattacaggcatgagccactttatgcgtatttaagccttggaaacacagggactatcttgtggattggggctagtacagaattcagactgcagccttttcccgatgcgttgacttacagaaggggcattttggagggtctgtggtcctaacctggggatagcagggagatcccggggcaatgacagagaggcacagagacacggatttcctgagaaagggagaggagagaggctgagacccagggatcatgaaggggacgagcaagggaaggaagagatgatgagaccctgggaatccgggagagagacagggacgtggagagaaagggacagagagagagcgagaaggaaaggaagagacagaagggagaaggggcaaccgaaaatgggcacgaagaggcccaggcacagcaacagctggggaaatgacagagactgagacggagatgcagaaagatacagagagagctggagagggtagagaagggctttcggggagaaagtgatggagggacagagaggagaggtggaggccaaggagggaaagaccccagtagagaaagacagagggacagagaaggggatgcagacgcaggcgggagcacacccacagaggcgaaggaagggcgcaagaccatgagaaccacagacgcggaaagccggggaggtcgtggctcggtctagggcgcacggggagcagggcttgccccccagcacctccggggaggtgaccccagccgggagatgcgagtcccgcggagcccgcgcccggcggacggaccgatggacaaagccggggagagctcgggcgcggccggggcgggggccggtgcccgcagggacccgggcgcagcggggaaaggaggggcgggcaagcggcgagaaggggaaggaagcggaggtgccgggcgggcgcggggcgcgggcaggaagcggggaggggcggcggggcgggggcctccggaaaaacgccccgacttcctgccccgccagagccaggaagcgggagccgggacccagggcccgggatcgccgagcccgacctcgggcgccccgccggtcacctccgcgcggacaccaggtactcggtccccggccccgcccggcctcctcccctcggctgttgggggaagtggggaggaggagggaggggctggggcgctgccggcagcgg

SEQ ID NO: 21787 - DNA, 2300 bp, Homo sapien
tctcccctctttgctccctttgacagatgggaaaactgaggcccaaggaggggcggccgctggttccgtggggtccgaagggggcccctccgctgccggcagcgccccagcccctccctcctcctccccacttcccccaacagccgaggggaggaggccgggcggggccggggaccgagtacctggtgtccgcgcggaggtgaccggcggggcgcccgaggtcgggctcggcgatcccgggccctgggtcccggctcccgcttcctggctctggcggggcaggaagtcggggcgtttttccggaggcccccgccccgccgcccctccccgcttcctgcccgcgccccgcgcccgcccggcacctccgcttccttccccttctcgccgcttgcccgcccctcctttccccgctgcgcccgggtccctgcgggcaccggcccccgccccggccgcgcccgagctctccccggctttgtccatcggtccgtccgccgggcgcgggctccgcgggactcgcatctcccggctggggtcacctccccggaggtgctggggggcaagccctgctccccgtgcgccctagaccgagccacgacctccccggctttccgcgtctgtggttctcatggtcttgcgcccttccttcgcctctgtgggtgtgctcccgcctgcgtctgcatccccttctctgtccctctgtctttctctactggggtctttccctccttggcctccacctctcctctctgtccctccatcactttctccccgaaagcccttctctaccctctccagctctctctgtatctttctgcatctccgtctcagtctctgtcatttccccagctgttgctgtgcctgggcctcttcgtgcccattttcggttgccccttctcccttctgtctcttcctttccttctcgctctctctctgtccctttctctccacgtccctgtctctctcccggattcccagggtctcatcatctcttccttcccttgctcgtccccttcatgatccctgggtctcagcctctctcctctccctttctcaggaaatccgtgtctctgtgcctctctgtcattgccccgggatctccctgctatccccaggttaggaccacagaccctccaaaatgccccttctgtaagtcaacgcatcgggaaaaggctgcagtctgaattctgtactagccccaatccacaagatagtccctgtgtttccaaggcttaaatacgcataaagtggctcatgcctgtaatcccagcactttgggaggccgaagcatggtggatcacttgaggtcaggagttcgagaccagcccggccaacatggcgaaaccctgtctctactaaaacaaaaattagctgggtgtggtagcacatgcctgtcatcccagctactcgggagcctgaggtacaagaatcgcttgaggtggaggttgaagtgggctgagattgcgccactgcactccagcctgggcgacagagtcagactctgcctcaaaaaaaaaaaaaaaaaaaaaaagcggccgggcgtggtggcaggcgcctgtaatcccagcactttgggaggccaaggtaggtggatcacctgaggtcagaggttcaagaccagtctggccaacatggtgaaaccccgcctctactaaaaatacaaaaattagctgggcatggtggcaggcgcctgtaatcccagctacttgggaggctgaggcaggagaatcgcttgaacccaggaggcagaggttgcagtgagcactccaacctgggcaacagagtgagactctgtctcaaaaaaaaaaaaaaaaaaaaaaagtgtaagtaatttggtagccacagccatcttgatcttgtcccccttcttgcttaaggatatgaccctagggtgaggccctgcaaagagggccaaaccagtccttcagttggtctggggaccttcccaagagacatcttgttctcccaggagggcagcccagactggctacctggtcccaggtgtggggagtgggcagggagtggcttgggctgggactcctgggtctgagggacatgtgggagaggcggtttccgtaagatccacgactcctgccaaggtctgcagttgggaagaatttattatcactaagtggccctgacagatcagggaggagggggtgacactaacgaggctgctacaatcagctcccctagaggcagcgattaagggctcattacccgctggggtgaggggagcctgggaaaggcagcggggcggggggattaggttaggaggtggggcagtttagagggaagaagag

SEQ ID NO: 21788 - DNA, 2300 bp, Homo sapien
ctagtacagaattcagactgcagccttttcccgatgcgttgacttacagaaggggcattttggagggtctgtggtcctaacctggggatagcagggagatcccggggcaatgacagagaggcacagagacacggatttcctgagaaagggagaggagagaggctgagacccagggatcatgaaggggacgagcaagggaaggaagagatgatgagaccctgggaatccgggagagagacagggacgtggagagaaagggacagagagagagcgagaaggaaaggaagagacagaagggagaaggggcaaccgaaaatgggcacgaagaggcccaggcacagcaacagctggggaaatgacagagactgagacggagatgcagaaagatacagagagagctggagagggtagagaagggctttcggggagaaagtgatggagggacagagaggagaggtggaggccaaggagggaaagaccccagtagagaaagacagagggacagagaaggggatgcagacgcaggcgggagcacacccacagaggcgaaggaagggcgcaagaccatgagaaccacagacgcggaaagccggggaggtcgtggctcggtctagggcgcacggggagcagggcttgccccccagcacctccggggaggtgaccccagccgggagatgcgagtcccgcggagcccgcgcccggcggacggaccgatggacaaagccggggagagctcgggcgcggccggggcgggggccggtgcccgcagggacccgggcgcagcggggaaaggaggggcgggcaagcggcgagaaggggaaggaagcggaggtgccgggcgggcgcggggcgcgggcaggaagcggggaggggcggcggggcgggggcctccggaaaaacgccccgacttcctgccccgccagagccaggaagcgggagccgggacccagggcccgggatcgccgagcccgacctcgggcgccccgccggtcacctccgcgcggacaccaggtactcggtccccggccccgcccggcctcctcccctcggctgttgggggaagtggggaggaggagggaggggctggggcgctgccggcagcggaggggcccccttcggaccccacggaaccagcggccgcccctccttgggcctcagttttcccatctgtcaaagggagcaaagaggggagaactcacacttgacgagtgccccataggtggggacgaacggtgcgaggccggggccaaggcctcccacctgctcagtggagaacggacgatcactaccattgtacgggtggggaaaccgaggcccggggagccaaaccgactcgtcccagggaacgcacatcgtgagaaagtgtggagttgggatttgaactcgcacgtgctttccgcaaagcgccatcctccaacccccgcatgctttagggccacctaaaaatgaaaaacaacgataacaacaacgacgagggtcgctgtgaagctgaaagttgcagagtgcatttgaaagagttttcggaaagctcttttctaggtcattaattataccgtgagagacaggtgtagggagagagctggaggccttctcccattgtacggatgggaagactgaggtctacagagaagtcattactttttgcagattacactgcatgtcagagggaaagttgtgctggaactcaagactattgcttttccggttccaaaggaaggggctgggggtgggagacggaggggattgatgtacgaggattggaaattcagcgggtcccctaagtggggagactaataggacggggagccccagtccgccgtccgagtgctcagcgctggggtgactaggagatctccgatcgaactcgggaggagttggacccatctgcacctccgggcgcggggcggggcccggggagtgacgggggcagtcgagatacggaaacgctggccctccaagacaggccagagcggccctatctggcctgcgtggcgcagtacagcgctagagcggccggcgggaggagtagagtcgtcggggccggagcccggcaggagccgggctagagcggctggcaggaggagtggagctgggcgcaaaggtggactcagggcggctagagcgacgcggcggcaggggtggggagagtgcggagcccgagcgcggaggcttcggttccggtggcggcgatggcttctctttccacctggagcaggtgagggacgcggtccccagcgggtgtcagaccctgactctgcacgtcctccccggcatccctggccgtgcacactgccacgtcc

SEQ ID NO: 21789 - DNA, 2300 bp, Homo sapien
ccccttccctcagtttgccctttccacagctttgctcccaggctctgacctctctgctggtgctgcgtctcccacccccttggactacgttttccatcaacccttccttttccagaaccttccctgagtacatgaccagtccaccctctgagctgcattgctggccccctaggtggggagcccgccagccccatgagcttcatccctcaccatccttacactgctgtggcctcaggcccttggatctctgcatggccaggccagggctcacacaccagctctgctgactgcttgtgtttatttagtatcttggatatgactcccctttcttagcctccgtttgcttttctctaaaggagtatgagagggtggggaggatgaatggacgtggaggcagcacagaatccagggccctcccgacctcagggggctgcagtctggttgggtgggagagatgtttgtgacctatttgctaggcctggggtccccatccacccaggacacacaggggcacccacttctgttgcatcttcatgctcctgcccctagtggccatgttctgagaggtcttaacatctgtccgtcccgtgctgaagtacagagcagccatgtggtgtctgccaggcactgggtagctttagcccccgcaattccaggcccccagagtgtgggtctcgtggccgcagaggccttccagccagccctgctccctccaccccacaggtgctgacgcccccctggagctgggggactcatccccgcagggcccaatgagcctggagtccttggcgcccccagagagtaccgacgagggggccgaaaccgagaggtgcccaggctggggtgcaggggcgggaggtgtggcttactgggcgctggtgggtgggtgcagggtcaccgctgccatctgtgcctgcctgtcccaggctcttgctccccatgctcctctgctgctctctgggtctggccattcctctcccttcttctttccttttctcatctccctcctgcttcctcattgcccccctttccttttatccttcctttttcctctgctccttcctctccttccttttttcactaatccttctcctcctcccttcctctccaccactccttccatctcctttatttccccctcctctctcacctcccctctcctctctcacctcccccctcctctctcacctcccccctcctctctcacctcccctctcctctctcacctcccctctcctctctcacctcccccatcctctctcacctcccccctcctctctcacctaccccctcctctcacctccccgctcctctctcacctcccctctcttctctcacctccctcttcctctctcacctcccccctcctctctcaccttccccctcctctctttcctccccactcctctctcacctgggttttctttccccaccttccatccccctccgatctccctgccacttttcattttttcagcccttcctccccttctctttcaagcccccctgccccctgccccccaccccccgcctcgctcctgcctcctggtgcccgtccctcaaccccccacccctctgctctgtgccctgggggccctgtcccccttacagctggggggcaggctctgcctcctgcccgtccttgtgccgctgctttggggaccctttggtgggtgcggggaggtgggtcaggttccatctgggcccacctctgaccctgtgcccctctctccccagaaggtggaagaggtgggtgcctgggccctgggtgggggaagggctagcccctcccccatttctcccagcccctcccctctccccatggccactccctccccttcactccctgtgaggggtgggtggggacatcaccctcccagttgaagagctaagtatggaaatcctccccaccccataacaccccctctgttgccatccccctgcctcagggaagggagggggtcagtcctatgctccatcctgggttccccatcccttcccccatcaaatttcagtatcccccctcccccaagaccccccactaccccagtgcccctaaaatcccaccactcctctgactctctcctctcttctgttgcatgtttgatccctgtcctggtcacccttgccccggtcctggtctctccctgtctctgtccctgtcctggtctctccccgtctctgtccctgtcctcgtctctccccaatttctgtccctgccctggcctctccccacctctgtccctgccctggtctctccccgtctctgtccctgtcctggtttctcttcgtctctgttc

SEQ ID NO: 21790 - DNA, 2300 bp, Homo sapien
cccaatgagcctggagtccttggcgcccccagagagtaccgacgagggggccgaaaccgagaggtgcccaggctggggtgcaggggcgggaggtgtggcttactgggcgctggtgggtgggtgcagggtcaccgctgccatctgtgcctgcctgtcccaggctcttgctccccatgctcctctgctgctctctgggtctggccattcctctcccttcttctttccttttctcatctccctcctgcttcctcattgcccccctttccttttatccttcctttttcctctgctccttcctctccttccttttttcactaatccttctcctcctcccttcctctccaccactccttccatctcctttatttccccctcctctctcacctcccctctcctctctcacctcccccctcctctctcacctcccccctcctctctcacctcccctctcctctctcacctcccctctcctctctcacctcccccatcctctctcacctcccccctcctctctcacctaccccctcctctcacctccccgctcctctctcacctcccctctcttctctcacctccctcttcctctctcacctcccccctcctctctcaccttccccctcctctctttcctccccactcctctctcacctgggttttctttccccaccttccatccccctccgatctccctgccacttttcattttttcagcccttcctccccttctctttcaagcccccctgccccctgccccccaccccccgcctcgctcctgcctcctggtgcccgtccctcaaccccccacccctctgctctgtgccctgggggccctgtcccccttacagctggggggcaggctctgcctcctgcccgtccttgtgccgctgctttggggaccctttggtgggtgcggggaggtgggtcaggttccatctgggcccacctctgaccctgtgcccctctctccccagaaggtggaagaggtgggtgcctgggccctgggtgggggaagggctagcccctcccccatttctcccagcccctcccctctccccatggccactccctccccttcactccctgtgaggggtgggtggggacatcaccctcccagttgaagagctaagtatggaaatcctccccaccccataacaccccctctgttgccatccccctgcctcagggaagggagggggtcagtcctatgctccatcctgggttccccatcccttcccccatcaaatttcagtatcccccctcccccaagaccccccactaccccagtgcccctaaaatcccaccactcctctgactctctcctctcttctgttgcatgtttgatccctgtcctggtcacccttgccccggtcctggtctctccctgtctctgtccctgtcctggtctctccccgtctctgtccctgtcctcgtctctccccaatttctgtccctgccctggcctctccccacctctgtccctgccctggtctctccccgtctctgtccctgtcctggtttctcttcgtctctgttcttgtcttggtctctccttgtctctgtccccggcatctgcctgactctgtccttggcctcggggtccaggctatcagggcgtctggggcgctcagagagcctgcgggtgagtgaccgccgccggccttcccggggcagcctcggggctaagggccggggtgggggccgctcccggagcgacgtggacatggaccccagttccgccacggcagtgcttggccctgcccgacgagccacgtatgtcaaccctctcccttcccccatccactaaggcagcctggagaatcagggagggattgttgtcagagtcacagaggaatgggcgttggagaccgaggtcattgaggccaactgtggtcacagaccttggaggaggagggggtagaatgcttctagagatctgggaactctagtgtggtccgatctagagacctggtctgctgcacgggccaccctgcgggcatcgaatgccaaggccactgaccggggttgaacgctctaagaggctgaaggctgcttcttgggatggcccaagctggggccctaacaaggcctctgtccacagccccgagcctggagatgagggggagccggggcggtcgggactggagcttgaaccagaagagcctcccggctggcgggaactcgtccccccagacaccctgcacagcctgcccaagagccaggtgaagcggcaggaggtcatcagcggtgagtactgcccccatcaccccactgtggccaaggacacagtccagctctggcaa

SEQ ID NO: 21791 - DNA, 2300 bp, Homo sapien
acaaattagctgggcatggtggtgcacacctgtaatcccagctactcaggaggctgaggcaggagaatcgcttgaacccgagaggcggaggttgcagtgagtagacattgtgccactgtactccagcctgagcaacagagtgaaactccatctcaaaaaaaaaaaaaaaaaaaaaggaaacctgattccactaaaagcctgggggtgacaaagaggaaataaacagtaactagccaatctgatcttcaaagtgtaactcttccatcttcagtgtggggcccttgcaaagggcttccctgcctattgcgccaccagcccctcagacagggccatcttcctcccacctcctgggaacaccttccagcaggcctcaaagcacaaaccctaaactgctgtagatcttggaagacaagagctgggcctaaaagagtcacttggggccaggcgcagtggctcacacctgtaatcccagcactttgggaggccgaggcgggcaaatcacaaagtcaggagttcgagaccagcctggccaacatggtgaaaccccatctttactaaaaatacaaaaaattagctgggcatagtggcgggcgcctgtaatcccagctactcgggaggctgaggcaggagaatcgcttgaacccaggaggaggtggaggttgcagtgagccaagattgtgccactgcactccagccctggcgacagagtgagactccgtctcaaaaaaaaaaaaaagtcacttgaacctgggcatggtggctcacacctgtaatcccaatacttgggaaggccaggcagaaggatcgcttgagtccaggagtttgagacctactgggccaacacagcaaaatcccttatctacttaaaaaaattttcaaaaaaaaaaaggtcacctggttatcccatatagatattttccttccagccccacccagctgctttggaaaattaggatcccagtctgcttaagggagcccaggcttccctatacttccacacacatttcttgaggccctgttctggttcaccccattagaattcaattagaattccagccctgtgggccaggcacaatggctcacgcctgtaatcccagcactttgagaggctgagacaggaagatcacgaggtcaggagtacgagaccagcctggccaacatggtgaaaccccgtctctactaaaaaaatacaaaaattagctgggcgtggtggcgggcgcctgtaatcccagctactctggaggctgaggcaggagaatcgcttgaacccaggaggcagaggttgcagtgagccgagattgcgccattgcactccagcctgggcaacaagagcgagactccatttcaaaaaagcccacaaaacttctcaaccttttgtctttcccaacttcactcccttctctccaaaggtgtgtgtggcggggtcggaggtgtccctagccccaactcattcatctttgggactccacaaggtggggcagggggcaacctcagatacccctccagcaaccatggccccctcactagcctcaatctcttgaggaaggaatcaattcccacaaattatctaaatctttctactcaaaatgtagtccatggaccaggggcatcagcatcacctgggaactcagaaatggaaattatgggctccaccccagacttgctgaatgaaaacatctgggctagggcccaggaatctgttttagcaagccctccaggtgtttttttatgccctctagagtcagaaggacagctctgcacggtccccattgtgccttccctgggagagtacacaacgcccgcttctgccgttagagttcccataacgccctcgctcctgacagcccacatgcaccctcctgaaactacaactcctataatacccagaggcgcgcgccgtcactttctgggattatatctcccaaggtgttttgcgagtcagaccgccatcatagcgcccatcctcttagtcaccgtcaggactacaactcccacaatactcggcggcagaactacagtccccagctgctccggggctgcgccacgtcgactccgctgggtggggccggcgtcgggcggggccggcggggtcttcagggtaccgggctggttacagcagctctacccctcacgacgcagacatggcagcgcagaaggaccagcagaaagatgccgaggcggaagggctgagcggcacgtgagcgagctggctctaggccctcggaccagagacccgggagtccgggcccccggccccctcctccctcctccctcgagagcctggagtcccagccccgagc

SEQ ID NO: 21792 - DNA, 2300 bp, Homo sapien
cctgacctcaagtgatccacccacctcggcctcccaaagtgctgggattacaggcataagccatcatgcccggcccattcagtatacattttttgaccagccaccacatgttaggccctgttttgggtgctgggtgtacacacagtagtgagtgacatggtgaagtcacccctctctgagacttacgctctggttctagaagacagacaataacaaaggcatgaggaggtaatcgtagtggttgtggtgctgagggagggaaccctgcaggtgtctgggggaagagcgctccggtagcaggcacagcctgtgcaaaggcccagaggcgggagtgtgctgacgcatctgaacaccagccagccagccagtgcagaggggctgggagccagggagcgtggtgggggtggtgggtgctggccagatcctgtcaggccccacgggcatggagaggacttggctgtgactctgaggagcacacaagcctccagggggctctcagccaaagagagacaggagttgactcagagcttttaaaataactttattaagatataattaacataccatagctcgtccctctaagtgtataatttaatagttttagtatattcgcagatataggcagccatccacatagtcaattttagagcattttcatcacctccaaaaagaaaccccacatctctcagctgtcacccgccccctcctccccgacactcccagccctaagcaaccactaacctactttctgtccgtatggttttgcctattctggacatttcataaaaatggaagcatacagctgggtgtggtggctcacgcctgtaatcccagcactttgggagaccgaggcaggaggatcgcttgaactcaggagatggagaccagcgtgggcaacatagggagagcatgtctctataaaaaattagccaggcatggtggtgtggacctgtggtcccagctacgtgggagaccgaagcgggaggatcgcatgagcctgggagatcaaggctgcagtgagctgtgatctcgccactgttctccagcctgggtgacagagtgagaccctgtcttaaaaaaaaaaaacagggtgggaggaggggagcacagacgtggtggcttatgcctgttatcccagcactttgagaggccgatgagggcagatcacttgaggccaggagttcaagaccagcctggccaacatggcaaaatcccgtctctactaaaaatacaaaagttagctgggtgtggtggtggtgcctgtaatcccaagctactccggaggctgaggcaggagaattgcttgaacccaggaggtggaggttgcagtgagctgagatcgtgccactgcactccagcctgggcaacagagcgagactctgtctcaaaaaaaaaagaaaaaagaaaaaaagaaaaagaaaaagaaatatatatccatgacatagacagagcggacaggaatgagcagaggtctctgtgagagagtgtgggggagccctggtgtgggcctatcctggcacccgtggctctggacaggggacaggatggggcagggagcttcctggtgtctgcgtggctcaggcacgccaccctctgatcggtccccagctctccatccatgagaccgaggaccccaacgacaaccgatacctgctggtgatgaagggtgcccccgagcgcatcctggaccgctgctccaccatcctgctacagggcaaggagcagcctctggacgaggaaatgaaggaggccttccagaatgcctaccttgagctcggtggcctgggcgagcgcgtgcttggtgcgaggctgccgggcgggctctggggtccctggagggcaaggagggttgtgatgctgcccaaagcctgtctcagcccagggcctcccagaatatactgtaaatgaatgaatgaatgaatgaatggatggatgagaggggaaggtatcctaggaaatgaatgctgactggccgtcttgctgatggggagatggaatgcgggcgatgcagacatctaggggcatggggcggaggttccgaggctgggaccctcacaccccaacccttccctgccactaggtttctgccattattacctgcccgaggagcagttccccaagggctttgccttcgactgtgatgacgtgaacttcaccacggacaacctctgctttgtgggcctcatgtccatgatcgacccaccccgggcagccgtccctgacgcggtgggcaagtgtcgcagcgcaggcatcaaggtgtggcttggggtggctgggggaggcaaagccaggcgtggggc

SEQ ID NO: 21793 - DNA, 2300 bp, Homo sapien
aagaacccatctctaccaaaaaatgtgaaggctgggcgcagtggctcatgcctgtagtcccaagactttgggaggccgaggcgggtggatcacctgaggtcaggagttcgagaccagactggccaacatggcaaaaccccatctctactaaaagtataaaaattagccaggcgtggtgatgggtgcctggaatcccagctactcaggaggctgagacaggagaatagcttgagcctaggaggcagagcttgcagtgagccgagatcgtgccacctcactccagcctgggcgacaaaagcgagattctgtctcaaaaaaaaaaaaaaaaaaaaaaaaatttttttaaattagccaggcgtggtggtacatgtctgtagttccagctatttgggaggctgacccgggaggttgaggctgtagtgggccatgattgaaccactgcactctagcctgtgtgacagagggagactccatctcaagaaaataataataataataattattataataataataattattattattatttttaaaaattttttctctggctgctttgctgccagcttcaccccagaagtccattctctgtgaggttccgcctgacagctgtgagcatattgactaaatgctgtcttcaaggtgcatggcagggactatcttagaaataccattctcctctttcattctttgacttaatgttttatgtgaagttttccatattagggccgggcagggtggctcacgcctgtaatcccagcactttgggaatccgaggtgggtggatcacttgaggtcaggagttcaagaccagcctggccaacatggcaaaaccccatctctactaaaaatacaaaaattagccaggcgtgatggtgggcgcctgtaatcccagctacttgggaggctgaggcacaagaattgcttgaacctgggaggtggaggttgcagtgagctgagatcgagccactgcactccagcctggacgacagagcaagactgtgtctcaaaaaaaaaaaaagtttactgttttccatattagcaatgttgaatgctaccctatgtcaaatggatttttatacgcaaaggattaagcatattgtgagcacatagtctgatgatttggggcaaactgaacagaatcacgtcagctgcaacgagactgcgtctccctgaagccccctcaagaccttatttagcccctgccccccaacccaagggtaacccctgatctggctgctaacagcatagattaactttgcctgtgttcaaacttcctattaacggaataattcagtatgaactcatttctggctctttttggctgaacatgtttttgacgttcacccatgcaggtgcaggcagcagtaatgtatttgtttttatcaatgttagtattccattgtccacaatttatcttttctgctgttagtggacatttgagtagtttgcagttttggacaattttttttttttttgagttggagtctcactctgttgcccaggctggagtgcagtgtcacgatttcggatcactgcaacctccacctcctgggttcaaggggttctcgtgcctcagcttcccaagtagctgggatgacaggagtgtaccatcatgccctgctaatttctgtatttttagtagggatggggtttcaccatgttagccaggctggtctcgaactcctgatctcaagtgatgcgcctacctcggcctcccaaagtgctgggattacaggcgtgagccactgcacctggctgttttgcactattatgcatgtggctgctatgagcattctagtccctgtctttgggtgtctctgccctgtttctattggtctgaattgggggtggcattgctgggtgctgcctcattcttttccaggccctcaggattctctgggggctgggcagctgggctgtggccctcgtgtcgctcatccaaccctgctgccgggcttgtccctgtaacttgcctgcccttgctcgtcctccaggtgtgtctgacgctgaccgccaagcgcatggcccggaagaactgcctggtgaagaacctggaggctgtagaaaccctgggctccacgtccaccatctgctcagataagacagggaccctcactcagaaccgcatgacagtcgcccacatgtggtttgacaaccagatccacgaggctgacaccactgaggaccagtcaggtgagcgcaggccccgggtgaggaccatgggggcctggctccaggagtccctggccctcacacatgcctcccccagggacctcatttgacaagagttcgcacac

SEQ ID NO: 21794 - DNA, 2300 bp, Homo sapien
cggagggtcaacgcagatgccacaccaggatgtggtttcaaacatggccacctaattcagaaacacagacacagactcagatatacactgacagagaaactcacacacacactgacacgcacacacacacacagcaatgcaggcataacctggtgacagagagacatgagagtcaggcacagagagtgtcctcagatgttcaaatctaaacagtcttagacataagctctcacagagaggcagagctggagacacagagacagagatccacacacagagaaccaaagaagctgccttgtagaatgtaaagtcaggcatgcagccagtcagacagacacatggacagacagccgcatcccagactcaacatgtgcaggaggacagacacacacacaaaacagatggacaagtcgggcatggtggctcacgcctgtcatcccagcaccttgggaggccaaggcaggagggtaacttgagaccaggagttccagtagcctgagtaacatacccagacagacccagcctctaaaaaaacacaaaacatagccgggcctggtggcgcacacctgtagtcctagctactccggaggctgaggagggaggattgcttgaatctgggaggttgaggctacagtgaactgagattgtgccactgtactccatcctaggcagcagagcgagaccctgtctcaaaaaaaaaaaaaaaaaaaaatgccaggaaagatggctcacacctgtaatcccagcactttgggaggccaaggtgatagatcacaaggtcaggagatcaagaccatcctagccaacatggtgaagccccatctctactaaaaatacacaaaattagccaggtgtggtggcatgcacctgtagtcccagctactcaggaggctgaggcaggaggatcgcttgaaccaggaggcggagattgcagtgagccaagatcatgccattgcactccagcctgggcgacagagtgagactctgtctcaaaaaaaaaatcgacagacccttagattcaaacacaaccattacagaaagagggactcaagcacaaacaggggagactcagacacaccaaccctcataaccaacctagggtcagacacacaaatacagacccccactgacacaaagctcccttcccagactccaggcgagcagggactggtggagagtggcttgggcggcccctgatcaacatccccacatctccccacagctgtacctgggcatcgtgctggcggccgtggtgatcatcactggctgcttctcctactaccaggaggccaagagctccaagatcatggagtccttcaagaacatggtgccccaggtgaagggtgcccagcaaggggccagacgggggtgttagtgtatgggctgggggccgggcccagtgacccccaggcagagggagtctgggaggtgacattactccatcccacctcagcaagccctggtgatccgggaaggtgagaagatgcaggtgaacgctgaggaggtggtggtcggggacctggtggagatcaagggtggagaccgagtgccagctgacctgcggatcatctcagcccacggctgcaaggtgggcctgggcctagggcccggctttaccctccctcgggctgcccaggagctcaggcccagcccctcctccctcacactcaggagtccaggtcccaacccctcctccctcagacccaggagtccaggcccccaggccctcctccctcagacccaggagtttaggccctgggccacctcctcacccaacagtcaggagtccaggcccagccctcacctttcggagatccttagggaccctagaccttggccagcagcactgtgccttccccaccttcaagatcccagcctctggcctcccacacaccactcacccactgggcacccaggcttctagctgtgatctccaggcacacaggcttcagccccaagccctgtacacaaataccctcctgtcccaggccctggactgaaccctctctctgctgcacctacccccaggtggacaactcctccctgactggcgaatccgagccccagactcgctctcccgactgcactcacgacaaccccttggagactcggaacatcaccttcttttccaccaactgtgtggaaggtgaggcgggtgcagagaagacacacagctggggcagacacagggatgtgtcccagggggtcaggcctccagaacctccctgagccaccccacctcagcctaacccctctggcctgcaggcacggctcggggcgtggtggtggccacgggcgac

SEQ ID NO: 21795 - DNA, 2300 bp, Homo sapien
ccaggcccatgcctctaggccaaggtgtcaagagaaggaaaggaggatatgttgataggctctccctcccctaggaagagggcagagttggggagggggcgtctgggggtgaggcatctgggttaaaagatgtggctcctccccctttcccagtctccatggcaacagcccagtctgcaggcccaacctcctttgctgcagaagcagctccctgttaccatggcaacaaaggacagcgagaaagatggggacgggtcagaggacaggattgggatggggctctgggcactggggaaagcctccattcactctctggccttgtctctgtccatatgctgtggctctgaatctctgtgtttctgtgcctctctctggccttcagcctttcacacatttccctgcaccaggtcctcgaccttcacccacccaccctcatacaccaagctcactccctgtcccttgcctgcgtcccccacatctcctatcccataggtggagaggatacccacattctgagaaaactacaaggtcaaatgctctctgtctctctctctctctcttccccttctaccatccccagggagagtctggggtgttcctcatagaacaaagtggtgttggagtgagtggggaggcctcaacttcttgggctccagtggggtggctgatggggtgttgtgtgtcggcagcaggcctggggtgtgggtgccggctgtgcatctgtgtgtgtacatatactgtgacgagctctgtgtgtcatgtgggtgagggcgttggggtgtgtttggaggtgcaacaaagatgtctgcgatagtgctgcaataacgtgatgtgtgtatgtgtgggaggtgtgtgggtgtcgcgtgacttgtgtttgaattattgtgctatgtgtaagtgtgtgcacctttttgtctgtcattcacagttagcattggcaactttgcactgtgggccgttgctcatgcccaaacacactggggagcagtgtgtgtgaggatgtgtgcgacatcgtgggatcatgcaacgatgtccacaaaggctgatgtagtgtgtctggaggcagtgtgaggcctgtgcgtgtgtgatggtgctgagtgcaggtgtgtgttggtttatgggttgcacgatgtgggtttctatgtgagatggtgggaggtcaggtgtggtagagtgtgtgatgtgtgagtctgcgattttctgagtgtcggtgttagtccgcacagcactttgtggctgtgattatgagtctcttgtggtgtgatgggtgtgtaaggtgtgtgccctatgtgtgtttcactctatgtttgagactctgtgtgtggtggggtggtgttgtgtgtgtgagggtacatgctggcctatggtggaatatgagtgcaaccctgtggtgtgtgcgtgtccccagcatctgggctatcagtgtgatggtcctgtgtaactgtgacgctgggcattttctgggcctcctggggccatcctccaccgtgttgtgtctcccgtgtaccctgtgtggttgtggctcattggatagctcaggcgtagtgggggggcacccacagtgagggaatctcagggctcctcccgccagcacccctcctcaattgcaaggcctttcttgctctcttgtgttcccttccaacttcccctcctgcagggccctctccctgaacagcactaccccccgccgtctccagggtccctggtgccacactgcagtgattcaccgggcttccctcccaccccgtgtcactacccgccccccctcccccagcgtacccttctcggtgatggcacacccccacaatgagaggatttccggggttttctttccctgagcgccccttcttggaggccctactccatattgagggggtctccaagtcccctattgcggaggtctctgggaatccccccacccccgcagcgctcccccttcgcggccgcgccgccactttgcggagcccaaggggaggacagctgcagtaccaggggcggggccgcgggccgtccgtcagcacggcggcgcccctgattggccagcgccgcccccctcccgcggacgcgggcatatgaggaggcggaggcggcggccgccgcagcctctgtgcggtgggaccaacggacggacggacggacgcgcgcacctaccgaggcgcgggcgctgcagaggctcccagcccaagcctgagcctgagcccgccccgaggtccccgccccgcccgcctggctctctcgccgcggagccgccaagatgggggtaggtgctgagccggctgggcgccgcttccgtgtgacat

SEQ ID NO: 21796 - DNA, 2300 bp, Homo sapien
gttccagctactcaatcttccattgtagtatagaagctgttgtagatgatacattaaatgaatgagtgtggctgtgttccaataaaactttatttatggatactgacactgaaatttgaattttatataagtcatgtgtcataaaatattccttttttttttttttgaggcaatatctcactctgttgcccaggctggagtacagtggtacaatcttggctcactgcagcctcaacctcccaggcttaaggaatcctcccacctcagcctcttgagtagctggaaccacaggcacgtgccacccagtctggctaactttttgtagagatagggtttcgccatgttgcccaggctagtctcaattcctgggctcaagcgatccacccaccttggcctcccaaagtgctcggattataggtgtgaaccactgcgcccagcctgttcttctgatttcattttaaccatttaaaaatgtgaaaactggccgggcgtggtggctcatgcctgtaatcctagcactttgggaggccgatgcgggcggattgcctgagctcaggggttctagacctacctgggcaacaaggtgaaaccccatctctactaaaatacaaaaaattagccaggcgtggcagtgtgcgcctgtagttccagctactcgggaggctgaggcaggagaattgcttgaacctgggaggcagaggttgcagtaagctgagatcgtgccactgcactccaacctgggcaacagagagagactctgtctccaaataaataaatacatacatacatacatacatacatacatacacatacatgtatatatacatatacatatatgtatatgtaaaagccattcttagcttatggggctgtacaaaaatagacagcaggtcagatttggcctgtgggccatagttagccagccgctggttcaaaccaattacccttaatgtaattactgatatggttaggtttaaatctaccaacctgctatttgtcccatctgttctttgttccccttttcctctttttctacctttagggggttactgggacttttcttttcttttctttttgagacagggtctcactctgtcacccacgctggagtgcagtggcacgaacacgactcctgggctcaagccatcctcctgcctcagcctcctgtgtagctaggaccataggtgcgctctaccatgcccagctaattttttaaattttttgtagagaccggatctcacttcattgcccaggctggtctcaaactcctgagctcaagcaatttgcccaccttggcctcccaaagtgatggaattacagcgtgagccactgtgcctggcctgttgggattttcaagattctgcttatctctactcttgacttgttaactgtacttctttgttttatttttcttagtggttttctgggtttgcaatatggatctttaatttattacaaaatactttttttttttttttttgagacggagtctcgctctgtcccccaggctggagtgcagtggcgcgatctcggctcactgcaagctccgcctcccgggttcatgccattcttctgcctcagcctcccgagtagctgggaccacaggcgcccgctaccacgcctggctaatttttttgtatttttagtagagacggggtttcaccatgttagccaggatggtctcgatctcctgacctcgtgatcctcctgcctcggcctcccaaagtgctgggattacaggcgtaaaccaccgcacccagccacaaaatactttcaagtaacattataccatttcacgtaagatataagaccttgacaacatgatatgttcctctcaccctcccgtcctttgagctctgcatatcttatgaaccccacaatacattaggggtgtgtgtgtgtgtgtgtgtgtgtgttagatagtaaatgctgggtgtggtgctcacgcctgtaatcccaacactttgggaggccgaggctggaggattccttgaacccaggcgtccaacaccagcctggccaacatagcgagacctcatctctacaaaaactaagaaacattagccaggcatggtgatgcatgcctgtggtcccagctccgtgggaggctgaggtgggagaattgcttgggtccaggaggttgaggctgcagtgagctgtgttcacgcctctccaccctagagcaggaccctgtctcaaaaacaaaaccaaaccactaaatgcttcgtaaggaaatttgaaagtgaggaatatatcttttctatttacccacaaatctaccatttgaagagggtgccctt

SEQ ID NO: 21797 - DNA, 2300 bp, Homo sapien
gagaatgcacagcacagtttctcaatacacaataaccagtgtggatattttatttattttatttttgagagagtctcgctccatctcccaggctggcctgcagtggtgaaatctcggctcaccgcaacctgagcctctgggactctacctcagcctcccgagtagctgagactacaggtgcacaccagcacgcctggctaatttttgtattttttatagagacggggttttgccatgttgcctaggctggtcttgagctcctgggctcaagccatccacctgtcttggcctcccaaagtgttagagttacaggcttgaggtactacacctggctcattgtgtatattttaaccaaagctctttcctggctcttccctaagtcctaagtccttttgttcattattccaaagtgacattgtacaaacaaccatttagacaataactgtgtccagataagtttcccatttgttaccatcatcacatgccttgttttcctagcacttggaccattctttctgcttttgtgtttctttggcacaacgggatcagtaaagtttgctcaaacccctcagaaataagcgtcaatgtggcaaactgactgtaggtcagagattgcaaactagaaactgtgtttgttttggcctgcagaacatttaataataattggtattagaatttgaattggttgctgtattagttcattttcatactgctgtaaagaactgcccgagactcggtaatttatgaaggaaagaggtttaattgactcacaggttcagcatggctggggaggccttgggaaatttacaatcatagcagaaggcgaaggggaagcaaggcaccttcttcacaaggcagcaggagagagatgtgccgagtgaagggggaagagcccattataaaaccatcagatctcgtgagaactcactatcactagaagagcatgggggaaaccgcccccctgattcagttacctccacctggtctctcccttgacacatagggattatggggattacaattcaaggtgagatttgggtggggacacaaagcctaaccgtatcagttgctaacatttatgttattttattttagagacagagttgctcagttgcccaggctgaagtgcagtggtacagtcatagctcactgcagcctcaaactcgggctcaagcaatcctcccacctcagccttccaaagcagtgagatttcaggcatgagagttgctaacatttataaccaggagactttataaaacaatcttaagtttccaaattctcttaaaattgcaccatctgggccaggtgcgatggctcacacctgcactttgggaggccgaggtgggcggatcacttgaggtcaggagtttaagaccagcctggccaacatggtgaaaccccgtctctactaaaaatacaaaaacaaaattgggcgggcgtggtggcaggcacctgtaatccaagctacttggcgggggtgaggcaggagaatcgcttaaacccaggaggtggaggttgcagtgagttgagatcgcgccactgcactccagcctgggtgacagagcaagactctgtctcaaaaaaaaaaaaaaaaaaaaaaaattgcaccatctgtcatcttcagcctgcctccctcatggggaattggactggagctaaaccctggtgagggaataccatctttaacccattagtggctcatgaagttggtttggtgagtcattaccagccatgtggaaagatgaagtatagcagaatagaaaatatcagtgtattgcccatagttactagggcaaggactgttctgtggaattaagtctagttacgtgtgttcatgtgtgggtgaattaggttgcagggtaaaatgtatcttttactgtgaattgtaataagaaatctgaaagcccctgatccactttggcacaagatctatccagtctgactctaaagttacctcctccctcatacgcatttgagcttggcaccaatgagcatcaggttggctgctgaagattaaaatggctccctgcaatctgctaggaactggcagtacccatgtgtttttccctggctttcaggtctattccccactctgagcatttgtaagtgagaaatgtgtactatgaataaatcaaccgtgctcagcaagcagattcctgctctacctgcctggtccgggctccaggatccgcaacccagccactagacacccagcctctgacccctgctttcttctgcccacccaggagaacccatacgtcatgcgccggcccaacttccaggccctgtcggggaacgaa

SEQ ID NO: 21798 - DNA, 2300 bp, Homo sapien
aagatcacgcagtgagtcaggggcagagctgggactgatccccagcctaggttttgcaggccacttgagatggtgagaaggacttgtgcctctatccttccctcgaagttctcattccacagtttcaccagctcaagctgtccttccatggggactgagtggggtccggtgtccaggcccacttcacagcattctgtgccccccacagtaaccctactccatggaaacccaagcatcccttcccgtggggcacagccctcagccaggggaagtggagctgtgcatctggccaaactccttgcccagtggttgccctgcagaaagctggggtgcctagaggaatccctgactccttaggggtggagagttgtgaagagcaaagatgcaccatctccccctttacttcttctccccagtagggtggggggcagtggtatggcacccacttctggcaggcagctccactccctgccttactcactcctcccttccagctcttcctgcttgtatccgagtcggttcctatcttttctccatcctctgtctccctcttcctgtgtctcgcctgtgccttggtttccccacctccagcctgcccctctttcctccgctccctgctctgtcctttctttatcttgcctcctcatcctcctgtctcttccctctttctccctcctagtcctctccctgcctccctgtaactctcctcttttctctccatttctacccccattttcctattgtcttgtctttctcttcccttgtatttctatctattttgacctttctctctttctgagtctctctgtctttcccttctctaagcctctctttcactttctctgtttcctcccttctctctctttgctttttttttttttcccccttttactgctctgggtccattcatctatggggttctgtgtgtgcctctctctctttttctccatctctccatctctcccgaagtttcctaactcccagatactctctcctccagacctcggatgtccaggcctctctccccatgggattgtgggaactggggatgttaggaaagtggcaagtgaggcctgggatggggttgcctagcaaccaccgcatcctctccagccggtttctgttgcctagtaacggctgcctgcccagagacaggggcgggactgggtggggggtggcacttcctggtttcctatttgggtggggctggtcccaggaattcactcctacctgagaacctcgcacgcctccctcctgttttggtagctgtgcccatcctctctcttgcagcctgtcctactcagcgcctgagcactgtgacctccaccctggtagtgcccctctgagctgagcttcccttcttgcaatgccctcagtattgccagcttctaaacagagcagggctctgcagagctgtgaactgcttgccaacaatgtccccaaggcttctgtgaccaccccatccagcaggcctccaaggggttccatcccaccacatagtaatctccccttggtctggggggtctccctgcaggtggcgagtgggggccgcggcagctgcgtccccatgaggaggggaggaagatgccggctgagctgctgctgctgctgattgttgccttcgccagccccagctgccaggtgctctcatcactgcgcatgggtgaggccctcccgcaccctgcccctgcatcctcaggccctggggctcctctggggacccaggcatgccagtccgtcagggtccaggtctcagctctcttcagcagcaaggaatcccagcctccagttcctccttcccccaggacccaggagtccagacccctagctcccaccaacctcagatccaggtgtctagacccctggtccgtatacccacctcaccctagagccctggagtctaagaccacagccccctccttcctcaggactcaggagtctggtccccaacccatgtgtcccctcagctgcaatcctggatgatcagacagtgtgtggccgcggtgagcgtctggccttggccttggcccgggagcagatcaacgggatcatcgaggtcccagccaaggcccgagtggaagtagacatctttgagctgcagcgggacagccagtacgagaccacggacaccagtgagcggggccatgggggcgtggggtgaggcagggcaggtcggtggccctcagtccatccctctgcccctggcctctggcctggccttgtcctcttctagctccatcctcccccttctttgtgtttgtctctgccttcttcccagacatggctgctgctgggcctgg

SEQ ID NO: 21799 - DNA, 2300 bp, Homo sapien
ggttttgacttttatctggctttgcccagtctctggggctgagtcctggacctgcctgacaccctacctgccctgtctctgtctcctttgctgtctcacttctaggctgtgtctgtctcttgctctctcacttagcctcagttcctacgtcttgggctgtctttctgtgtgtatctctgtgtccacctgctgcccctcaaccctgtctttctctgtctgctcccacctttggctgccacctgtgggtccctgtccttctgtcccatctctccctcggtctttctgtcctttgtcctctgctccctgatttgccccaggagtccctggtgtctcaggatgacccactccactcctgcctctctcctagctccgcccttcacactcctcccactctgagcgctcctccgggtctcccagcatcccttgtgcctccatccttgacaagccttcaccttaatccacattatagtttgcagtccccagcctgtccagcataccctcccacctagcactctcttcttctcagaggcctagaaggcagtgacttgctcaagatcacgcagtgagtcaggggcagagctgggactgatccccagcctaggttttgcaggccacttgagatggtgagaaggacttgtgcctctatccttccctcgaagttctcattccacagtttcaccagctcaagctgtccttccatggggactgagtggggtccggtgtccaggcccacttcacagcattctgtgccccccacagtaaccctactccatggaaacccaagcatcccttcccgtggggcacagccctcagccaggggaagtggagctgtgcatctggccaaactccttgcccagtggttgccctgcagaaagctggggtgcctagaggaatccctgactccttaggggtggagagttgtgaagagcaaagatgcaccatctccccctttacttcttctccccagtagggtggggggcagtggtatggcacccacttctggcaggcagctccactccctgccttactcactcctcccttccagctcttcctgcttgtatccgagtcggttcctatcttttctccatcctctgtctccctcttcctgtgtctcgcctgtgccttggtttccccacctccagcctgcccctctttcctccgctccctgctctgtcctttctttatcttgcctcctcatcctcctgtctcttccctctttctccctcctagtcctctccctgcctccctgtaactctcctcttttctctccatttctacccccattttcctattgtcttgtctttctcttcccttgtatttctatctattttgacctttctctctttctgagtctctctgtctttcccttctctaagcctctctttcactttctctgtttcctcccttctctctctttgctttttttttttttcccccttttactgctctgggtccattcatctatggggttctgtgtgtgcctctctctctttttctccatctctccatctctcccgaagtttcctaactcccagatactctctcctccagacctcggatgtccaggcctctctccccatgggattgtgggaactggggatgttaggaaagtggcaagtgaggcctgggatggggttgcctagcaaccaccgcatcctctccagccggtttctgttgcctagtaacggctgcctgcccagagacaggggcgggactgggtggggggtggcacttcctggtttcctatttgggtggggctggtcccaggaattcactcctacctgagaacctcgcacgcctccctcctgttttggtagctgtgcccatcctctctcttgcagcctgtcctactcagcgcctgagcactgtgacctccaccctggtagtgcccctctgagctgagcttcccttcttgcaatgccctcagtattgccagcttctaaacagagcagggctctgcagagctgtgaactgcttgccaacaatgtccccaaggcttctgtgaccaccccatccagcaggcctccaaggggttccatcccaccacatagtaatctccccttggtctggggggtctccctgcaggtggcgagtgggggccgcggcagctgcgtccccatgaggaggggaggaagatgccggctgagctgctgctgctgctgattgttgccttcgccagccccagctgccaggtgctctcatcactgcgcatgggtgaggccctcccgcaccctgcccctgcatcctcaggccctggggctcctctggggacccaggcatgccagtccgtcagggtccag

SEQ ID NO: 21800 - DNA, 2300 bp, Homo sapien
gttaggaaacttcgggagagatggagagatggagaaaaagagagagaggcacacacagaaccccatagatgaatggacccagagcagtaaaagggggaaaaaaaaaaaaagcaaagagagagaagggaggaaacagagaaagtgaaagagaggcttagagaagggaaagacagagagactcagaaagagagaaaggtcaaaatagatagaaatacaagggaagagaaagacaagacaataggaaaatgggggtagaaatggagagaaaagaggagagttacagggaggcagggagaggactaggagggagaaagagggaagagacaggaggatgaggaggcaagataaagaaaggacagagcagggagcggaggaaagaggggcaggctggaggtggggaaaccaaggcacaggcgagacacaggaagagggagacagaggatggagaaaagataggaaccgactcggatacaagcaggaagagctggaagggaggagtgagtaaggcagggagtggagctgcctgccagaagtgggtgccataccactgccccccaccctactggggagaagaagtaaagggggagatggtgcatctttgctcttcacaactctccacccctaaggagtcagggattcctctaggcaccccagctttctgcagggcaaccactgggcaaggagtttggccagatgcacagctccacttcccctggctgagggctgtgccccacgggaagggatgcttgggtttccatggagtagggttactgtggggggcacagaatgctgtgaagtgggcctggacaccggaccccactcagtccccatggaaggacagcttgagctggtgaaactgtggaatgagaacttcgagggaaggatagaggcacaagtccttctcaccatctcaagtggcctgcaaaacctaggctggggatcagtcccagctctgcccctgactcactgcgtgatcttgagcaagtcactgccttctaggcctctgagaagaagagagtgctaggtgggagggtatgctggacaggctggggactgcaaactataatgtggattaaggtgaaggcttgtcaaggatggaggcacaagggatgctgggagacccggaggagcgctcagagtgggaggagtgtgaagggcggagctaggagagaggcaggagtggagtgggtcatcctgagacaccagggactcctggggcaaatcagggagcagaggacaaaggacagaaagaccgagggagagatgggacagaaggacagggacccacaggtggcagccaaaggtgggagcagacagagaaagacagggttgaggggcagcaggtggacacagagatacacacagaaagacagcccaagacgtaggaactgaggctaagtgagagagcaagagacagacacagcctagaagtgagacagcaaaggagacagagacagggcaggtagggtgtcaggcaggtccaggactcagccccagagactgggcaaagccagataaaagtcaaaacccagcagagagctgagcaacagtgggcataggagagacatcagcaaaggtgagaggcaaggagggccagcgaaggcacacagggtgagggagaaggcaaagggagataaagaaacagcagcaggtacaagacttgggagaaggaaagaaatggccaaactctacaaagagagagggccagtcggaaagagagacagtatgtcggagctgcacgacaggcccatagaagaggaaggggcaagggggaaaagcacctgggagagagaaagggggagtcagggagggaaactgaggtggggagatggagtgagtgcactagaggggcacaggcagggacagggcaagcacctgcaggagaggccagacccacacagaggcatagccaccccaagacactcaggaatgccgtgtgggggagcaggagatcctggggcctgaaagcccccagacatggagaggaatgggagcagaaaggccacgcgaggtaacacagaagtcgggagagagaatgggagtggaaagagccagaccagccaggaaaagtcagcatggaccacggagaggtggggcagcagctgaggagggagggactgaggagccgggcacccagagtggatctgggggaaagaggtggaaaagtgacagagggaagacagcctccaagctcagaggcagagagagggaggaggacaggtgagcggaggcacagaatagaaagagaaatggaaagagacctgccgagggagacttggaaagagggaagccagggtgga

SEQ ID NO: 21801 - DNA, 2300 bp, Homo sapien
agacccacacagaggcatagccaccccaagacactcaggaatgccgtgtgggggagcaggagatcctggggcctgaaagcccccagacatggagaggaatgggagcagaaaggccacgcgaggtaacacagaagtcgggagagagaatgggagtggaaagagccagaccagccaggaaaagtcagcatggaccacggagaggtggggcagcagctgaggagggagggactgaggagccgggcacccagagtggatctgggggaaagaggtggaaaagtgacagagggaagacagcctccaagctcagaggcagagagagggaggaggacaggtgagcggaggcacagaatagaaagagaaatggaaagagacctgccgagggagacttggaaagagggaagccagggtggaggagttctgacagagagagggatctaaacagagacatgccgagagcaacctgggctaacagcaaagagagaagttgggcagagtcagagaggggcccaagagacacaggaaatgggggctcaaaagcggaaagacatatccaggagatagagactggacggggtggggacagggccaaggcccaccgcaggcagaggatgaggctcagaggaacagaaagagccagtctgggaccaggacggaggcttggagacagcaggggcacggacatgccaggggcccggggtaagtgagagcccaagtaagagcaatcagccccgtaggaccccagaaagctagagggccaggggcggcagtgagctatgtacccagaagaagaggtgagaagaggtcgaggtgaatggacgctgaggagatggagggcgcagagcaggcccctagtgggggagggtacttgccagtccggagaacggggagaatgtggtgcccccctgccaggcggcaccagagcccagccttccaggacccagaacccagcccaatccctgccctgcagacactcacggatcctggtgggacggagggctgggctccctcgaggcccgaagaccgacagcgggaggtgctctggcgctgggtggtggtggggctgggcggggggagagggcagtccacagggccccctcccccgccgccggtggtggctcccaactaatccaaaacggtggctccacaggagcagggaggaaggacaggtggaagaggagagggcgggccggggaggggaggaaggggaaaggagaaaatggaggagagaaggggagagaggagagggggaaggagcaaatggaggggaaggagggaggaaaggaggagaggaaggtgaaaacggaaggggggggcacaggcaaagccgggggagggggaagctggcccaggaaagggcccccgccccctcccctagccgggccggcctgggggggccacagggggcgaggactgggtggagaaaaggaagccggccatcaggagaagtgggggaggggagggcctgctgggggagggggccgccccctttccccctcccccctggagcctgggccctgccctggttgaggcaagggcccggagtcctcaagccctcagcccccacgggaaaagcatgctgggggcggggagagcccgggagtggagagctggggaggatggagagctgggagacccggagaggccaagaagggggcaaatgaggtggagagatagggaggagggagaggaggatggagaggagcaggtggaagagaaaggcggaggagggtggggtgtcccaggggctcccggtgctgggcctcagtgggagggcctggcgacacactcctggtcccctgtgaggagccggctccagtccccggctccagtccccggctgggcctgcctccctgccgctggctgccgccaccgctcagtctcccctccgaggccgccgcctgcctgcccgcctgccgcctgcgctgggtcctggagcgcagtggggtggttcaggagagagagaagagggagggagggaggcagggaggagggcgggcaggaggaagggagggaggcaggcaaagagagagtagggaggtgagtcgggggagggggagcctgtattggttggggctgggggccccccgcgaggagaatgctgatgagaagaaggagctgcattggatggaaggcccacccccgagccaccccctctaccacaccatgccaccgccctgcccaggcagccctgggcacaggagcccacagagatgagaggcaagaagacccagggagaaggccactgagatgaggggagagggctacagagatgaagagaaatgaagagaagagagacagcc

SEQ ID NO: 21802 - DNA, 2300 bp, Homo sapien
gaggttgcagtgagctgagatcgtgccactgtactccagcctgggcggtgggcgacagagtgagactccatctcaaaaaaaaaaaaaattaaattaaattttaaaaataggccaggtgcagtggctcacgcctgtaatcccagcactttgggaagccaaggcaggtggatcacgaggtcaggagattgagaccatcctggccaacacggtgaaaccccgtctctactaaatatacaaaaattagccaggcgtggtggcgagcgcctgtagtcacaggtactcaggaggctgaggcaggagaatcgcttgaacctgggaggcggaggttgcagtgagccgagatcgcgccactgcactccagcctgggcggcagagaaagactctgtctcataaataaaataaaataaaataaaataaaataaaataaaataaaataaaaataaaatgagtaactcctagatgtcttttactctctgcctcacatgagatgaaatggggctcacatgaaatggggctgttattagccccatttcacagattagaaacttaggctcaggacagttgacttgccctagaaccaggattccaatccgggaatctgttttaactatacatgcctggtgttagggaatttaatccatgagaaggttaggacatctagtgaccaaatggccatagaattggccccgggtctcactgtgagacgcatcccatagtggcttcaggtaagtaaataaataacacaattctgagagtcagtttcctcatccgataagttgaaattcctctgtgtttgggttcaaggagtaggtctggaaatgtttcttttcttctttcagatggagtctcgctctgtcgcccaggcgggagtgcagtggcgtgatctcggctcactgcaacctcggcctcctgggtgcaatcaaatctcgagcctcagcctcccgagttgctggggttacaggcacgagccaccacgcccagctaatgttttgtatttttagtaaagatggtagtttcaccaggttggccaggtgggtctcgaatgcctgacttcaagtgaacccgcctcagcgtcccaaaatgttgggattgcaggcgtgagccaccacgcccagcctggaaacgtttctaacagtactggggcaactccctcccaaggccctgaggggcgcaggaacgaggtgagtaggaatggccagagccccttggacacatggggccccaatctcgaggtgtaagggtcagagtcaccccggaaggaggtggagtggagtccgcccgttaccggctcacttccttcaggctctcaccccgattgtccttcaggtcctctacccaccacactccctatttcttccaatgaaattgtccctgcttctttttctccatatcctcgctctccttgcttcccctatgacatttctcctctctccacctcccaaaagtcccctcggtcttttctctgtttcttcctgttgccttcattcccctccttttaataaagtgagtctggaaccttggtttcccttttctctctccatgtgactggtgctgcatgcagtttgccctctccccatcgcgctaagtggtttcactttctccctctgaccctcggggaaaccacaaaggttcccgtgcctccattcccccgctccagccctcaaggtgccgcgtgcctcaatttcccaggctcttttcctccctctccctgtccccaacgctgactccctcacggcgtccccaaaatggcgcccgcggccgcgctccgccgcctaacgtcatcgcgccgccctccgctcagagttcccctctggagccgtcggaggcggagtcgaggaggaggaggagcatcctctaaggaggattaaaggggcgggcactatccacccgagggctgaccggtgagggaacgacgctaaaggattggttgggcgctgcggggaatctcgacgctcctcactattggcccaagcctcagagacatgaacgtcgattggccgaacggcagggcccgagcgggcaatgattggttgcgtccggccgtccgtgcggcggccgaggaggaaggtgggaggggcgttgctgagggtagctgggggcgagagcgaggctacggagcaggcgagaggcgacggcgagagctagagcgggcgcagcgttagggtggccgtgcaaggggagccgtggcccgggcccggggcgtgcgagacggcggaagcaggtgagcgcgagcgggcgcgcagaggccggccgggctgcgctccctgccgccgcggcctcctcttgccaggtcgcctgcg

SEQ ID NO: 21803 - DNA, 2300 bp, Homo sapien
cctactgcccagcacctctgaggtccccatttaaccccagagaggaacgagtcagtgggagcagacaccctggatctctgtgtctacactgtatggacacacacacatatacacagttgcatacacagtcacctcaacaaataaacatgtcaccctgcaaatagtcttcctttcatcccacccctctcctcaccgcctttgcttgctcatacccactcattcttcatatccctgctcagacacccccttcctccaggaagccctccttgacactctaccaactaaatcacatgttttcagggctcctacgatcccctaatacctccccgtcctggcccaacccctctacctatgtccccctatcccagccctgacccctctgcctgggcctcccccatcccagccccaacccctctacctatgtccccccatcccagccctgacccctctgcctgagcctccccaaccccagccctgacccctctgcttggggcctccctcatcccagccccaacccctctacctttgtccccccatcccaccccgacacctctgcctgtgcccaccaccccagccctgacccttctgcctgggcctcccccatcccagccctgacccctctgcctgggcctcccccatcccagccctgatccctctgcctggacctcccccatcccagccctgacctgtctgtactgtcattggtgacaggtctgtcttctccaataaactgggagctccaggaggacagacctgagctaccctttccactgtacttccaacacccaacacagaactactcaatagatacatgttggtggaggacacacgggtgcccgcacacaatggcgcatataggacagcacacaccaccaaaccaagactcatgcccatggtcatgcctacacagccacaaatgaaacaggcatgaagggctgagtgcttgccatgttccaggcactgtgctaagcatgctacatgtattacctcatttaagactcccatcaacactgctgagtgatagccatcaccatacagacatatacacattctactaaatgagccaacagctataaatcaccttgtacagtgcctggtgcacaatgttcactcagccaactgacatttggtggagaaggcatttaataagcacacaaacaaacacataatgaaattcccagcagtgatacgtgccgtgaagaaaagataaagcagggtgaggggactgagagtgacaggatcagtgccagtttagatggggaggtcagggaaggctgccctgaggaggtgacatctgaggtgaatgaagtgaagaagggagccaggcaatcatcaccccacaatgccacacacaacagccccctacactcacaagcacacagcagtcccactcagagcactcagaactactgcacacacacatgcacacgcacacctgtaccagatgtgcacacacacactcaaaagggaatgacatcccccaagtccagcaacttggcattccaatccctttgcagcccttatccaaggattgcccatgtcacccaccccactggttctccacatgagggcccgctaccaacacccagctccctccctcccgtccccagacccttcggaacagggcaacagagaagagaagatgttggaagttccggtgcctgatgtggaaagagagggcaaagaggagctgtgggggttagcggggacccggcatgggagagagggagttgctagagtacagaggagaaggacaatggagacagctgaggaggaggggcaggcagggcccgcagagcaaacctaaatgtgctgcctgtcctctgagcagtggcacaggcaccagcccccttacctggagcccccatgctggagtgaaccatgctgcccgccccgccagggctgggggaacaactgtgtcatctccccaccctctctgggggccgagccctccctgccggaagtcactcagggaggaaaccacagggccggtccgcccccttcagaagggaaaataccctggcccacagacccgccccggcagcccggcccaccccaaatcatgtgtgtgtgctggggggtgggggctagtggggcagaggataagcaggctggaagagccgactcctacggctgcgatccaagaggtgcctgcaacagttgccccccgacttctgtcgcccccatggaggcaaacaagtctggaacagggaatgggggtctgggagagaaggtgggtccacagcagtaacaacaataaaacactagccagcagcttattggagagagggctttgccga

SEQ ID NO: 21804 - DNA, 2300 bp, Homo sapien
ttccagctgccagtgtgttccaaactctgcccctctatcctctctcaggcaggcccatcctccttcaagatcccctcaccaggcccagctctggtctgaggcactgagaatggagccagcatgggaggcgagaggtgtggggttgtttcatctctcagggagcgtatacagccttccccggctccaggactgaactgcagacctggccgcactggaagtgggtggtccttctctgctggctctagggggctggaatggggtcacatccaaaagcgtgttcctgacgtggatgatgttgagtctgtccagggtggagcataagggtggctggtgaggttttgcccccccccataatgtcctatagccccatttccaagccccccaaaacaaatcctaactgaaaacaaagcttactgcgtaaatgtcgctttgagacaaggctccagtgtccactgctaccaggctgctgtcgggaagaccctcatgtatagaaatcctgtggccagttgctgtgtggtctgtggatctcctctgtgaaatggcctttacgatacgggatgttgtggagtgtagatgccgggaaacggtcacctctcgtgtgcatatatgagaactgccagtccttcctgttgtgcccacctgcttgcctgggtgtgtctgggtgcacagggcacgtgtgcagtcaggggagggcactcctgtagttgtgcctgtagtataccctttctgagtgtgcctgtgtgtgagtgggtgcgagtggccaggaagtatgcttgggcacatatgtgtagaagtgcccttgtgcccatgggtccatgtgagggagtagaggaggtatcagtatatgggagtgaccatcgtcagcagggagggctggtgttggggcctgtgcacatagatgtgttcatgcacgtgtgtgtgcacacgtgtgtgtgtgtgaagtgctggggttcatctgtagaaatacttgtgtgtgtgagggtgagtccaggcgtctgtgcatgcacctgtggtttagggggccccccagccacggggcgcaggatgtcctgcggggcccaggcgggcatgtggggtgtctggagacgccaggcagccccacagcctcagacctcgggcaccaagaggaagagggcagcggactcgggcgcgcctttgtctgagctgcggtgcgccgggagtcctgcgcctttgtgtgaccctcgcaggtgtgcgagcggaggtgttgggagggtgttggggaggggagcggagggaggggctcccttctccgcagccggccccgccctccggcccattggctgggcgctgccgccctctggcgggcacggagggaagcgctgaaatgggagcgccgcagcgcgaagagccagccggcagcccggggacctggtgctcccctccactggagccgcctcgggcgcccgcatttggccggcgacttattgtagccccaggccaagtccccgacccaccgtccccactaccactgcccacgggcaccacttcctcccaatggtggcacccaacagctcacctgcagataggcgcagggcttgcttgatcttccctgccgcggcgtgcttttaagcttcaacgcttcttggctctgggcctttgggaaagctactgctcacctctctgatcctcagtcttttcatctgtaaaatggggcaaataagagtgaccaccacattggagatggcacctgtcaagagtgaggcacagggtcaggcatcggcaaagccctctctccaataagctgctggctagtgttttattgttgttactgctgtggacccaccttctctcccagacccccattccctgttccagacttgtttgcctccatgggggcgacagaagtcggggggcaactgttgcaggcacctcttggatcgcagccgtaggagtcggctcttccagcctgcttatcctctgccccactagcccccaccccccagcacacacacatgatttggggtgggccgggctgccggggcgggtctgtgggccagggtattttcccttctgaagggggcggaccggccctgtggtttcctccctgagtgacttccggcagggagggctcggcccccagagagggtggggagatgacacagttgttcccccagccctggcggggcgggcagcatggttcactccagcatgggggctccaggtaagggggctggtgcctgtgccactgctcagaggacaggcagcacatttaggtttgctctgcgggccctgcctgcccctcctcctcagctgtctccattgtccttctcctctgtact

SEQ ID NO: 21805 - DNA, 2300 bp, Homo sapien
gtggtggcctggactgcagtgggaggagtggaggaatcagacagcgcttttggaattggtgacaatatcaaggctcaaagaagtggagagcagagagtgagagtctgacccttccaaacctgagcttttcctcttaccaggtcaggtgctactttttccctaggaggctgcaggaagcctccatgaggcagatgcctgggttgcttatatttaatgttctccatgtgaaccctaaagtgcctggttggcactgagaagtttcttgccagaccgggatcttgcacagatgtgaatgggggggccttcccttaggagactccacagaggaggtgagctctgagtaaggtggtgtagggagcgagtagatttgaaggtgttggctcccctcacagctggtctttctgtatgagctcggagaatctgctagggccccacaaagtggagctggggagcattgtgcaatctgcatcccagaattgttgtgaatcaaggtgggcaggtgatgtgaaggcactcagtgaatggttcatattggcagaaggccataactggggacggggatgggagatacatggatgtctcagacagcaaagcccaggtccaaggccagtgtttctgctgagccaatgggacagggtgggcaagggtttgagggagaggaagagaacagtggatggcaatgtggactttggagtccggtttcctgggtgccaatcctggttccatctgtgtctccagccaagtgatttaactttgctgggcatcagtgttttcctctgtaaaatggggatgttaacaatgcttttttgtagagtattgagaagattcagtgagaaaatgcttctaaatattaatagtaggtggagggcttctctttaacttgtctaaagcagaactcttttttttcttttttttttttttttttttgagacggagtctcgctctgtcacccaggctggagtgcagtggcgcgatctcggctcattgcaagctccacctcctgggaagcagaactcttttttttttgagacagagtctcgctttgtcacccaggctggagtgcagtggcgcaatctcagctcactgcaacctccgcctcccgggtttaagtgattcttctgcctcagcctcccgagtagctgggattacaggtgtgtgccaccatgcccagctaattttggtatttttagtagagacggatttcactgtgttggtcaggctggtctcgaactcctgacctcaagcaatccacctgccttggcctcccagagtgctgggattacaggcatgagccactgcacccagcctaaagcagaactcttgattccctctcccaagcttttccaagagcttgtgtccatctcagtaaatggttgtcacaacaacaacctagacttcttccttgatccctcactttccttcaaatgtccagagctcagagtttgcttcaacgatgacaggcactgtgtctcatgcgatctgggctaatacagttccgttaagttaaactcctctgaatcaatgtagagcaccttctgtaggcagggccctctgtggatgctgctcagggtccgcacagttctgagagaggcacagagaggctgagtggtttgctcaaagttgcacagctaggactcagcagtctttgcagaggctgagagaggccaaggcagcttctaattcttgagcctcctagtgtactaagaacgaaggaatactgaaatggatttacagacctgtgcttttagcaatgacaacaataaaatgccacgttaactgatatttataaggtcatttcaggatttattaaaacaaaatgcatactatcttactggtggtgtggtctggcagtgtcattcaactataaagtaaaaaatacacattttgttttaatttcatcccctcaggaatgtgacacatgggccaagtgacacataggccacacctagccccacagctgggacttaactacctatttatgtgactctaaagttgacaccttttcagccatcctcagttgcttttgcagagatgcaagaggcccaggacttcacagactttggaggaagagaaatgtgcatgggatcagtgtaacagcaaggcctggggcaaggagagctgggctctggaattggcttgcccatgactgagtctgggcaagtccttgccctctctgacccgccttggggtgctcctctgaaaagggggtggataataacagcccctgctttagtgaattgttgggaagatgccaaaagatgatgcaaagaatacacataacatatgcctgcacagagcag

SEQ ID NO: 21806 - DNA, 2300 bp, Homo sapien
caggaccaggctcacatttggcattcagggcagctgacaataaaaatgctttattgccaagaaactggatcgatcggggctggagggggccggcaggggggacgcggagggctcagcgcagaggccggcggccggccttcgcagcgaccagggcccgagccgccctcccccctgcacccccctccctgcctcctgccctttctctctcctgcagccaccgcttagttcttattatattttttcttatatatttttcccccagcttctcctgctcctgtttttttattcttttaattttttttaaaactcgctgcactcccaatgccgcaggccgggtgggggtggggtgggggcatctgcctgggccaggcccctatccacagggtgcccagaactgctggctctgggatgagccccactttgcttctgtatcccccaatccaaccaggctcctcctagagcctgtcctctgtggatgcccatctccccctgccacccctccaaggggcctccttccaacctcagagtacccacacacacatatccatggtgggctgagggccctggccaggccttcctcccctcccccctacctggccccctgctcactcccggagccatttggctgatggtcagaactgtctgtcaaggtggctctgagcccctggggacccagatgggaggagggagggggagaggtcgggggtcaggccacgtcccctcagcttgtctctttcccctcccccttcctaacaaagggagcatcggcctgacactggcgggatggcctggtactcagggaagcggggaggagaggggctgtggggatggccatgggcagaaggcgggggtgggggccgcctgcccctcctctgccctccccctcgggtcaaggctaaggtgattcctcaacctctcggaggctgggctgggaggagaggaggatctggacagacaaagaactggagccctggggagttgggggctggggggacgcacctgggaccagggcagtcctggctgagggaggggcaacaggcacccctctggccctgctctcaccctctggatggccctgcctcccatctgtaccaatccctacggatcccagagccatacagaccttccagcttgggcaaggtcggatgggggtggggggaaactgaggcccagagaggggagacggcccaggcccagggttctcagcgctgtcccagagtctctcccctcacttctcttcctactaagggaagacatcttcctctcctgccctcccccacccaggtcaggggaggtttggtgggggcagatggtagaaggttctatggagagggaagaggaggctgaggaaaaagtgaggctaagcgttctcctctcttaagccagtgggcaggggaggaagccagaagagaaaaagtctaaatgtgaccttgagcactggcctggcacagctgtgggaagaaacttaacgtccgtcagaaagggcaggaaaccaacatagacagggtgctcctgagtacctggctagcggtggctggggaagaggccttcagacagttttccccttttgcccatggctacagtgaaggaggaggattcacactctggttggtcacaatccacccatgacactgcgtcagggcctcccatccacccagcctgactgtggggcgcaacgggtagctgaggcaatgaacagctgtgagcccccatgcccacagggatatggagcctccaaagagacagaaggaaacaggcagatcttctgtgcttaaattctcctatgaaggctgaggtgactctcggggagagggccgcagcgaagaagaagagggggagaataaggcgggcctcttttggagggggtgggatgggctcacacatgcccccacagcctgccaagaaggccccagatgggccgaggactataggggtcccggctgccctcccccaaacctcccctcccttctctccctctctctttctcggctggctatcgaccggggctgtgacatggtggatcaatacggcagggatataaagccggctggctggctgcctgcctctgcctctctctctctcccttgcttgccttgcttccttttcccggagccgcacccaggtcccccaccatcatgtaccccttacccaggcctctgaggggccaggcaccccccaccactcccctacagcaggagagcttagggaggctgagagcttggacagccgggagagggggtgagtatgggagtgggcaaggaagcagatggggatgggggccatagtttcaggtaaggggg

SEQ ID NO: 21807 - DNA, 2300 bp, Homo sapien
cactgtaggcgcccactacaacccacttagcaagacagaatccttcacagtttgttaaattgctttcctattctccctactcttcgtttgatttaatgatagtcacttaccaggcccccttgtgagtttagcccaggactatgcttccgtagcttaccattgccatccatttgtttcacaagtagggaaactgaggcccagagaggggaagggatttcttggagggtttgtttgtttgtttgagacggagtctcactctgtcgcccagactggagtgcagtggcacgatcttggctcactgcaacctccgcctcccgggttcaaccgattctcctgccttagcctcccgagtagttgggattacaggtgtccaccaccacgcccggctaatgtttgtattttttagtagagacggggttttgccatattggtcaggctgctctcgaactcctgatctcaggtgatccacccgtctcggcctcccaaagtgctgggattacaggcgtgaaccaccgcgtccggtcttgtttgtttgtttgagacagagttttgctattgttgcccggactggagtgcaatggcgcaatctcggctcacggcaacctccgcctccagggttcaagcgattctcctgcgtcagcctcccgagtagctgggattacaggcatgcgtcagcacgcccggctaattttgtatttttagtagagatggggtttctccatgttggtcagactggtctcgaactcccgacctcaggtgatccgcccgcctcggcctcccaaagtgctgggaatgcaggcgtgagccaccgcacctggcgtttgtttgtttcttgagacaaagtctcgccctgtggcccaggctggagtgcagtggcactatctctgcttactgctccctggttcaagagattctcttgtctcagcctcccaagtagttgggatttcaggcgcgtgccaccacatccggctaagaacagacagggtttcatcatgttggccaggctggtctcgaactcctggcctcgtgtgatccgcccacctcggcttctcaaagtgctgggattacagacgtgagctaccgcgcgcagccgattcttttgaattcactgctacagctcaggcagagccagtactgggccagtgctaggcaggacccagatctcccgactcccaagaggagttaattgcgggggtgggaagaggtccagggaggggacttgtctcaagtacatgcaggtcctgaccttgagtcacctaagtggggggcgtggcgaccgtcacacccaaggccccgcggtaaggggacacgcatacaccacagcctagactccctgacagaccctctctagttgttgcaagttagggagcgggtatctgggcgaccctggagggcagagattggaaggggttacggaggggccgttttggctctgggtggagacatctgactgtgatgggggtcgtgatggacgccatcgagatgtacacagtcggaatggagggttctgttgccgcttggaaggaggtatccgtcctgaacgtgagatgagggaattctggttttgatcaggggaaggaacttatagactgcgggggtggtggtgggggggcgggatttccatttgggatcacgagagagcacagttgagatgtagatccctggttgtcactagaagtgagggacaatctaatggaggagtgcccaggaccagatcatataaggcctgggagtttactgggagacgggaaagtagtgattgtgttactttgccacgggcaactaggggcagtggtgatgtgggcgtctagctcgtgatcaggagggggctgtagtttatgagatgagtagttacaactactcgtgacgtggcgctacatggccccggtggcttgagtcacgggcaggaagtagggacctggaaccgggtaccagatacagcccaagaggcggcgtgctctcgctctgcgcaagcgcagcactcgcgaaccaagatgcttcggttgggggcaggtcaagcggcccaggaagggcggggcttggaggcctcgttctgcgcatgcgccgaaggggcgtggcggtcgcacctgcgcgagttgggggaaggaggaggggcgaggtgacgcaggcgtaataatagagaaggtgccagaaagatccaaaacaagtggctgcggccgtcgcccaggagtcatcggacgccagaatctggtgaggatccagagaggcctaatggtgactggtggcgggtagacaggaccacctgggctctggggagcgggcggggccgcccttgcagg

SEQ ID NO: 21808 - DNA, 2300 bp, Homo sapien
caccacccccgcagtctataagttccttcccctgatcaaaaccagaattccctcatctcacgttcaggacggatacctccttccaagcggcaacagaaccctccattccgactgtgtacatctcgatggcgtccatcacgacccccatcacagtcagatgtctccacccagagccaaaacggcccctccgtaaccccttccaatctctgccctccagggtcgcccagatacccgctccctaacttgcaacaactagagagggtctgtcagggagtctaggctgtggtgtatgcgtgtccccttaccgcggggccttgggtgtgacggtcgccacgccccccacttaggtgactcaaggtcaggacctgcatgtacttgagacaagtcccctccctggacctcttcccacccccgcaattaactcctcttgggagtcgggagatctgggtcctgcctagcactggcccagtactggctctgcctgagctgtagcagtgaattcaaaagaatcggctgcgcgcggtagctcacgtctgtaatcccagcactttgagaagccgaggtgggcggatcacacgaggccaggagttcgagaccagcctggccaacatgatgaaaccctgtctgttcttagccggatgtggtggcacgcgcctgaaatcccaactacttgggaggctgagacaagagaatctcttgaaccagggagcagtaagcagagatagtgccactgcactccagcctgggccacagggcgagactttgtctcaagaaacaaacaaacgccaggtgcggtggctcacgcctgcattcccagcactttgggaggccgaggcgggcggatcacctgaggtcgggagttcgagaccagtctgaccaacatggagaaaccccatctctactaaaaatacaaaattagccgggcgtgctgacgcatgcctgtaatcccagctactcgggaggctgacgcaggagaatcgcttgaaccctggaggcggaggttgccgtgagccgagattgcgccattgcactccagtccgggcaacaatagcaaaactctgtctcaaacaaacaaacaagaccggacgcggtggttcacgcctgtaatcccagcactttgggaggccgagacgggtggatcacctgagatcaggagttcgagagcagcctgaccaatatggcaaaaccccgtctctactaaaaaatacaaacattagccgggcgtggtggtggacacctgtaatcccaactactcgggaggctaaggcaggagaatcggttgaacccgggaggcggaggttgcagtgagccaagatcgtgccactgcactccagtctgggcgacagagtgagactccgtctcaaacaaacaaacaaaccctccaagaaatcccttcccctctctgggcctcagtttccctacttgtgaaacaaatggatggcaatggtaagctacggaagcatagtcctgggctaaactcacaagggggcctggtaagtgactatcattaaatcaaacgaagagtagggagaataggaaagcaatttaacaaactgtgaaggattctgtcttgctaagtgggttgtagtgggcgcctacagtgtatgagcgctgtgcatgtgtgatatcatccaatcccctaaacaatctttgaggtggctgtgactcaagctcacttcacaccagtaaaacagaggcccggagaggagaataactccaagtgtgtcgggctctaaagctgtactctcagaaatgctccgtctcttcagctttgaaatgacatctctgtcaaggtctcccgccgcccagttcactccatgggcccaacgctcaccaaaggttgcccgagtttctctacagaacttgccgacgcttagcccgggagcgacccagagaaatgcgcaggcgcatctcctcgccctgagccccgcccacagggcgaagatgtgtgcgtggataactcccagagccccgcctgtgtggcaacacgcaggcgcaaggtcgcgtgccctgcgctgcaggctctgattggtcgccacgggtaagggcaccgcccaatgggaggtgtggatagtgaggggtcccacacgcctggagccgagggtctgtgtcaagagcggcaggggctgcaggagataagagaaacgggtgagggcgccgcgcggggctggactgggaagagaacgctgggcggacggagggggcggaaggaaaactaaggggtctgcagggatcgaagagccttggggcctgcgctagggcgggagcggcgcgggctggaaggagagcactccttcctg

SEQ ID NO: 21809 - DNA, 2300 bp, Homo sapien
tcccagctacttgggaggctgaggcaggagaatggcttgaaaccgggaggcggaggttgcagtgagctgagattgcgccactgcactccagcctggagacagagtgagactctgtctcaaggaggaaaaaaaaaaaaaaaagttgctcatattaagcacctagacggtagcagtttagcctgcacatcactgaagcacgtccagtgccaagaacaatgtctagcacacagtacatatttagtgactgagaaatgctcccaggccaggtgtggtggctcacatctgcaatcctagcactttgggaggctaaggtggtttgatcacttgagcccaggaggtggaggctgcagtgagcctcccttgggaagtgagaccttgagaggtttttttttttttttcctccttttgagacagggtctcactctgttgcccaggctgcagtgcagtggtgcgatcttggctcactgaggcctccacctcctggactcaggtgatcctcctgcctcagcctcttgagtagctgggaccacaggtatctgccatcatgcctggcaaatttttatttttatttattttattttactttttttgagacagagtttctctctttttgcccaggctggagtgcagtggcacgatctcggctcactgcaacctccgcctcttgggtccaagcgattctcccgcctcggtcacctgagtagctggaactacaggcattcaccaccacgcctggataatttttgtatttttagtagagatggggtttcatcatgttgcccaggctggtcttcaactcctgacctcaagaaatccacccaccatggtctcccaaagtgctgggattacaggtgtgagccaccacacctagcccctggctaatttttaaattatttgtagagaggtctccctatgttgcccaggctggtctcgaactactgagctcaagcaatcctcccacccaggcctcccaaagcgctggaattagaggtgtaagccactgcctggccgaccctgagtttaactgtccctatgcacagtccatttctaccagaccaacttccccattagactgtgaattcccaaaacacacagcccagtacagggccctgctttcagttaatgcccaatacatactccttgagtaaattattcactaaaggagctggagctaaactttccttatctactattccaatccccttcctaatttttgagttgccaggcccctgcacacaacagccattccacaaaggaccttcctggaagtaggcaaccaggggcccgagagttccatttttccttgattacagccccatttccaacagagaactcccctagggcgaggcccagtgcctgctgcaaagcttgcacaaagcaggtacccaataaatgtctacgaggtggcccgggagacttgaaatttgccctttcctcgtctacgattctttctcccactcttgaattgtgaactacttagggaaagaatgggggtttttcacacagtatatcagtaagtctttccaggaaggaacccactagggccctggaaattcaactttcccgctttacaacgcttgtctcctaccagactgagctcctcggcagggtgagagctcgcagcagtgggtggtgggcgagttccagcgtaggctcccgcacactaaaggagccccagggcacacaggaaggagtgctctccttccagcccgcgccgctcccgccctagcgcaggccccaaggctcttcgatccctgcagaccccttagttttccttccgccccctccgtccgcccagcgttctcttcccagtccagccccgcgcggcgccctcacccgtttctcttatctcctgcagcccctgccgctcttgacacagaccctcggctccaggcgtgtgggacccctcactatccacacctcccattgggcggtgcccttacccgtggcgaccaatcagagcctgcagcgcagggcacgcgaccttgcgcctgcgtgttgccacacaggcggggctctgggagttatccacgcacacatcttcgccctgtgggcggggctcagggcgaggagatgcgcctgcgcatttctctgggtcgctcccgggctaagcgtcggcaagttctgtagagaaactcgggcaacctttggtgagcgttgggcccatggagtgaactgggcggcgggagaccttgacagagatgtcatttcaaagctgaagagacggagcatttctgagagtacagctttagagcccgacacacttggagttattctcctctccgggcctctgttttact

SEQ ID NO: 21810 - DNA, 2300 bp, Homo sapien
aggactttcttctggtttcagaaaggacaggacagttagtataagcacaagctcggattaacgtgaagtccagagactccatttcccaccattccaggatgcgggaggggctgagaacgctttcattctacttctaagtatttccgggggaggaagagacacatacagacacaggaactctgtttcccagcgccttttgggggctactctccttcgggtattaatcgataaataggacgactcactgagtacacaaaacctgaggcagctggcttccttatttttggctttccgggatcttgtaatttaggaagcggaggatgcaaaacacaagagtgggaggcccggtgccgtggctcaagcctgaaataccagcacgttggaggctgaggtagaatcgcttgagcccaggaattggagaccagcctgggcaacatggcgaagcccaccccgctaccccccaccaccccaaaaaacaaaccaaaccaaattagctgggcgtgatggtgcacgcctgtagtcccacctacatgggaggcttaggtggggggattgcttgagcctgggagttagaggctgcagtgacctgtgattgcgccactgcccgccagcctgggcggcagagcgagaccctgtctcaaaacaaaccaaaaactgaaaactgaatggtggttcaagacaggatttttttttttttgagacggagtctcactcttttcgcccagactggagtgcagtggcgcgatctcggctcactgcaacctatgcctcccgggttcaagcgattctcctgcttcagcctcctgagtagctggtattacaggcgcccgccaccacacccggctaatttttgtacttttagtagagacgggggtttcgctatgttggccaggctggtctcgaactcctgacctcggatgatccgccagcctcggcctcccaaagtgctaggattacaggcgtgagctactggcgcccagcctgagccacagcgccaggcccagaaatgacatttccgtctttttaatgctccattcagcttcctggtgcgaaccacattgctaggaaaagctagactgtatccgaagactagttagtgttctgagaaaccgccgggaactttgtttcccgaatctttgcagagttgcggttagagaggggacattttttctttcctgatctatggtcacctggaacttaaaggtgcttggatccattttccagcagtccttgatcgacctcggctctttcttaaagaaggacctgggggcgaggaaggaggcgctgaaacacttttaagtctctccagggaactgccgcagtctctaacctttcgttcacacgcccctgatggtggccattggacttcgcttcccggcaagcctccgcagactggcctcacagagggtcaggtctggactattccccagcatgcttggagctcatgggcgatcccgccccctcagtcaatggggaggatacgtcgaactccatttcccagaacacaccagggctcgctgtggcaactgcactgaggccttggtgctgactacacttcccggcagggactgcggcccagcgtacctggaaagaggagcgcgtaaacctactccatttcctcgcccatctccggaactgcagtatccacctggggcttaaaaaccacctgagactccatttcccggcgtgctttaaaaatcgctttacacctgcaatgcggtgagggcgtggcgacgactccatttcccggcttgcctcacggcccgagacccgcaggttcacgcgggccgactcaatttcccagagcgcaccgagctctgggaggcatacacagctaatagactgagtgagtggactccgtttcccagcgtgcatcaggctctctgcttcctaaagtgcttcagggctccccgtcgtacagtcggctgacagattaccctggactccatttcccgacgtacagcgtgacccgtcattcccgcccatcattcccgcggtctactctgaggcttttgtggacttcatttcccggcgtgccacgcggctctctgtgcgggccgagggcggtgacggcggcgcggacgacagccggactgcatctcccggcgtgccccgcggcgggcgctgggccggagccggagcccaagccagagcggcgcggcctggaagaggccagggcccgggggaggcggcggcagcggcggcggctggggcagcccgggcagcccgagccccgcagcctgggcctgtgctcggcgccatgagcggcggcgggccttcgggaggcggccctgggggct

SEQ ID NO: 21811 - DNA, 2300 bp, Homo sapien
tttatttttagacggagttttgctgttacccagggtggagtgcagcggagcgatctcggctcactacagcctccgcctcctggattcaagcgatcctcctgggttcaagcgattctcctgcctcagcctcctgagtagccgggattacaggtgcgccaccacgcctggcaaatttctgtacttttagtagagatggggtttcaccatgttggccaggctggtctggaacttctgacctgaagtgatctcccgcctcggctcccaaagtgctaggtttacaggcgtgcgccactgcgccgggccctgatgtagtatctttgaaaatctgcatttttttttttttggagggggtagtaaaagaggtaataaagcataatggtaaagggtaaatgtggtggtttggaattggttagatctgggttcgaatcttagttccaatacttcctggctgtaagatttagtggactgattttccctcagagagcatcactttctttatctgtaaatggggataacagcagtaattcccctcgttgggattttgtgaggattaaatgagaagatgcccctgacaatgcttggcccggtgcctggcacatcatgaacactcggaattcgggagctgttattcgaacaatgaagatgattattattgctggaccacaccgctcccagagggttacaatatccgtgggggagctgtactgtccgtaggcaaggttacataattcccgggggttgtgggggaaagcttccctggagcccttggtctccccaaggaggaggcctgagacttttttttttaggcactggtgaggagcctgtctaaggtggactaggtaccccgcaagcgaggaggctgggattgaagccctgggtaccgggagcctgagctccgcaggccttccctatctgtgacttttctgtctccccgcccatcttctggattcgtcccccacccagcccccccaactcccgcccgccacccatacgcccctccttcggaacctcagagtcttttttgagactctgtttccaggctatgcctgtgaatattgcttctatttggcctctaccctgctgccggctcctgggctccatcagatctgcgctgtgatttcctgtttcccagagcctcaggcttcatccttccctcccggctgaggcagagaacggagacttaacacttctctacgctctggctttcgatcttaagccctgtcttcctctctcctggcgaccctcagtgccccttgggagcacatttgttcagactttggtcgccccctcgtatcccggccccgcctccggaacccccggtcctagtagtggacgtggggggacctccggcgccagccctatccccgggacagctgcagcctggggacggtggtggtgggggcttccaaatgcattctctctggtcacttcctccccagctggacgggggttatcagggaagccaagaccccatccccacaggagcggagggcacagccgcctccccatttccgatgctgggaaatgcatcccacccattccaccccacccctggacagctgcccccattcaggctcagggttggggggttgggtaaaaccaagctgggaaatgctgtggtcttcatcatcttctaaggtcctgaccccgcccctctgcagagaagattctgccccctccccacaaaagtttctgacccccgcttcctcggaagggccccccgttttcccatacaggctcccaaaagaaactctggagcccgcagtgggcaggagaggaggaggggcagcaggtagcgagtgccgaagacttaagttagctgcagactcggagcctctgactagggtcatgacccgcgggaccccatcccacccccaccccctccttcctccctcccccgccgcgcggcccctttaagcccagagccggccggtcctcagtggctgcgcgccgacgagcgtgtgtgtgagtgcgcggggagggggcgggcgcagtgtctccatggcgacgcggcggtgacgtcgccggccggggggcgtgggcgtcccggccccggagtgcgatattaacccgggaggcggcggcggggaggggagaggctctgagaggcgaggccgggtgaggcggcgagggcggcccgacgggcgcgggacgggacggggcagcgagggcgccgggagccgcggcccggaatcggggcgcttcgccccgggccccccagcatgaagaccccggcggacacaggtgggggcgggggcagcacgtgtgggggagacttgttgccccgggaaaccgaacgg

SEQ ID NO: 21812 - DNA, 2300 bp, Homo sapien
tctgtatcattgtctaactatattccccagcctctgtttggagttccctccctgggtccaccctgaggttaagccttgagtaatggaaacagcacttgagttagagctctgggctggtacatcttgactgcatgatcttgccacagtttattcaatctctgaggctcattttttcacctgaacaatgggtgtaataaagcatacctccctaggtggctgtgaggattcaatgaaccagataatacatacaagctcccagcacacagcagccccagtaagtgttagtttcctttcttcctggccctttttttctgggagggggggcggggttagtgggtggctggcagagcagtgtggtggggccagccatggtgtgctctgtggttccctgccttatactgctagacagagggtccagagtggccaatgagtgtcagggtgggtggctgaatgatggcggtggccactgagctctgtatacctgatgggcctgggtactgaagcaggtagcacccattagggtaggattatatagagggtggggtcggtatgatggtgtctgtgagagctgagtgtgcactggggataggaggcgctttgtgagtgctaggaaggctgtgtgtgtgacggaggagtgtgtggttgtgtgggaggggtgtggagtgtgtgtagtggacaagcagggctatgctgagttcctcctgtttgacatgttgtctgtttgcatgattcatgtgggctggtgggggtgtgatgaggatgcgggttggcgaagcatgtgtgacagggcatggatgagatgggtgatgtgaacaggatgggtgaatgcacgatggtgggtggggagcgatggaccgtgagcgtgtgaggttgtacatctgtgtgagcaggtatgtgaggtgtgacagcgtgggtgtaagacagagggcatatgtgcccgtggggtgtgtaggagataatgggtgtggcacgaaagtgtgtctgtatgtctgtgaggagtgtgagtgtgagtaggtgagggctcaggatgcctcgcccagccctacgcgcagtttgtctgcccagcggggccaggcgcgcccaggcgggtgtgcgggaggcgggccgagccgcgcgtgagcgtgttcctcgcgcggactggacacacaacagcaccacgcacaacccagagacctccgcagcgcggcgccccgaaccgcccccctggctcggtgcctttactgcagtgcgccctccctgccaccctcctaccgcggccccgcccccggccggctcggggccaaccggagcccgccccgccctgcccttatttgcatatgactgacgttcccccggggcggccaatgggggcgggcgcggcggggcctgacccgcgcgcggcggcggcagccaatgggctcacgcgcggggggccgggcttgcgcggaaggccgcgggggaagcggggaaggggcggggggaggcgcggcggggggaggggagcgcgtagtagtggcggggcggggaggcggtggtggttcggcgcggggctcgctcggagcgcacggacgcacgcacgctggtccgtctgcccgcccggggccggaggtcgacccggcgctgagcctcgggcccggggcccggaaaggcggggcggcggcgccggcagccgggacgcgcggggccagagccgttacccgccggagctgcgagggagggagggaacgagcgagccagcgagcggggaagggagggggccgcccccgcgcacgcgcgtcgcgccccgccccgcctgccccgcctgccccgcccgccggactccgcgagggaggagggagagggagggggcggtgccgatggcccccgtgccgcgcgccccgtgacggcccccgcgcgcgccggggggcggggcggggccggtgcgcgctgacctcccccgccccccgggcggcgggaggcaggcggcgctgtgcgcaggcgcgcccggcagagacccccgcgtggggcggccggaggggggcggcgggggggggggcatgcggcgacggcctcccgctccccccgggcccaagcggcgacggccgaggagcgggctgcgggcggagcggcgtcggccgctgaggaggtgcgagcccctgccgggtcccccctgcgccggaccatgtattcggcccacaggcccctgatgcccgcgtccagcgcggcctcccgtggcctcggcatgttcggtcagtagcgcctgggccctgggactgcaggggtcaaggtgtcggggtgctaagtgcggagtaacggtggtgggggtatagtaggggagagaa

SEQ ID NO: 21813 - DNA, 2300 bp, Homo sapien
gggtggctcagcccagctgctgcctgggaaggtcctagtgcctctggccgcccctagcatgtcagtgcggggtggaggggccggccagccactgccactggtgagcccgcccttctcagtacctgtgcagaatggtgcccagccccccagcaaggtgagggcctgcctttctctctacctgctggatgttggcccctgtaccccatcatttctttgtcttttttttcagtcttttctccttctccatgtatctggttctctgtcttgccatcttccgtgatgtctctgtgcatcctgactctctcaagtcctcagtgtctgtaccctcctccttctctgtgtccccacctctcactgtcatcttgcccatcctgttctcaccccaagttctgtgttccttgcttttgcttagagtcccacttgaggtcttggtcttcccctgccccagtctggggccacagctcaccctggcctatgggtgcccttctccacagatcatccagctgaccccggtgcctgtgagcacacccagcggcctggtgccgcccctgagcccagccacactccctggacccacctctcagcctcagaaggtcctgttgccctcctccaccaggtaattgcagctgagcccatactcagaggccagggaaggggtggggcggggccggcttacctcactcctccccatttcctctcctgcggcagaatcacctatgtgcagtcagcgggcgggcacgcgctgcccctgggtaccagccctgcgtccagccaggctggaacagtcacctcgtacgggcccacgagctctgtagctctaggcttcacctcgctggggcccagcggccccgccttcgtgcagcccctgctctcaggtgaggggcggcctggcaggcagtgctggggacccagggtggggctgaggcagtccgggccctaacttggtctcctgcttcttcttctctgtctttcagcaggccaagccccactgctggctcccggtcaggtgggcgtgtcacctgtgcccagtccccagctgccgcctgcctgtgcagcccccggaggtcctgtcataacagcattttactctggcagccctgcacccacctcctcagcacccctggcccagccatcccaggcccccccaagcctggtctacactgtggccaccagcacaaccccacctgcagccaccattctgcccaagggcccgccagcccctgccactgccaccccagccccgactagccctttccccagcgccacaggtaggtgtcagatcaacccagagcagagtgagttgggggacccaggggatgggctccagtcaggcctggctcagcaaacaattttctccccactagcaggttccatgacctacagcttagtggcccccaaggcccagcggcccagcccgaaggccccccagaaagtgaaggcagccatcgccagcattcccgtggggtcctttgaggcaggtgcctctgggcggcctggccctgcaccccggcagcctctggagcctggcccagtccgagagccaactgccccagagtctgagcttgaggggcagcccacaccaccagcccctccacccctgccagagacctggactcccacggcccggagcagccccccactgcccccacctgctgaggagcggaccagcgccaagggccctgagaccatggtgagcgcctgcaggccgtggggctcccactgccacttggctgtgcctctccattgacgtctttgcttttctgtcctactcttctttccatgcctgtgtgtctctcaggttaaagggtcccctctgtcccttctgcctgcctgtgttgtctcctctcccatctgaggcccctgtcttggccttcctgaggccgtgtgacagccttctcaaggggtctgctgggcgggctcagatccaactctttgtttctggcctttgccccagagtctgagctcagtgttcgccatctccctgcccatctccaccccaggccagcaaattccccagctcatcttcagactggcgcgtccctgggcagggcctggagaatcgtggggagcctcccactcctcccagcccggccccagctccagctgtagcccctggtggcagcagcgagagcagcagtgggcgggcagccggggacaccccggagcgcaaggaggcggctggtactggcaagaaggtgaaggtgcggcccccgcccctgaagaagacctttgactctgtggacaagtgagcatgggctggggccttggtggagcgtgttagggtggcgggagtgggagca

SEQ ID NO: 21814 - DNA, 2300 bp, Homo sapien
cgctcattcaccagttgcacaatggccttgatgccaccagtcacctgctctgctgtgtgtccgtggttgttggtgcccacccagaccaccacaatctgtggaaaaagagacatgaagcagcggtgagggggcagccaaaagatgttttagagccccacccaagccccgctcaccttgggccggatgtgttccagctccccattctccagccgccacagtacatgctgtgtgccgtcaccaccaatgccaaagttaagtgcatgcagaggagagaagagctcgcgccagatctgtgggcaagaagtggtgtgggcaagaagtggtaggggcacaagggcactgtccgcatggaccatccccctctgtccaggtgttaaccaaatgccattatggaagaaccttacttcatggaagcagtcttaaaattttacctggagcaaactccagcatggctgaacctcactttatagaaatctattagagtctctcacttattttattttattttatatttttgagacagagttattttatttttgagacagagtctcactctgtcacccaggctggagtgcactggcactatctcggctcactgcaacctccgcctccctagttcaagtgattctcatgtctcagcctcctgagtagctgggactacaggtgtacgccaccacgtccagctaattttttgtatttttagtagagatggggtttcaccatgtgggccagactggtctcgaactcctgacctcaggtgatccacctgcctcggcctcccaaagtggtgggattacaggcgtgagcccatggtgcccagcctatttattttttgagacggagttttgctcttgttgcccaggctggagtgcagtagtgcgatctcggctcattgcaatctctgcttcccaggttctggcgattctcctgcctcagcctgccaagtagctgggactataggcatgtgccaccatgcccagctaatttttgtatttttagtagagacaggatttcgccatgttggccagggtggtctcgaactcctggcctcaggtcatccgcctgccttggcctcccaaagtgctgggattacaggcgtaagccaccacaccctgcctagagtctctcactttaaaccaagccccaggctctgttgctcatgctgaggtgggcggactgcttgagcccaggagttcaagaccaacctgcgcaacagggcaaaaccccatctctacaaaaattacaaaaattagccaggtgcatggtgatgtgcacctgtagtcccagctactcggagactaaggtgggaggatcacttgagcccaggaggcagaggttgcagtgaacagagatcataccactgcacgccagcctgggtgacagagcaagaccctgtctcaaaaaccaaccaaccaaccaaccaaccaacaaaacaaaccaagccccatagaagcaagactcacttcatgaaaatccagtctgcttgagccatgcattgaatcaatggcattacagttgaaacttattttgatgaaacccattacagttggacatgctttgtggaaagatattattatgattgagtcctctttgtggagtgccattagagttgcccttcgcttcctgtaaagtgactatagctttgtgtaaacccaacagggctgcgcactacttaaagcaaacaagaaagagcctcactttaggcaagcctatggcaggaaagcctcattttaggtcttagtacattatacacaaatccaatctgataaaaccaaggcatacatttctttctcaatagaatgttgcaccttacaccaagattctcagagcctcgggctgcctgaggccaatctgggtactctcataatacctcacctggcctgggttctggtccagatgtgtcagcatggacacagggctggatggggcagggggagagggactgccctcacctcgcactggtgcatgagctggaccaaggagtccccgatgaagacgacttcgggttccttatctttgctgtcagccacgaaccgatggtgctgcgggagcgcgcgagagggagtcaatggcatgcacgctccagggcccgccccgccctgctcccttaggcagcgcctcctcaactgccctcagtttcccaatcaggtagtgagagtggcacgaaccagccgttctcctgagccaccccccgcgcccccggactcctcaatatcccaggtgggaacgctcaccagggacatccagcgcccgtcgccctgtacgtcctgcaccggcgtgggcttgctggctgggttctc

SEQ ID NO: 21815 - DNA, 2300 bp, Homo sapien
ttcacgctattctcctgcctcagcctcccaagtagctgggacaacaggcgcctgccaccacgccccgctaattttttgtatttttagtagagacggggtttcaccgtgttagccaggatggtctcgatcctgacctcgtgatctgcccacctcggcctcccaaagtgctgggattacaggcgtgagccaccgcgcccagcctttttttttttttttttttagacagggtctcactgtgttacccaggctggtctcaaacttctgggttcaagcgatcctcgcacctcagcctccccagtagctgggactacaggcatgcatcactgcacctggctccctcagactttatttgtttgtttatttttgtaattaagacagagtctcgctgtgtcacccaagctgggccactgttgcccaggctgggctgcagtggcgcgatctcagctcactgcaacctctgcctcccagactcaagcaattgtcctgcctcagccttcccaagtagctgggactacgggcgtgtgctgccatgcctagctaattttttttttttttttgtatatttagtagacacgtggtttcgccatgttggccaggctggttgacctcaagtgatccgaccatgtcagcctcccaaagtgctgggattacaggcatgagcctccatgctggcctccctcagactttaaaatcaagctattccacgatattccccaaacctaataagaaagtgattacctgtgtcttttctttctgcttgcccattcttcattatctttcagacccagctgagatactactcctaggaaacccatagtcctcagagtccttctcctcttcctccccagaggtccctgtctctccctcaaacacaactttgacacccctacacctctgtgtctggatctgtctccctaaacacattgggacaaggtcaggagctgacccactcatttactactcattcagcaagcacttgtggaataaccactgtgtgcccggcccagttccaggaaagtggattgaaaacataaacacaatgaataacactcatctctgtctcagtatcaatccacctcgaaggaatgaatacatgggaaggtcccacctggagtgaggctacaagaacatgaccaggacgtttagcagggagtgagccccccacctggtcccagagaagagggagatctgagaagacactgaggtctgagattaatttggggcagcgttgggggagaggcgcgaccctaggtggccttggctatggatgtaggtttcagagctcagacatacccagttggcctgtgggtttagagagagtgtagaggctgcagatctgcaagatgatctgccggagggacgccagactggacctgagccctggaggcgtctctaatttcctttctctttctgcaccttcttctaccctccaagcaggtcctatggtgtcttgaatgcaaagatatgtagtttatatgttatgccacgcgcgcgcacacacacacggtgttttgagtaggggtcctgtgatgtcttgaatgcaaagatatgtactttagatttcaacacacacacacacacacacacacacacacacacacacacacccacggtgttttgagtaggggaagcccacgagtagataggctcactaaagccctggcgcggccttagagtggctccttagaagggagcctcgaattttcacattttgtcatcttccttttctgtcccccacatcagtagaaaataggagcgtcccccccagccaggtgcattcgagccaccccttcaagggaatataagaatggactcgtccactcgctcccctccccccaccacgtgaatgggtcacccccccccccgcaacagtaggtggtcccttccgcacatttcactctgtacagcaaatggtttcttcccatttgctagacagagggctagattttccccgcccactctcgactcttcaggtagttcgcccctccccgtgaccggtgggtggtttctccctcctccccgcctcgggagctggatggtctcgcctctccctccccccaccccgtgccgggtgcgcggcctgggagtcagcggcccgagcgggaagcgccgggcgagcccactgtgcggccgtcgtgggggaagcgaaggttcctgattccacctacctcctaagtgaaggcttccgtccctggagaggaggcggcgccctgtatcggccttcgtcctccgcgggtgtgctagcgttgggacggtcctttgttgccgcgaggggtaggagtgggcgtggcggagccagc

SEQ ID NO: 21816 - DNA, 2300 bp, Homo sapien
tttctttcttttctttctttctttttccttccttccttccttccttccttcctttctttccttctttctttctttctttcttttttggagacagagtcttgttttcttgcccaggctagagtgcaatggcacaatcttggctcactgcaacctccgccacccaggttcaagcgattctcctgcctcagcctcccgaggagctgagattacaggtgtgcgccaccatacatggctaatttttgtattttaagcagagatggggtttcgccatgttggccaggctggtctcgaactcctggtctcaagtgatcctcctaccttggcctcccaaagagctgcaattacaggcatgagccaccgtgccctgcgaaccctctatttttcaagggtggtggaaacttggtacttgaggaaaagaacatttcaggcaaggggaacagcatatgcaagtcctggaggaggctgcatagcagatacagggccattttcactcagcaaatccctaggccatgctgggacctagagtaagccacatctgggcctgcccttgagcgcctcctggtctgtgaacacagggaacagtgtatgtgcaggctcagggcaggagtgacagatcagggctgaatctggcccacaggctttttttagtttcacccacgatatgttttaaatgttggaatcaattgcctactgttacaaaccaggcagtttgctttttttttttaaattgcatttctggcttctttcagaaggaaagaaaaaataaaaaaggatctggcagcagcactacaatccttcctggcaacaactggccaagtagcagaggccccctctttgtgggatccatgctctccattaaaaatgtttcacttatatttccagcttggccccttggcttagaaaatttgtaaaaaatggtattttgagcagcccccgttttctgcagtggagaaggatgaagctagaaatgtttgttggagtctgatcaggaaaatcaaggtgaagggcatggcttctactctggaaaagcctttctagggcttgctgttgtccactgggaaaccatagggttgatatctgcatagaggggactgggctaggagatcatagggctgaatgacttggcccaggtcttatggtggacaagtgaaaaagtaggggtcaggctgggatttgaatgaacccaagcaagttattttaacttggatctgaaacatgcttttggctatctcacactaccacctctgtctctcacagcaacccagcttcacagcatggtaagcagtgacaggtcatggtcaggcagaggggtacggtggttatactgaagcctccaccaccaccatgtggtgtaacaagtggcttcccctctctgtgcctccatgggcactttgcagggtgcatcagatctagaacgctggcaactccaggatggacacagctggggatggctgcaatagaggtggtgatgggcaatcaaagacttgttggccaggcgcggtggctcacgcctgtaatcctagcactctgggaggccgaggtgagcagatcactttaggttagaagtttgaaaccagcctggccaacatggtgaaaccctgtctctactaaaaatacgaaaaaatcatccgggcgtggtggtgggtgcctgtaatccctgctactcaggaggctgaggcaggagaatcgcttgaacctgggaggtggaggttgcagtgagccgaggtcgcgccactgcactccagcctgggtgacaaagcaagactcgtctcaaaaaataattagtttggggactacattgaggggaggccaggacagagcatgggtctggggatccggagaaggcagtctggaggaggcatggctttggaagacgtgagttcagtttaggacacaggaaaccataggtatctacgggactccaggaggggagggctggggcggggtgacagaggatgaacgtccccctcccacgcggagaagataggagtcaggttgggccctcttggaggagggggcagggagcgcggcgcccggcggcccctttaatcgggggcgcgcgctggccagcccgcgcgctctcgcctccattgccgggccagtgcgggagccggagcggagccggggccggagcgggcggaatggagcccctgcgcgcgcccgcgctgcgccgcctgctgccgccgctgctgctcctgctgctgtcactgcccccccgcgcccgggccaagtacgtgcggggcaacctcagttccaaggaggtgagcatgccgagccctcctctgcggcccgccggcccc

SEQ ID NO: 21817 - DNA, 2300 bp, Homo sapien
tcggaccccaagtttatggggacagcctccggcctgacagtgcctctcacacctgctcctggccctggcctcagatcatgacccgcccatcagcggccaacaagaacttcccgtaccacgtgcgcacgtcgcagatcgcttcagccggagtccctggacccggagggagccaatccgctgacaaggccttcccgcagcacgtctatgggaacgtgacgtttatcagcgactcggtgcccaacttcacggagctcttctccatccccccgcccgccacctccgtaagccccgcggccccagcgcccgaggagctgctggcgccgcccctggagtacctgaccccgctcccggccccgccgccgcccccagcgcccggacccctgagccctcctcctgcctttcgcactccccgcgccccaacaccgcgccgcgaccgtcccctggcgcccgcgcccaccctgcctgactgggttctggcgctgttgcgcacacccccgcagactccctgcgccgtgcccccaccgcccgccttccgcggctctcccccagctccccggccgccgccggagttcgccccgcgcgccccgacgccgccctttgagtacctggccccgctgcccaggcgccccgccacccagtccttccctgactgacaacgtgcgtccacacctggggtggaagggttctccgggggagggggacgggccttcggggccgcatctgccccccgagggtcccggacggcctctgaccctgacccccctcccaggccgggaagcaggtggaggagacagcggtggcggcggcggtggccccgaggggccgcgtggtgaccatggccgagccgggcgcagcctcccccccacttcccgctcggttccccaaggcggccgactcgggctgggacggcccgacgccgccctaccagccgctcgtgccccagacggcagcgccgcacaccggcttcaccgaatacttcagcatgcacacggccgggggcactgcacccccggtctgagcacccctgcccgcccctgccccatgggccatgaccgggccccggccgggctccggacccctgctttatcccggcccgagagctcgcccatccccggccttcccgacccttcccaccccgcgcgcccaggttgggtacgctgcgtcccgcccccctcccctctgtgccaaacggtcccgcgggagccgctctccccgtcccctccctcagcccctgccccgagcggcgccggattctgggctcccgctgttccgtgacctccggccccctggcccccttcgagacctctgaccccgctggactccggaacacccgtggtgaccgccgggaccctgcctgtgactctccaggactctgcgaccccgggatggatattgcgatgctggtctcgaccctgaaaccctccctcggatctgtgacctcggacccgtactccatctgccgcatctccattccgggggccttccctcgggtccctggcagaaagacattttaccccttcttgccaaaataaaaaaggattcgtttttatctataacatggcttcttttgcatcttgatggtgttcagcggcggggctgagccagaactatgtcaggctcgggacctcagtgtgtccatctgtgaaatgggaatttggaaccggaggcaggggcctgtataacctgatctttatgttgccccagaatgtgggaacattgaagatgatcaaacatctagcagggtcttgcaccgctcctttatttttgccttcctttcctcactcagaggtagaggcgccctccagtggcccatgctttgctgaaccacaggcacccagagtttgggttacgatcttagcactgcgcatatgtgtatttctctccctccaggaggacgctgctgcgcatgcggttgggaacaaatgggcggggatttccccggaagtctccctttatggagggttggggttgggcgctccgcagtcctcccagggccgctctgaccggccgctctgtaacttctcgcctcctcttcgccgtccctcccacagcggctgctcggctcccgccccctcgccctcccacagcgggtcttcccgcggccgctctggcccaagcgtcccctcgtctctctgatctggcccatccggcttcggagggaggcgagggtgggtgagcaaagggattgggtctgtggggtccaggcccgaacccctgaagacgggctccgcccccggcacccgctcgcgccccgcccccggctggaggagtctctcctggaccatccgaacctagcctgt

SEQ ID NO: 21818 - DNA, 2300 bp, Homo sapien
cgtctttctgtcttttctcctttttctctgtgcatcttttcctttttctgttggtcttcttttttccgtctgtctgcttccttctgattgtttctctttgtctcttgtttctgtctgacagtttgcctttcccctcttcctgtctctctctgtctccctttctctctctctctttccttttccatcctctcccttcctgtctgtctctttctctctccctttgtgccctgtctgtctcattctgcctcttttcctctctgtgtctcctttgtctctctgtccttgtctctccctctcttatctctgcctttatgtctcctttcccgcagcccctgggaccatgccgctgtgagcctggcttcttgggacgtgcctgtgacctgcacctgtgggagaaccagggggctgggtggtggcacaacgtgagtgccagggaccctgccttctctgcccgtattggggcagctggcgccttcctgtccccaccagggctgctggcagttttcggaggtgagcagatggggcgagtatctgggatctggaggcccggcagcctatggccagggcatgagactatccacccctccacaggccaggacctcaacaatgccctgggtgacctcgtcctatacaacttctccgccaacacctgggagtcttgggacctgagtcctgccccggtatggacccctcctctgccctggaggagcctttccactcaatcagacccagccggggacccccggaatgatcccctatcacctagtgctcccacagttcctgcagcttgatataggaacctacttctccctgtttctgccttttctctccggttttcttttttcttcttcctcttcctttatctgcctttgtgcatcttatttttccatgtgtctcctgttgctcaatctgtctctgttttcgtctgtctgacttttgggcttctgtgttctctgtttctgtgtctccatctctctggatctgtttctctctgccatttgtccctttaactctgtctccttgccttttctctctcttattgtatttctctgtttctatgagtctgtctcttcttttctctctctgccggtctctgcctttctctttgtctctgtctttatctcgccttctctccatgtttctctggctctgcatctctctgtctaagcctggctctggctctcttgctgtgtctctacctctgtctcttttctcttcctcacaggctgcccgtcactcccatgtggccgtggcctgggccggctccctggtactgatgggtggtgagctggctgacggctcgctcaccaacgacgtgtgggccttcagtccactgggcaggggccactgggagctcctggcaccacctgcctccagctcctcggggcccccaggcctggcaggtcacgcggctgccctggtggatgatgtctggctatatgtgtctggaggccgcaccccgcacgacctcttctcctctggcctcttccgtttccgccttgacagcaccagcgggggctattgggagcaggtgattccggcaggcggacggccccctgctgccactggccactccatggtgttccatgccccctcccgtgccctgctggtccatggtggacaccggccctccactgcccggtaagtgacctgtcccataacccatgctccacaggccaggcccagctcaacaccataggcctttagtctttagaggtctttgcccactgtcggactcctgtggtctctcagtcactccttccttcatgtatttacttattccttcgttcactcattcattcattcacccactcacacattctctgatgttttattcaatctcttggtgaattgccttccacacactcccacccatgtatctattcaacagagccctgcttggtgtccagcccttgctagcttatgcaggtaactcagagatgactcagggtcctgcccacagggaacttctagtttggaggggacatagagtcagtcatggccagtctcatccctgggtgatcacatggctcctaagagcctggaggagggagagagacgcttcctgccctgagcccctgccctgcttctccttcggtaggttctctgtgcgagtgaactccactgagcttttccacgtggatcggcatgtgtggacgacgctgaaggggcgggatgggcttcagggcccaagggagcgagccttccacacagccagtgttctgggcaattacatggtggtctatggtgaggaggctccccaatcctgcctgcctgcctgctgagggcctgagccaacc

SEQ ID NO: 21819 - DNA, 2300 bp, Homo sapien
gcccgcctcggcctcccaaagtgctgggattacatttttctaagaaactgtggtttgcaaccccactcctgatactcttttctgtctccttctgggaacattgccattgttcctttacctggaagaaacagaagtgcccttagtgaggaggggaactccctccaccaatgcagtagtacctgttggaacccaggatagaaagtacagcagggcctcacaaggaactggagacagactggaaagctgcctttctatctgtctttagggcacgtggttctcatctctgtctctttctgcagcctgctcttttcctgcctgtctgcgtcctctttatttaatcatcatttgcttatctaaacaatcccttcaacccaagtctacgcgatcttccagtttattttctttttttgagacagagtcttactctgttgtccaggctggagtgcagtggtgcagtcatgactcattgcagcctcaaactcccgggctcaaaaaatcctacctcagccccccaggtagctgggtctacagatgtgtgccaccacacacagctaattttttatattttgtagagatggtgtctcactgtgctgcccaggctggtctggaactcttgggctcaagtgatcctcccactgtagcctcccaaagtattgggattacaggtgtgagccactgcggccaggcaaccttccagtttcaagatcctccccagcctgacttcccgccttggtgtgtagttacaaacgcttgagagggaaaacatgatgaccccagctagtgtccactttgctctacctgtggccagggaggggtgagacctcaaagagggtgtggtctgggaagatacccagaatgtgtttgtttaagcttatttccccatctctctcttccctgcatccccatcccctcccccccatacagtgtctgagcccttcctacctgcccctgcgatgtatggccggaggctgtgggcggctgctccggggacctgagagctgctccctgggctgtgctcaggcaactcagtgcgccttgtgcctgcggcgcccccattgcggctggtgtgcctgggggggccaggatgggggtggccgctgcatggagggtggactcagcggcccccgtgatggtgagagggctttgggcactgggggagaggggctggcccttggttggggtctgatacagtgaacatagggatactgggccagacccagaggtggggctcagaggaggcaggagggagggcctaggcaactggggcaggtggtacagaggtccaggtaaaatgctatatccccggtgctagggctgacatgtgggcgtccgggggcctcctgggccttcctgtcctgcccccctgaggacgagtgtgcaaacgggcaccacgactgcaacgagacgcagaattgccacgaccagccccacggctatgagtgcagctgcaagaccggctataccatggacaagtgaggccgcaggcggcgctggggccaggcaggctagggtgggagagtctgtggggagcagtaatggatgaggcctagagccaagcaggacagaagaaaagaaagctcgaggcatgaaggcagtgggattgattcctgaaggtcaagagtggtgaggctgagcagggaagagtgagtttcatagggtaccccaatggccgggcacagtggctgatgcctgtaatcccagcactttgggaggccgaggcaggtggatcacttaaggccaggagttcgagaccagtccacagggagaccccatctctacaaaaaaataaaaaagaaaatagggtaccctcaaaagaggagagagggttgtgggctacacctggagggggtggtgggctagatcctgaagagaagatagcaacgggacagagcagggatgagcaaccagttgagaagagggtggggtagttggttgggtgctaggccatgaagccacgaggagggtggccacctgccctgacccccactttgcccctgcagcatgacagggctgtgccgccctgtgtgcgcccagggctgcgtgaacggctcatgtgtggagcccgaccactgccgctgccactttggctttgtgggccgcaactgctccacggaatgccgctgcaaccgccacagtgaatgcgctggtgttggggcgcgtgaccactgcttgctctgccgcaaccacaccaaggtgggccgcccggagcctcagacccccgaccctgggacccaggccctcacttgccttcatcccacgctcaggcggctcgcatctcatcctgagccctgataagccag

SEQ ID NO: 21820 - DNA, 2300 bp, Homo sapien
ccccggggggctggggatccaggaggagcaggggccagcagtgggccgggcgccccagcagagccacgggtacgggaggtatggccgcggggcctgattacctacgtgacggtgacggagccgtcggcagtgctggtggtccgcggcgtgcgggaccggctggtcatcacctacccacacgagcaccatgccctcaagtcgagccgcttctacctgctgctgctgggcgtgggagacccaagtgggcccggcgccaacggctcagccgactcgcagggcctgctcttcttccggcaggaccaggcccacattgacctgtttgtcttcttctccgtcttcttctcctgcttcttcctcttcctctcactctgtgtgctcctctggaaggccaagcaggctctggaccagcggcaggagcagcgccggcacttgcaggagatgaccaagatggccagccgccccttcgccaaggtcaccgtctgcttcccacctgaccctactgccccggcctccgcctggaagccggctgggctcccacctcccgccttccgccgctctgagcccttcctggcacccctgctgctgacaggggccggtgggccctggggacccatgggagggggctgctgcccaccagccatccccgccaccactgctgggctgcgagctgggcccatcactctcgagcccacagaagatggcatggctggcgtggccacactgctgctccagctgcctggcgggccccatgcacccaacggcgcctgcctggggtcagccctcgtcacactgcggcacaggctgcacgagtactgtgggggtggtgggggtgctgggggcagtgggcatgggactggtgcgggccggaagggactgttgagccaggacaacctcaccagcatgtccctctgacatgcccagggttctcatccacagcagctgggtcacctgatagggccgccctggacttggggtccctccacctgggggcccctggacactgtctacttggagaccactggcccccttcccccagggttgcccagatggggcctcctttgttctgcattcagcagctatttatcgagtacctactctgtcaggcactgtcataggcgtggggcaaagcaggaaccaagagacgaggttccctgatctcatgggacttaggttctggtgaagggagacaatcagtgcacatgcacacaccccacacgcatacacacatgaacacatgcacatgtgcacacacaagtaagatggcttcagagagggagaagcactgtgaggcctccagaggatgtggcagtgagggacgatggggtgaagtcagctgggcattcaaagaagctagactgagaacgcctgagaagaaccagctacgggaagagctttgggaagcaaaggcagaggccctggggtgggagcaggcttgttttattggaaggaccagaaaactggtaagtgtgacccagatcaagtgtgaggagatgaggctggggatagtcaggggctggatcacccagggccttgtgggccccacatagggttttgggttttattctcagggcaatgggaagctgttggatggtttgatgaaggggagtgacaggatccgatgtacctatttaagaatttaagagggtcgggtgcggtggctcatgcctataatcctagcactttgagaggccaaggtgggctgatcacaaggtcaagagttcgtgaccagcctggccaatatggtgaaaccccatgtctactaaaaatacaaaaattagctgggcatggtggcacacacttgtagtccgagctactcgggaggctgaggcagaagaatcgcttgaacccaggaggcggaggttgcagtgagctcagattgcgtcactgcactccaacctgggtgacagagcgagactccacctcaaaaaaaaaaaaaaaatttaagaggtcactcagttgtgctgtggagaatggaccggagggacaagaggggcagcagggatggtgggctggagtagggtgctggcaatgagggagtctggctcagatgtgggatgtgtatggaagaatataaatgatggtgtggatgtcagggtgagggaggagacaaaaccacgatgacccctagctttgtggcctgaactgtgggtggctgaggggatcgttaattgaatggggcagactgaggcttgtgaggaagatcagagtctggttcttgacatgagatgcccttcagacatctcttcactcaggtccaactagggatacagaaacactgaatatttcaacagcagaaattg

SEQ ID NO: 21821 - DNA, 2300 bp, Homo sapien
aacttgaggacaactcagagtgtcatgctgggagccctggggtcctcggagatgactgaccttgagtcacctgcacccttagtctggacagcaggggggatggggccctgtagctgcctccacagggcaggtctggagatgaacagagatgggaagcgagattcagaagagattttgacataggagacagagaccccgggataagggcacagagacacagagcctggaaggagagggacccagagatggagagacagagatttggaaagagatttgcagagatgaggaaagaaagacagattcacagctggaaaggtgaagatgcagggtgagagacgaagattcagagatgaggagacagggatgttaggacacaagtgaggagatgtcccccagacatccaggctctaggaccaatgacggacgtgcaccggcaagacagtgagcgctgccgggagttctggggacaggaagacccaaccatctgggtggtgctgggagaccaaggcttgggtcctaatgtgttggagggagggagggagggaggggacacctgggatcccagctagcagggtgatccacctgccatcaccccatacccggcggggtgatgacaccaccttctctgcaggtgacaccccagttttctagtgcctcctacatttttggggtgacacccgtgctgagaaccccacccagctctaatgctgcttccctcactgagtcacctcccaaccccgtcaggcctgttggggggaaactttggcgattcaggcacccagacccccagctccttccctgctcaggagcccagcagtgtggaatcccaggacccctaccctactgagggatgtgcagcctggcctcatgagacgcaggagtccagggccccagcccctcctccctcagacccaggggtccaagcccccactcctttgctccattaggacccaggagtcccaggtgacgtccacgtccttcaggaactgcggcttttcagttcccagcctcctcccttcccaatttggagctggggtgaggtgtgtttatttactttggttccaacatgagtcattccccaaaacacactgccccccatgtgtctcctggcttgaatggggaggacactgtccccctctcccaggaaagtggggatatcactgagagagatgagcgagaccctgaaaggggagtcccacacagcactctctcccactccacccggcctttttctctccccacccatcacctctccccatttccctgccctctaagcctgttcagtgatccccccacctgcctctccacttttccatctccgtctctcttctgtctcccatctccccttttctttccttttttttttttaagacagggtcttgctctgtcactgaggccggagtgtagtggcgggaacacggctcactgcagcctcaaacttctggactcaagcgatcctcctgcctcagcctctcaagtagctgggactacaggcacatgccaccatgcccggctaattctatttgtattttttgtagagatggggtatccctatgttgcccaggctggtcttcaactcctgggctcaagcgatcctctcacctcaggcgattacagggttgggattacaggcgagagccaccatgcctggcccatctcccctcttcttgttatttcttttcacatttttgtgcccctctgtttcttggcacctctccatctctctacatcttcctgcgtctctccatctctctgaatctcctctctctcctttctgtctagagggacttccctgcctgcctttctgacactgtgtttctgtctctccctctcttttggtctctgcgcattgacccggctgtggccccccgcccccgccaaacctcccaccccccgccaccttcttttccctgggtcctgggagctgaggcaggaggagaagtggggggatgggagtggagagggagggcgggaaatcccagtgtggggagagggtcgatcagaccggcttggctccctgggcacctctgtcagagccccgcccagggctgcgtggccgcccatataagtggctctgggctgagacggagaagtcagtgcccgtgtctccacacgtctgcctccatcactgccatcgcgatcctgcaggtaggaacatcccctccgcagccctcttctttgaggttgggcgcctctgctctgttctccctcctcctcatcccactcatatcactctgtctcctttcatatcgctgattgtcggtctctcgggacatctctgtccttcccaatgcccccaa

SEQ ID NO: 21822 - DNA, 2300 bp, Homo sapien
catctctttgccctcactggccaagtaaggaagcccaggcggccttggtccctcagagccccagtgtcgtcatctgggaaatggggtgatcctaaggacactagcctcatccagttactggcaagatgaaactgatgacgaggattgctccagccagcccagatgcccttgaggcaggagtgaggtctgattaatttatctaaagcctggcacgagggcggggcttcaggaaatgacaggcaaatcttggagtttgcaggaatgagcctttgtgaatggctcgttttgcagggagccctgcccaactggattctgactcctcatgacaaccctaagggaagcgtgattattatgatctctgttacagttcacacattccttcacttattaatccaataaatatttgagtgcctatttgcctggcataccaggctctagaaatacagggtaaacaaggcagatacagccctgcttttaggatgttcaccgtccggtggggactaacagtaacaataaccttcacttctcctgagggtttgctgcgtgcctgtgccaaacgctctacattcattctaacctcacaaaaggaggtactcctatcatcatacccattttagagctcagaaagctgaggcagggaaagagggagtctcctgcccagaacatcacagctcccagcctgaggaaccggatctccgacgcccacgtttcttaactacagtctgtactgcctctgggtatgctatactggtgtgaggctcagtgtcttgctgtgacagcgagtgcccttgggctccagtccgtctgccctctgagcctgtctgagcctgcgtgtgtctgaagccaactccaggtctattctgggctaatgatgtgttctacggcaggggaagcaatgagtttggggtccctggggctgaggggtggtgttagtttccttcctgcatgggaacctcccacgggtccccatgctgattgataaatgcttgtaactgaggacctgcccctgcctgaggcttgcagcatttctgttggtctgtcagcctttgttccgccttttgagacctgaaaataatgtgacaccctagagaaatgaggccttcccttttgctgaggcaggtgtggaggtctgaagccaagccagggcccgttgtcctggaaagggtaggggtcagggctaggccccagtggagccggctgaagcgggttgactgacaatgaatggatggatggatggactgacttgccgggtgggaggccgggactgcgatgaactttactggccccgctgcactctccactatgggcaccccttcctcctacctctccttgactcaccgctagacttcctctttgagtaacacctgctaacctccttcccccttatcctctcaagagcgctggagccctgaacatcggcgcttgaagcattccccaggtgggaaacactgagggcatccgttgcccttggtcacacagcgaatacggaatccgagcgggaaccctggtccacgaagctcgcattccggactctgctcccaagccgatccgggcgtcagctagtccctgtgccagggtgggcctctcggctgtcacatcacccccttctcacaatggatcatcccgttgtccccgcaagcggcaatgggccagtccgcggacccccccaactccctgtggcagtgggccagtccacgctgtccccactgccccgtaggatgtacgaggttccttccgggctgctgccggtctccgcgcgctcacctttggccttgtcttttcgccaccgccggcgaccgtggctccttgagccctctttggcattcttcgaggccggggccatagcggcctcggcgggctccgttcccccggccaactccatcaattccccgcggtcctcccgcgggggccaattccagccgcgaggccctgcccggagggccaatcctcgctacacactactgtcgggcccccctattacccaatcccgagcttgctcttctctgggtccagctccctaaccaattctggtctccctccgctgccgtgctccgcccccaaccgccagaatttaagatctggctccgccccctaccgcgcattaaagggctcgcggccaacaaaaaggcaaccccgggggtggcgaaaagcgtccttcgggcaggactagtgcggagccccgcggggagcaccccagcagggaagtcccgatcttcccacgtgctgggaagcctcccatgtgctggctcagtctcgccatcccactcaccttcccagggagggatgccctagcacgcggc

SEQ ID NO: 21823 - DNA, 2300 bp, Homo sapien
aaccttcacttctcctgagggtttgctgcgtgcctgtgccaaacgctctacattcattctaacctcacaaaaggaggtactcctatcatcatacccattttagagctcagaaagctgaggcagggaaagagggagtctcctgcccagaacatcacagctcccagcctgaggaaccggatctccgacgcccacgtttcttaactacagtctgtactgcctctgggtatgctatactggtgtgaggctcagtgtcttgctgtgacagcgagtgcccttgggctccagtccgtctgccctctgagcctgtctgagcctgcgtgtgtctgaagccaactccaggtctattctgggctaatgatgtgttctacggcaggggaagcaatgagtttggggtccctggggctgaggggtggtgttagtttccttcctgcatgggaacctcccacgggtccccatgctgattgataaatgcttgtaactgaggacctgcccctgcctgaggcttgcagcatttctgttggtctgtcagcctttgttccgccttttgagacctgaaaataatgtgacaccctagagaaatgaggccttcccttttgctgaggcaggtgtggaggtctgaagccaagccagggcccgttgtcctggaaagggtaggggtcagggctaggccccagtggagccggctgaagcgggttgactgacaatgaatggatggatggatggactgacttgccgggtgggaggccgggactgcgatgaactttactggccccgctgcactctccactatgggcaccccttcctcctacctctccttgactcaccgctagacttcctctttgagtaacacctgctaacctccttcccccttatcctctcaagagcgctggagccctgaacatcggcgcttgaagcattccccaggtgggaaacactgagggcatccgttgcccttggtcacacagcgaatacggaatccgagcgggaaccctggtccacgaagctcgcattccggactctgctcccaagccgatccgggcgtcagctagtccctgtgccagggtgggcctctcggctgtcacatcacccccttctcacaatggatcatcccgttgtccccgcaagcggcaatgggccagtccgcggacccccccaactccctgtggcagtgggccagtccacgctgtccccactgccccgtaggatgtacgaggttccttccgggctgctgccggtctccgcgcgctcacctttggccttgtcttttcgccaccgccggcgaccgtggctccttgagccctctttggcattcttcgaggccggggccatagcggcctcggcgggctccgttcccccggccaactccatcaattccccgcggtcctcccgcgggggccaattccagccgcgaggccctgcccggagggccaatcctcgctacacactactgtcgggcccccctattacccaatcccgagcttgctcttctctgggtccagctccctaaccaattctggtctccctccgctgccgtgctccgcccccaaccgccagaatttaagatctggctccgccccctaccgcgcattaaagggctcgcggccaacaaaaaggcaaccccgggggtggcgaaaagcgtccttcgggcaggactagtgcggagccccgcggggagcaccccagcagggaagtcccgatcttcccacgtgctgggaagcctcccatgtgctggctcagtctcgccatcccactcaccttcccagggagggatgccctagcacgcggcccggcccgccttttgaagggggaaagtggggcgcctctgagcctctgcctggggtgggggcgggccaggtcctctgccaactcaaagacgaggcggggcgccagcgctggaggcgtggctgtgcctgagagccgttggaggagggagccccgctttccctctcctgtctcctagttctcctattgcgcttttcctgggggatctttctccctctgtctccgccccctaatccatgctcccgataatgagggtgggggatggtggtaggagaacgctcggcgcctgcgcactagcttcaggccgcgggccggcccaagagcggaggtagagggaacgacgcatgcttgagaaatggcgggaaacagaggaggctcgaggcttgctcacacgcacacagccaactgcttctggaccgccttgctcacacgcacacagccaactgcttctggaccgcctgaaaggcaacctcgcccgccgcggtggtgtggggcgggcatcccttgagactgtgctc

SEQ ID NO: 21824 - DNA, 2300 bp, Homo sapien
attcatttacttaaaaaatactaaaaacttacggtgtatcaggttagctctggtcatccttcaacaatcctgagataaagatcaacatccccattattaaaaaaaaaaaaaaaaaaaaaaaaggctgggcgcagtggctcacacctgtaatcccagcactttgggaggccgaggcagatggattgcttgaggccaggagttcaagaccagcctagccaagatggtgaaacaccgtctctactaaaaatacaaaaattagccaggcgtggtggcaggtgcctgtaatcccagctactcgggaggctgaggcagagaaacacttgaacccgggaggcaaaggttgcaatgagctgagatcgtgccactgcactccagcctgggtgacagagtaagactccatctcaaaaaaagaaaaaaacaaagtctcactctgtcgcccaggctggggtgcactggtatgatcatggctcactgcagcctcaaactcctgggctcaagcgatcctcatacctcagcctccggagtaggtgggactacaagtgcaccaccatgccccgctaatttttacattttccgtagagacgtggcctcgctatgttgcccaggctggtctcgaactcctggccccaagcaagcctcccacctcagcttcccaaagtgctgagattacaggcatgagccaccgagcacctggccaacatcctcattttagaaatgaggacatcaggtagaaaataaagaagtaagggttcttgcacagggccatgcagttaggaagtggcaaagtcaggatttgaagccggggtctttctcccctggaccaggctgcctccctatagaggatttggggaaaatcaaatcccagagtgggaaggcactctgagctagggaccaggagaccaggaaagcggccctcttgccagtgttcattcatccatccacagaaactgactgagcaccagctctggggtagacacgggcgtaagtcccagcaatacaatacaaagacggtaccttacccttctggagtttccaggcaggctaggcagaacattggggcatcaacagtctctcagtttaccaggtctgtcctcttctgccaggaagatacctgctccctgccaggctgcctccataggggactcagtccagccaggcggaagggccttgcgggttgtgttctcagcaaggaggagccgggagagaggtgcgggagccgccaaggtctcaggcaaggtcagggactgacggcaggaaagttgggggagcagcatcagaggataacgggcccaaggctctgggctcaccgcaggcactccctcgccttctccgcctcttcccggggcccagtgctgccccctgcctgcttcacaggagccccaggaagctccgatcttccttctctaggctcaaaacccctgccatggagaaggggggaatacaagttttatctatggaactggaggttacttgttgaagtcccctgatgtggggggaaaaaccaacgcagccctaatcctgaagctgagggtatctgtgaggccctggtccagagggcaggcaatggcggcccctccgcccagaggccagtctgtcttgtctctcccacagctgataagagagtaacgcgtttctcagcgccggggctgctgggtatgctttgagagggaaggaagaggggcggcaggcaaaggcagggattgaggcctgctctccccagtgctgaggatagaaagctgtttctccaggcctccagagcacagtctcaagggatgcccgccccacaccaccgcggcgggcgaggttgcctttcaggcggtccagaagcagttggctgtgtgcgtgtgagcaaggcggtccagaagcagttggctgtgtgcgtgtgagcaagcctcgagcctcctctgtttcccgccatttctcaagcatgcgtcgttccctctacctccgctcttgggccggcccgcggcctgaagctagtgcgcaggcgccgagcgttctcctaccaccatcccccaccctcattatcgggagcatggattagggggcggagacagagggagaaagatcccccaggaaaagcgcaataggagaactaggagacaggagagggaaagcggggctccctcctccaacggctctcaggcacagccacgcctccagcgctggcgccccgcctcgtctttgagttggcagaggacctggcccgcccccaccccaggcagaggctcagaggcgccccactttcccccttcaaaaggcgggccgggccgcgtgctagggcatccctccctgggaag

SEQ ID NO: 21825 - DNA, 2300 bp, Homo sapien
gtgaaaccccatctctactaaaatacaaaaattagccaggcatgatggtgggtgcctgtaatcccagctactcgagaggctgagacaggagaatcgcttgaatctgggagacagtggttgcagtgagccaagattgcaccactgcactccagcctgggcaactgaacgagactccatctcaaaaaaaaattaaatgtgaaggccaggcatggtggctcatgcctgtaatcctagcactttgggaggccgaggtgggtggatcacatgacgtcaggagttccagaccagcctggccaaaatggtgaaaccctgtctctactaaaatacaaaaattagccagccatggtggcaggcacctgtaatcccagctacttgggaggctgaggcaggagaatcacttgaacccgggaggcagaggttgcagtgagttgagatcctgccactgcactccagcctgggcaatagagcaagactccgtctccaaaaaaaaaagaaatgttaaaaatggttttaacactagcctctcccctttatttgcaccctaggacaccaaaggcaccacagaaagccaaacaagcattccagagcctgccagcaatttctcaaacaatgtcagctaagaagctttgctctgcctttgtaggagctctgagcgcccactcttccaattaaacattctcagccaagaagacagtgagcacacctaccagacactcttcttctcccacctcactctcccactgtacccacccctaaatcattccagtgctctcaaaaagcatgtttttcaagatcattttgtttgttgctctctctagtgtcttcttctctcgtcagtcttagcctgtgccctccccttacccaggcttaggcttaattacctgaaagattccaggaaactgtagcttcctagctagtgtcatttaaccttaaatgcaatcaggaaagtagcaaacagaagtcaataaatatttttaaatgtcacagatcaaaattgtttccttcaaatggggtctgccaattcacaaccagatgacccattttaccctattcactgcagactgaatccagattctacacatacttatccccaccaagaccctcactctgtctccattggcctacttgttcatctttcactcattcgacaaatctttctgaggtaagagcgaggtgggacaaaaaaaaaaaagcataccaatgaaccagacacggtcttattaaagataatataggtttaaaaaaaaaacttggcacagtttcttagcacttaggcagcctttggtatttatgactactatcatcaccattaccaccatcattatcagtcattgtcatcagtggtcactgtcttctgtgagtttccaatctagtacaggatcatagttcagggctagagagatggcatggagtatctcaaatgccattcagaagggcctcaagctataaaagtgggaaggcatgacattagtttttaacatgagagttaaatgatcagaatgacaatataaggaaattaaactagcaacctggctgggcgtggtggctcacacctgtaaacccagcactttgggaggcccgggggcggggggtgggggtggatcacttaaggtcaggagtttgagaccagcctggccaacatggcaaaaccccatctctactaaaaatataaaaattagccgggcgtggcagtgcacgcctgtagtcccagctacttgggaggctgaggcaggagagtcgcttgaacccaggaggtggaggcttcagtgagccaaaatggtaccactgcactccagcctgggcaacagagaaagacttgtctcaataagtaaataaataaataatctggcaaccatttgtaggaatgaacaaagagggaaataattattacaacaactacagagactgccccctgaatgacgctttcctcagacattagaaggaaagagaaaaaaggaacactcatccagcatctggcttctgtcatcccagatgacacggaggcctaaattgggatgcttgccttatgagaagaaacattttaacggagtggtgggtggggtggggccctatttatgacacaagagagcaagcccctcccttcttgtaagagagtgctaggcacatagcctcctcctattcctaatcctcccaccaaagaaagaggcacagagttcattacttagtgggggccagctgtgatcggccaactgccagctgccttaaaaaggaagaccagtgatgctaggatggagtgaaacccaagaggaagtgccatcatgaggaatcaatgagagatc

SEQ ID NO: 21826 - DNA, 2300 bp, Homo sapien
aagtctcactgaatgtatgtgtgaataaatgactatatgagagccatgtggatcatggacaaagtcaacaaatatttttgaatgtctaccaagtacactgtagaatagggaaataagtaacccaggcagggcggtgttttctcccaaattccccttacctcctcctgaggaatggagggcctctgtacatcagagagactcttgacacaaataatgttcttgagatgcatcataagaagttgtgatgttaacaagaaaaaagtccatttgtcttgggggtgttttatattaatagacctaacagaccggaagccccctccaatgggacacaggatgcaacacccaccccaagtgcatggaggggaaaccagagggagcaggacctggaagaacagaggggtaaagagactgaggcacgggaggtaggtctgaggaggagctcccggcccctgcggtggcctgggtgtggactgatgcagaactcagcagcataagtaaagtggccgcaccaggctccatttgtacatgggatggtttttcagtaagattttctttctgctaatgggctacattttcgcacactttctaatacatcaggcccagttaatgggctacaaaacaatcattccattcaacagtcatttatagaatactcccaaagtgccagaccctgtgtaagttcaagcaatacaaaaatgaacacgaacagctcctgtcctctaaaatccccatccaatgagctccaggaggcacctctcctacaacacgcccctgctctgcacggccctcctctctgccctccaccaacccaaatcctcccccaactccagctcaagttccacccaaccaagtccctctcagtccccctgcactcctgccactttgagagatgactgcacccatatctctaggctttatgaaatggatgtcatctccctggttttagaattttccagaaagaagccacatcagtgatttgcatcagaacaagcttaggcccaccctgagccttcaacttggacacaggctcagtcatagcagtccctggcccctgcagtgctttataaacactgcagtagcaaagtccacaatcaactctgtgacaagtcaacaggccgagataatttgaaaacgtggagaaaaaagaatggtcaaacaaaaccaaagggctttgactcatgcctttcctctttccttctctcagggaaataaagtcacaccccctgctctcactcctgcctggaggcttccaaaaaaagggctcccttgttagccttcccttcagcccccatgaatatcacccagcattcaagcccagcctctcctctccctttgagcacatttcctaaagtctcaaataaatgtcaagtttagtgagtgctgatattctatgcccctaatgtttacttcaagtattattacctttcttcttttgcccggggccatttccaaacaagggctggagccaggcgccccagcagctgggcaaacacacttcagggctccttccctcctgtggctcctgtttctcaaaccctctgagacctaaagctctgggggtctcttcccccaacccagttccctcccctttagaccagaacaactaagccatggccaccttcccgatggacacacaaggaggcctggtgtcacccactgctccaggggcggtgttctcggcaggggagctgcctcttgtcccggatcctgctctgctgccatcttatgtggctgcagaattggagggaattgtgaacagagagaggacagggcaacttcccaggcaacaacactactattgccgatattttgccaaggatgggagcaggagcacagaggggaaacagaccttgtcaaagtctcttctaccaacacttagtatccactttcctgccaaatattcagatagagagggtcattgaaaggtataaggaaatccaagcaagaaaaaaagatttgaggaagaaatcatgaggcattggggtgtgaggaggcgggaaagagtacaggagagaactggcacagctgccaagttatcagtcaccttcttatgttcttaagaatgctgaatttcttttgtttgaccagtttcacctcccagattcccataaagcacatggtctaatctgttacgtaacagcaagacagcgtcacctcacctgttctcgccctcaaatgggaacgctggcctgggactaaagcatagaccaccaggctgagtatcctgacctgagtcatccccagggatcaggagcctccagcagggaaccttccattatattcttcaagcaacttacagc

SEQ ID NO: 21827 - DNA, 2300 bp, Homo sapien
ctctgtcgcccaggccggactgcggactgcagtggcgcaatctcggctcactgcaagctccgcttcccaggttcacgccattctcctgcctcagcctcccgagtagctgggactacaggcgcccgccaccgcgcccggctaattttttgtatttttagtagagacggggtttcaccttgttagccaggatggtctcgatctcctgacctcatgatccacccgcctcggcctcccaaagtgctgggattacaggcgtgagccaccgcgcctggccttatttttttttaagatggagtctcactctgtcgccacactgaagtgcaatggtgcaatcttggctcattgcaacctctgcctcccgggttccagtgattctcctgcctcagcctccaagtagctgggactacaggtgcccacgaccacacctggctaattttttgtatttttagtagagacggggtttcaccatgttggccaggatggtctcaatctcttgacctcatgatccacccgcctcggcctcccaaagtgctgggattacaggcatgagccactgtgcccggcctatctagctgtaattttatatcctttaacacatctttccctgtccctcccttcctctacccttcccagcctctggtatgctctgttctactttttccttccatgagatcaactgtttttaggttccacatattagtaagaacatgtgatgtttaactttctgttcctagcccacttccattcatgttgccacatgtgacaggatttcattctcaagcccccaaaggcacctcactgggcctttgtttttttgttttgttttgtttttgcttttgtttttcaaacctctgggacagatggctccttctaaggcagcccatccccctggtggacagttctctccaatcttgacagaagtcctctggacaactcacgtcctctccctgggctcatcctgcaccgcatggagctgggcagcctggggacccgcagtgaacaggacctggggtgacttgaccttgaagcctggaggtcagagcccacatctgcccaggggtcagggccagctcacatcatgtagaccctggtcagcatccctggggcagcccttgacaaggctgcaggccttgtcttgccctccagggggagacattgcacacagacaacactcaggaaacattcccctggtcatgaacctggctttgctaaggaggtgaaggtagagcccactttccatcccttgctccaaaacacccttccaggccctcccatgtacctgctctgtcccttcctgggtcctctgaggaccctgttctgtgaggggtccctgtgcagctccccattccctcctggcaccacctgtggggaaggtgcggtgaccacaggacaatcagcctcgcagaggacagagaccacccaggatggtcagggagaacatggacaggccttgagcctcagctcaagggagggagggtccccctgaagtcttccccaaggacagtagagcccagagccacccacctccctctatcacagtcctctcttcccaggacacacaggacacctccccctccatatccgggagctgcagctccacctgagacccctggacttgggtctctgtccctgggttagaggccaggctggtgacactagagacagagggctggtccctccccagtcatcccccagtgagcccctttccatcccccagagccacctctgtcaccttcctgctgggtgtcttcctaccttcccagcacactgaagagcatggggagacctggcagctcactgtgttgcaaagaaaataattaccacatttggatatgccagggttctctgtgtgctgctgacagacccatagccaggacacaatagaggtcagtgctggagaggggggatcctcctcccctgatggggacagaggtctcatcagccttgattctcaaagtgtggtctgggaaaccaaaatgtagacagaaaggaaagagaaagtaaggacaaaggtaggaatgagaggagaggaaacagagcttcctggacaaaccccgccccagcacacatgatcagacaaagctctgggccccagggaggaggctcagcacagagagtggaaaacagcagaggtgacagagcagccgtgctcgaagcgttcctggagcccaagctctcctccacaggtgaagacagggccagcaggagacaccatggggcacctctcagccccacttcacagagtgcgtgtaccctggcaggggcttctgctcacaggtgaggggaggacaccctgggaa

SEQ ID NO: 21828 - DNA, 2300 bp, Homo sapien
cccccatggattctgactttatcttacttggcgcattattcagatcttgttgtggagttggggcagggtaggtcataaagcctgaccccaggacactctgtgtgagcacatgagccacacacaccccattagatctccacacacagctgtgaccattgtgaggaggactaacacaggctcagagatcacaccagagaatcagccacagagaaaaacacggatgtggaatgtgatggagctcgacataacatgtgggtgacctcgtgtgaaatgtgcagatccatgtggaataaaacacgcagccggacctgggactgcggccacccacacttcccttccagtccaccagagggcgacagagtccctccagcctggagccttcccaggggctgctgacctccctcagcggaacccacagcccagcagggtccaccctcaccagggcacctcggcccacgtcctccttaccctccaagctccccatacggactctgtcagctcctccctgcagccaggcagccggcaacatgaggccgccccctctgcaggcagctcctgccccacacacccaatccttccctgggcctagttaaggcatctcccagggcagcgctggtgcacgggatgccacactgggcgctttcccctcgtgacctccctccatcctcatcaactctttctgtgactgctccctaaatacccgcccctgctccgtgtgtcctgttctctacggcatggcaggctgagcccagcgctgacagaaccacagctgcctgagggcccacagtgcctctggggaatcagccaggcaccctatgaccttccctctgcaccccaggaggctcggagagtatgtgatggtcacgcccaggcactgtctgggatgtagccacctgccccctgctgtccttcgtgaagccaggagggaggacagcgctctctcatgtacacaagctggggggcaaggaatgagctccctttgttcccagaacatggcccacccctacctgccctctcaggtgtgagcaacgtccccccagacgggctccccggccgctgcccatcctttctctacacagaggggcctgaccaggtccaaacccttaggacagaccccaggggatatcagcatggggagggctgagcccatcctggctgcagagtaagttgggatgagtctctccagctctgagcccctgctctgtcccaggctccctctcctggatctcagagagcactgtcttgtggggcccctgggcaactccccacttcctgctgcaccaaccatagggaaggtggggtgaccacaggacagtcagccgggcgaaaacagaggacacccaagatggtcagagagaacatggaaggcccgagccccagctcagctgccagaacccaaagagcaagagaatggctgatacctgtccctgatgaccactaggcccacagcccccactgaccaaccagaacagccctctctctcaggaggcataagagattatttgccctgcacaccaccagtaaggacagtcccctctgggatatccagggcattgaatgtccatccttggaagctgcaaccaagcttgacacaatgagagagggggaggatccctctcaccagtgagcacacacctccccaaagctcagtggtggtgtccctgtgacagggtccttgcggagcgctgacctcctgatctgaagggaagagccagatggggatgggagagggcagggggagcgactgtgcaccccgacctggagacataggctgcaggatgctgagggcacagggctgtgctcacccagtctccagggtgtatgtgtgactgtgtgtgtctctttgtgtatgtgtgtgtctctgtgtgtgtgtgtctgcatagtgtgtgcagaggttgggtgagagaatcactgctgaaggagtcagagacctcagcaattcccaggggcctgaaacacagacagaaaataaagggaaaggagggacagggaggcaggactgagaggggaggggacagagaggtgtcctgggcacagaccccgcccatgagcctgagaagtgctcctgccccgggaagaggctcagcacaaaaggaggaaggacagcacagctgacagccgtgctcagaaagtttctggatcccaggctcatctccacagaggagaacacgcaggcagcagagaccatggggcccatctcagccccttcctgcagatggcgcatcccctggcaggggctcctgctcacaggtgaggagaggacttcctgggaaaggacaggaggaggaaacacagtgact

SEQ ID NO: 21829 - DNA, 2300 bp, Homo sapien
gtggctttggagcagaagcatgttccctgtcttgggttctttaagtttcctctccttctgcagagggcaggtgaggaccatgtggatctttccagaaatacatgtggacatttgcaaatgcagcactgactggtggaaagggtgggaatgaactgctggaaatctggtcctcatggaccatatgtgtttgatggatatgagacaaatttggagagaagttttgcaaatattttctttcattggacattctactcaatgattccatgggttcgactactctagggacctcatgtaagtggattccagagtgaatatgagaagagactgctggttgccaggagctgggagtggggagaatcagaagttgttcatgggtgggcagtttcagttattcaaggtggggaggttctagagatctgctgtagagcttgatgcctatagttcacacagattgagtatttcttatgcataagacttaggacaaaaagtgttttggatttctgacattttttgattctgaaatatttgtcatatacttactggtttagcatcccaaatctgaaagactcaaaatctaaaatgcttcagtgagcatttcttttcagcatcagattagtaggcaaaagtgggaggtgataagccaaagatattcttgccctttttttttctctcaccacttttctagcttggtgattagttttcggtgaattccatactggccatgctgcacttgtatatttttgaaggccttgggatgtgagaaaggctgattgctattttctatgtcatcagaactttccaccttttcatggttgcctctttttctcagtgtatctgttgtggcagtcattaataagagcctgtcaggtgagatttaggacagtgttttctaattctgcaaaaaatgttactgggattctgttaggtgttacattgaatccgcaactcactttgggaatattatctttctaacaatattgattcctccaatccatgaaaatgaaatgtgtttccatatattgatatcgtctttaacttgtttcagcaatcttttgtagttttcagggtataatcatttgactttttggttaaacttatttcaaaatattttattccttttgatgttaatgtgaactgaaattctttccttaatttcctttcagattgttcattgttagtgtatagtctaaagaatgatctagaaagagtgaaggggacaggcaaaagctggtggttttggagcagaaacatattccctgtcctgggtttttgattttccctctccctttgcagagggcaggtggctcttccctgatagctagatagacttcactggaaaacatagtgccaatgctccagggatccacttaccagggactatgatcctcttgattatgagatttgttccagcagtggctgagttatggatgaaacagacatagacccctctatatgttttagtgatttgggggataaagaacacttgtgctgattgctggaacttcccatcaatcagccaagaatgctctgccagtgggtgagagtctgtgaggcaggagagcttgggggcttcccctgtatggtaataggtgtatgaggaggaaatggtgggggcatccaggccatgtggagcaaagagaataatgtcataggtggtattgtcagagggaagggaaaatcctggtctgtggaagggccacagtgaccctgtgagccaagttgcaacactgaagtcccagccaaatccctgctgtgttcactgatctggagcctgagacagtcacctgttttgcccatcacaagctgtggacgctgagtctcccatgacaggagcagcctcttttctcctattgttgatcaagcctaggcctactctggtttgcctggggcagaaagtcatggccaggtttgatgtccaggggtaaaggtctctgtacttggacctgagagggactgagaggcctggcctctggccacgtgtatttgggatggcagactggctcacagaggaacaggagatactcacggaggagattcagggtgactgggtcactgcggctggcactcactgggttccgtatttcacattcatagggtcctgcagtgtactttgtgacaccaaatagaaagagggtccttttgtttttggacaactgcaagctgtgagtcatagggaggctctgaccattcatccaccacaggtagcttgcgtccggagtctcaggatcacaggttaagctcacagcctccatgtcctccctggggtataagttgctgctggagatggagggcttgggagt

SEQ ID NO: 21830 - DNA, 2300 bp, Homo sapien
atgacttgtccttgcccccctgacattgatcttcccaccctgctgctccctcttcttctcccaagcccatgtgcactgctcagccccagacatcactgcccccagggtatacacagtgctgcctactgcacacaaacacaaactcacagaaggtgacaaaaatctgcatttgggacatctgattgtgaaagagggagaacagtgaacatagagccacacagactgggactcacggggctggaaggtgaaggagctataacataacatatgtgtgacctcgtgtgaagtgtgcagatccatgtggaataaaacatgcagcctggcctgggattgctgccgttcacatttccctccctgtccaccagagggggacagagtccctcccagcctggagccttcccaggggatgccaaccgccctcaacggaacccacagcccagcagggtccaccctcaccagggtcacttcggcccaagtcctcagcgccctccatgctccccacacggactctgtcagctcctccctgacctgggggccgccaacctaacaccactccccctgcagggagctcctccccacacacctgctccttccctgggcccagctaaaggcatctcccagggcagtgctggtgcacgcgacactacactgggtgctttcccctcgtggcctccctccatcctcatcaactcgttctgtcactgctccctaaatgcctgcccctgctccatctgtcctgttctctggggcatcccaggccaagcctagcactgacacagaacagtggctgcctgagggcccacagcctccccgggaatcagccaggcaccctgtgtcctgcctgctccctgcaccccggggggctcagagcacgtgtgatgctcacacacaggcaccatccgggatgtggccacctacccccagctgtcccttgggaagacagacctctcctgtgtgcttgctgggagaagggggatgttattgctctttgctcccagaacacaactcacccccacacgcccactcaggtgtgagcaacgtccctccagacaggctctctggccactacctgttcctcctctacacacagcagcttggccaggtcaaaaacctcaggacagacccctgggtatgtcggcacatggatggctgagcccatcatggccacagagtaagttgggatgaatctctccagctctgaacccctgctctgtcccaggctccccctcctgcatctcaatgagccatgtcccccggggttcctgggtaactccccacttcctcctgcaccaccacggggaaggtgtggtgaccacaggacaataagctgggcagagaagagaggacatcaaagatggtcaggaagaacatgagaaaccatgagctccagctcagccgccagaccccagggagccatagagtgaccgagaactgtccctttgactatgggactcacagccccccactgagcaaccagcacaggcctctcctcacaagaggcatgagagattcatcctgcacacctccaggaaggacagtttcctctgggacacccaggtcctgaatgtccatccttggaagctgcagccaagctagacacgattagaaaaaggaaggttccctctcatcaggcaacacacagctcacccacagcacaatggggtgtcactgtgacagggacctggttcagctccagcctcctgcactgaaggggagagccagatggggatgaaagaggccaaagggcatgaatgtgcaccccgacccagagccatggggacagcaggaggctgaggcccaggactctgcttgcccaacctgcagggtatgtttctgactgtgtgggtctgtgtgtgtctcttctgtgtgtgtctgtgtgtgtgtgtgtctgcacaaagtgtgtgatgaggcttggtgaaagaatcactgctgaaaaaggcagaggcctccacaattcccagggacctgaaacacagacaaaaggaaaaacaggagggacaaggaggcaggactgagagaggaggggacagagaggtgtcctgggcctgaccccgcccatgaacctgagaagtgctcctgccccgggaagaggctcagcgcagaaggaggaaggacagcacagctgagagccatgctcaggaagtttctggatcctaggctcagctccacagaggagaacacgcaggcagcagagaccatggggcccctctcagcccctccctgcacacagcgcatcacctggaaggggctcctgctcacaggtgaggagagaacttcctgggagaggacaggaggaggaa

SEQ ID NO: 21831 - DNA, 2300 bp, Homo sapien
gaggctgtgagcttaacctgtgatcctgagactccggacgcaagctacctgtggtggatgaatggtcagagcctccctatgtctcacaggttgcagttgtctgaaaccaacaggaccctctttctattgggtgtcacaaagtacactgcaggaccctatgaatgtgaaatacggaacccagtgagtgccagccgcagtgacccattcaccctgaatctcctccgtgagtattttctgttcctctgtgagccaggctgccatcccaaatacacgtggccagagaccaggcctctcagtccctctcaggtccaagtacagagacctttacccctggacatcaaacctggccatgactttctgccccaggcaaaccagagtaggcctaggcttgatcaacaataggagaaaagaggctgctcctgtcatgggagactcagcgtccacagcttgtgatgggagaaacaggtgaatgtctcaggctccagatcagtgaacacagctgggatttggctgggacttcaatgttgtgacttggctcacagggtcactgtgattgtggtgcttccacagacgagattttcccttccctctgaaaatatcgcctgtgacattattctctttgctccacatggcctggatgcccccaccatttcctcctcatacacctattaccatacaggggaagtccccaagctctcctgcctcacagactctcacccactggcagagcattcttggctgattgatgggaagttccagcaatcagcacaagtgttctttatcccccaaatcactaaaacatatagaggggtctatgtctgtttcatccataactcagccactgctggaacaaatctcataatcaagaggatcatagtccctggtaagtggatccctggagcattggcactatgttttccagtgaagtctatctagttatcagggaagagccacctgccctctgcaaagggagagggaaaatcaaaaacccaggacagggaatatgtttctgctccaaaaccaccagcttttgcctgtccccttcactctttctagatcattctttagactatacactaacaatgaacaatccgaaaggaaattaaggaaagaatttcagttcacattaacatcaaaaggaataaaatattttggaataagtttaaccaaaaagtcaaatgattataccctgaaaactacaaaagattgctgaaacaagttaaagacgatatcaatatatggaaacacatttcattttcatggattggaggaatcaatattgttagaaagataatattcccaaagtgagttgcggattcaatgtaacacctaacagaatcccagtaacattttttgcagaattagaaaacactgtcctaaatctcacctgacaggctcttattaatgactgccacaacagatacactgagaaaaagaggcaaccatgaaaaggtggaaagttctgatgacatagaaaatagcaatcagccttcaaaggcttcacatcccaaagccttcaaaaatatacgagtgaggcatggccagtatggaattcaccgaaaactaatcaccaagctagaaaagtggtgagagaaaaaaaaagggcaagaatatctttggcttatcacctcccacttttgcctactaatctgatgctgaaaagaaatgctcactggagcattttagattttgaatctttcagatttgggatgctaaaccagtaagtatatgacaaatatttcagaatcaaaaaatgtcagaaatccaaaacactttttgtcctaagtcttatgcataagaaatactcaatttgtgtgaactataggcatcaagctctacagcagatctctagaacctccccaccttgcataaatgaaactgcacacccatgaacaacttctgattctccccactcccagctcctggcaaccagcagtctcttctcatattcactctggaatccacttacatgaggtccctagagtagtcgaatccagggaatcagagagtagaatgtccagtgaaagaaaatattcccaaaacttctcttcaaatttgtctcatatccatcaaacacacatggtccatgaggaccagatttccagcagatccttcccaccctttctaccagtcagtgctgcatttgcaaatgtccacatatatttctggaaagatccacatggtcctcacctgccctctgcagaaggagaggaaacttgaacgcaggacaggcaacatagttctgctccaaagccaccagctcttgcctgtcgccttcactctttctagatcattccttg

SEQ ID NO: 21832 - DNA, 2300 bp, Homo sapien
tcttcccaccctgctgctccctcttctgcttccaagcccaattgcagtgctcagccccagacatcactgcccccagggtatacacagtgccgcctactgcacacaaacacaaactcacagaaggtgacaaaaatctgcgtttgggacatctgattgtgaaagagggagaacagtgaacatagagccacacagactgggactcacggggctggaaggtgaaggagctgtaacataacatatgtgtgacctcgtgtgaagtgtgcagatccatgtggaataaaacatgcagcctggcctgggattgctgccgttcacacttccctccctgtccaccagagggggacagagtccctcccagcctggagccttcccaggggatgccaacctcactcagcggaacccacagcccagcagggtccaccctcaccagggtcacttcggcccaagtcctcagcgccctccatgctccccacacggactctgccagctccaccctgacctggtggccgccaacctaacaccactccctctgcagggagctcctccccacacacctgctccttccctgggcccagctaaaggcatctcccagggcagcgctggtgcacgcgacgccacactaggcgctttcccctcgtggcctccctccatcctcatcaactctttctgtcactgctccctaaatgcccgcccctgccccatctatcctgttctctggggcatcccaggccaagcctagcactgacacagaacagcagctgcctaagggcccacagcctccccgggaatcagccaggcaccctatgacctgcctgcccgctgcaccacggggtgctcagagtgcgtgtgatggtcacacacaggcaccatccgggatgtggccacctgccccagctgtcccttgggaaggcagacctctcctgtgcgcttgcagggagaagcgggatgttattgctctttgctcccagaacacaactcacccccacacgccccctcaggtgtgagcaaggtccctccagacaggctctctggccactgcctgttcctcctctacacacagcagcttggccaggtcaaaaccctcaggacagacccctgggtatgtcggcacatggagggctgagcccatcatggccacggagtaagtcaagatgaatctctccagctctgaacccctgctctgtcccaggcacaccctcttgcgtctcaacgagccatctcccttggggttcctgggtgactccccacttcctcctgcaccaccacggggaaggtgtggtgaccacaggacaatcagctgggcagagaagagaggacatcaaagatggtcaggaagaacatgagaaaccctgagctccagctcagtggccagaccccacggagtcacagagtgaccgagaactgtccctttgactatgggactcacagcccccactgagcaaccagcacaggcctctcctcccaagagacatgagagattcaccctgcacacctccaggaaggacagtttcctctgggacacccaggtcctgagtgtccatccttggaagctgcagccaagctagacacgattagagaaaggaagggtccctctcaccaggcaacacacagctcacccacagcacaatggggtgtcactgtgacagggacctggtgcagctccagcctcctgcactgaaggggagagccagatggggatgaaagaggccaaagggcatgaatgtgcaccccgacccagagccatggggacagcaggaggctgaggcccaggactctgcttgcccaacctgcagggtatgtttctgactgtgtaggtctgtgtgtgtccttctgtgtgtgtgtgtgtgtgtgtgtgtgtgtgtgtgtgtgtgtgtgtgtgtgtgtgtgtctgcacaaagtgtgtgttgaggtttggtgaaagaatcactgctgaaaaaggcagaggcctccacaattcccagggacctgaaacacagacaaaaggaaaaacaggagggacaaggaggcaggactgagagaggaggggacagagaggtgtcctgggcctgaccccgcccatgaacctgagaggtgctcctgccccgggaagaagctcagcgcagaaggaggcaggacagcactgctgagagctgtgctcaggaagcttctggatcctaggctcatctccacagaggagaacacacagacagcagagaccatggggctcctctcagcccctccctgcacacagcgcatcacctggaaggggctcctgctcacaggtgaggagagaacctcctgggagaggacaggaggaggaa

SEQ ID NO: 21833 - DNA, 2300 bp, Homo sapien
gcctgaatctgagaacttcatcaggacttttggaacaatttagcccacaggtccaaggctgatttttgtcacagtgaagttcaggtagtaagaattctcactggtggctgttgaggatggtggtggtggggatgggtcatatggagaattagcagtgggagactagaaattaaagtggagaaagggaagaattaaaagtcaaaaacagtgtgagggaggaaagcaatggatataacacctcaaatctttatccttgagaggccttaaaaaatctacttaataataatcagatgctattctataagtactttgagactagacatgtgatgacttttaggaacctgtactgtggctgaaaatgcatgcaaatctagttgactcagatccagtcttaactggctcataacttgcttcatatgcatgactgtacgttagcaaggaaatgagagagaataacagcacatcacataggcatgaaaagtatttgcaaagcagcagttctcaaaaatgacattttgcagtgttttccagaagcagattcagaaaactgaagaccaaagtaatgatggagccgtctcatgcctagatgagcagaagcataccaaaggcttagtatttccccaagtagtaggcacctcaaacttatttaaggaaaatactcttcttgatgaaacagatactgcagtcgaagcaggaatgtgtttggtgtgctgccttaaatagcatgggtagatgttcaaacatgttaggactcgctggccctaggaaagacccgcaagtagatactttccacaccaggaaagtgacaatgaaacaccaaacaccttttctcctctaattaccaaggaaaatatttctttcccaatggtggaagacaataatgttgggaatgatgaagttttctggagtgtgaagtggatatgtcttataagtttaatccacagattcaccacttcataagtggataatcgaattgtgcctcagtttcctcagacttggggatattaagagaaccctcagtcaccacaaggtgggtaccagcataagaaaagagtgtagcaaaagcccaggggtgcatgttcttaaagtgcctagtgtgggattagaatgacaagtggtagatgacctacttgtgcagaaatttagagttattttgtgattttcaaatgatcatgggtgctttccatatgctgtccagactaggggtgctgcagctagaaagggaagaaggtttccatatttcctgagattggagtcacatcctctcaccaatgcactcacctgctgactaaccagtgtacttctgggaattgcaaatgcatgaaatggcacccattctagactagtcgcggcagtgttggtgatggccacagaccaggaacgaccttgacgtttatccgtagggaactgggtcatgagccatgatccacatcatggatactgtgcagctgtggcaatgaatgaggtatccttctgtctgtgcaccgggaaaggtttccaagatacactgcacagtgagaaaaacaagaagcagaacaatgcacggtgtgctacctcttgcattacaaaggaggaaatgtaaaattaatttacaaatggccaataaacacatgaaaagatgctcaacatcactaatcattaggaaaataaaaatcacaactacagtgggataccaccttacatcctttacgatggttgttcccaataaaaaaaaaaaaaggaaaacagaaaagaaaagtgttggcgaggaggaattggaatgcttgtgtagtgtttgtgggtttgtaatatggcacaacaactgtggtcatttctcaaaaaattaatcatagacttaccacaagatgcagcaattcggcttctggtgtattccaaaaagaacggaaagcaggggccccagcagatatttgcatgtctttgttcatagcagcattattcacaatagctaaaagttggaaacaagcccagtgtccatccatccatgaatgaataaacaaaaagtggtctatgcgtacaaacaaatgggattcagctgtaacaagaagggtgattctgatgtgtgcttcaacatgattaagccttgagttctttctgctaagtgaaataatcagactcaaaaagacaactactacatgattccacttaacagaggtgcgtaacgtcatgaaatgcataggcagaaaatgaaaaggtggttgtcagcggctggagggagggggaaagaggagttggtgtttaatgggtacagaattccagttggggaatatgaaaaagttctgggtggggatggacagtggtgg

SEQ ID NO: 21834 - DNA, 2300 bp, Homo sapien
aagtgacttgtccctgtccctctgacattgatattcccactctgctgctccctcttctcctcccaagcccacgtgcactgctcagccctagacatcactgcccccagggtatatacagtgccgcctactgcatacaaacacgaactcacagaaagtgacaaaaatctgcgtttgggacatctgattgtgaaagggagaacagtgaacatagagccacagagactgggactcacggggctggaagggtgatggagctgtaacataacatatgtgtgacctagtgtgaagtgtgcagatccatgtggaataaaacatgcagcctggcctgggattgctgccgttcacacttccctccctgtccaccagagggcgacagagtccctcccaccctggagccttcctaggggatgccaacctccctcagcggaacccacagcccagcaggatccaccctcatcagggtcacttcggcctaagtcctcagctctctccatgctccccacacggactctgtcagctcctccctgacctggtggccaccaacctaacaccactccccctacaggtagctcctccccacacacctgctccttccctgggcccagctaaaggcatctcccagggcagcactggtgcacgcgacgctacacggggtgctttcccctcgtggcctccctccatcctcatcaactctttctgtcactgctctctaaatacccgcccctgctccatctgtcctcttctctggggcatcccaggccaagcctagcgccgacacagaacagcggctgcctgaggacccacagcctccccgggaatcagtcaggcaccctgtgacctgcctgcccgctgcaccccggggtgctcagagtgcgtgtgatggtcacacacaggcaccatccgggatgtggccacctacccccagctgtcccttgggaagacagacctctcctgtgtgcttgctgggagaaggggggtgttattgctctttgatcccagaacacaactcacccccacacaccctctcaggtgtgagcaaggtccctccagacaggctctctggccactgcctcttcctcctctacagagagcagcttgaccaggtcaaaaccctcaggatagacccctgggtatgtcagcacatggagggctgagcccatcatggccacggagtaagttgggatgaatctctccacctctaacccctgccctgtcccaggctccccctcctgcgtctcaatgagccatgtcccacggggttcctgggtgactccccacttcctcctgcaccaccagggggaaggtgtggtgaccacaggacaatcagctgggcagagaagagaggacatcaaagatggtcaggaagaacatgagaaatcctgagcttcagctcagccgccagacccgagggagccatagactgaccaagaactgtccctttgactatgggaatcacagcccccaaagagcaaccagcacaggcctctcctcccaagaggcatgagagattcaccctgcacacctccaggtaggacactttcctctgtgacacccaggtcctcaatgtccatccttggaagctgcagccaagctagacacgattagagaaaggaagggtccttctcaccaggcaacacacagctcacacacagcacaatggggcatcactgtgacagggacctggtgcagctccagcctcctgcactgcaagggagagccagatggggatgaaagagggcaaagggcatgaatgtgcaccgcaaccaagacccatggggacacctggaggctgaggcccaggactctgcttgcccaacctgcagggtatgtgtgtgactgtgggtctgtgtgtgtctcttctgtgtgtgtgtgggggggggggtgtgtgtctgtgtgtgtttgtgtctgcacaaagtgtgtgttgaggtttggtgaaagaatcactgctgaaaaaggcagaggcctccacaattcccagggacctgaaacacagacaaaaggaaaaacagaaggagggacaaggaggcaggatgtagagaggaggggacagagaggtgtcctgggcctaaccccacccatgagcctgagaagtgctcctgccccaggaagaggctcagcgcagaaggaggaaggacagcacagcctacagccgtgctcaggaagtttctggaacctaggctcatctccacagaggagaacacacaagcagcagagaccatggggcccctctcagcccctccctgcacacagcacatcaaatggaagggggtcctgctcacaggtgaggagagaacttcctg

SEQ ID NO: 21835 - DNA, 2300 bp, Homo sapien
caaagctatcagctcttgcctatccccttcactctttgtaggtcattccttggactctgctctatctttagagtcactagctcaactcagtcactatgagacacctgggaaaactgccccacctcgtggctccactgcctgatgactgaactgacctccaggcttgactctggtctcccctgttttatgctagaatacccagtcccaggccaggctttccagtacccaaaggttttaaggacaatgggaagttccatcatccatctctaggatgtccttggcaagggaagctgcagagaaaacatacctcagtgggcaaagtgagactgaaactaacaagattccagcactgcatgctccaagtgaggaccacaaggtgggccaggcaggcagttggagacggagggacacacagaggcaccaggggctgtgactgctggtcctgtgtctttccatgacccaatgctgctgctcaattcacacttgagaaagtctgtgcttctcccacatgaagcaggcagcctcacaatctctgagccctcagattgccatgcatctgtcttgtatcacacacacctgccatgggcttttaaggacttgggtgggctgagaggtgggaaatgccaattctgattgaaaaatgcctttggaggaatcaaaggcgccacacacggcaatcttcaccctgttttctgcacagtggagactcctaagccctccatctccagcagcaacttaaatcccagggagaccatggaggctgtgagcttaacctgtgaccctgagactccagacgcaagctacctgtggtggatgaatggtcagagcctccctatgactcacagcttgaagctgtccgaaaccaacaggaccctctttctattgggtgtcacaaagtatactgcaggaccctatgaatgtgaaatacggaacccagtgagtgccagccgcagtgacccagtcaccctgaatctcctccgtgagtatcttctgttcctctgtgagccaggctgccatcccaaatacacgtggccagaggccaggcctctctgtccctctcaggtccaatacagagacctttacccctggacatcaaacctggccatgactttgtgccccaggcaaaccagagtagacctaggcttcatcaacaataggagaaaagaggctgctcctgtcatgggagactcagggtccacagcttgtgatgggagaaacaggtgaaggtctcaggctccagatctgtgaacacagtggggatttggctgggacttcaatgttgtgacttggctcacagggtcactgtgattgtggcccttccacagaccaggattttcccttccctctgacaatagtgcctgtgacattattctctttactccacatggcctggatgcccccaccatttcttcctcatacacctattaccatacaggggaagtccccaagctctcctgcctcacagactccatccactggcagagcattcttggctgattgctgggaagttccagcaatcaacacaagtgttctttataccccaaatcactaaaacatatacagggatctaggtctgtttcatccataactcagccactggtggaacaaatctcataatcaagaggatcatagtccctggtaagtggatccctggagcattggcaatatgttttccagtgaagtctatctagctatcagggaagagccacctgccctctgcaaagggagagggaaaatcaaaaacccaggacagggaatatgtttctactccaaaaccaccagcttttgcctgtccccttcactctttctagatcattctttagactatacactaacaatgaacaatctgaaaggaaattaaggaaataatttcaattcacattaacatcaaaaggaataaaatattttggagtaagtttaaccaaaaaagtcaaatgattataccctgaaaactacaaaccattgctgaaagaaattaaagacgatatcaatatatggaaagacatttcattttcatggattggaagaatcaatattgttagaaagacaacattacccaaaatgagttgcagattcaatgcatcccctaccagaatcacagtaacattttttgcagaattagaaaacactgtcctaaatctcacatgacaggctcttattaatgactgacacaacacaaacactgagaaaaagaggtaaccatgaaaaggtggaaagttctgatgacatagaaaatagcaatcagcctttctcacatcccaaggccttcaaaaatatacgagtgcagcatggccactgtg

SEQ ID NO: 21836 - DNA, 2300 bp, Homo sapien
tcctgggttctggtccctgggagtgagaaaatgaaaatgacttgtccctgcccccctgacattgatcttcccaccctgctgctcccaagcccaactgcagtgctcagccccagacatcactgcccccagggtatacacagtgccgcctactgcacacaaacacaaactcacagaaggtgacaaaaatctgcatttgggacatctgattgtgaaagagggagaacagtgaacatagagccacagagactgggactcacggggctggaaggtgatggggctgtaacataacacaggtgtgacctcgtgtgaactgtgcagatccacgtggaataaaacatgcatcctggcctggaattgctgccgttcacacttccctccctgtccaccagagggggacagagtccctcccagcctggagtcttcccaggggatgccaacctcactcagcggaacccacagcccagcagtgtccaccctctacagggtcacttctgcccaagtcctcagcgccctccatgctccccacacggacactgtcagctcctccctgacctggcggccgccaacctaacaccactccccctgcaggtagctcctccccacacacctgctccttccctgggcccagctaaaggcatctcccagggcagcgctggtgcacgcgatgccacaccgggtgctttcccctcgtgacctccctccatcctcatcaactctttctggcactgctccctaaatgcccacccctgctccatctgtcctgttctctggggcatcccaggccaagcctagcgctgacacagaacagcggctgcctgagggcccacagcctccccgggaatcagccaggcaccctgtgacctgcctgcccgctgcaccctgggggctcagagcgcgtgtgatggtcacacacaggcaccatccgggatgtggccacctaacaccagctgtcccttgggaagacagacctctcctgtgtgcttgcgggaagaaggggaatgttattgctctttgatctcagaacacaactcacccccacccgccctctcaggtgagagcaatgtccctccagacaggctctctggccactgcctgttcctcctctacacacagcagcttggccaggtcaaaaccatcaggacagacccctgggtatgtcagcatatggagggctgagcccatcatggccacggagtaagttgggatgaatctctccagctctgaacccctgctctgtcccaggctccccctcccgcatctcaatgagccatgtcccgcagggttcctgggtaactccccacttcctcctgcaccaccacagggaaggtgtggtgaccacaggacagtcagctgggcagagaagagaggacatcaaagatggtcaggaagaacatgagaaactatgagctccagctcagccgccagaccccagggagccatagactgacagagaactgtccctttgactatgggactcacagcccccactgagcaaccagcacaggcctctcctcccaagaggcatgagagattcaccctgcacaccgccagaaaggacagtttcctctgggacacccaggtcctgaatgtccatccttggaagctgcagccaagctagacatgattagagaaaggaagggtccctctcaccaggcaacacacagctcacccacagcacaatggggcatcattctgacagggacctggtacagctccagcctcctgcactgaaggggagagcctgatggggatgaaagaggccaaagggcgttaatttgcaccccgacccagagccatggggacaccaggaggctgaggcccaggactgttcttgcccaacctgcagggtatgtgtctgactgtgtgggtctgtgtgtatctcttctgtgtgtgtgtgtgtgtgtgtgtgtgtgtgtgtctgtgtgtctgcacaaagtgtgtcttgaggtttggtgaaagaatcactgctgaaaaaggcagaggccgccacaattcccagggacctgaaacacagacaaaaggagaaacagaaggagggacaaggaggcaggacttagagaggaggggacagagaggtgtcctgggcctgaccctgcccatgagcttgagaattgctcctgccctgggaagaggctcagcacagaaagaggaaggacagcacagctgacagccgtgctcagagagtttctggatcctaggcttatctccacagaggagaacacacaagcagcagagaccatgggaaccctctcagcccctccctgcacacagcgcatcaaatggaaggggctcctgctcac

SEQ ID NO: 21837 - DNA, 2300 bp, Homo sapien
tgaaaatgacttgtccctgcccctctgacattgatcttcccacgctgctgctccctcttctgctcccaagcccacgtgcactgctcagccccagacatcactgctcccagggtatacacagtgccacctactgcacacaaacacaaactcacaaaggtgacaaaaatctgcctttgggacatctgactgtgaaagagggagaacagtgaacgtacagccacaaagactgggtctcacggggctggaaggtgaaggagctgtaacataacatacgtgttacctcgtgtgaagtgtgcagatccacgtggaataaaacatgcagcctggcctgggattgctgccgttcacacttccctccctgtccaccagagggtgaccgagtccctcccagcctggagccttcccaggggaagccaacctccctcagcggaacccacagcccagcagtgtccaccctcaccagggtcacttcggcctaagtcctcagcgccctccatgctccccacacggactctgtcagctcctccctgacctgggggccaccaacctaacaccacgccctctgcaggtagctcctgccccacacacctgctccttccctgggcccagctaaaggcatctcccagggcagcgctggtgcacgcgatgccacactgggcgctttcccctcgtgacctccctccatcctcatcaactctttctgtcaccgctccctaaatgcccgcccctgctccatctgtcctgttccctggggcatcccaggccaagcttagcgctgacacagaatagcggctgcctgagggcccacagcctcaccgggaatcagccaggcaccctgtgacctgcctgcacgctgcaccccacggggctcagagcgcgtgtgatggtcacacacaggcaccatccgaggtgtggccacctatccccagctgtcccttgggaagacagacctctcctgtgtgcttgcggggagaagggggatgttattgctctttgctcccagaacacaactcaccccccacccgcccgctcaggtgtgagcaacgtccctccagacaggatctctggccactgcctgttcctcctctacacacagcagcttggccaggtcaaaaaccctcaggacagacccctgggtatgtcaacacatgaaaggctctgcccaacattgccacggagttggtcgggatgaatctctccagctctgaaactctgctccgacccaggctccccctcctgcgtctcaacgagccatgtcccaccgggttcctgtttaactcctcacttccttctgcaccaccacggagaagctgtggtgaccacaggacaatcagctgggcagagaagagaggacatcaaagatggtcaggaagaacatgagaaaccatgagctccagctcagccaccggaccccacggagtcatacagtgaccgagaactttccctttgactatgggactcacagccaccactgagcaacaggcacaggcctctcctcccaagaggcatgagagattcaccctgcacacctccaggaaggacagtttcctctgggacacccaggtcctgaatgaccatccttggaagctgcagccaagctagacacgattagaaaaaggaagggtccctctcaccaggcaacacacagctcacccacagcacaatgggacatcactgtgaaagggacctggtgcagctccagcctcctgcactgaaggggagagccagatggggatgaaagagggcaaatggcatgaatgtgcaccccgacccagagccatggggacagcaggaggctgaggcccaggactgtcctcgcccaacctgcagggtatgtgtgtcactgtgtgggtctgtgtgtgtgtgtgtgtgtgtgtgtgtgtgtgtctgcacaaagtgtgtgttgaggtttggtgaaagaatcactgctgaaaaaggcagaggcctccacaattcccagggacctgaaacacagacaaaaggaaaaacagaaggagggacaaggaggcaggactgagagaggaggggacagagaggtgtcctgggcctgaccccgcccatgagcctgagaagtgcttctgccctgggaagaggctcagcacagaaggaggaaggacagcacacctgacagccctgctcaggaagtctctggatcctaggctcatctccacaggggagaacacacagacagcagagaccatgggacccctctcagcccctccctgcactcagcacatcacctggaaggggctcctgctcacaggtgaggagaggacttcctgggagaggacaggaggagg

SEQ ID NO: 21838 - DNA, 2300 bp, Homo sapien
acccctgggtatgtcggcacatggagggctgagcccatcatggccacggagtaagtcaggatgaatctctccagctctgaacccctgctctgtcccaggctccccctcctgtgtctcaacgagccatgtcccgcgggtttcctgggtaactcttcactgccacctgcaccaccacagggaaggtgtggtgaccacaggacaatcagctgggcacataagagaggacatcaaagatggtcaggaagaacacgagaaatcctgagctccagctcagccgccagaccccagggagccaaagagtgaccgagaactctctctttgactatgggacttacagcccccactgagcaatcagcacaggcctctcctcccaagaggcatgagagattcaccctgcacacctctaggaaggacagtttcctctgggacacccaggtcctgaacgtccatccttggaagctgcagccaagctagatacgattagagaaaggaagggtccctctcaccaggaaacacacagttcacacacagcacaatggggcatcactgtgacagggacctggtgcagcttcagcctcctgcactgcaggggagagccagatggggatgaaagaggccaaagggcgtgaatgtgcacccctaaccagagccatgcggagagcaggaggctgaggcccaggactgcgcttgcccaacctgcagggtatgtgtgtgactctgtgggtctgtgtgtgtctcttctgtgtgtgtgtgtgtgtgtgtatgtgtgtgtgtgtgtgtgtgtgtctgcacaaagtgtgtgttgaggtttggtgaaagaatcactgctgaaaaaggcagagggctccacaattcccagggacctgaaacacagacaaaaggaaaaacagaaggagggacaaggaggcagaactgagagaggaggggacagagaggtgtcctgggcctgaccccacccatgagcttgagaagtgctcctgccccgggaagaggctcagtgcagaaggaggaaggacagcacagctgacagccgtgctcaggaagattctggatcctaggctcatctccacagaggagaacacgcagggagcagagaccatggggcccctctcagcccctccctgcacacagcatataacctggaaagggctcctgctcacaggtgaggagagaacttcctgggagaggacaggaaaaggaagcagagtgactggatggggtctcctagagaggatggggttctaaaaaataaaagaagccagcactttgggaggctgaggtgggtggatcaagagatcaggagttcaagatcagtctggccaacacaatgtagccctgtctgtactaaaaatacaaaaaattaaccaggtatggtggtgtgctcctgtaatcctagctactcaggaggctgaggcaggagaatcacatgaacccgggaggcagaagttgcagctagccgagatagcaccactgcatgccagcctgggtgacagtatgagactccgtcccaaaagaaaaaaaggaaaaaagaaaaaaaaggaaagaaggctctgttggagcctggataggggaaaatacaccagagagggacaggggtcaaaataggaaagtcacattgaaccggaattggtaagaggtaggaaaatcttaagtgttctgtttttctgattaatcctcaggggtcaccacattttgaaaaatgaaaataataactatatcagatgacacttgaaataaaaatataagcagggcatgaaacactgtcctcagcaaaaaacctcaacaattgggaggaaaaaaaacacccagggcatggaggcccctgagaactctcacatctacaggagtctgcagcctgttccaggcactggggtgcgaccaagatcacaaaagtccctgtcctcacggagctcatgctgtcatggggaggaagacagacatgcaaagagatctagaatgtgagatcaggtgttgacaagaaccctggagggagcagagcagggaaaggtcaaaaaggaaagacccaggttctctgaaggaggtgtcaggaaagaagtctaaggatgccctgatgtgagcagaacctgagggcagtgtggagggggccgtgcggacccctggggaagaggattccaaacagaaaaatgccaaagtcaggagtgttgaaggaatgggggtcatgctgctgaccttgacctagtaggacagtaggacacacacagaaacacacatgccccttttatatgtgtgtgtgtgtgtttgtgtgtgtgtgtgtgtgtgtgtgtgtgtgtgtgtgtgtg

SEQ ID NO: 21839 - DNA, 2300 bp, Homo sapien
cgttgatcttcccaccctgctgctccctcttctgctcccaagcccacgtgcactgctcagccccagacatcactgcccccagggtatacacagtgccgcctactgcacacaaacacaaactcacagaaggtgacaaaaatctgcgtttgggacatctgattgtgaaagagggagaacagtgaacgtagagccacagagactgggactcacggggctggaaggtgaaggagctgtaacataacatatgtgtgatctcgtgtgaagtgtgcagatccacatggaataaaacatgcagcctggcctgggattgctgccgttcacacttccctccctgtccaacagagggtgacagagtccctcccagcctggagccttcccaggggatgccaacctccctcagcggaacccacagcccagcagggtccaccctcaccggggtcacttcggctcaagtcctcagcgcgccctccatgttccccacatggactctgtcagctcctccctgacctggcagccaccaacctaacaccactccccctgcaggtagctcctccccgcacacctgctccttccctgggcccagctaaaggcatctcccagggcagctctggtgcacgcaacgccacactgggcgctttcccctcgtgaactccctccatcctcatcaactctttctgtcactgctccctaaatgcccacccctgctccatctgtcctgttctctggggcttcgcaggtgaagcctagagctgacacagatcagcggctgcctaagggcccacagcctccccgggaatcagccaggcaccctgtgacctgcctgcccgctgaacccctggtggcttagatcgtgtgtgatggtcacacacaggcaccatctgggatgtggccacctacccccagctgtcccttgggaagacagtcctctcctgtgtgcttgcggggaaaggggggtgttattgctctttgcacacagaacacaacccacccccacccaccatctcaggcgtgagcaacgtccctgcagacaggatctctggccactgcctgttcctcctctacacacagcagcttggccaggtcaaaaccctcaggacagacccctgggtatgtcggcacatggagggctgagcccatcatggccacggagtaagtcaggatgaatctctccagctctgaacccctgctctgtcccaggctccccctcctgtgtctcaacgagccatgtcccgcgggtttcctgggtaactcttcactgccacctgcaccaccacagggaaggtgtggtgaccacaggacaatcagctgggcacataagagaggacatcaaagatggtcaggaagaacacgagaaatcctgagctccagctcagccgccagaccccagggagccaaagagtgaccgagaactctctctttgactatgggacttacagcccccactgagcaatcagcacaggcctctcctcccaagaggcatgagagattcaccctgcacacctctaggaaggacagtttcctctgggacacccaggtcctgaacgtccatccttggaagctgcagccaagctagatacgattagagaaaggaagggtccctctcaccaggaaacacacagttcacacacagcacaatggggcatcactgtgacagggacctggtgcagcttcagcctcctgcactgcaggggagagccagatggggatgaaagaggccaaagggcgtgaatgtgcacccctaaccagagccatgcggagagcaggaggctgaggcccaggactgcgcttgcccaacctgcagggtatgtgtgtgactctgtgggtctgtgtgtgtctcttctgtgtgtgtgtgtgtgtgtgtatgtgtgtgtgtgtgtgtgtgtgtctgcacaaagtgtgtgttgaggtttggtgaaagaatcactgctgaaaaaggcagagggctccacaattcccagggacctgaaacacagacaaaaggaaaaacagaaggagggacaaggaggcagaactgagagaggaggggacagagaggtgtcctgggcctgaccccacccatgagcttgagaagtgctcctgccccgggaagaggctcagtgcagaaggaggaaggacagcacagctgacagccgtgctcaggaagattctggatcctaggctcatctccacagaggagaacacgcagggagcagagaccatggggcccctctcagcccctccctgcacacagcatataacctggaaagggctcctgctcacaggtgaggagagaacttcctgggagaggacaggaaaaggaa

SEQ ID NO: 21840 - DNA, 2300 bp, Homo sapien
gaaaatgaaaatgatgtccctgcccccctgacattgatcttcccaccctgctgctccgtcttcttctcccaagcccaagtgcagcgctcagccccagacatcactgcccccagggtatacacagtgccgcctactgcacacaaacacaaactcacagaaagtgacaaacatctgcgtttgggatatctgatcgtgaaagagggagaacagtgaacgtagagccacacagactgggactcacggggctggaaggtgaaggagctataacataacatatgtgtgaccttgtgtgaagtgtgcagatccacgtagaataaaacatgcagcctggcctgggattgctgccgttcacacttccctccctgtccaccagaaggcgacagagtccctcccggcctggagtcttcccaagggatgccaaccgccctcagcggaacccacagcccagcagggtccaccctcaccagggtcacttcggactaagtcctcagcgccctccatgctccccacagggtctctgtcagctcctccctgacctgggggccaccaacctaacaccactccccctacaggtagttcctgccccacacacctgctccttccctgggcccagctaaaggcatctcccagggcagcgctggtgcacgcgatgccacactgggcgctttcccctcgtgacctccctccatcaacatcaactctttctgtcactgctccctaaatgcccacccctgctccatctgtcctgttcactggggcatcccaggccaagcttagcgctgacacagaatagcggctgcctgagggcccacagcctcaccgggaatcagccaggcaccctgtgacctgcctgctcactgaaccccggagggctcagagcgcgtgtgatggtcacacacaggcaccatccgggatgtggccacctacccccagctgtctcttgggaagacagacgtctcccgtgtgcttgcggggagaaggggggtgttattgctctttgctcccagaacacaactcacccccacccgccctctcaggtgtgagctacgtccctccagacaggatctctggccactgcctgttcctcctctacacacagcagcttggccaggtcaaaaccctcaggacagacccctgggtatctcagcacatggagggctgagcccatcatggccacggagtaagtcgggatgaatctctccagctctgaacccctgctctgtcccaggctcctcctcctgcgtctcaataagtcatgtcccgcgggattcctgggtaactccccacttcctcctgcaccaccacggggaaggtgtggtgaccacaggacaatcagctcggcagagaagaaaggacatcaaagattgtcaggaagaacatgagaaaccaagagctccagctcagctgccagaccccatggagtcacagagtgaccgagaactttccctttgactatgggactcacagcccccactgagcaaccagcacaggcctctcctcccaggaggcatgaaagattcaccctgcacacctccaggaaggacagtttcctctgggaaacccaggtcctcaatgtccatccttggaagctgcagccaagctagacacgattggagaaaagaagggtccctctcaccaggcaacacacagctcacccacagcacaatggggtgtcactctgacagggacctggtgcagctccagcctcctgcactgaaggggagagccagacggggatgaaagagggcaaagggtgtgaatgtgcaccccgaccaagagcaatggggacagcaggaggctgaggcccaggactctgcttgcccaacctgcagggtatgtgtctgactgtgtgggtctgtgtgtgtctcttctgtgtgtgtgtgtatgtgtgtgtccgcacaaagtgtgtattgaggtttggtgaaagaatcactgctgaaaaaggcagaggcctccacaattcccagggacctgaaacacagacaaaaggaaaaacagaaggagggacaaggaggcagggctgagagaggaggggacagagaggtgtcctcggcctgaccctgcccatgagcttgagaagtgctccttccaccgggaagagtctcagcgcagaaggaggaaggacagcacagctgacagccgtgctctggaagcttctggatcctaggctcatctccacagaggagaacatgcacgcagcagagatcatggggcccctctcagcccctccctgcacagagcacatcaaatggaaggggctcctgctcacaggtgaggagagaacttcctgggagaggaca

SEQ ID NO: 21841 - DNA, 2300 bp, Homo sapien
ctcccaagcccatgtccagtgctcagccccagacatcactgcccccagggtatacacagtgccgcctactgcacacaaacacaaactcacagaaggtgacaaaaatctgcgtttcggacatctgattgtgaaagagggagaacagtgaacgtagagtcacacagactgggactcacggggctggaaggtgaaggagctgtaacataacatatgtgtgacctcgtgtgaagtgtgcagatccacatggaataaaacatgcagcctggcctgggattgctgccgttcacacttccctccctgtccacaagagggcgacagagtccctcccagcctggagccttcccaggggatgccaacctccctcagcggaacccacagcccagcagtgtccaccctcaccagggtcacttgggcctaagtcctcagcgccctccatgctccccacacggactctgtcagctcctccctgccttggctgccgccaacctaacaccactccctctgcagggagctcctgccccacacacctgctccttccctgggcccagctaaaggcatctcccagggcagcgctggtgcacgcgacactacactgggagctttcccctcctgacctccctccatcctcatcaactctttctgtcactgctccctaaatgcccacccctgctccatctgtcctgttctctggggcatcccaggccaagcctagagctgacacagaacagcggctgcctgagggcccacagcctccccgggaatcagccaggcaccctgtgacctccctgcccgctgcaccgcgcggggctcagagcgcatgtgatggtcacacacaggtaccatccgggatggggccacctgcccccagctgtcccttgggaagacagacctctcttgtgtccttgcggggagatgaggggtgttattgctctttgctcccagaacacaactcacccccacctgccctctcaggtgtgagcaatgtccctccagacaggatctctggccactgcctgttcctcctctacacacagcagcttggccaggtcaaaaccctcaggacagacccctgggtatgtcagcacatggagggctgagcccatcatggccacggagtaagtcgggatgaatctctccagctctgaacccctgctctgtcccaggttccccctcctgcgtctcaacaagccatgtcccgcggggttcctgggtaactccccacttcctcctgcaccaccacggggaaggtgtggtgaccacaggacaatcagctgggcagagaagagaggacatcaaagatggtcaggaagaacatgagaaaccctgagcaccagctcagcagccaaaccccagggagtcagagagtgaccgagaacttccccttgactacgggactcacagcccccactgagcaaccagcacaggcctctcctaccaagaggcatgagagattcaccctgcacacctccagaaaggacagtttcctctaggacacccaggtcctgaatgtccattcttggaagctgcagccaagctagacacgattagagaaaggaagggtccctctcaccaggcaacacacagctcacccacagcacaatgggacatcactgtgacagggacctggtgcagctccagcctcctgcactgaaggggagagccagatggggatgaaagagggcaaaggtcgtgaatgtgtaccccgacccagggccatggggacagcaggaggctgaggcccaggactgtccttgcccaacctgcagggtatgtgtgtcactgtgtgggtcggtgtgtgtctcttttgtgtgtgtgtgtgtgtgtgtgtgtgtgtgtgtctgcacaaagtgtgtgttgaggtttggtgaaagaatcactgctgaaaaaggcagaggcctccacaatccccagggacctgaaacacagacaaaaggaaaacagaaggagggacaaggaggcaggactgagagaggaggggacagagaggtgtcctgggcctgaccccacccatgagcctgggaattgctgctgccccaggaagaggctcagtgcagaaggaggaaggacagcacagctgacagccgtgctcaggaagtttctggatcctaggctcatctccacagaggagaacacacaggcagcagagaccatggggcccctctcagcccctccctgcacagagcacatcaaatggaaggggctcctggtcacaggtgaggagagaacttcctgggagaggacaggaggaggaagaagagtgactggatggggtctcctggagaggatggggttctaaaaaa

SEQ ID NO: 21842 - DNA, 2300 bp, Homo sapien
tgtccctgcccctcaacattgatcttcccaccctgctgctccctcttctgctcccaagcccatgtccagtgctcagccccagacatcactgcccccagggtatacacagtgccgcctactgcacacaaacacaaactcacagaaggtgacaaaaatctgcgtttcggacatctgattgtgaaagagggagaacagtgaacgtagagtcacacagactgggactcacggggctggaaggtgaaggagctgtaacataacatatgtgtgacctcgtgtgaagtgtgcagatccacatggaataaaacatgcagcctggcctgggattgctgccgttcacacttccctccctgtccacaagagggcgacagagtccctcccagcctggagccttcccaggggatgccaacctccctcagcggaacccacagcccagcagtgtccaccctcaccagggtcacttgggcctaagtcctcagcgccctccatgctccccacacggactctgtcagctcctccctgccttggctgccgccaacctaacaccactccctctgcagggagctcctgccccacacacctgctccttccctgggcccagctaaaggcatctcccagggcagcgctggtgcacgcgacactacactgggagctttcccctcctgacctccctccatcctcatcaactctttctgtcactgctccctaaatgcccacccctgctccatctgtcctgttctctggggcatcccaggccaagcctagagctgacacagaacagcggctgcctgagggcccacagcctccccgggaatcagccaggcaccctgtgacctccctgcccgctgcaccgcgcggggctcagagcgcatgtgatggtcacacacaggtaccatccgggatggggccacctgcccccagctgtcccttgggaagacagacctctcttgtgtccttgcggggagatgaggggtgttattgctctttgctcccagaacacaactcacccccacctgccctctcaggtgtgagcaatgtccctccagacaggatctctggccactgcctgttcctcctctacacacagcagcttggccaggtcaaaaccctcaggacagacccctgggtatgtcagcacatggagggctgagcccatcatggccacggagtaagtcgggatgaatctctccagctctgaacccctgctctgtcccaggttccccctcctgcgtctcaacaagccatgtcccgcggggttcctgggtaactccccacttcctcctgcaccaccacggggaaggtgtggtgaccacaggacaatcagctgggcagagaagagaggacatcaaagatggtcaggaagaacatgagaaaccctgagcaccagctcagcagccaaaccccagggagtcagagagtgaccgagaacttccccttgactacgggactcacagcccccactgagcaaccagcacaggcctctcctaccaagaggcatgagagattcaccctgcacacctccagaaaggacagtttcctctaggacacccaggtcctgaatgtccattcttggaagctgcagccaagctagacacgattagagaaaggaagggtccctctcaccaggcaacacacagctcacccacagcacaatgggacatcactgtgacagggacctggtgcagctccagcctcctgcactgaaggggagagccagatggggatgaaagagggcaaaggtcgtgaatgtgtaccccgacccagggccatggggacagcaggaggctgaggcccaggactgtccttgcccaacctgcagggtatgtgtgtcactgtgtgggtcggtgtgtgtctcttttgtgtgtgtgtgtgtgtgtgtgtgtgtgtgtgtctgcacaaagtgtgtgttgaggtttggtgaaagaatcactgctgaaaaaggcagaggcctccacaatccccagggacctgaaacacagacaaaaggaaaacagaaggagggacaaggaggcaggactgagagaggaggggacagagaggtgtcctgggcctgaccccacccatgagcctgggaattgctgctgccccaggaagaggctcagtgcagaaggaggaaggacagcacagctgacagccgtgctcaggaagtttctggatcctaggctcatctccacagaggagaacacacaggcagcagagaccatggggcccctctcagcccctccctgcacagagcacatcaaatggaaggggctcctggtcacaggtgaggagagaacttcctgggagaggacaggaggagg

SEQ ID NO: 21843 - DNA, 2300 bp, Homo sapien
ggttctggtccctgggagtgagaaaatgaaaatgacttgtccctgcccccctgatattggtcttcccatcctgctgctccctcttctgctcccaagcccaactgcagtgctcagccccagacatcactgcccccagggtatacacagtgctgcctactgcacacaaacacaaactcacagaaggtgacaaaaatctgcatttgggacatctgattgtgaaagagggagaacagtgaacgtagagccacacagactgggactcacggggctggaaggtgaaggagctgtaacataacgtaagtgtgacctcgtgtgaagtgtgcagatccatgtggaataaaacatgcagcctggcctgggattgctgccgttcacacttccctccctgtccaccagaggacgacagagtccctcccagcctggagccttcccaggggatgccaacgtccctcattagaacccacagcccagaagggtccaccctcaccagggtcaattcggcccaagtcctcagcgccctccatgctccccacatggactctgtcagctcctctctgacctggcggccgccaacctaacaccactccctctgtaggtagctccagccccacacacctgctccttccctgggcccagctaaaggcatctcccagggcagcgctggtgcacgcgacgccacgctgagctctttcccctcgtgacctccctccatcctcatcaactctttctgtcactgctccctaaatgcccgcccctgctccatctgtcctgttctctggggcatcccaggccaagcctagtgttgacacagaacagtggctgcctgagggcccacagcctccccgggaataagccaggcaccctgtgtcctgcctgcctgctgcagcccagggggcgcagagagcgtgtgatggtcacacacaggcaccatccgggatgtggccacctgccaccagctgtcccttgggaagacagacctctcttgtgtgcttgcggggagatgaggggtgttattgctctttgctctcagaacacaactcacccccacccgccctctcaggtgtgagcaacgtccctccagacaggatctctggccaatgcctgttcctcctctacagagagcagcttggccaggtcaaaaccctcaggacagacccctgggtatgtcagcacatggagggctgagcccatcatggccacggagtaagtcgggatgaatctctccagctctgaacccctgctctgtcccaggctccccctcctgcgtctcaacgagccatgtcccgcggggttcctgggtaactccccacttcctcctgcaccacaacggggaaggtgtggtgaccccaggacagtcagctgggcagagaagagaggacatcaaagatggtcagggagaacatgagaaaccctgagctccagctcagctgccagaccccagggagccatagagtgatgaagaactgtcctcttgactctgggactcacagcccccactgagcaaccagcacaggcctctcctcccaagaggcatgagagattcaccctgcacacctccaggaaggacagtttcctctgggacacccaggtcctgaaggtccatccttggaagctgcagccaagctagacacgattagagaaaggaagggtccctctcaccaggcaacacacagctcacccacagcacaatggggtgtcactgtgacagggacccgttgcagcttcagcctcctgcactgaaggggagagccagatggggatgaaagagggcaaagggcgtgaatgtgcatcccgacccagagccatggggacagcaggaggctgaggcccaggactctgcttgcccaacctgcggggtatgtgtgtgactgtgtgggtctgtgtgtgtctcttctgtgtgtgtgtgtctgcacaaagtgtggttgaggtttggtgaaagaatcactgctgaaaaatgcagaggcctccacaattcccagggacctgaaacacagacaaaaggaaaaacagaaggagggacaaggaggcaggactgagagaggaggggacagagaggtgtcctgggcctgaccccacccatgagcctgagaagtgctcctgccctggagagaggctcagcacagaaggaggaaggacagcacagcctacagccgtgctcaggaagtttctggatcctaggctcagctccacagaggagaacacgcaggcgcagagaccatggggcccctctcagcccctccctgcacacagcacatcacctggaaggggctcctgctcacaggtgaggagagaacttcctg

SEQ ID NO: 21844 - DNA, 2300 bp, Homo sapien
ggagtcagaatcctgggttctggtccctgggagtgagaaaaagaaaatgacttgtccctgccccccgatattgatcttcccaccctgctgctccctcttctgctcccaagcccacgtgcactgctcagccccagacatcactgcccccagggtatacacagtgctgcctactgcacacaaacacaaactcacagaaggtgacaaaaatctgcatttgggacatctgattgtgaaagagggagaacagtgaacgtagagtcacacagactgggactcaaggggctggaaggtgatggagctgtaacataacatatgtgtgacctcatgtaaagtgtgcagatccacatggaataaaacatgcagcctggcctgggattgctgccgttcacacttccctccctgtccaccagagggcgacagagtccttcccagcctggagccttcctaggggatgccaacctccctcagcggaacccacagcccagcagggtccaccctcaccagggtcacttcggcccaagtcttcagagccctccatgctcccaacacggactctgtcagctccttcctgacccgcagccgccaacctaacaccactccctctgcaggtagctcctgccccacacacctgctccttccctgggcccagctaaaggcatctcccgggcagcgatggtgcacgcgacgccacactggacgctttcccctcgtgacctccctccatcctcatcaactctttctgtcactgctccctaaatgcccgcccctgctccatctgtcctgttctctggggcatcccaggccaagcctagcgctgacacagaacagcggctgcctgagggcccacagcctccccgggaatcagccaggcaccctgtgtcctgcctgcccactgcagcccagggggcgcagagagcgtgtgatggtcacacacaggcaccatccgggatgtggccacctgccaccagctgtcccttgggaagacagacctctcctgtgtgcttgtggggagaaggggggtgttatttttctttgctcccagaacacaactcacccccacccgccctctcaggtgtgagcaaggtccctccagacaggctctctggccactgcctgttcctcctctacagagagcagcttggccaggtcaaaaccctcaggacagacccctgggtatgtcagcacagggagggctgagcccatcatggccacggagtaagtcgggatgaatctctccagctctgaacccctgctctgtcccaggctccccctcctgcgtctcaacaagccatgtcccgcggggttcctgggtaactccccacttcctcctgcaccaccacggggaaggtgtggtgaccacaggacaatcagctgggcagagaagagaggacatcaaaggtggtcagggagaacatgagaaaccctgagctccagctcagccgccagaccccagggagacacagagtgaccgagaactgtccctttgactctgggattcacagcccccactgagcaatcagcacaggcctctcctcccaagaggcctgagagattcaccctgcacacctccaggatggatagtttcctctgggaaacccaggtactgaatgttcatccttggaagctgcagccaagctagacacgattagagaaaggaagggtccctcttaccagacaacacagagctcacccacagcacaatgggacgtcactgtgacgggaaccttgtgcagctcctgcactgaaggggagagccagatgaggaaggaagagggtaaagggcgtgaatgtgcaccctaccccagagccatggggacagcaggaggctgaggcccaggactctgcttgcctaacctgcagggtatgtgtgtgaccatgtgggtcgtgtgtgtctcttctgtgtgtgtgtgtgtgtgtgtgcatctgcacaaagtgtgtgttgaggtttggtgaaagaatcactgctgaaaaatgcagaggcctccacaattcccagggacctgaaacacagacaaaaggaaaaacaggagggacaaggaggcagaactgagagaggaggggacagagaggtgtcctgggcctgaccccgcccacgagcttgagaaatgctcctgccccgggaggaggctcagcacagaaggaggaaggacagcacagctgacagccgtactcaggaagcttctggatcctaggcttatctccacagaggagaacacacaagcagcagagaccatggggcccctctcagcccctccctgcacacagcgcatcacctggaagggggtcctgctcacaggtga

SEQ ID NO: 21845 - DNA, 2300 bp, Homo sapien
taatatcaagaactagctacaactcaataaagaaaggacaaatcatccaatttataaatgggcaaaagactcaaatagacatttcttcaaagaagatatacaaatagtcaagaaggacatgaaaagatactcaacatcaatagtcattaggaaaatacaaagtcaaagctgcaaggagacaccacatcacacctacaaaactggctaacattcttttaaaatgttaaataacaagtagcagtattatgtagaatttgaaatcttcatacattgctggtgagaatataaaaggtacagccactaggagaaacagttttgctgtttctcaaaaagctaatcacagaattctcatttgaaacaacacccattcctaggtatatacccaaaaaattaaatccagggactcaaacaggtacttgcatgggaatgttgattgcagcattattcacaaaagataaaatatgaaaacaatccaagtgttcatcaacacatgaataaataaatatggtgacacatacaacagaatgttaatctgccataaagaggaatgaagctctgacacccgctggaacatgcatggactttggaaacattatgctaagtgaaatatgtcagaaacaaaataacatcattgtataattccatttatatgaaacatcaagaataggcaaattcatagagacagagtagagatgatcaaggtctagagtagaacatacaaagagttattgtttaaaagatacaaagtttcagtttaaaatgataaaaattttctagggaaaatagtggtgatggtaatttaacatggtgtatgtggttaatttcacttgatcgtggattttaaagtggttaaaatagcacattattcacagaactgtgaaaaatagatttctattatttaattcacccaggctaaggtgtttgttatggcagctgaagcccatgaatccatcatctgagccagtgtttcaatgaaaggcatcagttttcaatcaagttagctggaagctcctgtatccaggagaaccagaggccccaaaacaagagctccagcaggggctcaaccagcacaggtcccataggacagcctcaatgtcaggctctggatggcatgtgaggctacaatgatacaaccacaacgtgaaaatgtatgttcttgtactacttacagacactagggagccctcggcacatttggagaccacagacacagaggtcagtgagcccaggctttattaagtccagggtgttatctgacaggtttccagcagggagctttaatggatgtgttcaaagcaagcaacaaacactgggaccaggagctcacgctgtgactgagaggaggtcactttaaatgtgaaggcgaatgtcagaattatcagtttaaagaagcagctgcagagaggggagtccagcacaccaagcaggagagatgcctctaagattttatctctgcacaccaactggagtcacttgaaccagatacagtattgaaaactgccatggtgaccaagccctgcctctgatttgaggcaaataaacttacatcttaaaaaatgaatgccaaggcaacatgacactatgagcctcatgacatccagggacaccagcagggtgtggtactgtgccctggagtcagaatcctgggttctggtccctgggagtgagaaaaagaaaatgacttgtccctgccccccgatattgatcttcccaccctgctgctccctcttctgctcccaagcccacgtgcactgctcagccccagacatcactgcccccagggtatacacagtgctgcctactgcacacaaacacaaactcacagaaggtgacaaaaatctgcatttgggacatctgattgtgaaagagggagaacagtgaacgtagagtcacacagactgggactcaaggggctggaaggtgatggagctgtaacataacatatgtgtgacctcatgtaaagtgtgcagatccacatggaataaaacatgcagcctggcctgggattgctgccgttcacacttccctccctgtccaccagagggcgacagagtccttcccagcctggagccttcctaggggatgccaacctccctcagcggaacccacagcccagcagggtccaccctcaccagggtcacttcggcccaagtcttcagagccctccatgctcccaacacggactctgtcagctccttcctgacccgcagccgccaacctaacaccactccctctgcaggtagctcctgccccacacacctgctccttccctgggcccagctaaaggcatctcccgggca

SEQ ID NO: 21846 - DNA, 2300 bp, Homo sapien
aatgctcctgattattgtaaatacaaagttgcatgcaggattgtgtaaagacaaatgccaggttggactgccagaatgagccaacagcacgtgatgtgcttccccctgcagagagcctatgaacggacatgcagtcagggaggtttcacattaccaagattcctatcccagaaaagcagatgtccatagctctgggaatggaatgtgacccttacggagagcctataaatgaccctaaatccctcactaacctacccccactctcactaaacttaataataaatgctggtatatccagtgcattggcagcatcgcaggaccagaaggcagtgacccctctggacccagctttcactatcttgtgtgtgtcttttatttctcaacctgccaatctgcctgggaacaaagaaagagccccgttgcattgcaggctgctggccagatcctgcaatatagtcccagctacttgggatgctgaagcatctgtagagggagagctgccccaaatcataaatcacaaataaaagccaattacatctataactaaattagttgtaattttgtcttatcacacatgttcacaggaagcaatggccagtggagtctctcagactgcatcattctcaccctgaccctcctgccttcctctttcactcacaaggacccttatgatgatacagggagccacccagataagccagaataagctttccatctcaaaatactcaacttcatcaactttgaacagtgtttttgccaagaaaagtaaatgcattccaagtaaatgtgttccaagagttaggatgtggattttttttttttttttgagacagagtttcactcatgttgccccggctggagtacagtgggacaatctgggctcactgcaatctccgcctcgcaggttcaaatgactttcctgcctcagcctcccaagtagctggcattacaggcgcccgccaccacacccagctaatttttgcatttttagtagaaacggggtttcaccatgttggccaggctggtctcgaactcctgacctcgtggtctgcccatctcagcctcccaaagtgctgggattacaggcgtgagccaccgcacccgacctggatgtggacatttttaagaggccattattctgcctcatacaggtcactttcataaacatcaccgacaagaaaaatgttttgccttccttccatgtctcacttttctgtctgcgcaaaccacagtgaaacacactagctctgctatgaagtggctggatgaccctgggccactcgtttgacctccttcagcctctttcctcatctgcagtgtaagactgactcttactgcatcagaaaatgacagtggaagagtaaattaacatgtgtgagacattaatcacagagcctggtacctgatgagcccttggtaaacattcctttcagttctttcctttcaccttcccatttttcttgccctcacccatcttctccttcaactcctttctcttcagtaacttactctgtctaacctgccaattacagaagccacactacccattctctcgtgactctgctggaatgttcttgtgatgcagtctgctatccactgaaggcaatgggtattatttatatagagaggtctgtttgcaacaagaaatcctttttctattcacacaaaatttatacacaatttctcttaacttacacgtaccagtctcaattctaccctgttatttcatacatgtacttcattattttattctttggtctttctccttacaccttaaaaattaggacagtacaaaaacaaaaataatgacctgggccagaagaggggattcctttagcaagatgaatgctttcctttttcaagatgaatgaatgctatgtgtaaggcagacctgaagcccatttctgggtttggcttacatcaaagccatttgactctaggacacattcttaaattcccaagagataatgattgtcacggaagccacacccactatgagcattcctactgttgggtaaaggaatgtttacagaatgttgtgcattctgtttactcctcctaaattcttccactcctggaagttaagcttccccactaatcagcttcatctccagctggcctgcctggaccctgactggaaaatacctccccactctggatggccagggtggcacctttgtctattcccataattataatagctcacactgatgcagcactcactatgtaccaggcactatcctaaggcctttccaggtaactacagtcctcaccaaaaaatcccaagtgcgggccgggcg

SEQ ID NO: 21847 - DNA, 2300 bp, Homo sapien
atcaggttgcatttgtaatctatgttctaaactcataattctatctcccatccatgtaacagaagcacatcccgtgctgtaggctcattctcgcagcccaacctgtcattgtgtttacacaatcctgcgtgcaattttgtatttacaataatcaagagcatttcatcttttattctgtagcagtagtttctgggggtctccctacaggactgcaggtgcacgccaccatgcctggctaatttttgtatttttagtagagacagggtttcaccatattgatcaggctgatcttgaactcctgaccttgtgatctgcctgccttggcctcccaaagtgctgggattacagatgtgagccactgcacccagcccataaatcacacatttctttgagtttttgtaattccagcacaagagaaaccgtttgatatttgaagaatggctgcacacaaatatttgcacagaaataaaaacatctgtagattccaccacatgagggagaataccagtatgactatcaggaggaaaatatcaagagtttggaatatgcaccttaggcaagatgcaaaccaactacaataggatagatcaaagaagaagccagaagagtctagtcattttaaccaggcagcacatttattgatttttacaactgagtctctataatacccgatgtatttatccatgtgcaacaagaagtgtcagaaactgcacagactccccgctgtccagctggtagagaacaattctattatctagcattgcatgtctatgttaaattaaaacagggagtgagaataggcaagtatagaagtggaagcctaaaaaaaactccatacatttgaggaaaaagttgtgttacagatgcagctaacgtcagcctttgtgtggactaaaggatgtcttgttatgtaaaaatgtgtgggctgggtgcggtggctcatgcctgtaatcccagcactttgggaggctgaggcatgcagatcatctgaggtcaggagttcgagaacagcctgaccaacatggagaaatcctgtctctactgaaaatacaaaattagctgggcatggtggtgcatgcctgtaatcccagctactggggaggctgaagcaggagaatcacttgaacccaggaggtggaggttgctgtgagccaagattgtgccattgcactccagcatgggcaacaagagcgaaactccatcttaaaaaaaaaaaaacgaagtgtggttgacatgatatatctgacactgttaacttactctcagaggctatttctggtgaaatcctaagtacagcattattctgggaagcaaaggagacaggcaaaagcaaagacaaattaagagaggtaagagtctcatcatgactgatagtcttgttctgacatcttgagaaaagctgtccacagtgtaaagtcatcagcttgtcgtggtttgcagtttgagtgtctctaagttatggtgttgaacatttggtgagctcttagtggcccccacctcaaacacgagggttttcccatgaaatttacattgagttgtccacctccaccttatatggcttcaggaacagagccgctcttgttcttaatgatttcattggagaaaactgaattggaagaactaaaagaattcagggtccagtccagtctaccagtggattataaatactcaaagataatgaacagtggttcaatctggtaacaggtgtactacagtttttcttttcagctagtttttctctctatcggagtctctatttttaccaaagataattccaataagatgaatttgcttgcaaaataggttgagtctcaccgaacttgcccagattttttacctaagtgcggcaagagtagcaatggaccatagaggctctttttaaacttctctttgctagaagtttttaataagaatctcagatgaaacttccaaaaacctcttgagactaggaagccaaaccaaggcccacttcagactttgcctgcattccctatgggtttattctatgtatattctcaaatataacatcccagtcaaagccttggtaatataaccaatgttttcaaatgtgtcctgttataaagagagcagattcttacggaacatgtgcaaataactttattaccataaacctatgaatactcatgaatagtttcacaattctggggcattcagatagacagcaaaagcaaatatttcaatttttgtttacaaaagtatactttaccaattgctgaagaaaaaaagttcataaatctggagaataaaacattcaaagaatcagcacattttccaataaa

SEQ ID NO: 21848 - DNA, 2300 bp, Homo sapien
tgacttgtccttgcccccctgacgttgatcttcccaccctgctgctccctcttctgctctcaaacccatgtgcagtgctcagccccaggcatcactgcccccagggtattcacagtgttgcctactgcacacaaacacaaactcacagaaggtgacaaaaatctgcgtttgggacatctgattgtgaaagagggataacagtgaacgtagagccacagagactgggactcacggggctggaaggtgaaggagctgtaacataacatatgtgtgacctcgtgtgaagtggaataaaacatgcagcctggcctgggattgctgccgttcacacttccctccctgtccaccagagggcgacagagtccctcccagcctggagccttcccaggggatgccaacctccctcagcggaacccacagcccagcagggtccaccctcaccagggtcacttcggcccaagtcctcagcaccctccatgctccccacacggactctgtcagttcctccctgacctggcggccgccaacctaacaccactccctctgcagggagctcctgccccacacacctgctccttccctgggcccagctaaaggcatctcccagggcagcgctggtgcacgcgacgccacactgggcgctttcccctcgtgaactctctccatcctcatcaactctttctgtcactgctccctaaatgcctgcccctgctccatctgtcctgttctctggggcttcccaggccaagcctagcgccgacacagaacagcggctgcctgagggcccacagcctccccgggaatcagccaggcaccctgtcacctgcctgccccctgcaccccagggggctcagagagcgtgtgatggtcattcacaggtaccatccgggatgtggccacctacccccagctgtcccttgggaagacagacctctcctgtgtacttgcgtggagaagggcggtgttattgctctttgctcccagaacacaactcacccccacccgccctctcaggtgtgagcaacgtccctccagagagcctctctggtcactgcctgttcctcctctacagacagcagcttggccaggtcaaaaccctcaggacagacccctgggtgtgtcagcacatggagggctgagcccatcatggccacggagtaagtcgggatgaatctctccagctctgaacccctgctctgtcccaggctccccctcctgcgtctcaatgagccatgtcccgcggggttcctgggtaactccccacttcctcctgcaccaccacggggaaggtgtggtgaccacaggacaatcagctgggcagagaagagaggacatcaaagatggtcagggagaacatgagaaaccctgagctccagctcagccgccagaccccagggagccatagactgacagagaactgtccctttgactatgggactcacagcccccactgagcaaccagcacaggcctctcctcctaagaggcatgagagattcaccctgcacacctccaggaaggacagtttcctctgggacacccaggtcctgaaagtccatccttggaagctgcagtcaagcttgacacgattagagaaaggaagggtccctctcaccaggcaacacacagctcacccacagcacaatggggtgtcactgtgacagggacctggtgcatctccagcctcctgcactgaaggggagagccagatggggatgaaagagggtaaaaggcatgaatgtgcaccccaacccagagccatggggacagcaggaggctgaggcccaggactgtgcttgcccaacctgcagggtatgtgcctgactgtgtgggtctgtgtgtgtctcttctgtgtgtgtgtgtgtgtgtgtgtgtgtgtgtgtgtgtctgcacaaagtgtgtgttgaggtttggtgaaagaatcactgctgaaaaaggcagaggcctccacaactcccagggacctgaaacacagacaaaaggaaaaacagaaggagggacaaggaggcaggactgagagagaaggggacagagaggtgtcctgggactgaccccgcccatgagcttgagaagtgctcctgccccgggaagaggctcagcacagaaggaggaaggacagcacagctgacagccgtgctcagacagcttctggatcccaggctcatctccacagaggagaacacacaggcagcagagaccatggggcccctcccagccccttcctgcacacagcgcatcacctggaaggggctcctgctcacaggtgaggagagaacttcctgggagaggacagggggaggaa

SEQ ID NO: 21849 - DNA, 2300 bp, Homo sapien
tttttttttgagatggagtcttactctgttgcccaggctggagtgcagtggtgcgatctcggctcactgcaacctctgcctcttgggttcaagcgattctcctgtctcagtctccggagtagctgggactacaggtggctgccactacaccgggctaatttttgtattttttttttaagtagagatggggtttcaccgtgttgtccaggttggtttcaatctcctgacttcaatagatccacccgccttggcttcccaaagtgctaggatgactggtatgagtcaccgctcccagcctgaaatttttcaaaatgaaaacaccgcaggtcaggagtttgagaccagcctgaacaacatagtgaaaccctgtctctattgaaaatacaaaaattaaccagacatggtggtgtgcacctgtagtcccagttactcgggaggctgaggtgggagagttgcttgagtccaggagatggaggctgtagtgacctgcagtgagctacaactgcaccactgtactccagcataggtgagagcaagactctgtttctaaaaaaaaaaaaaaattactgggcatgtactgtatgccatgtaggtggtggagacatagcaggagatcagacaaacacttccctgtctgtgtggcaaatattaaacttgcaataaacttgcaaagacaaataaagataaaatttatagagatgtcaaaaataaacatataattgcaagtcacattcatttctctttctctgctattcctgctctcgccttccctcttctgcttctcctctctccgtcacagacacccacaacgtccctctgcagtcactgacagataccccaggttccttcctgtcttcctccccgccaccccagtgtgttacagctgatttgtacagccctggacaagcccatggttaaatagctagggatttcatcagcctggttggcaaactgtaggtagcttaaaatcagacatgctatgagtatttacaccagagaaataggccaacactacgaggcaggatttgtgggtattgtttttcagaaaacttggtttttcagcacaacactgctctcccatcggcttccagcaaataaatgttgcatttttcagatatatcctaattctttcatagatattcagtctctactccacctctggccaagcctttcctggtggtaggaaactggggacttgagtcctatgttgtactgtgagggtagagaatagaagagaaagcatgagagaaaagcatgaaaagaagaatcaaaagaaagcaatataagaaggaaagagaaagaacagagaagtgggaagacagtggagggtagaaactaggaccggaagacatggggacaagctgatgcccactgcacaacgtcctcacaggtagttgggccatttccccatctggggtacagaggtggccagggagcccatgagaaatgaggaaactgccttcccaaactactggagaaagagggtgggggtggtgatccacatagctgggctcaggaggaaagagggctgggagtctggaccgggggaacctcgggtcaagatgccacagtttctaactatggagggcctgggggcctggactcctgggtctgagggaggagggcctgggggtctggactcctgggtcggagggaggagggcctcggggcctggactcctgggtctgagagagggaggcctggggcctggactcctgggtctgagggaggaggggctggggggctggactcctgggtctgagggaggaggcactgggggcctggactcctgggtctgagggaggagggactgggggcctggactcctgggtctgagggcggaggggctgggggtctggactcctgggtctgaaggaggaggggctgaggggctgggggtcctggaccctccatctgagggaggaggggctggatgcctggacccgaaggtctgaggaagaaagggggtccctgataggccactgcggccattgagacttggggtggggcccaagcctccattttgcaaggccctcccctccccacccttttctgggctggctgcttaagggctggtataaaggacttgtttcctgctgaaaaagcagaaagagattaccagccacagacgggtcatgagcgcggtattactgctggccctcctggggttcatcctcccactgccaggtgagtgatgagcccagcctggaggagattccctggaggccgggcaagggaaccctgctgagatggatttgctcttgccactccaggagtgcaggcgctgctctgccagtttg

SEQ ID NO: 21850 - DNA, 2300 bp, Homo sapien
ttgagatgaagtctcgctcttgtcccccatgctggagtgcaatggcacaatctcggctcactgcaacttctgcctcccaggttcaagtgattctcctgcctcagcctcccgagtagctgggattacaggcgactgccaccacgcctgggcaatttttgtattttttagtagagacggggtttcaccatattggccaggctggtctcaaactcctaaactcaagtgatctgcctgtctcggccttccaaagtgctggaattagaggtgtgagccaccacgcccggcctctttaatttcttaataggctcttccaggagttattgagaagaatattttacaattctaagtggaatattttagcaggaaggaccgtggtttatttctacgataattctgttgtggcttaaacagtttgttcttttgtaatttggggtattccctctaccacctattgttgactttcgacctttgatatttaccctatgtaaattcatcaacccctgattttacttcttcaaagccagcatgaggctagtcaagcctggtttcctctcacaggaagtcagtctttggccccatggtatttgtgtaaccaggttacaagatttaaaaatctatcgcaagtgacagtaattaaaaaaaaaaaaaaacaaatgtgggctactctggaagaagaaacattggaatgtagattttatttgtttaattgcagagacatgaaccagcttatactcgtttgatttccacattattcatggagagtctaaagtcaatttctgggaacaaaaaaccaacttgaaaagctgtttaaattctattagtgggacttccaaaggtacaagggttaagaaaaagagaggagaaaagagaaaagaggggtagggagaaaggaagacgtgacaggaatgtgagccagacaatggagatggagaaaaagcagtcaagagggacagagggcgcggtggaggtctgcaggatctgaagatccacctctcttctctggacactgacctcttacctgatcccagaaacagactgagctttaactctgaccacatactcctcagggtgatggagagtggggccacctgcaccctaccagccttccacagcccctctgcatgggctctgccccgcaccctacacgtgctctgaggcctcttattgcaacaaatgacttcctccggattccattccctccaccgcctctttcttctcgctcaagcatcttcaatggtctggatacgtttctttgcttccatttgtcgccttccactcactcatccatgtccacttccatcttcccctttctctaacattgcttgtactgagatcagcaacatcctgctttattgctaaacctgccaggaactcacaggttagttttgcatcctttgacgctgagggccacttcttttcctggaataatctctgtgaggcaaatatacatttttaaaaattttgtttagcctgttgcaaaaagatagagactctcctcttttcactcagatcattttctcttcattcattcattcattcattcattcattcattgatagagtctccctctgtcacccaggctggagtgcagtggtgccatccaagcttactgcagccttaacctcctgggctcaggtgatcctccctccttagcctcctgagtagctgggactacacgcatataccccactatgcccagcaaattgattattgttattgtgtgtgtggagataggatcttgctatgttgcctaggctggactttgagagcatttattttttagaagaggtgtaattgaaaattctttctctgtcccttgaagatgtatgtaaagctttctaaagcatacataagcatcttgcctgcctcacaacccagaactgtcctcctcaaggccataggagccctctctttgaaaggcaggcatccgggcagaaagcgcccctgtctcccagtttctgtgagaaggaaggaacctcagttctgggggcatctcactcccagttgcaaaactacctcctgtcatagataagagaggtttgtttttcctgtggataaagccaattaaccacacagagaatcaacacagttactgggtgaatttaggatgaactatgtgtgacaaatggtgccgttgagtcctctcaactgggaacgagtcaccgtgtatctggagaccatgtgtgtaacgggttgcacctgcttggctggatacaaaggtgggatttctttctgtctttgtcatctcttagcagattgtatcacattttggcttaatgcttactcagtcataagacaag

SEQ ID NO: 21851 - DNA, 2300 bp, Homo sapien
cggtacatattctctggctgcagtgcagtttttaaatgccaccagtacacatggggaatgttctgtcttcccaaggaggaagccggaaagttcattttcccagcactctttgcaggagggacacagacacgggtccaggctttccccatcaggtgctcccgtgaaagactcaggatcccgaacagcaccaggaagcagagggtgcatggcaccgatttgctttttgtttttgttttaattttttgagtggggatcggggacagaagcttctggactccagggccagcctcagcagtgcagggtgcagggtgtggtttctgcctcctgcagtagccagaagatcttgaccggagctgtcctgtgcctgtggtttggtccttgccctgggccctgtggcctccaagctggcttcatgagggcccttggagcttggtgaccttcctaccctgtcctttaaccagtcccttttctgcttcttgctggagtgagctgggcggttttctctgaatctgttcctgtgctgggttctcccttagggaagggcaccctgggcacccgacccctcagccggatgcctagcagatgttctcatgcttccacttccttgcccctttatgtccagtggtcactcctttatgtcccttccatgtcctacatctctctctgctgtgtcctgtcttctgcaccctgtggcctccacctaagtttgcaccaccacccattcctccttgaatgaatacagttgtctccccgggtctccctgtctccactggggccagcagcatccgagccagcttcttctctgtggcagagatgatctttttcaggcctcctccggccatggccctctcctgcttctgtttccagagctcccaagtccctgggatgtgctccagctgctaagagaggcctcgaaggttgggtgatgtggcctccactgtcctcctgagcaaccaccccacctaccctcatccttcagctccattacatttcctttttctgtttaattttttgaataggtgttgtatttagatggctcagaaatttgcatccgtgtgtatctgtgtatgtgtgcaggcatgaagagcctgtgtctcatccctgttccctatgcacccaggtcctagccccacgccagacccagtagccagctgtgctgttcatgacctgcaaagctttctacagctgttttatgcaaaacaataggaattattgtaaattatggtaaaatatatataacatagaattcaccattttaatgacttttttcttttcttctcttttcttttctttttttttctttttttttttttttttttttttttgagaagagttctcactctctcacccatgctggaatgcaatggcgtgatctcggctcactgcaaccttcacctcccgggttcaaccgattctcctgcctcagcctcctgagtagctgagactacaggtgcatgccaccacgcccggctaattttttgtagttttagcagagaggggatttcatcatgttagccaggattgtctcgatctcctgacctcgtgatctgcctgcctcgacctcccaaagtgctgggattagacgtaagccacctcgcccggcccattttaaccacttttaagtgtacatccagtggcaggagtacatttaggttgttgttcaacgaccaccactgtccatccccacccagaactttttcatattccccaactggaattctttaccaattaaacacaactcctctttccgcctccctccagccactgacaaccaccttttcattttctgtctatgcatttcacgacgttaggcacctctgttaagtggaatcatgcaaatttgtctttttgagtctgattatttcacttagcagaaagagctcaaggctcattcatgttgaagcaccatcagaaccacccttcttgttatggctgaatcccattcatttgtacatatagaccacgttttgcttattcattcacggatggatggacactgggcttgtttccaacttctagctattgtgaataatgctgctatgaacaaagacatgcaaatatctgctggggcccctgctttccgttcttttcggaatataccagaagccgaattgctgcatcttttggtgagtctatgattaattttttgagaaacgaccacagtggttgtgccatattacatacccacaaatgctacacaagcgttccaattcctccttgccaacacttgttcttttctgtttttcttttttttttttttttttttttttgagaacaaccatcgtaatggatgtaaggtg

SEQ ID NO: 21852 - DNA, 2300 bp, Homo sapien
gaatcagtaccaattctgaaagtatacaaagcgttgccttactttaaggaaggagaccactactactcctgctgccctcctcccccgaccttgcctagttcacaagacaggaggaaagagagaaagcaaaaagttggaaagaaacagaagtaagataaatagccagtcaaccttggcaccaccacccagccctaggagttaaaaaaagtaataataataacagcaacccctgacctaaactacttgtgttatctgtaagttccagacattatatgaaaaagcattgcaaaactttctgttctgttacctgatgcatgtagcccccagtcacgtttcccacgcttgctcgatttatcacgaccctttcatgtggacccctcgaagttgtaagcctttaaaaaggccaagaattggccaggcgtggtggctcatgcctgtaatcccagcactttggggggcgggcggatcacgaggtcaggagatcgagaccatcctggctaacacagtgaaaccccatctctactaaaaatacaaaaaaattagccgggtgtggtggtgggtgactgtagtcccagctactcgggaggcggaggcaggagaatggcatgaagtcgggaggcagagcttgcagtgagccgagattgcaccactgcactccagcctgggcaacagagggagactccaaaaaaaaaaaaaaaggccaagaatttatttttcagggagctcggctcttaagacgcaagtctgctgaggctcccggccaaataaacctcttccttctttaatccagtatctgaggagttttgtctgcagctcatcctgctacaacttcatgtcacacctggaaagcttacataggccaggggtggtggctcacgtctgtaatcccagtactctgggaggccgaggtgggcagatcacctgaggttaggagttcaagaccagcctggtcaacacggcgaaaccccgtctctactaaaaatacaaaaattagccaggtgtggtggcaggtgcctgtaatcctagctgctcaggggagactgaggcatgagaatcgcttgaacctgggagagggaggttgcagtgagctgagatcacgtcactgcactccagcctgggggatagagagaggctctgtctccaaaaaaaaaatacaaaaaattagccaggcatggtagcttatgcctgtaatcccagctacctgggaggctgtggtaggagaatcacttgaacccaggaggaggaggttgcagggagccaagattgtgccattgcactccagcctgggcaaaaagagcaaaagtctgtcaaaaagggaagggaaggggaggggaagggaggggaggggagggaagggaaggttacatagatgtgaaagtgaactgccagccatgagcaacaaatccgagtgacatgtcttcttcatggtcctgacacggacgcgtgggttcgatctgacagcagcctgtgccatcatagctactgctcatgcatgcattcggggtgcccaaagtgatgctgaggggggcattcctagattcaaccctccaggagaccatgaggaggctggtgcgatagcgcaatcagatgaagacgcctgggctgcacaggggccactgcaagtgaagactcaagaggccaagctgactcccagaggctagggccactaaggtgggtgccgaggcaggggccaggctgggaacatgagaggccatttgggtagggagataagttccgtgagtgagggccaagggtctgacctcctagtgtggctggagaagcagagacaacagagtgcaaaaagagaaatgggccaggcgaggccatctggcaacgcactgcccaccctccattgcgtgcctctggctgcaaaaacaggcaggatcttccggccggtttgcccgccactcaccttccgagcatgcgcaccctccgagattgccaggaattgacttctctgtggccaatgaggtgccgcgttcctccaggctcatccaatgaacttatccgatgcttttgcatccaccaatggggtttcgagtgctgtgtggccaggctggcccggccttgcgtcgtaagagaatgccaagcccggggagaaggcgttccgggcctcaactttggcgtcgtgagattcttgtgaggcgtctgcctggaagccggcagcaattttgcttctttaaagagaaaaagaaggctagggactcagattcctggattctgaggaaagagaaggctggggacccagatcctggctctgaggggaacgagggttgggggcctgggctcccgggcctgag

SEQ ID NO: 21853 - DNA, 2300 bp, Homo sapien
ggtgcacacccccacgcccagctaattttttgtattttcagtagagacgaggtttcgctgtgttgcccaggctattgatttgtttcttgatcctttactgtcgcagtgtggccttgtccaggttggtgctctgtgaaattatctaggcgcagttgaactccatggcctcactatgtgtgtcaggccaactcccagctgttaggggctgtttttctctttcttccatggaaaactacacggccccctgttggtttcctggccttctctctcaccccttctagagtcattttccttttttacacagagtccacagtgacattctttaccttgtttttattgaagaataacatacgtccagtgacaggcctgagtcagtgattctcaacgtatctgtacacacatgcagctgtcacctagatgaagatcgtgggggctcctccctgttgctccttctggggccatgccctcccaaaggtaacatgtgttctgatttctatcaccactggttagttttgtctgttctgaaacttcatatatattcagttacacagtatgttttgtttgtttgtttaaggctttctaaactcaacaccaagttttttctttttttaaaataaaatgagatgggatctcactatgttgcacagcctggtctcaaaacccctgggttcaagtgatcctcccaccttggtgtctcaaagtgctgggattacaggtgtgagccactgtgcctggccccaacacaaagtttttgagatatgttgctgcatatatcaggtgttggatcttttctattgctgtgtagtattccattggccgaaccaaccactctcttttgccattcacttctttttctttttccttttttaaaatcatatatcctactctcagatccatttacttttttttaatttttaaatttttaaatttttttttttgagacagggtctcactctgttgcccaggctggagtgcagtggcgtgatctcagctcactgcaacctccacctcctgggctcaagtgattctcctgccctacccttccgagtagctgggacagcaggtgcacgccactgcacctggctaatttttttaaatttattatttttttttaatagagatgaggtttcgccatgttgcccaggctggtctcaaactcctgatctcaagtgatccacccagctcggcctcccaaattgctgggattacaggcatgagccaccgcgcccggcctccatttacttcttgatggctagctgcactatttctcaggttgatcatattaggaagcaaatctattatgtcctccagctcatttagaccctcttaaaggttctctactattctcaaaattaatccaaatctcttgtcggggcctctgatgccctgagtgtctcggcctctgcctgactctttcatctcagttcctgcccttctctcatggacttctgagctcaggagcactgctctcctttccatgtttgaatggtccatcctacctcctacctccaggtgctcccacgtgctgttccctctgcttgtaaagggctgtgtccctctcttgacctgctctagctggctacatcctgcatgcccttgaggttgcatctcagataacctcaaggaagccctcaccgaccagcccccacttctagactgcacatctccttgtatcactacactttttccttcagtgtcttagtctctttggtaaacaccaatttgtacgattatttgattagcatctgtctcccccatcagactgtgagctctgccaggacaggcactggttctgtcttcatctccagcattacctagaccaaagccgggcacactgtagatgctcatttaacagttaccgaacactgaatgtcgagtagccccagcctgtctttaagccccactactctcccactccaaacacacacagactttctcccgcgagctgtcagggaacctcagctcccaccctttccctccttggcaacttcacagggcagggaccgctctcccttggatgacgcgcctaggggcggggccccgccccacagccgacgctgagttggcccggttgggcaaggctggggttgcctggggcgaggttactcatcctgggctcaggtaagagggcccgagctcggaggcggcacatccaggggggacgccaagggagcaggacggagccatggaccccgccaggaaagcaggtgcccaggccatgatctggactgcaggctggctgctgctgctgctgcttcgcggaggtgggtctgctgcccggagaggtggagggggtagag

SEQ ID NO: 21854 - DNA, 2300 bp, Homo sapien
gcatttaggtggtctccaggcttttgctagcacagatggcactgcagggaatcaccttgaactcagatcactttgcatgtgtatgagtgtatccatccgctgaatttctagaattggaattggggctccatggtttatgcatttgtcattcagattttttttaaaaaagccaagttgccctccataaagcttgttccagtagaacacccccagtatcatgtgagggcatctgggtttcctacatagccaccagcacggtgggttttttgtttttttgttttacttattttttttgagacaggctgtcactctgtcgcccagactggagcgcagtggcacaatctcagctccctgcaaccttgacctccggggttcaagcgatccttccacgtcagcctccacagtagctgggactgcaggcacgtgccactatgcccagctaatttttctatttttttgtagagacagagtttcaccatgttgcccaggctcatctccaactcctgggctcaagcaatttgcctgcctcagcctcaaagtgctggcattataggtgtgagccactgcgcctggctgcagtgggacttttttttttttgcgacagagtctcgctctgtcgtccagcctggatttcagtggcgagatctcggctcactggaacctttgcctcccaggttcaagcaattctcctgcctcagcctcctgaaaagctgggattacaggcatgtgccaccacacctggctaatttttgtatttttagtagagacggggtttcaccatgttggcctggctggtctcaaacgcctgacctcaagttattcacccgcctcggcctcccaaagtgctgggattacaggtgtgagccaccacacctggcccacagtgggatttttagaaagagttttattgaggcataattcacgtccctatacaattcattcatttaaaatgtacagttctgtgtcttttagtatattcaacgttgcgcaaacattaccacaatcaattttagaacattttcattatcccccaaaagaaaccctgcatcccttagcctctcggttccccgatctaccccagtccgggcaaccacaattctacttcccatttctatgttaatttgcctgttccggacatttctttttttcttttctgtgttttttttttttttttttgagacagagtcttgctctgtcgcccaggctggagtacagtggcgcgatctcagctcattgcaatctccacctcccgggttcaagcgattcttctgcctcagcctcccgagtagctgggactacaggcgcgtgccaccatgcccggctaatttctgtatttttagtagagatggggtttcaccatattggccaggctggtgtcgagctcccggcctcaggtgatccacctgccttggactcccaaagtgctgggattacaggcataagccactgtgctcagcttgatatttcttataaacgggatcatacccctgtgaggtcctttcactcagcacatggacagtagtgttttgatttgtgctgactgggtggtggcttcactgggcagtgctctgacttaggttggagatcaagcctttttcctatgctcatgagccttttgtgttttcagggctccattggcctccagaggactgggagcctgccccggaaaaggggggagagggggagccagagaggatccccccgacctctgtccttccattgtactggtgaggatccccctgttccccacttccttcccacatcagcactcatcctgcagcagaggatggaggaaacccgcacctatgcctgcaggggagaagtggataggctcaggccagggtgtatccagccctgtaacctggtcccctctaccctagaatccctggaggcctcagctctcccgccagcagtgggggactccggcagataccccctctaccagctgctgaactgtggccgtgggaataggtgagacatcagagagaaggtggggagatggaagaagaggcccagccactgtaacccaccccgtctgtgttccctcctcctagctgtggggccatccatccagacattgcccacatggagcggctcctgcagcaggccatggcggagagggagcggctgctcaaggcccgggtgagagcccaggccatcctcttcggaacagaagactgccccagcctctcctccctcagacctgggagacccccaactccacctccctcagacccaggggtccaggcccccagcccctccaccctcagacccaggagtccaggcccccagcccatcct

SEQ ID NO: 21855 - DNA, 2300 bp, Homo sapien
gagggaaggagtgggctcaggaccaaaactctagtttcctgaagaggaaaggttcctaggatttctgggtctccagtggggcctggaactctacctaggccccttagttttaaccttgatttcttcctttcagactttgctgttccagccaacatgcgctgtggggtgcagacacccactgcctgatctcacttctgtcagatgctcccatccactattaatgcactaggtgggaggagagggcggcaatgacactgcacctctcctttcccaccgcattccctggagctccctaaataaaactttttttaacgtgagtctgacttctacctattttctgggggaaccaattgggtttctgggccgaaaggggtggggttctggtcctatggagaggccagggagcctgcaagatttgttttctttttcttttctttttttttttgagatggagtctccctccattgcccaggctggagtgcagtggcacgatctcggctcactgcaacctctgcctcccgggttcaagcgattctcctgcatcagcttcccaagtagctgggactacaggcgcgtgccaccatgcccggctaattttttcatatttttagtagagacagggtttgaccatgttagccaatatgatcttgatctcctgacctcgtgatccaccagcctcggcctcccaaagtgctgggattacaggtgtgagccaccgcgcccagcccgggagcccacaagatttctaactcacaagatcaaaaacaaacacagctatctggggcaggtcttctcatcaccttggattagaacaccggcttgcttttgagccacttcccacttagccctggggtaagttacttcacttctctaggcctcagttttcttatctctaaaatggaaggaataataatggggtgttgtgatgctctgatgagtcaatgtgtgtgagtgcctggcacatggcctatcagtgttcaccattaaagttactatcatttagaatgatcttttgggtacttcctggcttgtagtgacagtatacgcaatggttaagaacatggacttttgagagaatgaagcctgcattttaccacttacaacatgtgtagatgttggctacatttttttttttttttctgagatggggtcttactctgtcgcccaggctggagtgcagtggcacattcaagactcactgcagcctcgacctcctgggctcgagatatcctcctgcctcagcctctggagtagctgagatgacaggtgtgtgccaccacgcctggcataatttttgtatttttagtagagatggggtttctccatgttgcccaggctggccttgaactcctgatctcaagcaatccacctgcctcggcttcccaaagtgctgggattacaggcctgagcctctgtgcccagccaaccttgggtgcatttgtcctcctcagcttgtatccccaagtgtaaaatggagatagtaggccaggagcggtggctcacgcctgtaatctcaacactttgggaggctgaggcaggcaggttgtttgagcccaggagttcaagatcagcctgggcaacctggagaaacccagtctctactaaaaaaaaagaaatggaggtagtaatcactttctcgctggacagctttgagggtgaaattaaatgactgggtataaagtgtttcacacagctcttgacttctaatcatcccttttcatataccagttattttcctgttttcattttcctgttttcgcccagagaggaaagggtctggctgagacctttaacctctgccctccaccccatagcaaagttgtgggggggtggcggtacacttccctcagtctctgggcaggtgtctgactcagttcagggcaccccttccccttgtccagctccccaaaccggtcagggcccttctgaagggctcattagaggggagacgtccccatctccattcctgccttcctttctgaactcccaaggtctggacattagagaggctcccatacagaggtggccaagactcctccaggggggcaggaatgaggggctcgagggagactgggaggtcgcgatgctgagttccacgagggtggggccgggccggggccggtggggccgggatggccggatgccgaggccacgggtggggcaagcccgtggctccctcctccctcgggagctgttggacctgttgtcccccctccacttccgggctgctggggagggggaccgggcggcctctctcctccctcttcccctgccacctgtctcataggcagaagcggccg

SEQ ID NO: 21856 - DNA, 2300 bp, Homo sapien
ctcctgagtagctgggattacaggtgcctcaccaccataccgcttaatttttgtatttttagtagagacagggtttcaccatgttggccaggctgatctcgaacttctgacctcaagtgatccgcccacctcagcctctcaacgtactggaattacaggcatgagccaccacacccaggctaacaattcatttttttaaagtagaaggaaaaataaaggagagaaaaatggacccccatctccaaaatctcagacaagccagccatggtggctcacgcctataatcccagcactttggggaggtcaaggtgtgcagatcacctgaggtcaggagtttgagaccagcctggccaacatggtgaaaccctatctctactaaaaatacaaaaattagccagacatggtggcacatgcctggaatcccagctatttgggaggctgagacagcagaatcgcttgcgctcaggaggcagaggctgcagtgaactgagagcttgccattgcactccagcctgggtgacagagcaagactgtctcaaaaaaataaataaaaatgtgcctgggcgcagtggctcatgcctgtaatcccaacactttgggaggccagggcgcgcggatcacctgagatagggagttggagaccagcctgaccaatacggagaaaccccgtctctactaaaaatacaaaattagctaggcatggtggcgcatgcctgtaatcccagctactcgggaggctgaggttgcgctaagctgagatagcgccattgcactccagcctgcgcaacaagagcaaaactccatctcaaataaataaataaataaataaaacaaaaaaatttgctgggcttggtggcgcacgcctgtaatccctgctatttgggaggctgaaacaagagaatcacttgaacccgggaggtggaggttgcagtaaaccaagatcgcaccactgcactctagcttgggcaacaaagtgagaccctgtctcaaattaaaaaaaaaaaaaaaaaaaagttgcctaaggctgaggggggaaaagggaaggataggggtgatggctaaggggtgtggggtctttttggagtaatggaaacattttccaattaatggtagtaatggatgtacaactctgaatatactaaaagtcattgaattgtgcactcgaaatagataaattatatggtatgtgggttatatcaataaagctattaagcctgggcaacatagtgagattacagctcaacaaaaaattaaaaaattagccaggtatggtggcaggtgcttgtagtcccagctacttaggaggctgaggcatgaggatcacctgagcccagaaggtcaaggctgcagtaagctatgatcccaccattgcactccagcctgggtgacagagcaagaccttttctcaaaaacaaacaaacaaacaacaacaacaaaaaagggtgggtgcagtggctcatgcctgtaatcccagcactttcagaagccctgtaatcctagcactttaggaggccaaggtaggaggatcacttgtgcccagtagttcaagaccagcctgggcaacataacaaaaccctgtctctacaagaacatacacaaatcagccaggcgtgctggtgcatgcctgtggtcccagctaccagggaggctaaggtgggaggatcacctgagcctgggaggtcaaggctgactgcactccagcctaggtgacagagacccagtctcaaataaaaaaaaaaaagaaagaaagaaagaaagaaaaaaaaaaaacactgaagctaaatctaccatagctaaacccttcgttcatttcaagacatgtttgttagcacctattatgtacaatgtacatacatgtacaatgcatttttgcctgcttccagagaaaggcttgaaataaagcttctgtaaccattgtagctgaactctcttcccacacacagccctcatttcctctaaacactctgactcaaatgaactgtccctatttggcaaaactctctaacctggaggctgtcttctgtcacctgacattctgtccccaaagtcagccaaactttattatacatctttagcaattgatcagaagaatgccctgccagctgtttccctctctctgagggcaactcccctggccctccctccttcggcctggttgcaattctggccggaaacccgctggtgcctgtggcaaataaagtgaggaaggcaggaacctttagacttcccagtgtgaggcaacggcagggctaggactagggtgaggctgttggtgcaagatttaaggaggcgctcactca

SEQ ID NO: 21857 - DNA, 2300 bp, Homo sapien
aatgattctcatgcctcagcttcccaagtagctgggtctacaggcgtgccccaccacgcccagataatttttttgtattttattttatttttttcagtagagatggggttttaccatgttggccaggctgtctcaaactcttgacctcaagtgatctgcccacctaggcctcccaaagtgctcaaagtgcctgtgcatgagctcagccatatgctttttttttttttttttttttttttttgagatggagtctccatcacccaggctggaatgcagtggcacgatctcagctcactgcaacctccacctcccgagttcaggcaattctcctgcctcagcctcctgagtagctgggataacaggtgtgcaccaccacacccagctaatttttatatttttagtagagatggtgtttcaccatgttggtcaggctggtcttgaactcctgacctcgtgatccgcccgcctcagcctcccaaagtgctgggattacaggcatgagccaccgcgcccagccggccacataaaattttaatgaagcaatttgataggcttaaggaaaagcaggccttctctgtgtaaaggcattcacacaggggctgctctgaaaatagctccagggaccattccctggaaactccagaattaagataaatgttgttgcaggaaacccctcctcagaagctgtgggacaggataactcagtggttcatacctgtaatcccagcattttgggaggcccaggtgggaggaccatttgaggccaggagctggagaccagcctaggcaacatagcaagacccctgtttctacaaaaaaaattctaacaattaaaaaaaaaaaaaaaagctctgcccctaggctggaaatcaaggctgctctgatgtcacaaagtgacatagatcctccagatgagagtgggatgtcctattctcactactgctacgattacaaagagcagactttctgacagctcatgacttgagactacagtttttcagccccaggtccttggtgtaaatgaacacaagctcttttcagaggttcacaccccaacagaagatgaataatccccaatctgattattcaagagataatgcaaaattatctttttttttttttttaagatttcttcctggaaagagagaaacattcctgataaaatgcttatgcaatttctggatgaactttaatgggatcaagtgttgttctggtaaccaggcacccactcaaaagtccctcaagatattaatgacctggaaccgaacgaatatcttttttttttgagacagagtctccctctgtcgcccaggctggagtgcagtggcgtcatctctactcactgcaacctctgcctcccggaaccgaacatctttttctaaccatgactatcctaccacctgctagaaaacggccccacgggacgcggtggctcacgtctgtaatcccagcactttgggaggacaaggtgggaggaacgcttgagctcaggagttcgagatcagcctgggcaacatagtgagaactccgtctctgcaaaaaacaaattttatatacatgtatgtgtgtgtgtgtgtgtatatatatatatgtatataaatatatatatagatataaatatatatatataaaatgtcgggtgtggtggcaacgtgccatagtcccagctactcgggaggctgaggttggaggatcgcttgaacccgggagtttaaggctgtagtaagctgagatcgagtcactgcactcaagcctgcgtgacagagcgagactctgtctcaaaataaaacaaaagaaaaaggaaaaaaaacggccccgaggctatgagtgtactggggcctctccctgggtttctacttctctccctatctctgttcctacatgagtatgtctgtgtgtctctgagcgtctgtccctcgcactttgagtgtctccctgttctctgttttttctgggtctcaaagcgtccaggcattgcactctggctttcctcggtctcgccctcgccccagtcccgctcggcggtcccccgccctctgccccaggcgtccgtggcccctttaaggcgtgctccgcccccgccccgcccttcccggggtcagtgccgtagcgcccggctcctgcaggcgctcggcctccgctcattcctgaccccgcagtgggcgcgatggcggaggctgtactgagggtcgcccggcggcagctgagccagcgcggcgggtctggagcccccatcctcctgcggcaggtgcgggtggctggacctaggaggggactgctgggcactaggcggcagcaag

SEQ ID NO: 21858 - DNA, 2300 bp, Homo sapien
gagaccagcctggccaacatggtgaaactccatctttaccaaaaatacaaaaaaaaaaaaaaaaattagccaggcgtggtgacgggcacctgtaatcccagctactcaggacgttgaagcaggagaatcacttgaacctgggaggtggaggttacagtgggctgatatctcgccactgcacaccagcttgggtgacagagcaagactccgtgcaaaaaaagaaagaggtgggcacagtggctcacccctgtaatcccagcactttgggaggccaagacgggtggatcacgaggtcaggagatcgagaccagcctggccaacatggtgaaaccctgtctctactaaaaatacaaaaattagctgggtgttgtggtgaacacctgtaatcccagctacttgggaggctgaagcaggagaatcgcttgaactcgggaggcagaggttgcagtgagccaagattgcgccactgcactccagcctgggggacacagcgagattccatctcaaaaaaaagagagagagagagaccgaagtgtcacttcaaactaatacaatgtgtggagctcatttagatcttaagtcaagcaaatcaagtgtaataaaaagatatttatgagatatgatgtttgacatttagcttcagaatcatttgggaagagtggatggggggtaaatcaaacaatactggtcatgagtgaataattattttaaaaactttttttttaaagatacggggtatcactctgttgcgcaggctggaatgcagtaacacaatcatagctcattgcagacatgaactcctgggtgagtccccactccctacccccgtgaaatagctgggactacaggctgccattaagccagactttttttttttttttttttttttttttaagatggggaggtgtctcactatgttgcctaggctgggatttttgtttgtttgggtttttggtttttttgtttttttgagacggagtctcactctgttgcccaggctggagtgcagtggcttgatcttggctcactgcaacctctgcctcccaggttcaagccatcctcccacctcagcctccggagtagctgagattacaagcgtgtgccaccatgcctgactaatttttgtatttttagtagagacgggttttcaccatgttggccaggctggtctcgaactcctgacgtcaggtgatccgtccacctccgcctcccaaagtgctgggattacaggcgtgagccaccgtgcctagcccccgtctagtttggaaatcctgggctcaagtgattcgcccgcctctgcctcccagagtgctgggattacaggcatgagacagggagcccggcctaggcactttctagtctaaacactttccattgattatcatatttaatcctaaaaacgctccattttatagatgaggaaacaggcctagaaagagagctagaaagggtcacacggctagaaagtggcacagccgtattccaaaccagttacccaggcaatctggctccagagtccaaataaccccgccaaactcccagggatcgccagaccttgcgggttatcggactgagacccacccatgcagaggacttttatgggcatttcctggtcctttctgcaccaggcaggaaggtgcaccgccactgctcgggaagaatgctaagctgcatgccaccccaggcctggcaccaagagcatgggccagggcacctcgggaccacccaggcttccgagggggaaggtagatgggtgcgtggctgagaatcttgaatcacccaatagcgaggtgtgccaaggcgctgtgcaaataacgtgccttttattgggcactggctctctttgagcccggagtcccgcccccgccctctctcgaagaactggccagactttttgcaaacgccttgaagggtagaattagcagcgagctcttgaaactgcctctggagatggaactcagcggaattctcgaaaagaagagggacattaaaaagacgggtgcatgcactgatttccaagcgcagtttgtccatgttagtcttgtacatgcttgactccagtcagccaccgtaggccccgccaccggcggtgcactttctgtcgatacggtagcttcgcgcttgctcacgaacttgcctgcctggctggcgcacccagcccctccttccattccttcttccccctctctgcagcctctgccagcccgcactgcgcatgctttctgacgccccctttggtccagcgtgggaggaggggatggaaatgaggttgggctaagcagcttgcgcgcgctcccttg

SEQ ID NO: 21859 - DNA, 2300 bp, Homo sapien
tgctctcatctgatttcctagaattgagatgtgtttgggatccttcctggaggatggaggattcagagcccaccaagcccctctctcagggatccaatcacaggagcttttcttctctgggacccccaggctttctcttcctttacccttggcctcttccatgaatctgaatttccagaatgcctccccgttcaccttgaggacttgctgaaggctctttctctctctatatctctctctctctcaatctgggacctctctcttcctgaggtcccagagacagttcaggtcccttgtcacttaccaagacccaggagggtgcagagcaacacaaaggccagcagaaaggtctctggtctcctggagagcctcatggtgtgtgtatcagcagtacctggtccccagcttttataggaagctgaggaggggtgggtctggacccacattcaccctacggggagaaatagctgaggtcagaacccagggcagtcctctgtggcctccgggttgggaaggcagaaccagaatccaaaagtgacctgggcatcttgtgcccagccccccacctccatggagaccccaggagtctgggcttccatccccctcttctattagaacccagaaagtcaccaccctgttttctcaccttcccacggcccattgttgtttgtttgtttgcttgaagaccaagacggagttgggcctcttgattcccagtggctgcaagaactgggattccctctccttctctctcttcccctctcctcccaaggaagcacccagtgtgggtagggccccaccttggagcacccagcatgtccaggctggtcctgcgggtgcggggtgccttgtctcccttcccctctcttcatgtgctcggctcacactccttgtgtgtttgggctgtctccagctgcgaccccacccagggctgcacccttgggtctccaaggcaccgaatgaacagagggatgtctgtcggcagtcataggcgggcgtagtaaaagacagatgcccacagtccacatattgggaaactgaggcttttgtggaagaactccaggataggggtgtgtgtgtgtgtgtgtggtgggggttgggcacatgctttgtgttatatttaggacgcagaacccttctcttttggcctcaggcataaggctgaaagagatctgctaatttttttcgcgcgtgcgcgcgcgcgtatgtatgtatatgtgcgtgtgtgtgtgtgtggcaaggggacagagagaagagtgcagccgcctgagccatttgaagagatcctgttgcgtagaatccaggttccctacgaaactacgaaaattcactcagatttgctgtcctagcccagcgcagtcgctcacgcctgtagttccagcactttgagaggccgaggcaggtggatcgcttgagctgaggagttcgagaccagtctgggcaacatggcaagacccgccgccctctcaccccatgtctccacaaaaaatacaaaaattagccgaatgtggtggcgcgtgcgtgtaatcccagctacttaggaggctgaagtgggaggatcccttggccccaggagacaggggttgcagaaagccgagatcgtgccactgcactccatcctgggtgagagagcaagaccctgtctcaacaaaaaatttttaaaaaataaaataaataataatacagcaaaaagatttgctttctcggcttcagtgtgggcggtaactccatcgtgcaatgagaaaggcgaatttcttccagacaccaatcccggaggtcgcttctgttgctaggctcccagaaagcagggttcggacgtcattgggaggcgaggctagagcggggttgtgtgtggcggagggaggcggggctggaggaaacgctcgttgctaaggaacgcagcgctcttcccgctctggagaggcgcgactgggcttgcgcagtgtcgacgccggcgccggcgcgccggggtttgaaaggcccgagcctcgcgcgcttgcgcactttagccagcgcagggcgcaccccgccccctcccactctccctgcccctcggaccccatactctacctcatccttctggccaggcgaagcccacgacgttgacatgccggagatccgcctccgccatgtcgtgtcctgcagcagccaggactcggtgagggacctgcatgggggaggttggaagacgtgagggaattaatgaggatagctcttaaaagagcttttggggttctcttggaagtctaaggagagtcatggggggatttccaggaggctaaaagtgaattgtggagaga

SEQ ID NO: 21860 - DNA, 2300 bp, Homo sapien
aggacttgaacttcttggttctgagagaggggacagctaggggcccagaaacctgggtcctggggaaagtgaggcttacttggactcctgtgtgcaggggaggagggggctggggcctgaacttcttagtctaaggagaaaggaaatctctctacctcttttaaaaaaatatatcatatgatattaatgtattttttttgagatggagttttgctctgtcacccaggctggggagtgcagtggcacgatcttggctcactgcaacctttgcctcccagtttcaagcaatcctctcacctcagcctcccaagtagctaggattacaggcgcccaccaccaagctcagctaactttttttgtatttttagtaaagacggggtttcaccatgttggccaggctggtcttgaactcctgacctcaagtgatccacctgcctcggcctcttaaagtgctggggttacaggcatgagccaccgcacctggccttctccctctttttttttttttaattatatttttaaagatttccctttccagccatgctctcatctgatttcctagaattgagatgtgtttgggatccttcctggaggatggaggattcagagcccaccaagcccctctctcagggatccaatcacaggagcttttcttctctgggacccccaggctttctcttcctttacccttggcctcttccatgaatctgaatttccagaatgcctccccgttcaccttgaggacttgctgaaggctctttctctctctatatctctctctctctcaatctgggacctctctcttcctgaggtcccagagacagttcaggtcccttgtcacttaccaagacccaggagggtgcagagcaacacaaaggccagcagaaaggtctctggtctcctggagagcctcatggtgtgtgtatcagcagtacctggtccccagcttttataggaagctgaggaggggtgggtctggacccacattcaccctacggggagaaatagctgaggtcagaacccagggcagtcctctgtggcctccgggttgggaaggcagaaccagaatccaaaagtgacctgggcatcttgtgcccagccccccacctccatggagaccccaggagtctgggcttccatccccctcttctattagaacccagaaagtcaccaccctgttttctcaccttcccacggcccattgttgtttgtttgtttgcttgaagaccaagacggagttgggcctcttgattcccagtggctgcaagaactgggattccctctccttctctctcttcccctctcctcccaaggaagcacccagtgtgggtagggccccaccttggagcacccagcatgtccaggctggtcctgcgggtgcggggtgccttgtctcccttcccctctcttcatgtgctcggctcacactccttgtgtgtttgggctgtctccagctgcgaccccacccagggctgcacccttgggtctccaaggcaccgaatgaacagagggatgtctgtcggcagtcataggcgggcgtagtaaaagacagatgcccacagtccacatattgggaaactgaggcttttgtggaagaactccaggataggggtgtgtgtgtgtgtgtgtggtgggggttgggcacatgctttgtgttatatttaggacgcagaacccttctcttttggcctcaggcataaggctgaaagagatctgctaatttttttcgcgcgtgcgcgcgcgcgtatgtatgtatatgtgcgtgtgtgtgtgtgtggcaaggggacagagagaagagtgcagccgcctgagccatttgaagagatcctgttgcgtagaatccaggttccctacgaaactacgaaaattcactcagatttgctgtcctagcccagcgcagtcgctcacgcctgtagttccagcactttgagaggccgaggcaggtggatcgcttgagctgaggagttcgagaccagtctgggcaacatggcaagacccgccgccctctcaccccatgtctccacaaaaaatacaaaaattagccgaatgtggtggcgcgtgcgtgtaatcccagctacttaggaggctgaagtgggaggatcccttggccccaggagacaggggttgcagaaagccgagatcgtgccactgcactccatcctgggtgagagagcaagaccctgtctcaacaaaaaatttttaaaaaataaaataaataataatacagcaaaaagatttgctttctcggcttcagtgtgggcggtaactccatcgtgcaatgagaaaggcgaatttcttcc

SEQ ID NO: 21861 - DNA, 2300 bp, Homo sapien
cttgggcagtggtcaacatcccgcccatgaaaaaccagggagctgctggtccctcctctctcaggacacaaaagtcctaagtcaaagtcgtggtccgaagaccacaccacccatgactacagcctcgccctctgtctacactgcagggtgcccactacactgcgaaatatgtacggcggcggggagcaggtgccatggccaaatgaagacctgcagcagtgacaaggacacatgtgtgctcctggtcgggaaggctacttcaagtaagaggatgtggcctgggacctggtggggaggtggggtgtaccttcagggtggaagagactaccatgctgaggggggatcatcatggttctcaagacgggagcgtgggaagaaatcagtggagagcaggaaagagggaaagaccatcatgagatggagggaacagaaataagtggtgtgatagaaatcattattgtcacagaattctgaaaatgacactgtcctaaagagaaggaaaatgtgggaggggtgagagttaatagactttcttaggcagaagaggggtaaggaaagacactgtggggggcagagaaatagtgagaggggaagaatctaactggcaggaggtggaaatggtggggagtggatagagaaggaagaggctgggctggggtgggaaagtgtaagtgtaatcagggaagaggtcattcctgaccgagggaggagagatgatggtggagtgttggagtggtggaagagacagaaaagggatcaccccaaacaggagatggatgataaccttgaagtatggagcaaatcattttttttcttttttgagacagagtctcgctctgtcacccaggatggagtgcaatggcgcgatctctgctcactgcaacctccacttcccaggttcaagcgattctcctgcctcagcctcccgagtagctggaattacaggtgcgtgccaccacacctggctaatttttgtattttttagtagagacggggtttcgccatgttggccaggctggtctctaactcctgacctcaagtgattctcccgcctcgacctcccaaagtgctgggattacaggcatgagctaccgtgcctggctgagcaaatcatcgtaaagaggagaagcagagacagggagggggagatgtggatgagtaaaatgaaagggaggccgggcacggtggttcacgcctgtaatcccagcactttgggaggttgaggtgggaggatcgtttgagcccaggagtttgagaccagcctggacaacaaaaagagatccatctctacagaaaaaaaaaaaaaaaaatagttgcgcatggtggcacatgcctgtagtcccagccacttgggaggctgaggcaggaggatcacttgagcttaggagatcgaggctgcagcgagctaagtgcacaccgctgcactccagcctgggcaacagagggaaacctgtctcagaaaataaaatggaagagagaagatgggcatgagttaaatgaaagagaccaccccagacctgaaaaatgatggaggagaaagggagcaatggaagagaccagtgggggacagagatgtttatacaaagctgaaagagactttcaatcacaggaggagagatgatgaggcctggtgagggaataaaggcgactttgggtgcagggagaaaacactggtcgggagaggctgtgaaaggaaagtgagatcgaaaatcacccagccagcgttggtgggttaaggaaggacctgaaaggcttgaagagaacccccatcccggcatagaagaggaaacgcaccctcgggaagggaggagagagagctgggggacccctcgatggagtgaagggggaacctgtgaattgggtaggaagagaccaccacatggtggggagggggaaggccggggagactggaagaacccaccttaaacaagacctgaaaatagccaagaggggcagcaagagaccctcgttgggaggtctgaggagtgaccatggcaggatctgagagaggaggatgcctgttgctgggaccggggttcattggaagagactacggggtgggcgggggttggcggggagttgaggaggctggaagagaccatttcacgaaggcatgggggtggccataggcggcctgaaatagagtaatcccggaaggacagggagagaggggtggccgtgggtggggtggggtggggtggaagggaccacatccagcaggctgaggttggcaatggggagctggaagagaccaccaaaggccgactaggggctatggcagcgggagggagggctaccta

SEQ ID NO: 21862 - DNA, 2300 bp, Homo sapien
caacctccgcctcccgggttcaagcgattctcctgcctcagcgtccggagtagctgggattacaggtgcctgccaccacacctggctaatttttgtatttttagtagagacggggtttcaccatgttggccaggctggcctcgaactcctgacctcaggcgatcgacccgctccggcctcccaaagtgctaggattacaggcgtgagccaccgcccctggccaggaatcctgatacctttgggaaccatggtgaatgacatctagacccttctgtcctgaagggagttggtggcccagactctagcagggactatgtctttgtctcctagggagtagaaactggagttactggatgtttagtcctccagggaggctggtagaagtcctgtttcctaattggtggggaggtgtccatgactgggacctgaactccagtataggggagggagacctgagcgccccagggagctggaactcttgggcttcagagcctcagagggaaacagggtctacatttctctgggagaaaaagcctgcacacaggtccccaaggagcagtgggctttgaatcttgatggggtggcggaggcccctggggtctgagacttccggggttctaagatggctgtggaccttggttcctaaatattgggtaaggggaggtctgcatctggaggagggatcgggggcttgtgcgagaaagctggagacttcttgatctctcctggggagtggatgggtttctataattgccctccaaaagcatgtagggagggtggtcccacaaaaatgaggtgaggtgggtaagaggtctgggcatggtgggctctgggagtagccagggaccaggaatgaggtcttttgggtgtggaagggcagtaaagcatacctcagagacagctcctccaaaccttgtattgggatcccggcaactgcctctgtgagtgtgactgggaagggatatgactgccttcatcttctaggtgctgagcaattcaggtgatctctggggagtctgtttctctgtctcttttctttaggagtttctatctttttttggcctttttctcctggtatttaaccataaccctttatggccttggtgttttgtgcaccttccttttcagaagagcagctgtactgctgcactggtccaaacacttctgtatggacacctcgggtatccccaagaggctctgctttctgatgtacatagagggtgctgcattgagccaggggcccaccaaatgggtggtcaggcacttgagaccatgggaatatgccaggagtgaatgaagcaaaggcagaaaccacagtgcctggaatgttctaggctgctagccacatgtgggggaaaagttgcaggttacagaattcttcagtgtcaaaaacagaaaaggaggatctgagaatccaagcgatagaatcccttttgtcgtagacagaaagagcaaagtccagagagggcaggcttgaggcccaacagcacacagtaaggccctgtgggtctggcccttgcctattctcattcactgccccttcccactcctgtccagcctgatagactttccttctttttttttttgaaatggagtctcaccttgtcacccagtctggagtacagggatgtgatgactgtagctgagatgacaggcatgtgccaccacacctggctaatttttgtagtttagtagagaagggatttcaccctgttggtcaggctggtctcgaactcctgacctcaggtgatccacccgactcagactcccaaagtgctgggattacaggtgtgagccatcatggccgcctgactctttctgatgcctgagtggctaccttgagtcctgcctggggacccatgcacctgctgttctctttccttcaaggctctactcacaacttcctgttctactctcaaaccttcctgtgacgggctcagtcagatctcagctcacgtatcccctcagagaggacttcccctccctgaccaccctatctgaagtagctcacattcccccactattcatttcggccagttgagtttccttgtagcaattattactgtcaaaaatgatcttatttatttacctgtttattggcttttgacccgttgcctgtcctgttctctgttgtttccccagcatctagaacaataggtgcctgacacaataggtgcttcgtaaatatttattattattattattattttagagacagggtcttgctctgttgccccggctggaatacagtgggatgatcatggctcactgccatctccaactcctgggctcaaacgatc

SEQ ID NO: 21863 - DNA, 2300 bp, Homo sapien
cagcagataaagtgttaagcctttcccttttaattctagggctttgggaagcctgggtgggggcatggcttgaggccaagagttcaagaccagcctggggaaacagtgagatgctgttttgcagcctgtagtattagctactctggaggctgaggcaggaggatcatttgagcccaggaggtggaggccgtcagtgagctaggatcgcggcactgcactccagcctgggcgacagagtgagaacctgtctcaaaaaaaaaggccgggtgtggtggttcacgcctgtaatcctagcactttgggaggctgaggcgggagtattgcttaaggccaggagttcaaattcaacctagccaacatagcgagaccctgtctctcaggaaaaaaaaaaaaataataataatagagctaagccttgccccaaactcactgggggagggatctcatggacctccatggtcgcacctaggtgcctagggtctcgactaacggacccagccagaaagccggcactcacctccgcagcgcttctgcctggctctgcagcgccgcccggaggcgctctagctcctcgcagccgtcgctgctgccgcagttcgccggtagcacaaacagatccgcagctcctaaccccgcgctgttcagcagagctgctgtctgatcacgggcctgggcggcagtctgtgaatccccaggacggaggttccgcacagccagtagcggggtccctcgggccagggcggccagcgctgcctctcccagggctggagccaacggttccccgttcccctcgggtccgggcagcaccagtaccagcacgttggcttccgccgcccagggccccggcgctgcgggtgggcagctcagctcgcccagaaaaaggcctgggcccgcagctcttaggctgggaaccccggagtccggccgtccctcgggggcctcgagcgtctccacatccttgtcgcacagcgctgcgatcagcgcggacttccccaagcccggaggccccaggaacaaggcggtcacgtcaccctgcggcggaggcatggctggaaagcaacgggtagagaagacctgggtcagggagcacctagccttttcctttcctagccgccccactcggaacccaggcctcagtccttcaccctgtccccttcggttcttgagtgtcactctccaggacctaaaaaatccagagcccagaccctattcccccagaatcccaggcgtcctgtctgtccgccctccctctagatggaaacgtttccctttctgcttcaaaaactctgaaatcaggcgcggtggctcatgcctgtaatcccagtgctttgggaggccgaggccggaggatcgcttgaggccaggaattcgagaccagcctggccaacatgtggggggactctctggtagagtctccgtctcgataaaaaataaaatttagccgggcatggtggtgtgcgcctgtagccccagctactcggaaggctgcggcgggaggatcgcttgagcccaggacttggaggctgcagtgggccgtgatcacaccaccgcactccagcccaggcgacagagcaagaccctctctgaaaaataaataaaaataaaacctcagaaatctggcttccagtccctcctccctcggacacattgttattttcatctttccccttcccccttccaaatcaccaaccgagcaaaaagccgacccacgggagagagcgcagtcggtggcagtaggtcagcagctgagaagcccggcccctgggccgcggcggacggaggccgaagaggccagggagcggtgatttagagatgccgggacccgtcccggtagctttaacctgacgtcactccctctcccaagggggtgtgtcttggaaggccgacagcagagacccagcccttcgccgcgcctgcgcagaacggccgaagtgtgcacgcccctctttggcggcctcagggcctagaacaatgaatgagtcaacgcgcctgcgcgccacgagagcctacccacgcatgcgcaaaaggcttagctagctaagccgcgggaggctgaacgtcatcaaacgcgccatagggcagagaaggacccctcccgttattttgaggaccgggctggtgcgactatactactgccggatggcaaatccgggatctcggctccgagaggctcatctggcaaaagggcgcggaaaccacgggggccctgagactgagtggtccctatcccacttctctctggggcggcgctgtagccagcggctgacaggcgcagcgaaaggcagccctctgctgtaagg

SEQ ID NO: 21864 - DNA, 2300 bp, Homo sapien
tgcactccagcctgggcgacagagtgagaacctgtctcaaaaaaaaaggccgggtgtggtggttcacgcctgtaatcctagcactttgggaggctgaggcgggagtattgcttaaggccaggagttcaaattcaacctagccaacatagcgagaccctgtctctcaggaaaaaaaaaaaaataataataatagagctaagccttgccccaaactcactgggggagggatctcatggacctccatggtcgcacctaggtgcctagggtctcgactaacggacccagccagaaagccggcactcacctccgcagcgcttctgcctggctctgcagcgccgcccggaggcgctctagctcctcgcagccgtcgctgctgccgcagttcgccggtagcacaaacagatccgcagctcctaaccccgcgctgttcagcagagctgctgtctgatcacgggcctgggcggcagtctgtgaatccccaggacggaggttccgcacagccagtagcggggtccctcgggccagggcggccagcgctgcctctcccagggctggagccaacggttccccgttcccctcgggtccgggcagcaccagtaccagcacgttggcttccgccgcccagggccccggcgctgcgggtgggcagctcagctcgcccagaaaaaggcctgggcccgcagctcttaggctgggaaccccggagtccggccgtccctcgggggcctcgagcgtctccacatccttgtcgcacagcgctgcgatcagcgcggacttccccaagcccggaggccccaggaacaaggcggtcacgtcaccctgcggcggaggcatggctggaaagcaacgggtagagaagacctgggtcagggagcacctagccttttcctttcctagccgccccactcggaacccaggcctcagtccttcaccctgtccccttcggttcttgagtgtcactctccaggacctaaaaaatccagagcccagaccctattcccccagaatcccaggcgtcctgtctgtccgccctccctctagatggaaacgtttccctttctgcttcaaaaactctgaaatcaggcgcggtggctcatgcctgtaatcccagtgctttgggaggccgaggccggaggatcgcttgaggccaggaattcgagaccagcctggccaacatgtggggggactctctggtagagtctccgtctcgataaaaaataaaatttagccgggcatggtggtgtgcgcctgtagccccagctactcggaaggctgcggcgggaggatcgcttgagcccaggacttggaggctgcagtgggccgtgatcacaccaccgcactccagcccaggcgacagagcaagaccctctctgaaaaataaataaaaataaaacctcagaaatctggcttccagtccctcctccctcggacacattgttattttcatctttccccttcccccttccaaatcaccaaccgagcaaaaagccgacccacgggagagagcgcagtcggtggcagtaggtcagcagctgagaagcccggcccctgggccgcggcggacggaggccgaagaggccagggagcggtgatttagagatgccgggacccgtcccggtagctttaacctgacgtcactccctctcccaagggggtgtgtcttggaaggccgacagcagagacccagcccttcgccgcgcctgcgcagaacggccgaagtgtgcacgcccctctttggcggcctcagggcctagaacaatgaatgagtcaacgcgcctgcgcgccacgagagcctacccacgcatgcgcaaaaggcttagctagctaagccgcgggaggctgaacgtcatcaaacgcgccatagggcagagaaggacccctcccgttattttgaggaccgggctggtgcgactatactactgccggatggcaaatccgggatctcggctccgagaggctcatctggcaaaagggcgcggaaaccacgggggccctgagactgagtggtccctatcccacttctctctggggcggcgctgtagccagcggctgacaggcgcagcgaaaggcagccctctgctgtaaggaggaaaactgaggcctgggagcaggaacctgtaggcagcgcttgagggtagcgggatagcagctgcaagcgcgcgtgggaggcgggggctctgggcggaacaaaaatcacaggatgtcagaggatgtttcccgggaagaactgggataaagggtgggtatcactacctgccccaagacacttgagattgggatgacgctggtgtcaaagatca

SEQ ID NO: 21865 - DNA, 2300 bp, Homo sapien
cctttgctgcagttaatcccatacccaccctgtgaggtgggaagtaccaccctcttttgacagtcaaggaaaccaaggcccaagttacactgaaagtctagggcagagttgggaccagaatcttggggtttctctcccaatagaaccattcccagccacatctccaacccaagcctctcctggaagccaccctatccctctgaatgcataagcattgcaatcctgcttatgtggccagaggagggtgagtactctggccacataagctggtgtgaggagatgcacttcctgctagagcagctcagggaccattacagccccttctcaacaggcaaaactctgtggcgccttggacaccgaagtgccacagagatcttagcatcagctcctgcaccccaccctcctctagcccgccagccatgtgtactcacagatgttgcctcctgggctctggggacttctctccttgggtgaatcctgctgcttcatgttctcttcagggttcgggtcctccatggtgctgggacccttctagtcaggagaggagcgtgcataagtgaagctgttcatctgttaccagtcttagagggcaccctaagtctatgacctttgacatcgccagaggctctccttgcctgcctttgacccctacgacatactatctccttgaactctaattgatggagttcttgctaaaagaagcttcaaacctcccaaaggactggatttcctgggtttgggactcccctagagtcttctcactggtgtgacctatgacctgctgcatcaaactaactccctgaactcagcgtggaagccttgatctttgacaccagcgtcatcccaatctcaagtgtcttggggcaggtagtgatacccaccctttatcccagttcttcccgggaaacatcctctgacatcctgtgatttttgttccgcccagagcccccgcctcccacgcgcgcttgcagctgctatcccgctaccctcaagcgctgcctacaggttcctgctcccaggcctcagttttcctccttacagcagagggctgcctttcgctgcgcctgtcagccgctggctacagcgccgccccagagagaagtgggatagggaccactcagtctcagggcccccgtggtttccgcgcccttttgccagatgagcctctcggagccgagatcccggatttgccatccggcagtagtatagtcgcaccagcccggtcctcaaaataacgggaggggtccttctctgccctatggcgcgtttgatgacgttcagcctcccgcggcttagctagctaagccttttgcgcatgcgtgggtaggctctcgtggcgcgcaggcgcgttgactcattcattgttctaggccctgaggccgccaaagaggggcgtgcacacttcggccgttctgcgcaggcgcggcgaagggctgggtctctgctgtcggccttccaagacacacccccttgggagagggagtgacgtcaggttaaagctaccgggacgggtcccggcatctctaaatcaccgctccctggcctcttcggcctccgtccgccgcggcccaggggccgggcttctcagctgctgacctactgccaccgactgcgctctctcccgtgggtcggctttttgctcggttggtgatttggaagggggaaggggaaagatgaaaataacaatgtgtccgagggaggagggactggaagccagatttctgaggttttatttttatttatttttcagagagggtcttgctctgtcgcctgggctggagtgcggtggtgtgatcacggcccactgcagcctccaagtcctgggctcaagcgatcctcccgccgcagccttccgagtagctggggctacaggcgcacaccaccatgcccggctaaattttattttttatcgagacggagactctaccagagagtccccccacatgttggccaggctggtctcgaattcctggcctcaagcgatcctccggcctcggcctcccaaagcactgggattacaggcatgagccaccgcgcctgatttcagagtttttgaagcagaaagggaaacgtttccatctagagggagggcggacagacaggacgcctgggattctgggggaatagggtctgggctctggattttttaggtcctggagagtgacactcaagaaccgaaggggacagggtgaaggactgaggcctgggttccgagtggggcggctaggaaaggaaaaggctaggtgctccctgacccaggtcttctctacccgttgctttccagccatgcctccgccgca

SEQ ID NO: 21866 - DNA, 2300 bp, Homo sapien
ctcctgtcatcacagtggccacaggctcttcataccaggctcctcaccttccaacaccccaggcccatacctgcctcagggtctttgccaccctttctgccgatgtcactctccattccatgtctcttctcaagtgtcaccttctcagtgacgccctggccactccccagcactccctacgccccttactctgcttgatttttctccatcttcttttgagatagagtctcgctctgtcatccaggctggagtgcagtggcgtgatctcagctcactggaaactccgcctcctgggttcaggcaattcttctgcctcagcctctcaagtaactgggattacaggggcgcaccagcatgcccaggtaatttttgtatttttagtagagacggggtttcaccttgttggccaggctggtctcaaactcctgacctcaagtgatccactcatctcagcctcccaaagtgctgggattataggtatgagccaccgcagccggctcatttttctccatcttctgactcactgcattcaacatttacttgtgtgtttgtttactgcctgtccccgagagctgggactttgtctggttcactgctgtggccccagcatctaaaacacttcctttgtgcaaagaaagtacttatgacatatttatggcatggatatctctgcatggaatttgacaaaccttttctgaggcttcacacacactgttcctccctctggtgggaatgtcctgccctagtttttcccaccatcctttaggacccagtgggaggccttcctctttggtgaggccgtcccagacctcctcatcccaggcagccagtcactttttttaccaccctcctgctgggtccccagcatcaccagcccagaacaggttataactctttccttctgaacatccgtccctgcagctctctcctactagttcctgccatttaacaatcgtttcctgaggccttggtatgggctgttccccactctatccacctggtgaccccctactcatccttcaagacccagcacaaactctgtcctctgtgaagccaccaccctgaagccccaggctcccagccaggtctctctccagcttcccctgccccagcacctcctcctgttactgccctagaagctgactgcagtcagctgccccccagggtatctcccttatctgactgggaactcctcaagggcaggtatgatcttggggtccgcagcagaggacgtgtgggtgagtggatgatagtggccccaagaccctgatctccctccccaaagccttggcctctgctcctcgcccacctggttgacccgttcatttttttttttttcgagagagagtctcgctgtcacccaggctggcgtgcaatggcgtgatcttggctcactgcaacctccgcctccaaggttcaagcgatcctcccacctcagcctcccaagtagctgggattacaagcgtgtgctatcacacctggctaatttttatatttttggtagagatggggtttcaccttgttggttaggctggtcttgaactcctgacctcaggtgatctgcctgcctcagcctcccaaagtgctgggattacaggtgtgagccaccgcgcccagcctgaccctttctttctctactggcaaaactcctgctcctttttaaagccaagctcatgtcacctcctctgtgaagtcctcgctgactccccaagcggtcagtgtctctctcgtatgggctccccggcccctgcactgctctccatcacaccctgaccactctgggcagtggcccccctccccacccactgactatgggctccttgaaggcagggcctgggtctgccccatctctgtgtccccagcaatgctgggcatgagtcagcctcagaagacatctgctgaatggctgcaaaccagaggaaatatctccagcctcaggctgggacccctcccctctctcctcccacctctgacttcataccactcaccctccagagtcttcaatgcccactattacttcacacagttggcctgtgacaggcaatcaggtcatcgtccacggctaccaggtgtttcatgtctactgtgacttccaggaccacaagcccttttgcgcccaccatgtcttcacctaagagatcttcaaagcccagtatgtctctggcacccagtggatcctccatgcccactgcggatcccaagcctcctgcctccttgaagtccaccaaatcagcaacacccaacagatccttagtgcccaccaaaccagcgacatcccgtaactcagtcatgagcccaag

SEQ ID NO: 21867 - DNA, 2300 bp, Homo sapien
attctaactttaaaaaataacctcttacgatgtgccaggtgctgctcaaagttctagagtccatggtgaataaaacaggcaaatgttaagtgttaaagacagcgctacactaatctgaaatctgatcctgctctaagcattgagaacccaaagtgaaaaagggcgactccattcttaccctcatgaagctttcatgaggaaaacactcaaaacaaggaagcaaagaaagttcagattgtgataagaactattaatataaatgcagagtatggtgatgtggtatgccattgtcattatggaaaacttcaaacccacaggagtagacaggacaataacgtcccatgtactcttttttttgagaccaagtctcgctctgtcgcccaggctggagtgcagtagcgccatctcggatcactgcaagctccgcctcccgtgttcacgccattctcctgcctcagcctcccgagtagctgggactacaggcgcctgccaccacgcccggctaatttttttttttttttttttgtatttttagtagaaatggtctaggatggccaggatggtctcgatcttctgacgtgatccgcccgcctcggcctcccaaagtgctgggattacaggcgagacccagagtctcgctgggtggcccaggctggagtgcagtggctcaatctcgactcaatgcaacctctgcctccagggttcaagtgatcttcgtgcctcagcctcccaagtagcaaggattacaggcaccccccataacccctggctaatttttgtagttttaatagaggcagggtttcaccatgttgcccaggctggtctcaagctcctgacctcaggtgatacaccagcctcggcctcccaaagtgctgggattacgggcgtgagccaccgcgcccagccccatgtactcttcatgccagttacaaccaccaccaactcatggccaatcccgatttatccataactccagtcaaatgtgtaagtgctattatggagagatcaggaaaagcctctcagattgacatctgtaccaagatatgaatggtgagcacaagagtaggtattcaaaggtcagagggaaaagcattttcaggcggagggaacggcaagagcagaggcccgagctggtaaagagtttggggtaaggtggagctggacagaaatggagggaggaggaagtaggtggggtcagaaagataagcacggccagaccaggtgtatagccctgaggccatgataaagatttttggattttttttttttcctaatgggatccctttgggggagttttaagccagaatgtgacaaagtcacttacaggaagactggaatgtagccatagttgaactctaacatcgtctatagaaccatttcccgtctccagttaggttctaggcatactaagctgctcttgcttcctcaatcaaaacatgcgcttctatttttttttttttttttttggcctctgggccttggcgcttgcagttcattctgccagacccattcccattctagttggctcctattcgtacttggcttaaggatcaccacctcctggaagtctttctagaaccagaggccggggcaagcgcctcttaggctcccacagccccctgtgttcctcactccaggtctgaccttctgggtagtagttgtctaattaggtgcgtatctccttcgactggggtgccgtgagtacaggagtatggttcactgcagaaaccacagaatccgccagcatggggcctgacacctaggagatcaataaacctttatcctggttgggaggggtcctggccctcgtgccctctctcaggatgcaaactgatcccctacgaagacaaggctacccacttcgcgtcagtctgcagtccctgcgcgcatgcgctttgctcaggttgcccccgccatatgctaatcactgcgctctggagtaaggcccctccggggaatatgcaaatcactccttccagtgcgggaggcctttcattgtcccgcgctaggattatgcaaataagcaggcctcgggcccaggatccagtccgaactagcgccctccacccccagcgcatcccagttttgtaaggcgcgttcctgccccgcacacgcacgcgcgaacccttcagcttcttgttcctttgggccgcgggctgtaccaagtaaacccaggcagcgaggggcaaagcacggcgccccccgcgcgggtctcgtcgacggcccgacgcgcatagcccctcttcccacagcgctacaggactagtccgtctcgccgcgcaagcgccctaggctcttca

SEQ ID NO: 21868 - DNA, 2300 bp, Homo sapien
caaggttccccttcagctggagcaggagacatctgtcagagcacagagtgagcgggcctattggctcctgcgggaaaaggcaactactagttaccccttggaccagtattccaaaggcagatcaaacattcctctcccatctagcaaaagtcacagaatgtgagccctggaaagaggattagagactatctcttcccaagtctacagaagctgggaagctgaggactgaaaaagaaggaagttgctcagggctatggatctggggacacaggggcagttagaagcttgggctctcaggacagagaggattgctggagccatcgtcctggggacacaggagttgataggagcttggaccctgaggacagagaggatgctgggagccatggtcctgcttcacaggggttgatgggagcttggacctgaaggacagagaggatgctgggagccgtggtcctgaggacacaggagttgatgggagcttggaccctgaggacagagaagacactgggagccatggtcctgggacacaagggttgatggtagctatggttttgaggtcagaaaggatactgggagctgggtactgaggacagaaagggtgtgtgaagctgaagtcccttgtgggactggatgtaaaattttttagtcggaataaaaagtaaggattttcagccaggcatggtggctcacgcctgtaatccagcactttgggaggccagacagatggatcacctgaggtaaggagttcaagaccagcctggccagcatggcaaaactccgtctctactaaaaatataaaaattagctaggcatggtggcgggcgcctgtaatctcagctactcgggaggctgaggcaggagaatcactggaacctgggaggcagaggttgcagtgagtcgagatcgtgccactgcactccagcctgggcaacagagcgagactccgtctgggcggggaggggggaggggggaaggaaagatgttcataattggcacttctggacctcagtttgcctgacaaatgggcatgagagaggtcgaggccttctttccatggtttctcactctttctgggtcccataggtaatgatcccgcatcaggtctacagggtgtcacagaagtgggctcagggaaacccactcccaggagggagaagggacctaagtctggaggggtgagtcaccctcaaagatggggagagaggaagggcagaggcaaatacatgcagagagagggagagaggctggggcagggagacagcagggaggagaggggacgccagggcttggaaggtgttcacaggagcctctccctcctgggacccaggattcaggcttccttccagttagttcactttcagggggcccctcccggagaatgacgcggaaacacggggttttcaggtcaggacaggagagagggagggagggaactgaccccaccccactcctgagccccagcctcgccctgccctgggagatccttgacctgcctcgacctccggaccctccggacctccagctgcagcctcccctgtcccggtggctcagctcacagcctctcgctagactccagacacccacctgcccgcagcacgcctctcacactcacctttcccacgtcgcactccctcccttacgctcccccgtcacgctggccacgctctcccttcgcacacaccgcaccccacgacgcccgcgcccccaccctcgcacagcctccagcaacaccctgccaccctcccctccgcgcagcgcaagcaccctgcatgccagcaactccgcaccctcgcgcgcagcacctgggcccgcacgcagcaccctcacccaacaccctccatttcccgcgctcaccgagatcccccacctgctcccacgccgctgtcgccctcccgcgcaccccttcccgccctcctcacccctctcctctccagctttcgcaccccgcaccgttcccccaccgtgccgtccccccgattgtctccgggcctctcctccgtctccccctcccctccccggccccgccccggcctcggcgccccgcccccgggcgggcagggggcggggcgcggggggcggggcgggcggcgcgggcggtgcaggtgccgggccgggagcgagcggcggcggcggcggcggcggcaccatgggccgggcccggcgcttccagtggccgctgctgctgctgtgggcggccgcggcggggccaggtagggtcgggggccggggtcggccggccgggctggggcggggggcgcgctgtggtgacagcccggcagcctcggggccgcagaggc

SEQ ID NO: 21869 - DNA, 2300 bp, Homo sapien
atgagtcagggccgagccagccccttcaccaccagccggccgcgccccgggaagggaagtttgtggcggaggaggttcgtacgggaggagggggaggcgcccacgcatctggggctgactcgctctttcgcaaaacgtctgggaggagtccctggggccacaaaactgcctccttcctgaggccagaaggagagaagacgtgcagggaccccgcgcacaggagctgccctcgcgacatgggtcacccgccgctgctgccgctgctgctgctgctccacacctgcgtcccaggtaggggctgggtcccgaacgcctgcgcctggaacagggtctaattgagggggttgggggttgtcagaggatgagttggaggaatgcggttcagtcctcagcatcctccctaatcaaataatagtaattctcgtgctttgtgcaacgccacgcggcgcagtacctggcactcagtagctaaggaaatattagtggagcaaaggcatttagctttacataatttagtgagtgcttttttttttttttttttttttttgacagagtctcactctgtcgcccaggctggagtgcagtggcgcgatctcggctcactgcaacctctgccgcccgggttcaagcgattctcctgcctcagcctcctgggtagctgggattacaggcgcctgccatcgcgcccggctaatttctgtatttttagtggagaccgggtttcactctgttagccaggatggtctcaatctcctgacctcagatgatccacctgcctcggcctcccaaactgctgggattacaggcgtgagccaccgcgcccggcccaagtgttctttttttaaatggagttcttcgaagcctcttccttgcaatttcaaactaggcgatgggactttattaatttcgtttcgcagaggaaactagggcacagagaggttagataactggcctaaaatcacacagccagtgcttgaatacgcaggatctgaccctgcagcgccccccagcgctctccacgctgctgggtctccccctctgagaaacggggggacaggacccccttttacaaaaggcccaaagggaggctgactgagcggcgcagagccagtgctggagacccgggactgtccctcaggacctttccctctcactgaggcgactctcacttacttccccggaaaatgtggggggctctgggtcgaggaattcgagaaggaactgagtcagggcgggtggccacagggtgttggggccgcgatgaataacccggaaagcgctcgagaccgcgggaggccgggaatgagtaacagctccgggatactccgaacgcgcagctggaaagggatgtccgggaaggcccggaggtcggggaccgggcctagggactgggctgcaatctcggggcggagcctggggcggggagagagtgtcggggaggagccagagggcggggctggaacctcaaggaagagctacgggagaggttacagaccgaggaagagctaggagcggggctagaacctcgaggcggagccagagggcggggttataacctcgaggcgtaaccagagggcggagttataacctcgggaggagctagaaggtgggactagactcttgaggggcaggattataacctcggggaggagctagagggcggggctggaacctcaaggaggggctaggggcggggttataagcttggggaggagctacggggctgggctaggacctcaaggggccaaggggcgggggttacgacctcggggaggagctacagggtggggctgaaacctcaagaagggactggggcggagttatgacctcaggggaaaactaggggcggggagagctaaagggcgaagttagaatctcaaggaggagctagagggagggactaaagcctcgaggaggagctaggggcggggttatggcatcggggaggagctagggggcgggaagataaggtcaggaagagctaaagggcggggctagaacctcgacgatgagtctggagcggggccaaaacctagttggagagctggagggcggagacagaacttcgcgggaaactagagtatctaacaatagaaactccggagggctgatggggccgggcctagaatttgggaataaattagtgggccgggagaggctctggagccgggtagaaccagggggagtgagtggagggatagttccattagggcactgggagtgacggtataacataaagatcgacgcgggtggggcaaggctagaacgtccccagcagaactggagaggcgtaatcgacc

SEQ ID NO: 21870 - DNA, 2300 bp, Homo sapien
acaaagtgagactctgtctcaaaaacaacaacaacaacgacaacaaatcacatagtataatcattattacagcagtagaagtagctaccacttactcatcccctacgactctcttcctctcctaatctgttccagccacactgacatctcttctgttcctagaatctcatcaggcttccacctcaaggcctttgcactggttgttcctgctccttggaaaggttccctgcccatctgccctacttcttccctcactgcattcagcctctgcttgaatgccacttgctcagggaacccctcctggatcacccacctaaaacagctcacacctcatttgcacccagatacttccttcagcctgctttgttttctccagtttgcttatccctctcagacagtgaaagattagataacacatatctgctccccactgtcaacacaacaaaaggtgggaactttgctttgcgtcctgctgtgcccctagctcctggaccagtgcccagcacaaagtaggtccttggtagatgttaaaggaatgtgttgagccctccatttcggccagcagctattccaggcattgcacctacattaaattgctctgtttagttagatgcatcctaagacggggagacaattttatctttagtattttattttacttaaaaaaaaaaaaaacttggccaggtgcagtggctcatgcctgtaatcccagcactttggaaggacaaggcaggtggatcacctgaggtcaggagttcgagaccaccctgaccaacatggtgaaaccccatctctactaaaaatacaaaaattagccgggtgtgctggcgtgcccctgtaatcccagttactcaggaggctgaggcaggagaattgcatgaacccaggaggcggagattgcagtggccgagattgcaccactgcactctagcctgggtgacagagtgagacttcgtctcaataaataaataaataaataataaaaagaaagaaaaaacttattataagccttttcaaacccacagaaaaggagacagaatggcataatatgcccttatatactgattacctttatataattgatacaaccatttggctattttgcctttattttctactcaagtatttatttatttattatttttttgagacagggtctcgctctgttgcccaggttggagtgcagtggtgcaatcatagctcactgcagcttccagttcccaggttcaagcggtcctcccaccttagcctcccaactacctaggactacaagtacgggccactgcacccagctaattttattttatttttaatttcttttggaaagatgagggctctttatgtttcccaagctgatcttgaactcctggccccaagtgatcctcctgccttggcttcccaaagcattggtgttacaggcatgagccacctcatctgacctcttctaaaatattataaaataaatacagacatcaaaatgaaaacaaaagaaaaagaaaaaacaaaacaaaaatccccaaaacaacaacaacaaaaaatgcagacatcaataacattcaccactaaatactctagtaagcatctgcaaaaacaaacaaacaaacaaaaaccagaatcccacctaagcatacagccattgtcgtaacagtgatatctacttttttggctgaagtgtctttttttttttttttttttttttctgtgagaaggagtcttgttctgttgccaggctggagtgcagtggcacgatctcggctcactgcaacccaacctccgcctcccgggttcaagcgattctcctgcctcagcctcctaagtaacacacacacgccactacgcccggctaatttttgtatttttagtagagacggggtttcaccattaagtgttttaatgtaggtgcaatgcctggaatagctgctggccaaaatggagggctcaacacattcctttaacatttaccaaggacctacttcgtgctgggcactggtccaggagctgggggcacagcgggaagcaaagcaagggttaagtgttttaagtgtttaagagatgcatatttcaggatgcatctctagataaggacattttccaaaataccagtatccctcctgacaaaactaacaaaaatcctgttagccaaataatcagccacattcatatttaccgtcaaagtttttatcctcattttacagcagtggagagcgattgccccgggtcccacgttaggaagagagagaactgggatttgcacccaggcaatctggggacagagctgtgatcacaactccatgagtcag

SEQ ID NO: 21871 - DNA, 2300 bp, Homo sapien
tgtttgtctgagtcttgctttccttcagtgactctgttgttttgtttcgtttagagacagaatcttgctcagtcacccaggctggagtgcagtagcatgatcacggctcactgcagccttgaactcctgggctcaagcaatcctcccacctcagcctcctgagtagctgggactacagatgtgcaccatcatacctggctcattttttttttttttttaagagatagggtcttggccaggcacggtggctcacgcctgtaatcccagcactttgggagtccgaggtgggcggatcacgaggtcaggagatcgagaccatcctggctaacacggtgaaaccccgtctctactaaaaaatacaaaaaaatttagccaggcgcggtggcaggcgcctgtagtcccagctactcgggaggctgaggcaggagaatggcaggaacccgggaggcggagcttgcagtgagccgagattgcaccactgcactccagcgtgggagacagagcgagactccgtctcaaaaaaaaaaaaaaaaaaaagagatagggtcttgctatgttgcccaggctggtctcaacctcctgggctcaagcaaacctcctacctcggcctcccaaattgctgagattacaggcgtgagtgagccgccatgcccagccacgaagtaactctgtatttgaggctctttctgtgtctttcccttctctcttgggccaggggtgcgtgtccatgcattttgggaaggagtccttgctgtctgctggtctgtgtgctcggtgtccggggaagtctgagaaccatgttgttcactctcttcagctctgtgtgtttgtgtcagtcagtgagagcatgagtgagtcgtgtgtcttttgccctgcacctccctttcacctgtggcttaagaactctgtactatgcggccaacagcccactcttccccagctctcagggtggctctgagctagtctattccccttctgggcctctctctccttagttgttctcagaggctcctttccagaactggcctgcagatggtcaggaaaatcctctgagtagcgttattgtaaattccctacaagaggagaatggagaaggccctgtggagcctggcctgggcagagaggaagcccggaggggagacaggacagagacacttataaaggacaagaaggggccgggtgtagtggctacacctgtaatcttagcgctttgggaggcggcataacctgaggtcaggaggtttgggaggcgaggcaggcggataacctgaggtcaggagttcaagaccagcctaggcaacatggtgaaaccccacctctactaaaaaaaaaaaaaaaaaaaaaaaattagccaagcctggtggtgcatgctagtagtcccagctactcaggaggctgaagcaggagaatcacttgaacccaggaggcggaggttgcagtgagccaagattgtgtcactgcactccagcctgggtgacagagcaagacactgtttcaaaaaaagaaaaaaaagaaatcaatgactaaattattgggcttacaagatagcagatcagcctcccgagtagctgggactacatgcatgcaccacatctggctaatttttgtatttttagtagagatggagtttcaccacattgcccaggctgatctcaaactcctggcctcaagtgatgcactcgcctcggcctcccaaagtgctggcattacaggcgtgagccactgtgcccaccagcaatgaccgaatttgtatcatcaactttcacacttctctggggaactgacagtcccctgggtggagggtggagtggtagcagggccaagcccttggaaaccaatctgtgaatctgagactttgtccttggggggtgatggagaccatggaggattttgaacaggtcttggtgttagaaagatctctctggagtcttcaggggaactggagggcccagtgtgagtgggtggtgaccccatgagcagctggggcttggggtccctgctccacctccgggccccaccccctgacatcactgtcgcattattgcaccaggtctggctgaccaataagctgctgcttgctatgataatgggtcctagcaacggtgtctgaccttggctaagagggaaggagatcctatcagtggggagagtgtgaggggagagggagagcctgcagggcaggtgagtcccccagggctctctcgctgggcccctgtgcgtgggcggagcaggagcttatggtctaatccggaccccctcagcccaaattccaaccactgacttgtctgccccttgctgcc

SEQ ID NO: 21872 - DNA, 2300 bp, Homo sapien
caccctagactgatgtgtgaacagctgggaaaactctctaaggacctgtaaacagatactgaaatggtggagagtgggttgcataggtagccagacattatataacatctcaaatagaataaacactggagacaccttgaaatgaaattcactgtgagggaaggcagaccgtcaggaacggaagacagacagacactgaaatgtagtgggataccaggtgaaaataggcccttgagtgttggaacctcaccatgacatacactagtaagtggctggagccccaccatgacatacactagtaatgactaatcaagagtagctgttggactgaggatcacattgctggtttgtaagcaaatgccttgctgcattttggtaaggagaatatcctatttttatgtgaacttgcccctgtgagtttatttatgttggagcattttaatagttgggaatagttttggctgcaagtaagagatagatgtgtatttgtttttcactgcctctcgaagtaggcaattcaaggttaacgtggaaccccccaaccttgtgtcttgttttattgtaccttccattaaattgccttacagcccaggatagctgcttgagctccaacctccacacccacattcctgtcactgggaggaaggggcagaaggcatgtgccagagtctgtgaagggaagtttctggaagctgccaagccacacttctagtgtcataccatagccagaaagtacttactcacatggccacacctaactgcaaacaaggatgagaagtttgttctggatagccatgtacctagctcagaactgagggttttacttttttggaagaagtcaggagtggatgttgggaaccagcttgcagttgctaccacaggcccagagctctgttgaaaggaagggccttggccgggcatggtggctcacgcctataatcccagccctttgggaggctgaggcaggtggattgcctgaggtcaggagtttgagaccagcctggccaacatggtgaaaccccatctctactaaaaatacaaaaaaaattagtcgggtgtggtggtgggcatctgtaatcccagcttctcaggagactgaggcaggagaattgcttgaatctgtgaggtggaggctgcagtgagccgagattacgccattgcactccagcctcggtgacaagagcgaaactctgtctcaaaaaaaagaagaaaggaagagccttggttgggcacagtggctcacatctgtaatcccagcactttgggaggccaaggtaggtgcatcacctgaggtcaggagttcgagaccagcctggccaacatggtgaaaccccatctctactaaaaatataaaaattagccaggcatggtggtgggtgcctgtaatcccagctacttgggaggctgaggcagaagaattgcttgaactcaggaggcagaggttgcagtgagccaagatcaggccactgtactccagcctgggcgacagagagactccatctccaaaaaaaagaaagaagggacttcgtatagtctaggatatgccaagtagagtaggaagagactctgtcatcctgaaatcccctcattccctccataggtaaccatgtctgagtctggacacagtcagcctggactctatgggatagagcggcggcgacggtggaaggagcctggctctggtggcccccagaatctctctgggcctggtggtcgggagagggactacattgcaccatgggaaagagagagaagggtgagtgtctggacccaggagcagcattcatgtatctatttggttccacgcacctgccatgtgccaggcactaatccagatgccggggatatatttgtaaacaaaacctaccaccctcatggataaagaaggtggagagtgataaaggagactgttctagataacatggtcagagaaggtctctctgaagaggtgactttttagcagagacttgaaggagatgagagaataagccatgccagcatctgagatgaagagcattccagacagaaagaacagcaagcgcagaggccctgaggtggcccatatctggcgtgttcaaggagtagccataggaggccaggatggctgcaattgatgaggaaggagggagagagataggagatgaagtcaagtaactggggccaaatcatgtaggacctggtaggccttggaaagaactttgtatttcactgagtgaaattggcattggagagtttgagctgagaggtgccatagctcatgttttaaagggtcatgtcataataacaacaactgttactct

SEQ ID NO: 21873 - DNA, 2300 bp, Homo sapien
ctaatttttgtacttttagtagagatggggtttcgctatgttggccaggctggtcttgaactcctgacctcaggtgatctgcctgcctcggcctcccaaagtgctgagattacaagcgtgagtcactgcgcggaccaacatctgttaaacaaattaggggagaagattatagtgatgtatataaagcagagagcacacagcctggtacacagtgggtccaaggtcaatgccaggcctcctctttccctcttttaagaaaattctacctctgagggttgccctgacgtgaaactggcaatcgtgagtgatctggggttgagaaattcagatatggcctgagctgaagaagtaaaattggacactgatagacataatacagagatggcctgtcatgtgtatctttatcaaacacccagaatctttccccagaatccatcaacagtggactcaagtcattctgggtgactggtgtttctacctgtggcagcctggagaggtggctccacctggtactggtactgggacaatgacagtagggatgaggcctggaggggagagggctgctcagaatctacaactatcagcatggtagaccacaaaataatacacagagacaacacacagtaccattaggcaacaggcactgttctatgcactctcacccatttaatgctggcggcaatgttgtaagtaaggttataccacacccaattcacaaacagggacgtagaagtagagagtattaagtcacttggtcaagctcagccgctatttatatgaactcaacacatgctcttaactccaatgctttattataacagcagctccagaaggaaaccgggaaccagtgctttaggaaaggaaaatgggaaccagaggtggaaacttacttttattgtatacagccagagaggtttgaattgtgtatgtacatgtaatacctgttcaaatataattttaaaaaacttttttttagaccagccacggtggctcacgcctgtcatcctagcactttaggaggccgaggcgggcggatcacttgaggtcaggagttcgagaccagcctggccaacatggcaaaacccagtctctactaaaaatacaaaaaattagccaggcgtggtggacgcctgtaatcccagctatttgggaggctgaggcaggagaatcgcttgaatttcaggaggtggagacggcagtgatccgagatctcgccactgcacgccagcctgggtgacagggcgagactccgtctctaaataaataaataaaataaaaataaataaaatttcaaataaaaagctagaaccttcccatccacccactctgcccactggggaactgccgacccttccgaatgcgcatgcgctctccaggccgcgcccgtcgcccaatgttcctctttggcgcgcgcaagactccgcccacgtgtgtttaaattttcgaccctggagcggattcccttctccaacgcggccttcgagggttttaaacatagttctgtctcagactattctgcatctcccaggccttaaggataaaactgacactggagacccttcagggtctgacctgcccattctgctgcctcacctcccacccaggtggaccctgaatccaagccagtctagacctcttcccccggggtcttcgccgcctttgcttagctgttccctggagtaccctcgcctgcctgtccttcaaggtccaaccggacccgcgccctttcctaagtgatttgaggccctggcagtctctccacaggccggggtgtcttccagggcgcacgccaagtctgattcattcatgtgttcttggcactcagcccagaacagtgaaattcctccctgtcgtcccaccccactgcatcccgccaacatcaccgaagaggcacaactcgaaccccagatccgggccgctctccctcctgccggctcctcggcgtatccatttccctactcatctccccaccctcaaccccccaaccgcgcgcacgcgcattgagtcagagccgcggcgtcctcccgcctcccgctccggaacccgcatgcgtgctgaagccgaccgcctccatccacgcacgctcagcccggcgagcgcattcagttctcgagctccagccctcagcgcatgcgcaggacgagtcgcctgagggaactgatctcagctcgggcccgcgttacatcctcctcctcttcttccttcggcccagctttccttaggggctgcaacccggacgccgaggccggtttcggagtggggagtgcccattttctctccttcccacgttcctggccccc

SEQ ID NO: 21874 - DNA, 2300 bp, Homo sapien
ctcaaaaaaaaaaaaaaaaaaaaaaaagacaaacgcggaggtttccagatcaggagagactgagacaggaagcaagtcccaaagaaccagagaaagagccggagagggaggagagagacgcagcgagccgggcggccagtgggcaggggtgcccaggctgcaggctcaggagtgcccggcggctgcactttccccaagtggacgcatgtgtggtgtctgggcgcgcccgggtgtgtctccagccctctcccgccaagtctcgccgagtgggtaattgtgtgtgccgaggggcggagcccccgcaagggttgtgtttttgccactgggcgtgtccatgtgtatggtttggtgtctctgggtgtgtttgtgtgggctgccttggtgtgcagtcagacatgtctgtgcgtgtctcgcttccctggggctggtgggtccagggtcccacacgacctaggacacaaggagggggagggttgtgtccgcaggttccttgcagaggggtgtgcatgaggccaagggcagtgtcaccagttcagtgcatgatgctgggaggtgatgtgcgtcaccaggtcagtgcatgcctgtgtgtctccacaggagggtttgatctgtgtcggagcgtatggtgtacagatccatgagtggctcgtgctgcgacacatggagatgtcctatgttgtgtgttgctctgagagtcaccgtgcacattccacactggcatttgctgtatctcacgtcagggtccatgtccctgttgggggcctcttccttctcagcccccagcacccaccctgagtgccaaccaccccaagtgtcttgtgtttgtgtagctgtgtgttatgttgtgtcagaggatacacccccctcccccgatgctggtgttgtgtgggtggcggtagacctcagtgtcagtagtatcagtgagtggtgacatctggtgttttatgggacatgtggtcgtttgtggaaggttgggtgtgttggaaaacattgtgtttatgtgttttgcgttactgtgtgctggtgtattactccgcgtatgttgttgtgtggccacgcatgttggaatataacgtgttgggttgtgtggaggtattgtatgtcatgtttgggtgtggctcatggctcagaggtgatggtgtatgttgcgtttgtttttttgtttttgcttgttttagagataggatcttgctatgttgcccaggctggtctcaaacccctgggctccagcaatcctcccacctcaacctcccaaactgctgggattacaggcatgagccactgcacccagccgtatgttgcatttgggcactggggtctatgaaggtccaaccccatccccttcccccagggcatcatcctggatgttgtcctgtgtggccagaatataccagaatcatcttgcttcaggcatgtgcttcttgggtttctccgtgtgtcgctgtaccttgtaggtctctgcatgcatccactcagcttgtcctctgaccatacatttgaatcgcaccacacatcagagcatgctgaatcagtgcgtgttttgaatcatcactgcgagcacttgtgttcgagtcaacaggcgccacaatgtatgtgcaattctctagctctgggtgattgggggctactataggtatgtccctaaatgttgtgtgtctacacgtattgggtttcgttccaagggtgtgtagtgtttaggaaactgggactgcacagtgtttgtgtcggtgtgtggtgtgtggcatcagggcgtcactactttaatatatattgtgtgtttgtgtaacacctggtgtatgttgtgtttgtgtggccacagttgtgcatcgtcctatttgtggtgtttgggtgtggctctttgtgtcagagaaagttgtgacaactttgagtgtaatatttgtgcctgtgtgtggacggtgtttgggtggctgtgtgtgccacgggatactgcctgcttgctaagtgctggtgtgtgtcacaccatgtgtgtggtgtctgggtgtggctgtgggtttcagagcttgctgggagttgtgagtcactctgtgtaggttgtgttgtgtgccctggtgtgttagtctccgtcttgggctgtggagtgtccttcggtgtctgggtgtggtgagtagaggtgtgtgtcacaaagtacagaccattgtgtgtgacaaagcccatcgtgtgtctgtgtgtgtctttatccacgtggatggacgtctctttcttgctctgccccaagacacaccctagcccctccttattctcaaaagggggagctggggagcctccccctaccctggggc

SEQ ID NO: 21875 - DNA, 2300 bp, Homo sapien
ttttgagacagagtctccctctgtcgccgcccaggctggagtgcagtggcgcgatcacagctcactgcaacctctgcttcccaggctccagcaattctcgtgcctcagactcctgagtagctgggaccacaggcgtgcaccaccatgcccagctaatttttgtatttttagtagaaacggggtttcacctgttgcccagactggtctctaactcccgagttcaggtgatcctcctgcttcagcctcccaaagtgctgggattataggcatgagccaccacccctggcctccatatatgattttaaactgtatgtttttgtgatctcattttcctgtatctctaaacatcgcataattgtggcctctggttttatttgtgcttctgtgatttgggacctctctgggtatgattttctgtgcatctggtccctctctgtgttgatatggttatcatacaggcacaagcatcctcacagacatacgctttgtgtctgtgtgattttccatgtgtgaagtgctgtgccttagttagggaggtttatattgcagggtccagatgcgtacttgttttgtgtgagaatgtaaaactctgcctgggtgcattcaggatattctgtgtatatttgtgagacttggatgaacctgtgtatgtgttgttattgtgtgtttatgtcagtttgtgtgttgctggggctgatgtatgggtttacagggcactacaggaccacacttcactctacctgtcctggagtgcatgtttcttgtcaggggtctcttactgtgctgtccactttgtgagttaagcttggggaaggatgggcagagcaagaatgaatcacttttccttcctattctaagtcatagctagggagagggcttcctggaagagggtggagacctggagtgtcctggagggaaaaaactggactgtcagctgcagagaggtcattactctgccatgagacagacacagctgtgaccagctgcaatagcagcacctggtctctcaaggcgtgtcttccctgggagcagaggggccaggcccgtgtgcctgtcatttgctgggtggagctctgagttcctgggacaggctcacactggccctgctgactctgccacgcctctctccccagggtcccaagccctgcagtgctacagctttgagcacacctactttggcccctttgacctcagggccatgaagctgcccagcatctcctgtcctcatgagtgctttgaggctatcctgtctctggacaccggtaaggagcgggagccgggggacagggatgagagattagggaggaaaaaggggggagaggggagcagaaagggaggggaattgagtagaagatgaaaagataaagatagaaagatggggagggagaggaagaagaggaggaagaaaaagaaaagggtggatgagggctggggcagtggctcaggcctgtaactctagcactttgggaggcagaggctggcgaatcacgaggtcagaagtttgagaccagcctggccaacatggcaaaaccccgtctctactaaatatacaaaaagttagctgggcgtggtggcgggcacctgtaatcccagctactcgggaggctgaggcacgagaatcgcttgaatccgggaagcggaggttgcagtgagccgaaatcgggtcactgcactccagcctggcgacagagcgaggctccgtcctccgccccacaaaagaaaaagtggatgagggacgagcggtgaggggaggaaacaatggggaagcaaggaagagaaggtgggagaggcgcacagggaggaagagtggaggaagagaagaactcgggggaaaaggtctgggggtgagaggaaggagggaaggagggaggggaggaggtgtaggtgaaagtgaaaggatagagggaggaggaagaacgctgagactggagggagaagggtttcgggaagcagagcacgagccccgatcccgcccccagggtatcgcgcgccggtgaccctggtgcggaagggctgctggaccgggcctcctgcgggccagacgcaatcgaacgcggacgcgctgccgccagactactcggtggtgcgcggctgcacaactgacaaatgcaacgcccacctcatgactcatgacgccctccccaacctgagccaaggtgcgcgggagagcggggctgggctccgggagggacgatgagaggcctggcagcctcggggaaggcgtggcctccgctgggcgcctgctcttggcgcgctaggatcccaacccccgagacgtgctaggcgcgggctctggcgca

SEQ ID NO: 21876 - DNA, 2300 bp, Homo sapien
aggagattgcaatagggaaagagactgaactcaactccactgaaacaaatatgctagggtggttaagccctaggtgagttaatggaaaaatattggaggacaatgggggaggtgggtcaatgggatgtgtccatcacatggagttattctgtcaatgggatgtgtccatcacatggagttattcctgagtctgcaaatgtttttctctgtgattgggccatctgagtttgctgattgtcaattatcaaagtgaggctcctaccctcccacagagactgggcgataggggtgctatctcccttgatgatttcaaagggataattcccaggtccttgaaaaagacattcctgggttgtaacgctggcaagagaccaggagaagatttacctacatttcaaaggcgcagagaaggccgggcacagtggctcacgtctgtaatcccagcaatttgggaggccgaggcgggcagatcacttgaggtcaggaattcaagaccagcctggccaacatggtgaaattctgtctctactacaaatacaaaaattagccaggcatggtggcacatgcctgtaatcccagctactcgggaggctgaggcagaagaatggtgtgaacctgggaggcggagcttgcagtgagccgagatcacgccactgcactccagcctgggcaacagagtgagacgccgtctcaaaaagaaaaagagagggggtgcggggggagcagagaaagaatttgcaattatatttggccctctgtgtctatggggttctgcatccacaggttctacctccacgcattcagtcaactttggataaaaaatattttgaaaccaaaaaacaataaaaaaaatagaaatagaaaacaataccgagggatgactgtacaagttttctaaagtaagtgtcctacaaaaagcgtgatccagggccgagaggaagaaacctgtctaaagtttagtcgatctgaggggaccattaaggctcttttggtcaccagtgttacgtggactctgccatccagatgtgggtctgagactctgggtgtctgcacatggctggtgcccactctgtggctagtatccactagcctgatccagcaggcagcatctccaggcagcaagaagtgagacaaaccaggaggtgctagcctggggtctctgcctcagcaccaaccacctgctggggcctcctctggacctcctcacctgctgagtgtctgagcatccacatgtgtctgcctgtgtcctcgggggacagtgaccctctggttgtctgctgtatctccatcttcttgatttcattcatttaataaatgtttctgaaacacctgggggcatgtcgtgtctatcggggtgtccctcttcacctctaggtttgtctgtgtgactacacagtcacatctgttcacagcaggctgtgtctgtctttctgcatctcatgtgtaattgcttcctcgaaggcacactctctctctctctcttcctctctctctgtttctcttttgtgtctgtctctccctgtatgtctcttggtgcctctctgtttgtgtcttcattcattgattcattcgttcagtcatacggtatctcagacattcctggaggcccccgaagagttcacagcccggtaggggagacagacgctagcccagcctagtttgatcagggctgggagacaggaaggtgctggaggctgagggtgtgtggatgagtggggagatggggttcagagaaggtttagatgatgggacgatgaacgtgtctttgggtgtggagacatcccaggattggaagctgtgtgggtggtgtgtgttggggtagggggagggaagggaagtcaaaaggccatatgtgccaccctcagattagagcagagtgctgggaggggtgaaggaagaaggccaacaagacaccaatcattcaaaattaagggttccagacttctagttctctcctccctcagacccagaagtgtagatctccagcaactgaggatcaccctgtttccatcacgattacctaggaagagacccgcccacatagggagggtgggacgaagaaatactggccaggctgggtggccgggatgcttaggactcagtaaggagaaccagccaggcagcacatcacagcgggaggagctgtcccaggtggcccagctcagcaatggcaatgggggtccccagagtcattctgctctgcctctttggggctgcgctctgcctgacaggtacgcaaacttctgaatccagtagtgagaaggggcaggtggcctggactcctagatctgagggaggag

SEQ ID NO: 21877 - DNA, 2300 bp, Homo sapien
gagacagagttttgctcttgttgcccaggttggagttcaatggcgtgatctcagctcactgagattattgcttttctgtaatacttttactgagatataattcatatactctaaaactcacccatttaaagtgtacaattcagtagattcttttttatttctttgagacagagttttgctcttgttgcccaggttggagttcaatggcgtgatctcagctcactgcaacctccgcctcctgggttcaagcgactctcctgcctcagcctcccgattagctgggattacaggcacctgccatcacgcctggctaatttttgtattttttagtaaagacaggggtttcaccatgttggccatgctggtcttgaactcctgacctcaggtgatctgcccacctcagtctcccaaagtgctgggattacaggtgtgagccaccgtgcctggccgaattcagtagtttctagtttattcaaagagctatgcaaccatcatcacaatcaattttagaacattttcattgcccaaaaagacaccaatacccactagcaatcatcattttcagccactccatgggctacagggatcttttctgttattgcacttgttctatattcatatttcatgtaataaacatgcattgcttttgtaattacaaagtaaaaagaaaaacgttttaaaaaaaacttatgttgggattttaaattgatccaactgatttcactttttctgatgccacaatcaatttcttattgttttacttttaatcactcaagtaattccatgttctaatgcttttcggaccagatcgggagcattcagagtggtatagctgtagagatgttctaatgcttttcagtgaggagataaaacagaaatgagggaggtctattaagctaaagtagttcagtatttcaagaaagagtacgtcgctgagatagtagaaggcagccaaaaatctttcaaaataagtaataaaaatatttatttggatttagcaacattcagttaattgttgcagtttttaaatattcaaataactgatgataaataatgtcagaaatgaaagtgtccccctactcattccctatctacagaaatgaccaaagttaatattttcaggtattcttccagatttttctgtacactgaatgtatgtataaagacacagctattttatacagaaatgggatcatgctatccatataattctgccatttgccctttccacttcaacacattcttctacttcatttcatgtcagttatagatttaattcattccttttaacgttgaattattacctaacccagcactgttcaatgtagctttctgtgatgttagaaatgtttatatccctcttgtccaatacagtagccactagctgtcttggctaatgagcctttgaaacatggctagtgtaagaaactgaatttcgaattttatttaattttaatagatttaattttaaatagccacaaatagctatcatattggctagcacagactaacagtgtctcaaaaaacgaacattgaggttcttcagtattacaatgtgaattcttcagtattacaaacacggctttggtaagcattactgtacccacatctttgtctttcatgccagcatttttgtaggctagattcttgtatgtaaaaatgctggttgcttaggggtttgctttcacacttcgtgaatgctactacacaaaactgtaaaagagctgtagtcatttccacccactacgtgtgaaagctctcatttccccacattctcaacaatattgtgtaccatctacatttttagtttttgaaatttgataactgaaaacgaagtatgccatctgtttccgttatcagtttattgctctcacctccgcacgcactcttcaatatacgctccctgctaaagggattcccccgaagggttcctgcgcctacgcactcggagcacaggttacaacttccagaaacccttgggacgcgccgtcccaaacttgggtttctggcgtctcctgcgtttccggcccgggactacaattcccacaggtcactgggccgaatgagcgtgcgctcctgatccgctttgcgcatcccagtgattcttgggttccgcgtgtagtttcggaaggagacatcgaagcagggcgaggcgcagagggcgttgcggactcatgccccagtcggcagtgcgggtaagggtgggagaagcaatgaggcgaatgcgagcagccgaagaaggcgacagtgtggctgggtatgaagacttgagggagggggtggggcaaaacgaggtcagg

SEQ ID NO: 21878 - DNA, 2300 bp, Homo sapien
cagttgaatactactcagccataaaaaggaatgaattaatgcatttgcctggatttatttatttttccttttttttttaagatggagtttccctcttgttgcccaggctgtagtgcaatggcgctatcttggcttactgcaacctccacctcccaggttcaggcaattctcctgcctcagcctcctgaatggctaggattatagacacccaccagcgtgcccggctaattttcgtatttttagtagagacagggtttcatcatgttggccaggctggtcttgaattcttgacttcaggtgatccagctgcctcagcctcccaaagtgctgggattacaggtgtgaaccaccatgcccggcctggagactattattctaagtgaagcaactcaggaatggaaaatcaaacatcgtatattctcactcataagtgggagctaaggtgtgaggatgcaaaggcctaagaatgacacagtggactttggggacttgggggaaagggtggaaagggggtgagggataaaagactaaaaattgggtgccatgtacactgttcaggtgatgggtgcaccaaaatctcacaaatcaccactgaagaagttactcatgtaaccaaacaccacctgtttcccaaaaacctatggaaataaaaaattaaaaaaaaatcagacccccaaaatattcagagtagtacttgtgggagtcattgagcaagtaacatgggaagagaggaggctgcttccaccagtggttttggaggtggagcagatgctgatgataatgaagtcccagatgggaaacggggatgggtgccgaggaaagctcaaggaccctgcagatgaggactcagacccacgatactggatgaggcatccatgtcaccatgggagtcaaccagggtagtggcctcagctgaggcaggggaaaagctgggatccaagagctctagtcttctcttgataagcaagagagaccaggaggtgagagatggcagaggatgagagaggtgatatcagtgaccagaaagagcccctaaaaagtaacttccttttctttctgttagttttaatataaaatttcgctttaatatttttagacaattcttttttaaaaaagtatttatatccaaaggttcttaccacaccaaccacagccccaatctttttgccctaacctcagaatcagttagttgtctcctttaaaacctttctctctctcacacacccacacacacacacacgcaaacacacaggagagagagagagggaatatatagtattgtttttggagtatgagtgtgtgcttcagaataaatggtttcatactctataaaaaatgagattcaaattttataatccatcaagttttattggaacacagccatgctggattgcttgtgcattgtttatggccgcctttgcactgccataagtctccacggtcacaatatccactcactaccacttattgttgtctttcaacagcggcatataaaatctgtaacacagttcatctcacacctaataaaacagactcacacaggcataaatttagaaaacatcccatgaacataaacaggtccacgcagggtcccagacaccgaatcgaactaagaaactccctcacagcaagacacacccatctgttcaattgccagacactgttccaggcgctcatacccaggtaaactggtagtgtcgcgcaggtcatttccagcgaacttaccccggattcccttgctcgctcacgtctaagtccccagacaccccagtcccatcttcgcctgttctagactccagaatgcgttccttagcgaaagctgagaaccttttaattcgctctcagtcaacaccaaagaccctcaagcaaaagcaagagctcccgggcgtcttcgaaaaaagcgcctttgacaggtgaagccaagttgcatgctgggagcatccctgctgtccaggtttcaacttccggagactctgccgctgtggactacatttcccagaagtctccggggcacaggccttttaggggcggggcgagcttgcctgccagaagctcctctcccagcctgcgagcatttccaggctcttgtttcccatcagcctctgggtccaaactaaccacaggtctctgggtccttttccggtgtccttaaggttcttggactctgcatggtgagttggtcgtgtctgtagaagtaatcagcccgggtgaagctgggagggctcggctggctttactggggcccgactggaaccggcagtgagggtgggggtggcatcgggggtgctggaggtggggag

SEQ ID NO: 21879 - DNA, 2300 bp, Homo sapien
gaccctgcagatgaggactcagacccacgatactggatgaggcatccatgtcaccatgggagtcaaccagggtagtggcctcagctgaggcaggggaaaagctgggatccaagagctctagtcttctcttgataagcaagagagaccaggaggtgagagatggcagaggatgagagaggtgatatcagtgaccagaaagagcccctaaaaagtaacttccttttctttctgttagttttaatataaaatttcgctttaatatttttagacaattcttttttaaaaaagtatttatatccaaaggttcttaccacaccaaccacagccccaatctttttgccctaacctcagaatcagttagttgtctcctttaaaacctttctctctctcacacacccacacacacacacacgcaaacacacaggagagagagagagggaatatatagtattgtttttggagtatgagtgtgtgcttcagaataaatggtttcatactctataaaaaatgagattcaaattttataatccatcaagttttattggaacacagccatgctggattgcttgtgcattgtttatggccgcctttgcactgccataagtctccacggtcacaatatccactcactaccacttattgttgtctttcaacagcggcatataaaatctgtaacacagttcatctcacacctaataaaacagactcacacaggcataaatttagaaaacatcccatgaacataaacaggtccacgcagggtcccagacaccgaatcgaactaagaaactccctcacagcaagacacacccatctgttcaattgccagacactgttccaggcgctcatacccaggtaaactggtagtgtcgcgcaggtcatttccagcgaacttaccccggattcccttgctcgctcacgtctaagtccccagacaccccagtcccatcttcgcctgttctagactccagaatgcgttccttagcgaaagctgagaaccttttaattcgctctcagtcaacaccaaagaccctcaagcaaaagcaagagctcccgggcgtcttcgaaaaaagcgcctttgacaggtgaagccaagttgcatgctgggagcatccctgctgtccaggtttcaacttccggagactctgccgctgtggactacatttcccagaagtctccggggcacaggccttttaggggcggggcgagcttgcctgccagaagctcctctcccagcctgcgagcatttccaggctcttgtttcccatcagcctctgggtccaaactaaccacaggtctctgggtccttttccggtgtccttaaggttcttggactctgcatggtgagttggtcgtgtctgtagaagtaatcagcccgggtgaagctgggagggctcggctggctttactggggcccgactggaaccggcagtgagggtgggggtggcatcgggggtgctggaggtggggagggctgggtcacggacagagcgtgtcgtgtccggatcctcaagcctgtgtgcacgcgagcagccgagggacagtgtgtctcagacggcgtggcagggacggggcgtgtccccacggaggtgggtgcagttgtgaatgtgtgacgggctgacagggtgcgtggccgtatttgtaaatgtgatttgctttgaccaaatgctctaggttccctttagcctgtcttcgggcctgccacaattaaatgaccgcaagaaagaagtctatgctaagccccataatgaacgtttcaagcaagaaggatgagaattttagatctggaagtgtccgcgggacaggatcttgtcaagacctgatggggaagttctagaggtgggattcctagaagaggggcctctaggagctctttggtggtgagctacatgtttcagagccattgcaagcagacctctgtccccaagaattgccctcaacacagagacagactctagcctcccttttcattccgtttggttttgtgtggatgaaggcagaagtggccccagagggtgttttgctcttctttttcttttttaattaagtctgtgacgcgctagaaatgctgatgtctcatgttactgttttttcccccagtgctgccaggttgccagatttctaagaaggagtttgaagaggagaaaaggatttttgcatgtttagaaatcaaggttcaggtgaggttttttatacatactttttaaatacatacacatacaattacctttgcttctaggtcatgagaacattttctttccttggcctgaaatatcttgactgggttttcccagttacat

SEQ ID NO: 21880 - DNA, 2300 bp, Homo sapien
ttcacgccattctcctgcctcagcctcccgagtagctgggactacaggcgcctaccactacgcccagctaattttttgtatttttagtggagacggggtttcaccgtgttagccaggatgttctcgatctcctgacttcatgatccacctccctcagcctcccaaagtgctgggattacaggcgtgagccactgtgcccgaccccagggccttatttttaactacaacatagtacggcttcttacatgccacagaaagctggacttcaaacaagtcatgcttggaaatgttacagatttctatctaaagattatctgaaagtccccactcttgttggtgcaaattacaaatccctatgttcaaagctcaatcatatttccacccctaaaagcctcacaaagcagacaacattgtcatttactgccagaaacattcccttacttaaaatcccttataccttgcctttctttaagcatcatgactatgggccaggcatggtggctcacacctgcagtcccagcactttgggacgccaaggccagaggaacacctgagcccaggacttcaaggttgcactgagctatgactatactactgcactcagcctgggcaacagagtgagaccttgtctctaaaaaaagttaaaaaaaaattttaattatgactacagaaaagataaaaaataatgtttatataacaccacctaattactaatctcttcaaataatcatagtataaaataatgctctaatagcaatctacaagaggtgcctttctataactcttcagtgcatcataatgcactgaagtatttgaacaatttgccatatgaacaggtgggtaagaattgtggagaagaacaatagggggccactgggaggaaatatgtaccagcatggcgggtcatgtaactgggaaaacccagtcaagatatttcaggccaaggaaagaaaatgttctcatgacctagaagcaaaggtaattgtatgtgtatgtatttaaaaagtatgtataaaaaacctcacctgaaccttgatttctaaacatgcaaaaatccttttctcctcttcaaactccttcttagaaatctggcaacctggcagcactgggggaaaaaacagtaacatgagacatcagcatttctagcgcgtcacagacttaattaaaaaagaaaaagaagagcaaaacaccctctggggccacttctgccttcatccacacaaaaccaaacggaatgaaaagggaggctagagtctgtctctgtgttgagggcaattcttggggacagaggtctgcttgcaatggctctgaaacatgtagctcaccaccaaagagctcctagaggcccctcttctaggaatcccacctctagaacttccccatcaggtcttgacaagatcctgtcccgcggacacttccagatctaaaattctcatccttcttgcttgaaacgttcattatggggcttagcatagacttctttcttgcggtcatttaattgtggcaggcccgaagacaggctaaagggaacctagagcatttggtcaaagcaaatcacatttacaaatacggccacgcaccctgtcagcccgtcacacattcacaactgcacccacctccgtggggacacgccccgtccctgccacgccgtctgagacacactgtccctcggctgctcgcgtgcacacaggcttgaggatccggacacgacacgctctgtccgtgacccagccctccccacctccagcacccccgatgccacccccaccctcactgccggttccagtcgggccccagtaaagccagccgagccctcccagcttcacccgggctgattacttctacagacacgaccaactcaccatgcagagtccaagaaccttaaggacaccggaaaaggacccagagacctgtggttagtttggacccagaggctgatgggaaacaagagcctggaaatgctcgcaggctgggagaggagcttctggcaggcaagctcgccccgcccctaaaaggcctgtgccccggagacttctgggaaatgtagtccacagcggcagagtctccggaagttgaaacctggacagcagggatgctcccagcatgcaacttggcttcacctgtcaaaggcgcttttttcgaagacgcccgggagctcttgcttttgcttgagggtctttggtgttgactgagagcgaattaaaaggttctcagctttcgctaaggaacgcattctggagtctagaacaggcgaagatgggactggggtgtctggggacttagacgtgagcgagcaaggg

SEQ ID NO: 21881 - DNA, 2300 bp, Homo sapien
ctcaactctgttccattgacttatttgtctacgtttatgcaaacaccacatactctttattattgtagtattacgttaagctttccaattagtagggttgatcctccaactgtgctcttcttcaatgttgtctaggttattctagatcctttgtgttttcatctgaattttagaatcaccttgtctatttttacaaaagctctgctgggattttttttttttttttttttttgagacagagtttcactcttgttgcccaggctggagtgcaatgatgtgatcttggctcactgcaacctccacctcccaggttcaagcaattctcttgcctcagcctcctgagaagctgggattacaggcatgcgctaccacacctggctaattttgtatgttttagtagagacagggtttctccatgttggtcaggctggtctcgaactcccaacctcaggtgatccgcctgcctcaccctccgaaagtgctgggattacaggggtgagccatcgcacctggcctctgctgggattttgactgagattttgttgaatctgtggatctgtttgcaaaggtaagagtcatctgactgatgaacatattatagctttctatttgtttagatcttttaagttttttctcagtaattatttgtagttatgagagtattagtattgtcatcttttgttagattgattcctaagtattttatatttttcatttgatattcagtatttttaattttaatttccaccaattgttgctaattaaaatgccatttatgtttaacatattgagcttgtatcttctcagcttgctaactcacttgatagttttaatgaatttttattagattctattagattttctatatagacaatcatgttatctgtgaataaagagatttttacttctttttcaatctagatgctttttatttcttcttcttgcctgagttgcactggctagaaccgctagtacaatgttgaatagaagtggtgagagtagatatccttgctatattcctgatttggggaggaaagcattcagcctttcactatcaaatgtgatgttagctatgggttttttatagatgtcattcattgggttaaggatgttcccttcttttcttgtttcaccaaggatatcagcagtggatgttggcttttgtcagatgccttttctgcatctattgatatgttcatacggtttttcttttgtagtttgtgaatatggtgcattaccttgattgatttttaaatgtgagacaggcttggattgagccttggtcataatagagttccctttcttatatactgttagatttgatgtgctaaaactttgtttggaatcgttgcatctgtgtccatgatggatattggtttgtacttttcttgttctcagtggaatccagtgggctttgcttaggttcccgctccctgtgccacagcctagaaattgtctccttacagtaaactagtgtgactgtaggtttcacctcatttgttacttgtctttcaggtatcattgcgcaatgttttctgtcttgaaaaccatggtttaatatattttgttcagattttcagttgtttcatacaagaaggtaaattcaatccctgttattccgtgttggctggaaaagattttataatacaattgggggagggggtagttatcaattcatggtttttcatattcctcgaagagaaaagctgtaacaacttgtatttattaatattatatggcttaggtacgtagaaggtattgtgcttatatatactatttaatttggaaagtttggtgacttcatttatttttatatatttggatttttctctaatattactaagaaaattttgtgtgctccaacaggattccttaagattgtgtgggcactctacttaagacatgctaatttatttactcttatctaaccatgtcatcatcttgtaactctagactacttctttttacatattgcccctttattgcaatttaatgttccatcttgaaaagtcttctttacttttacaaataatacacaggtttgtcatttcaggtgccattgacattcagcgatgttgccatagacttctctcaggaggagtgggaatatttaaactcggatcagagggatttgtacagagatgtgatgttggagaattatactaacttggtctcattgggtaagaatatctgcacaaaatgatgtacaatatgctctctagaatatcagccttctctgttgtatattttatggtctatgccaagaaaccagctacatttctgctccatattctcaaagt

SEQ ID NO: 21882 - DNA, 2300 bp, Homo sapien
catatgaactcagggagtggagtacacaattcagtttatatcacctgttctcctctgacatcactgtggtaggggaagtggatcctgcctcattattattaggtggtgacagaaatccagatttcccactcagcctccattgatacccacaggggggctcctcattactagtggcaggggtgggagttccggtttcccactagacctccactgatacctttctaatttggagggaaaggagtgccttattactgcactccatgtggcttctactgttagcactgggttgaggggtggggaggaaagtcctaactctccaggcaagagtggaagcatgggtctttgctggcatgctggggatagtgctgaaggtttttcctgtggtgttttgactagagcatggcagtaattgtctaaaagttttccttcttgctaggctgccctcttccttgtcttttggctaaagacagcaggcttttgctgggacttttttgtctgtgcccattggtgtattgggactgctagcttctttggctttaagtctggcacaaaggaggcacaaagaaaatcaagggaactcagcaccagtctaccttttctctaccactcagtgttctttttctctttttttataactaatgcccagggtttttattgtacttagctggacaaatagaaaaaagtacatctattccatcttcctggaggtcccttctcaattttctttttctttttttgtagggggagacagaatctcacactttctcccaggctggagtgcagtggcacgatctcggctcactgcaacctccacctcctggattcaagcgattctcctgcctcggcctcccaagtagctgggactacaggcacgggcccccacacctggctaatttttgtatttttactagagacggggttttgccatgttggccaggctggtctcgacctcctgacctcaagtgatccacccacctcagccccccaaagtgctgggattacaggcatgagccaccacgcccagccttttcacaatgtttaaaataccaattttcctgaaaagtacccatatattgagtgcaattccaataaaaatggcaatgccacaaacatccccattcatgtattttggtgaatatgtatacacttacatttgggttaaaggtaagaatggaactgctaggttatagcaaatgcatatattcaaattcaatagatcttgccaaatagttttcccaagtgattatatcaatttatacactcgccagtagactacgatattaagtttctttgaccttaaaattcattttcttattttgaaagaaaacatttctgtgggctctcggtactttgcccattcagcctaatggataagtaggccatagtagtatttaccttggacaaatcagccagactcgtattttaagtgagagaatggcaattgggcatgagaaatttcagagtgggagtaggagtgaagggagagggcttaaaaaatttacataatctcaaaatctgaaacaaaccatttcatgtccaaagtaacacacttagaaacaaaccataatccggaatacaaccccatccatgttctcacacaatgaatttcacaatgtcacagagtgaaaacacaaaacgcacaggcattctttctctaaaaccaatgcacacttaacgccttctgtgctcctggagctactataggtgctggcgctacctgggagcgcgaaaaacaaaagcccctgtcctcagctcgcacctagaataccaaccgtggaccatacgctggagctcgccaacttctcctctcacacgcaggtttgaggctttgaggtctgcatgcccgtgctctgccttctccagccgagactcaagattccactcgcctcctctaaacacgcaggacgacctgaaatcatagcccttaatagagcaagtcaaccaacggtacagatggtcaagctcttgctcatgtgccctccgagcataggctacagaatggcgggcgccgtggacatggttattccgggtggactacatttcccagaagtcaccgcgctagggtcaccctcgagctctagatctttttccggtgtccgagctgctgtagcccctacgtggtgagtagatcgtctccacagaaatcagcggaggcttccacagtccctggttggaatggaaccggcggtgaggatgagaggcgctgaagaccagaagacccagggcgtgaacggggcgtgtcatccctggagtttcagtagaatttcaggcctgtctgcttgagcagcagaggaggagtt

SEQ ID NO: 21883 - DNA, 2300 bp, Homo sapien
tgtgagatcaaggtctttgttcactgctgtatatttcacatctaggacccttggctggcacagagtagacccttcaacaatcatatgttgaatgaatggttcaggtgataaataatgaggccctgatccacatggtgtatctatcaactattcactgagtcattaaagtagtcattctgcaaatctttgggttccttccaaatgcttgtagcaacttagtaggtgttggggatggagcaggtaacgaaactccacattagacaagtgtaatgaatataagtaagtaaatacctagaaggatgttagagaggaataagggcttagagaaaagaagtaagcagagatgagggataggaagtgttggggtgcagttaggagaccgaaattatctacaggatggctagagagagactctgaggtggtgacatttgaataaagaagaaagagtttcttagtgtggctctcctaatagtctctctggccctagcctcctccccctcaagcctcctcccgtttgagagggtaatctgtttctaacatgaaaggaatctttttactctcctttccagaagtccttcagtgttctcctgctgacttgcagataattttgtgacttgaacgtcatcatggtttgaattctgccttcctgcccatctctttctgcctgttatttgtcttcacatcatgacatttgttctctgggagttttatagtgatttggattctctggctaatagagctcagtcaccctccagggctcagattaagctacgtttgtgtagaacccctgcattccactgtgggcttatgagcccattcctcatgccgctaaaggatgctgtgcactactctggcatttagccatgtatagtggaattgccagcttcctcatcactagactgtgagcatcttgaggctggggaattgcatctcttttagtaaggttcccacaagtcttcactgagttaataaactcatctatttaatgaagtagtaataaattcacctgtctagtgctaattatgcaggcagtaaaatagtgttcattctcagtattttaagggacacattctgtgggttctgtaacagtgactcatgtcgtcgctgactttgaagagcagagagtactttcctaagatggtatttaacaaaatccagagatgcttttccttccaaagatgactctgatcttgcccaaggacagcaaatatggtgaaagacctagaggaaaaatttggaaataaaacccttgctctccaaatcttcccaactggagtcagtctcagggagacttagaccaactagtctagtcttcctatatgcctctccatgtctgatggtgggttcagtcatttctgctgggcaattactttgtacaggaactgttttaggtacttgggatataaagctgaataaacattcatcacaagacagatggttgatttgctattatctcttttttttcccgaggcgatggaaatatatcccctgcaaaacattcttactgagcagaggttgctgggcaaatatagagttagaacaaagtgaattacaaattctaaaagagtatttcaggctgggtgtggtggcttacgcctataatcccagcactttgggaggccaaggcgggtggatcacttgaggtcaggaggtcgagaccagcctggccaaaatagtgaaacctcatctgtactaaaaaaacaaaagaaacaaaaaaaattagccaggaatggtggcgggtgcccataatccagctactggggaggctgaggcaggataatcttttgaacccggaaggctgaggttgcagtaagctgagatcattccactgcactccagcctgggccacagcgcaagactccatttcagaaaaataaataaataagtatttcttctaagattggaaggttttatgtttcccttttcaatagtaagggttcttctatctgaagtaagagaactaagaataatttactaataaatcaagcagtaattaactaatactaagcttttaatctgggtattttactcgtttccaccctccatagaatcagaatcataccctgagagctacaagaactccatttttcactgtgcagaggctctctgctgaagggtcaagtggaatctggaatccagcccatgtttccccatcatcaagccatgtgaagctgcagactccgtgagtgccttagtccatttgtgctgctataacaaacaataccataggctgggtggcttaaacaacaaacctttataactcacagtcctggagactgggaagtccatgatcaagtcac

SEQ ID NO: 21884 - DNA, 2300 bp, Homo sapien
catgcctgtaatcccagctacttgggaggctgaagcaggagaatcgcttgaacccaggacgcgggggttgtggtgagctaagattgcacaattgcactccagcctggatgacaagagcaaaactcttaaaaaaaaaaaaaagtgtcagactcttagttgattctctcctggatcagaaaaaatggcctggaaaaaggaaaggagattctctacagaatgtagatttttctccacaaaggacaactttgcagggctatttcatgatagggcaatgaaacatatttggggttgaagtattttgatttcctttcttatccgtcatgaggtgttatgacaggttggaaagtaagtcacattatatagggttaaattaaaacccctctcatgagactttatggtttggagggcttgactccccagacccttagataggaatttgagtaagaaaagaaaaaacggcagagttcagtcttcaccctggtctcccatttagccagctctacgtgtattaaactctttctctattgcaattcctgtcttgataaattggctctctctgggcagtgggcaagatgagtccattgggtgattacatttctctcttcctcttactaaagtagagagagtacttatccagattttgaaatggcattgatgcagggcagtttcttggctttgctcaggaaagaattcaacagcaagccagcagcggaagaaagcaggtttatcgaatcaacagtgttaaaagctcagtgactgttccttgcagaccaagactagcccacaggcagtgtgcccagagtagcagcatatgggctgttggctgggtatatttataccaacttttcattacatgcaaattaaggggtgagttactcggaaatctctagaaaaggggttggtaacttccaggtgttgccatggcatttataaaccgtcacggcgctggtgggagtgtcttatactgataggtagcaaagggaacttacaggttgctttccatcacttgctggtttcagcaggtttcttatctgatcttggaatcacgccctgctggtctcctgcctcagcctaaattgaacattgttcagatgtttacagctactcctatgtagtcaacttccattttttcttctttaccctttcataataaacttggaaaaatatttagtttctacctaggagaaaagtgaatagtatagctttctgtattttttgcacttcatgtcttaatccctcacttcacctccctctccttactgaatattcatagacactttggcaaatcataagacacctttacagattcctgattctgagagcaagaagtgatgtgattccttaatctgaactgaatgttttcaagattttatataggatagagcctattcaatactataatactttcttcagtatcctgcgaatgaaagaaaactaagcgcaagaaaagtggagaattttgctgcttttgtttcatgtcctgctggatgattgcatctccttttttgagcatttttaatcacagatgaatccatacccatattataaaaggcttgttgctctgggcggctctggccacctcttttattacctctgtttttagctcacacatagcattcctttgtattttcctttttttttttcatattcgcaacttctgtcacgtataaaagggaacaatggcaaaaggaaaaagcaggctgagctctacaagcaatgacttagactccccccgctaattcaaaaggaaaattgcaggctggcgggaagctcagccctacagaggattctgggacgtgtggtccagacttttgggggcacttcagctctgggaaagcgcggctttgttatttgctcccctggggaaataggaacctataccccagtgctcagtgggttcggtggtacttcgactatttgaggacgagaacacgaagcccgctccccttggggattctgagaaataagattcggccgtgggagtcgaagcccgcacttccgcccagggggcggggcagcggcttccgttcctcccggggatgctgggaaatgtagttccagagctccctgctctcccgggcacttccgcggcaagaggttgagagcgcggccttcattcctctcgtggaagtgagtgagtcctgggaccccgcgacctgttttaacttttatggtttggtcgtaggatcagcagggctcgcacttcggtcagcaggaaaagacgctgcggcgagcagcggagggcggagttgaatggctgggcagctgattgccttactgtatccggagctgctgcgttc

SEQ ID NO: 21885 - DNA, 2300 bp, Homo sapien
cagtggcaacatggtggggtgcatgctcatcagctgtggcagcttgctagtgggtaccgggatgcctgcttctgtgtgagcacttacagcagtggtggaggcagcatggctcaagggggcaggggggccccccactggtgactgtatgtgtagtagtgctggtggtggtgttagcatggggatgaggcactggcttctgcaggtctgtgtgtgtcccctgtgcatgttcatatgttatttaacctacactccatatttaaatttattctgtttttaatttaaattccttgtaattgatttgcctccagtttagcccacttttatgaattgtttttaactgtcacgtttctcctgtctccattaatctggcatgattcttcagctttctctttttgctcatggtgtttttgatactattttaatgtatggatatactgcattttctatatcaatagtaatcaaaagtaatgccatttttaatagccacacataaagtcaaatacctaggaattaaccaaaaaagttaaagttgtctataataaaaactataaaacactgacaaaaaaattgaagaggacaccaaaaaatggaaaaatgttccatgtttatggattggaagaatcagtaacgttaaaatatccatactacccaagcaatctacagattcagtgcaatctctgttaaaaataccaatgacattcttcagagaaattaaaaagcctcaaatttatatggaaccacaaaaaaacccagaataattgaggctatcctgaccaaaaagaacaaaaccgacttcaaattatactacagagctataataaccaaaacagcatagtactggcataaaaacagacacagagaccaatggaacagaacagagaacagaaacaaatccacacacctacggataactaatttttgacaaatgtgctgagaacacatgaggaaaagacagtctcttcaataaatgatgctgggaaaactggatatccatatgcagaagaatgaaactagacctctatttcttaccacataaaaaagcaaatcagaatggattaaaaacttaaatctaagacctcaatctataaaactaataaaagaaaactttgggccaggcgcggtggctcacacctgtaatcctagcactttgggaggctgaagtgggtggatcacggggtcaggagatcaagaccatcctagctaacacggtgaaaacctgtctctactaaaaatacaaaaaattagcctggcgtggtggcaggtgcctgtagtcccagctacttggaaggctgaggcaggagaatggtatgaacccaggaggcagagtttgcagtgagccgagatcatgccactgcactccagcctgggtgaaagagcgagactccacctcaaaaaaaaaaaaaaaaagaaattttcaagaaaaaagaattattttacaaatgtataaacaatatttgaaaaatgagggaaaaggccaaaaagccattagtacagtaggcaaaaggtttgaacaatttaccaataataataataataataataatcatggcctttgaaaatatgaaaagatgttctatttcatttacaatacaggaaatgtaaattaaaattacatcggcatactatcagttttagcctcacatcatcaggttatactaaacattttcctcttttcagttctctactgatcctcaagcagtaatttcttgtcagttccttgaagattttatctccacctttgttcactctccagtaatacttctgtaataattggggatatttcaatcaggaaatcattgtttatgtaatatttttgcttgaagactcaagagaaaggtaaggacgacactcagtgcaggagtccatattaccacataggcgtttcggatgggggattcccttctccggggacttggaagaagtgtggtcaagaagctatgtgtagttgcaacacttccccctggagggtaaaactgtgaacgtttactccttgggcattctgggaagtgtcccaacggtcggtggggttgcgggcacttccggtcaggcaggcggatccggggaattctgggaaatgtagtccagacgctctgtggagtcgcgggagctacggctgcgggagttaccctttattctgtgatattttgagctgttctgcgtctcgcaggcccttctgaatttcctggacctactctcggaaccctcaacgagctagcgatagatttagaggaaaggaagcaccgtcggaaagcaaaggtttggaagggtgagggcggcggtttgcgatccccgcggcagag

SEQ ID NO: 21886 - DNA, 2300 bp, Homo sapien
tttttacaatgatatgaattagtaactctgacactgcatgatgcgtatgcaatggtcttaatgtttgtggcccaccaaaatccatatattgtaatttttaccctcaatgtgatggtaataggaggtggggcctttggagggtgattaggtcacgggatgaatacccttataaaaaatgccagaaggagcttgtttgtcacttcaaccaaatgaagacacagcaatatggtgctaactatgaacaagaaagtggccaactacctgacacaaaatctgccagtgctttgatcttggatcccagtttccagatctgtgaagaatagatttctgttgcttaaaagccggccgggcgtggtcgctcacgcctgtaatcccagcactttgggaggccgaggtgggcggatcacaaggtcagatcgagaccatcctggctaacacggtgaaacctcttctctaccaaaaatacaaaaaaattagccgggcatggtggcgagcacctgtagtcccagctactcgggaggctgagacagaagaatggcatgaacctgggaggcagagcttgcagtgagccgagatcgcgccactgcactctagcctgggcgacagagcaagactccgtctcaaaaataaaataaaataaaataaaataaaataaaataaaataaaataaaataaaataaaagccaggcaggctatgatattttgtgactaaaaaatattggtactgagaggtgggcttgctgctgcaacaaatacctaaaaatgtagcagtctttggaactatgtaatggatagagtctagaagagtttttacatgtatgctaggaaaagcctacattgccatgaatggactgataaggacaattctggttagcgctcagaaatagagaataagaactgtagagaaaacatcaatcttgttagagcatacctaggtagtcatgatcagaatgttggtagaaatatggacagtaaaggccattctgaagacctcagtcagaaatgttgaacatgttattggaagagaagagagcttcttgttataaagggacaaagaatttggctgaattatattcaggtgctagtgttttatggaaggtagaatttgtgaatgatataattgtttatctgaattaatttctaatcaaagtgttgaagttgcttgaatcatcttgactacccgtagtgaaaggcacgaagtgaggaatgactgaaataattattaattaaaagggaaacagaactaaaatttttaaaagtttacagcctatctactttggaaaaaaaaaaaaacaggaaacctgaagaatacaagggtatggttaagcaactaactaattcatgaatttagtatggattggccatgtcaactgaagccaggacctattgtccaagacaatggaagaatgaccccaaaggcatttcacagattatggcagcttctcctcccatcacaggcccagagtgcaaggacctgggggacagaaagggcctttgatgccagatataccctaatatattaggcacagtttcctgcctactacgattgagcgtgtcaataaatttttatctcttgggagggcagaacagagcaaggatacagctgtaactggtttagaaatagcagtcactcaattttcagagaagtgttcctcatactgtggttggcacagtcactttatctaaagaaaaccatgaaaagtattcttttttagtttagaaaaattgatatagaacatgagactccatttttttaaaataaaaatataggttgataggccagaattcacaggtccacctgcctgagccaaaattctcacgcctccacagagcaaatggactccatttcccaagataccagcgaaacgcctgcgggagtctaattgcccggtcgatgcgcaggaaatttggctcccgcaggcgtttcgcgagtagcttgggaggcgtgggaattttggcccaggcaggaggacctgtgaattctgggaagtggagtccatttgctctgtggagtcgtgggaactttggctcaggcaggcggattcgggggattctgggaagtgtagtccagacgcctgtggcatcatcgacacttccggtctccgagcaggacactgctacttaacaaggtggtttgagccaagtatgtgtcttgcgggtctttgcgaaagtgaaccagttattaggggcgcctaacgacctggggggtcaactaagggggtaagaagccctggagaagacctgaggtttggagatgcgaggggtgggagggaagtttcgttgccgtcgatggagccttc

SEQ ID NO: 21887 - DNA, 2300 bp, Homo sapien
tattatgtcatgctcatccaatattattcccatttgtgtttttttttttttttttttagacggagtctcgctctgtcacctaggctggagtgcagtggtgcgatctcggctcactgtgagctccgcctcccgggttcacaccattctcctgccccagcctcctgagtagctgggactacaggtgccggccaccatgcccggctatttttttgtatatttagtagagacgaggtttcactgtgttagccaggatggtctcgatctcctgaccttgtgatccgcccacctcggcctcccaaagtgctgagattacaggtgtgagccacggcgcccagcccccattgttatcatccttatgactatttcctgatagttgaaaacctttcatttttatatcatttcaaagctgtagaagagttgcaaaaatagtataaggaattctcatatactctttacccaaatttgccgattgtttacatttttcctgtttgctttgttggtggccatcagccaaatactaccaggaacatatctgtaaccagagacgattgtagatttctgcagcaaggaagcccacattccatggtgatcatggggtgacttggtaagaggtgtttagaaagggcaggttatagggtctcacgtaacatgctagacaatattaagatatcatattaaatgatatttattaaatattagatatctgtttaaaaaactactaattgtgcttatagtgttataattagatagtgctagatagcatattccataacatcatgttatctcatatgtggttccataattaaatttgttcaattttttcatttatagtcctcacaactatcttctaccctaccctttaccctgaccccagtttaaagtctaattatatgcattgtgtttactcgtcacatttctgtcttctttaatctggaaggatttcacagcctttttctttaatatatgtggtatttttaaagagtgtaggcaagttattttggagaaagacgttcattgggatttatctgatatatctcatgtttaggttcagatcatgcattgttattgcttctgggccttatgcattgttggtgcggatactgccaaagtgataaggtttccttcctattgtaacataacagggccaaacgatgttggtttggcccttcattggtgatctcaacttcattcatttggccaagatgatgtctttcagatttgtccactatcaaattacctttttaaaagaaatagtcaagtttcttctggggagatacattattaatgggcattcactctaaaaatgaactgccagttctcccccatttatttattagtttcttcaactataaatattctatcagtatggactcagtcttgttaagttaaatgacatgtaaactaacaattatttttcccaattctattgaggtattttttacgtatcatagcattcaccaatttcaggtgtacaattcagtgatcttcaggaatttcacatagtggttttgccatcatcatgattcagtttagaccattttcatcccctaactggacttcttgtgcccacttacagttaaaactcattttcaggccgggcacagtggctcatgcctgtaatctcagcactttgggaggccaaggtgggaggtatagcttgagctcaggagtttgagaccagcttggacaacatagcaagaccccatctcttaaaaaataaaaactcattctcacctcaaatctggagcaaccactaacttatattctctctatataccattatctattctggatggttcatataaatgggatcgtataatccatgggttttgtgattggcttctttcatttagcatgatgtttccaagctttggaaacatcctttaaatttccaaataagattccatggtatggatacaccaccatttgcctatccatttacccagaggaaggcatcttggttgtgtgcagtttgggtttattatgaataatgctgctgtgatcattcatgggctaattcacaacacacatctctctttttctgcagactgtggcacgtttcaggcaggattcctccttcattcaaactgcatcacccaggagtctgcaaattccccaaagtaggaggaaaaatgaccacattcaaggtgaggggggcgtgcctctctcgctgttaaaattccatgtcactactcatattttcatgtgtttttctctgtcatgagaagactcaaggggaaaacaggcatttggggacctgtttgtgccaggtgcttcctttatctcttttgtgttgactg

SEQ ID NO: 21888 - DNA, 2300 bp, Homo sapien
ataaggtgtaaggaaggggaccagtttcaatcttctgcatatggctagccagttatcccagcagcacttattgaatagggagtcctttccctgttgtttttgtcagtgtcatcaatggcatggtttggatgtgtccccacccaaatctcagcttgaattgtatctcccagaattcccacatgtgggagggacaccacagaaagtcagaattattaattaaaagggaaacagaactaagaattttaaaaattcacagcctatctactttggaaaaaaaaattagaaaacctgttctggataaaacaacggtagagataagcaactgatttaggagattagtttggattggtcatgtcaacagaagccaggacctgctgtccattaacactggaagaatgaccccaaaggcatctaggagatcatagaggctgctcctcccaacacagacccagagtgcacggacctgggaagcagaagggacctttgatgccaagtgcccctaaccttttaggctcagttccctgcatgctacgattgagtgtgtcaatacatcttatctttcgggaaggcagagtagatcaaggatacagctataactggcatatgaatagtgatcactcaattttcagagagcggatgtttggcatcaaaagtttggcacagtcaccttatttttgtgtctaaacaaaattttgaaaagtttttagtttagaaaaataggtaaacagtagactccattttttttaaaaagaagaatattggtttataggccaatgtatgtttatagggagaaaaaaagttaccttcaaaagagcaggtttttagatgaattgtttcctaatttagctttatactgttattattttttaaccaatgccagtttttaaattgctaactataataaagaaattatgtttcaccaagaaataagaagaaacttaaaaaaaaaaatctttaattattgaggtatctgttgcctaggctggagggcagtggtggcatcatagctcactgcagcctcaatcaaactcctgggcttcagcaatcctcccacctcagcctcctgagtacttggaacttgtagtcccaagatcaggccaccatgcctggccagttaaaaaaaaatttttatagagacgaagtctccctgtatttccctgtctggtctccaattcctgagctcaagggaacgtcctgccctggcctcccaaagggttggcattacaggtttgagccactgcgcttggccaggaagaaaactctttataagacatgctccttcacctatagaatcctcccgttttactgcatttacaatctcaatgtaagattgataccaatgcctagctcttcatcagtcattattgctctgaggtactgagcaattcactacattcgctgaaatttgatgtttctacatctaaggagaaatatgaataccatgaaaagtttatgggaagatagctattccatgacgacaccgcttctccactagtagctgtgatcttaaatgggggtggcttttcctgccaaaccagtggtcccacagcttctggagtaggggctggtgtcttcctgctcctcattgcccctgccaaaccattccacctggctcatcctttaaaccgttagttttaacctcccatcgtcagattatcctaatccttgaagattttatctcctcgtttgttctcttcccaataacactcctgtcatcgtgggaggcgtttagacttcaggaattcctgtctatacactattttcgctcaaagactcaggaagagagacggacgactcacagggtcacagtccacattccccaccaggcgctcagagatatggaatacgttcccggtgggcactgcggtgtgtgtagtcaaggaccaccgcggagtccaacgcttcccgctgaagagtgagattatagacattttcctttggcattggaggaagcggagtccagacacactctgagtcgcgggcaagttggctcaggcgggtggacgagtgaattctgggaactgtagtccatcaacttcatggaatggcggaccctttggctcaagcagttgaaccggggaattctgggaagtggagtccagacgctctgtggagacgcgagcacttccggtgtgtgagcctgcggttgctacataaccgcgtagtttgagccatttctgcgtctggcgggtccttctgaacttgtcaccttcgcttggggtcgcaacgacccgatgatcgatgatccaagcaagggaaaagaagccttggcggagagcggaggtttggtgggggcgggg

SEQ ID NO: 21889 - DNA, 2300 bp, Homo sapien
accatgttggccaggatggtctcgatctcctgacctcgtgatccacccgcctcggcctcccaaagtgctgggattacaggcgtgagccaccgcgcccagcaaaaatattttagatatcaggaaatagtcataaggataatgggaataataaaattgagcattatataatatggcagttcactagtttattcttttttttttttttttttttgagtctcactctgttgcccaggctggagtgcagtggcgtgatcttggctcactgcaacctccacctcccgggtttaagcaattctcctgcctcagcctctagagtagctgggactacaggcacgtgccatcacgcccggctaatatttgtatttttggtagagatggggtttcaccatgttggccaggctggtctcaaactactgacctcaagtgatccacctgccttggcctcccaaagtgctgggattataggcatgagccaccacaaccagcctcactagtttagtctctattagcaatatttaaaattttctatagttaaaagacatatgggaaaacacattaaaatataacaatttttaaaaaaatgtttatcaacaaatatagaagtagacacaaagaaagacaaaagaaatcaattagaagcttaacagttactacctttacatcttggatacatgggtaattaaaaaactttttctactctcatttctcctatttcagacttttccacaatgatacagttccacaacagtacgaaatacttggaaaacatgaaacaaaatagttgagaaatttttaaaaattcctagacgtccaagcccacgagccttgctctcaacgtcctttcaatcaggtcctaacttgctttccctacgagtccagctagttcctctgcctcaatgagaatgtatccaagaggtgatcaactcaggctctgacctggactgcctaggtgccaaccccagctctacctctcactagttggctgctatgcaccctgtgtctcactctcatttttaaaacaaagaaaagcaatacttcacagagccacagtgtggcctaaatttatttgtataaagcacttagaatgaagttaccaattacggcttaatgattatcaacacccattcccgaggacacactctcggttgggtgaacatctctataaaggaaaaaagccaaggaccaatcacatagagatttgccctcagtagccaagaagtcccctccctgcagctcttttagaaaggtcaggctggggaaggcgaaagttgtgaaataccctgactgcatcgcggtcccccataaaagttaaatgctccccgcccttcgtggaagcggacgcaactcgctttcctaaaaagaggtcagaaggcctcccgggatcatccagcgtcctgcagggattagggagaaggaccagggcccctgcagctgaagctatgactccacccggggacctgacctcttcgggaagttaacaagagaccaccagtcaccaagtgacagggactgctttaaggttctcatttgcgttatctctttcagttcccaaaaacgattctactaggatggttctaatgtccccattaccaaaaacagcaatggaaagtataaggacattgagtaacactccacgtcacactgcgagaaagcggtcgcacaggtagggtggagagaggcaggctgagcgaggtcaaagtcctggaaacgctcacagcagggcacagaggaccccgccaattccaacccccgggatgcgagcacagcacccccatcccagaaagcttccgtggacgggaaaaaaaccccattccccgcccccaccaaacctccgctctccgccaaggcttcttttcccttgcttggatcatcgatcatcgggtcgttgcgaccccaagcgaaggtgacaagttcagaaggacccgccagacgcagaaatggctcaaactacgcggttatgtagcaaccgcaggctcacacaccggaagtgctcgcgtctccacagagcgtctggactccacttcccagaattccccggttcaactgcttgagccaaagggtccgccattccatgaagttgatggactacagttcccagaattcactcgtccacccgcctgagccaacttgcccgcgactcagagtgtgtctggactccgcttcctccaatgccaaaggaaaatgtctataatctcactcttcagcgggaagcgttggactccgcggtggtccttgactacacacaccgcagtgcccaccgggaacgtattccatatctctgagcgcctggtggggaatgt

SEQ ID NO: 21890 - DNA, 2300 bp, Homo sapien
tgaatcagtaatccaaaacctcccaatgtagaaaagcccaggatcagatggcttcactggcaaacgcttcaacacatttaaggaacatttaacaccatagctgctcaacctcttcccaaaaatgcaagaagagagaacacttctttgatccttctgtcaggtcagtattaccctgatgccaaaccagaaaaagacaattcaataaaattatacaccaatatcccttatgaatactgatgcaagaattcaccagcaaaataccagcaagatccagcagcatattaaaaggattacacttagtgaccgaactgttttattcctggaaggcgaatataattatggttcaacatacaaatatcaatgtaatactccacatgagcagagtggaaggtataaatcacatcatgtcagtgaatgcagaacattcagtttcacaaaattcagcacctagcaccttttcatgattgaaataccaaataactagaaggagaataaactaccccagcaaaataaaggctatatatggaaattctcagagctgattgtcatactcaatggtgaaggactgaaagcttttcttctaatatcaggaacacaatgagttttctccacttttcccacatttagtcaatgtagtattggaagttctatgcagaacaattagatagaaaaagaaaataaagctattaaaattggaaacagaggtaaaattgtctatatgctaatgacatgttcttatatataaaaattctaaagaattcacaagaaaaaaaaactcttagagctagtaaagtcagaaagttgcaggaaaaatatctacatagaagaagcagttgtatttctatacaaaaacaattaatctgaaaaggaaaatagttccctttgcaatagcattaaataaataaattacttaggaactgtcttaaccaatgacaagaaacacttggacactgaattttgcaacatcttactaaagaaaattaaagaaggcaccccaggcatggtggcttatgcctgtaatcccagcactttgtgaggcccaggcaggcgaataacttgaggccaggagttcgagatcagcctggccaacctggtgaaacccctgtcttcactaaaaatacaaaaattggccaggtatggtggtacgtgcctgtaatcccagctacttgggaggctgaggcaggagaatcgcttgaactcaggaggcggaggttgcagtgagccaagattgtgccactgcactccagcttgggcgacagagtgagactctgtctcaaaaaaaaaaaaaaaaaaattaaagaaggcgcaaataaatggagatatatccattattaatggattgggcgacttgatattgcaaggctgtcaatacctatatctatagattcaatgcaatccttaatcacagtaacatttttctcagaaatgaaaaaatccacctgagattcatgtgaaatatcaagggacactctctcccatggtcatattttagacctcgtcattttctagcaaatattcctccataataatttgcagcactactctccaacaactttgacttgtatttccaccttggtcccaccagcatgctagcatcagtaatattagaacctcgccaatacctacagtccactgagacgatcacctttttactctttcaactcctcgtgtactcacagcctgccaagcacatttcttgtcaggagaggacagctcacttctcctaatgtctcacttcccaaaattgtgtcccatgaaaatttctagctagatgaaggcagagaaagaaaatatttgatttcttaggctttatggaagcgataggaatggcaatagtggtttggaatggagactgcacgcaccagtcaacagggtgtgtcccgaataagcagtgggtaaaggacatttactgaaatgctatctccaactccacttcaggaaagcttgctgcagagttagagtgatatagtccaaatgctctgtttgagtcgcgggccctttgtctcacacgggcgagtccggggaattctgggaagtggagtccacacgctctgtggaggctcgagcacttccggtccccaactgtgacgttgctatttcatttaccacagtagtttgagtcatttccacatcttgcgagtccttccgaacgagtctcctttccttggggctcgcaaccacccaatgatcgattcaggagaaaagaagcctgggcggagagcagaggtttggaggggcgcgggcggggattgccgttccagtcagctgagccttctggcgtcggggggctctgctagggt

SEQ ID NO: 21891 - DNA, 2300 bp, Homo sapien
tactttaggaaaatggatacaggacattagactctttttaaaaagaaaaatataggtcgacaggtcaatgtatgtttatttgggaggacaaaaaatatggtttatcttcaaaagagaattttagatgaattgtttcctgatttagctttatactattattaatgtctttcaactaacatatgccagttttcaaattgtttcctataatgaagatattttaaccaagaaatggaaaggaagaaactcttaataataaatcatgctccgtcacctatagaatcttctccagttttatggcattgaatcagacattgggtgtcagattgataccaatgccaagctcttcaacagttatacttgctttaagatacttagcaattcactaacttctctgaaatttagcgtttctacatctaaagtagaaatattactaccatgagaatgttaaatgtagcttttccatgaggacacagcttctccattggtggctggaattttgtttttcctgtcaaaccagtggtaccacagcatctggactagggctgtaactgagaaccaccatttttctaagagacagcttatttatttctctctcttttctcattcccttagttccccacttcctatgtagccctttaaaaatgcaaatatagacttttacctccccttcaccagacacttcctacagggaaagttcatctaactgtgtgctccaagccagaactctcctccagaattaacagtcaatttacaaactaaagcatgctggcctctgaactctcactcaccaggaggttgcctgaagagacaacagttgaaagcgtgcctgctactctctcccttctggttacaacttatttctgcccatgaaaaagccagctcaactgcctaatagataaggcaccaagccagcacacagaccccttccctcttcctcccctaccttttaaaagtgcctgctttctgctctaaaagccaagccgtgcacttaaagacaacacctgtgctacttcccctacgctagctctagaataaatcactttctttataccagatctccctcttgttaactggacgttgcaaacgggaagccactgatctacttttcagttacaggggctgatgctttcctggcttctcattgcccctcccaacccattctacctggctcattctttaaaccagtggtccccaaccgttttagcaccatggaccggttttgtggaagacaatttttccacggactggggaatggtttcgggatgaaactgttccacctcagccattagattctcataaggagcgcctgacctagatccttcgcacgcacagttcacaataggatccgcgctcctatgagaatgtaatgctgggctgatctcacaggaggtggagctcaggccataatgctccctcacctgccgctcacttcctgctgtgccgcccggttcctaacagtcagtggaccggtacaggtctgtggccctggagttggatatccttgctttaaaccctgagcctcctttcagccatctgacggctcaacagtcactctatctagctccttgaatattgtatctcctcgcttgttccctgtccaagaacactcctgtcaatcatgggagacatttagacttcataaattctttctattcaatattttcgctcgaggactctgggaaggacaactgtcagggtaacagtctgcattccccaccaggaacctggggctatgaaattcgttccccgtgggtgttgcgggaagtgtaatcgaggagcaccatgtagtcgcaacacttgagcctaaagggtgaggtgatggacattttccttttgcatctgaggctctgcagtccagacaccttgcgggattcctgatacttcagctcaggtaggcgtttccggagaattctgggaagagtagtccattttacgggaagtgtagtccactggctcgtggaacactgggtattttggctctggcaggtgaaccgttgaattctgggaacgatagtccagacactctgcggagtcccgggccctttggctcaggggggcgggtccggggaattctggggagtggagtccagacactctggcgcagagaggacacttccggtctcctagtctgaggttcctgctttaatgaccggggtagtttgagccatttctgcgtcttgcaggacattttgaacgaaccccctttgcttgaggctcgcaaccacccgatgatcgatgatcgtctcaggggaaaagaagccttggcgaagagcagaggtttagaggtgcgagggcgggga

SEQ ID NO: 21892 - DNA, 2300 bp, Homo sapien
tcagatggatagtttgcaaatattttctcctattgtgtgggttgtctcttcactttgttgattgcttcctttgctgtgcagaagcttcttaacttgacgtgatcccatttgtccatttttgctttggttgtctatgcttttggggtattactcaagaaatctttgcccagaccaatgtcctggaacatttccccaatgttttcttgtagtagtttcatagttcgaggttttagatttaagtctttaatccatttcgattttatttttgtatatggtgaacaacagggttgaagtttcattcttctatatgtggatatcatgtttttctagcaccatttattgaagagactgtccttttcccaatatatatacttagcacctttgttgaaaatgagctcactgtaggtgtagaaatttatttctggattttctagtttacgcagcactaaaaagaatgtactgtacatgaagtgatttctaggatatgttgttacatgaccatagaagagttagaaacgtgctttcttttaagtaataatggaaaataagaaatctacacatactgatacggtttggctgtgtctccacccaaatctcatcttgaattatagctcccataattcccacatatcatgaaagggacctagtaggaggtaattgaatcatgggagtgggtctttcccatgctgttctcgtgatagcaaggacagatagaggagtgactttgaatagaatgggaggcaggtttgccctaagcgatttccagcttgagatttccttagtgattttgggggcccaagatattttcctttcacaatactaagcagtttaatttctcttaaatgtggcatttccacgtctaaagaatattaatatgaaaactttaaaagtgggaagatagcttttccaggagggcaattggccctccatattggcccttgacagggcaggagcatcgccatcttggacaaacactgccattttaaagttcgcgttgatcaaaaactgcctaaatccaaagggcatcagcctaatggctaaggtcagcatgaccataaaccacaaatgacatctccaatcagaaacattccaaccataagataaacccctccctgaccagagacatgccagcaccgagataacctcccttccattggagagatgtcagtcccaagataacttcccctccaaccagagatattccaaccccacaacagacttctccccaatacagaaacattctaagcctgtggtaagctctctctccctaaagccaatacatactcttagtccgtaagagagagcgctcctgactgcaatcggccagaaggccctctcggtttattctccaaaacgaacctgtctttgactgttgagccgcttttcgtgttttttttttttttctctttaactcttacagccctcttaaacacttaaactgtggttgtttttcttgccaaaccagtggtacaacagtgtctggttgtaccaggggctggtgccccactcaatgcctctcccaaaccatttttcctggcccattatttaagctcttagatttagcctcatactattagcgtctagtatattagcctttcagccatctcctgaccgctccacagtcactccccgctaactccttgaagattgtatctccttgctttgttctctttcagtaacactcctgtcatcatgggaggcgtgtagacttcaggaattcctgtctattcaatattttctctcgaggacgcagggagagggaaggaccactctcagggccacagtccatattccaaaccaggcgcttgggtctatgggattcattcctcgtgggcattgcaggaagtgtagtcaaagagcaccgcggagtcccacgcttcccgccggaaggtgatactatagaacgtctcctttgagattcaaggaagtgtagcgcaggagatctgttgaatgacgagcaagtaggctcaggacggcgtatccggggaattctgggaaatgtagttcacacgctgcgcggggtaggggcacttccgctcccggggggcgaggttgctgcagtgcattcggtggtagtttggtgtcagtcctgtgtcttgtcggtccttctaaacgtgtccccttacgatgctggctcgcaaccacctggaagttgactaaggggagaaggagtctcgttggaaaacggaggtttggagggacaacggcctctcttttcgttcttgtcagcggagccttcttggtcttggggctgtcctcgcgtccccgggcatgaggctgggggttgggacttggtcggg

SEQ ID NO: 21893 - DNA, 2300 bp, Homo sapien
cccaggagcagaggactaccaggttgcctcaggagaggtaaactggcccagggtggaaacacagcaggtcagaactcccatgctgatcagtagtgagatgttgtctgtgaatagccactgcaattctgcctgcacaacgcagggagaccccgttttcaatttatacacacacacatatacatatacatatatattttatacatacatatatacaaaataagtattggagaggatgtggagaaattactaccctcacacactgaaggtgggaatgtaaaaatggtgcagttgctgtggaaaattgtttcgtggttcccaacatagaattaccatatgaatcactaaatttcatatctaggtatataccccaaagaattgaaagtaggtgatgaaacaaatacttgtacaccactgtttgtagcaacactattgactacagccaaaaggtggaaagaacccaaatgtccctcaatcaatgaatggataaacaaattgtggcgcaagcctgtaatcccagcactttgggaggctgaggtgggcggatcacctgaggtaaggagttcgagaccagcctgactaacctggtgaaaccctgtctctactaaatacaaaaaaattagctgggtgtggtggcgcatggctgtaatgccagctacttgggaggctgaggcagaagaatcgttttaacccaggaggcgggggttgcagtgagctgagatcgtgccattgcactccagcctgggcatcaagagggaaaccccacctcaaaacaaaacaagacaaagcaaacaaaaaaaacaaatcgtagtagaaacataaaatattatgaagtactggtacatgctgtgatgtggatgaactttaaaagcagtatgctggcagggcgcggtggctcacgcctgtaatcccagcactttgggaggccgaggcgggaggatcacgaggtcaagagatcgagaccatcctggctaacacggtgaaaccccgtctctactaaaaatacagaaaaattagccaggcgtggtggcacgcgcctgtagtcccagctactcgggaggctgagacaggagaatcgcttgaacccgggaggcggaggttgcagtgagctaagatcgtgccactgcactccagcctggcactttttttgagattccgtctcaaaaaaaaaaaaaagaagcaggatgctaagtgaaaggtgtcagaaacaaaaggttccataatgtataattccatttatatgaaatgtccacaataggtaattcaataggacagagattagtgttagacagtgactgcttagtgggtatggggtttttggggtgatgaaaatgtttcctaactttttatttgtactacatatatcctaaaatggtgaatttcacgttttgtgcattacacctcaatagagatgttttaaataataaaatacattaaaatgttttgcatagataaaacaataaaaaaaaacgtttttgttgagaaaatatttgcgagataaaatgttaatatcatgaatataagaacagtgcttgaaaagtgagggataaaaccaaaaactcaataagaaagtgggcaaaacatctggacaatttacaaaaaatgtaataatgacacctgaaaatatgcaagaatatgccatctttacaagagttataaattaaaactacatgccatttcttaccactggcaaaacttatttgaagagtgtatcatctcgcttgttccctttccagtaacactcctgtcctcactagaggggtttagacttcaggaattcctttctatacggtattttctcttaggcacccagggagagggaaggacgactctcagggtagaagtccacatttcccaacaggcgctcgggggtacgagattcgttccccgtgggaagagtggtcaagggcttcccagtagtcgtcaacacttccctttgagtgtaatgctgcaggagtacagtccagaccctcagtggaatcgcggtcggtttagctccggcagttgggtcccagggaattctgggaagtgtagtccagacgctcagtggagtcgcggtcagtttggctccggctggcgggtcccggggaattctgggaagtggagtccaaacattcggtggagtcgcggacacttccgctcggggactgaggttgctgcagtttttccgcgatagtttggggcagttccgcgcgttgcaggcccttctgaatttcctggacctacgcattggatcctcaaagaactggtgatcgaattaggggaaaaggggcctcgtcggagagtagaggtttggaggggca

SEQ ID NO: 21894 - DNA, 2300 bp, Homo sapien
aaaacatgaagccctacagacaacttgataattgcccagtgagatgtatcagacttcatccctaaagaacacaaaaataataaatgtttgtctctcagtctgctcagtctgtggtcactgggtaccagcaaaaggcaacacagtgcccttgggaggacagagaaacagcagggagaataaagtggctggtaaagacagagcaagaaggagaggacaggagatgtagttagagaggtggcagggaggggatgaagagcagatcacagggtctctaaaagtcaattaaagaggttgtaactttaataaaaataagccaaacaggcttttgagctgaggaatggcaatctgacttacatttcctaaggatcactttggctgctatgagaacagatgtcaggatgtgaaggcgggtggcagggccaccaggtgtaagatggttgtcaataatccaagaaagaggtttggccatttaggccagggcaatggatttgagcatggacagaagtgaaacaggtggaagagacatacagggattcacagttgcttgattcttacctgaattcccttccctttggattgctgtcttcatcatccaaatcttttcttcccttaggaagtggaaagtatccctgtggaatgcttgatgtcctgcaaacaggcaaacttacatgcttaatcccaacacattctaggtaatatcaaggtaaagtttaccagaaatttaggttcttactgcacactcaaacttgaaccataggttcaagttactaattaagacttgaaactttgtaccctaggatacaaagccacctctggggcctgacgttctgttacagagggtgcctgtcctcacccactgagagcaggttcctgaagttctccagcatcacatctcgatacagcttcctctgagcaaggtccagcagccccagctcttcctcagtgaagaccacagccacgtccttgaaggtcattgcctcctatagcatcaaacatatgcaatctcagtctcatgaccaatgattcctgggagaggggtggcactgagcagacagaggggaggggtgggaagttgttttggatcttgagagacataggtcaactcgtagatttcctactcattctgtctgtatcctgacaatgactgatttccctgagttccaccagaaacacaaagatgaaaaagacttcctgtatttttacttcgtgcaatcattgagtcttcttgtaagtaaccctctaggactctaaatgtggcatcctgggctacacatatatatgttttgataaatcttgacaatcaccctcagcaacatttagcaattcagtcctgactttgtttgataatgcccattgtcttcctctctcaaactcgaaccctggatgttattgtttttcttcaacatttgccaaactgacaagcttatggtgacatgtttgagtagttatgcagtgagtcctctatactctccaggcaaaaactacatacattaattgcaacactgaatgtcatgatctgcagccagcgtgcctcagagcgcatatataaggctctgtcccttcccagtcatgtgaccttggacaagttggcctgaatgcattactttcctctctatataatgatcgtcacatgatatagttttcaaattaaacagtggaatatacgtatgttactggggaaaagtgtgtagcaagactgaatacttaataaacattagctatttttatttttgtcaattattgtcgattttatctcatgtctgcatagtgttccatggaactaatctattgttattctaaataatgaatatttaattttatatcttttccatgattaccaatccaataaagaacatttcaggtagatcttactctcctatttaaagtaagttttaaataacaaaatgtcagaaatttaatattatgattatgtcatgttttctcaatttttttttttacctaacttcaaaatctttcaaggggatacattattctggtttttcttaacatagccaaaagcaagttatcaattttcccattactttggtaatctgattaggaagaaattgtttttttcttttttttctttttgtagagatagagtcttgctatgtttcccaggatggtcttgagctcctggtttcaaacaatcctccttcctaagcctcctaaagtgccaggattataggtgtgagtcacaggcctggccatgattttgttttattattctcacttatttgattataaatgaataccaccatcttttcaaatatttattgacatctgtttttctccttcta

SEQ ID NO: 21895 - DNA, 2300 bp, Homo sapien
tgagaccagcctgaccagcatggagaaaccccctctctactaaaaatacaaaattagccgggcgtggtggcacatgcttgtaatcccagctacgctggaggctgaggcaggagaatcgcttgaacgcgggaggcgaaactccctctcaaaacaaaaaacaaacaaaaaacaaccaaaactgaaagctggtaatgaaacaaatacgtatacacgaacatttgtagcaacactgttcactacagccaaaaggtgaaaagaagccaaatgtgcgtcaatgtatgaatggagaaacaaattgtagtataaacataaaatattcatctatgaaaaggaatgaagtactgatacgtggtatgatgtgaataacattaaaaatattatgctaagcaaagggagttagaaacaaaatgttccattcatttttatgatttgtccaaaataggtaatagaaaagagagaaagattcatgtttccccaggaatgggattatggacaacagtagtgattgcttagtgggcatggggttttctttgggtgataaaaatgttttgtaattcaagaggtggtggtttcacaatgaagcagctactttgtctgaggtttaaacccggggttcgtcgttaagcgccagaaaaatttaggacacggacacacaaaaactcctcagtttaggagcggaggtttaataggaagaagagaaagagaaacgggttcctccatagaggaaggggtctccgagcggaaaagggtcggctggcagtgaatgtgctgagttttacagaccagtttgaggaggcagtgtctgatttacataggggtcatagattggttcgatcagttatgacgtttacatagtgcgtggggaaggctggtcgccccaccctaatcttcttatgcaaataggcttcccagttgattggcccatcttgccagcttcttactgtgcacgtggctgacaaagagaagggaagatggagccgccatctttaacatgattggcacaactgctggtatctatgtctgcggcagctggattttacaggctgctcttccttaggaagggaaataatttggggctgcttttcattaaaaagaaaagccttaccgagggctcccataccctatctgcctaagtgatggcttcttaactcgtatatattaacaacactgtattcgtactagatgccattgccattgaattatgtgccttaaaataattttgttttgtgaattacacctcaaaaatattttttaaataataaaacgaccacgttaaaaacgttttgcatagcgaaaaacaagtcaaaggaaaaaagctttttggttgagcaatatttgatacaatgttaatatgagtatgtaaataatacttaacggaggggaaaaaactaaacactcaatagaaatgtgggcaaactatttgaccaattcacaaagactataatagtggcaacggaaaatatgcacggatgttccactttatttacaaaagaacaaatacaaattaaaactacatttagaaaccatttcttaccattagattagcaaaacttaactcctcgaagactgtgtcttctcgcttgttccctttccaataacactcctgttatcattggaggcgtttagacttcagaaattcctgtctattcagtattttctgtcctggaccagggagagagaaggacgactctcaggataacagttcacattccccactaggcaggcgctcgtggctttgggattcgttcccagtgggcacctcggagtggcaacgcttccccctgaagaatgagattttgagcgtttttccttcagcattcggaggagtgtaatccaaatgctctgtggagtcgtacacactggctccagaaggaggatacaagcaattctgggaatggtagtccagacgctcagtggagtagcggtcagcttggctccggcaggcgaatcaggggatttctgggaaatgtagtccagacgctcagtggagtctcggtcaatttgactccggcaggtggatcccagggaattctgggaagtgtagtccagacgctcggggtcgtcgcggtcagtttgtctcaggaattctgggaagtggagtccagacactcagtggagtagcgggccacttccgctccgttactgtgaggttgctgcagttttgtccctggtagtttgggtcagttccgcgagacccttctgaatttcctggacctacgcattggatccttaacgaactggtgatcgaattaggggaaaagaaacctcgtcggagagcagaggtttggcggagcggggcc

SEQ ID NO: 21896 - DNA, 2300 bp, Homo sapien
gtacacacgaaatgggtagtttctatgatatgtagaatacacctcaataaagttggacaaagcattggtaattgttcatccacatgtcatttaacttaataagactggattctggatctacactgatagaatatttatagttgaatgaatgaataagcaaatgaaggagaagggagagttcacctttacagtagaatgtgcactaataaatgtatttctccttacaaaattttatttaactaaaaaattagggagtgtatattgagagcaacttgaatctgtgttcctggggtaaaaaaaaaaattcaaaataattttacaatgcggaaatctgacaaacatgactttagccaagtgaacaaagttgagatcaccaatgaagtgacaaactgacatatggcccctgttatgttgcaataagaaatttaccacttcaggctgggcacggtggctcatgcctgtaatcccacactttgggaggccaaggcggttgaatcacctgaggtcaggagtctgagaccagcctggccaacatggtgaaatcccttctctactaaaaatacaaaaattagccggatgtggtggcaggcacctgtaatcccagctacttgggaggctgaggcaggagaatagcttgaacccaggaggtggatgttgcaatgagctgagatcgtgccatgcactacagcctgggcgacaagagcgaaactccgtctcaagaaaaaaaaagagagagagagatttaccacttctgtggtattccagcaaaaaatgcatattttgaagttaaacgtgaaatacatcagaaaaactccaaatgaacatctttgaccaaaataacttcatctatactcttcaaaaataacaaggataaaataccaagaaaaaacgatgaaagctatgctatctttcaagattaaagactagaaaaacatgacaactgaaagcaacacccatgcccgaagacacatcctatacactctcggttggggtgagcatctctgtcaaagaaaaaagccaaggatcactcacgtagagctttgccctcagaagccaagaagtccctccctgcagctcttttggaaaggtcgggctgggtaaggagaaggctgtgaaacactctgaccgtggtcgccgtgccccataaaagttaaatgctcctctcccctcctggaagtggatgcaaccctcgccttcctaaaagagaggtcagaaggcgtccgggatcacccagcgtcttgcaggaatcagggagaagggccggtgcccctgcagctggagtttcaccccacccggggacctgacaggcttcgtgggaaattaacaagagaccaccagtcaccaagtgacaggggctgctttaaggctctcatttgtgttaccgctttcagttcccaaaacgattctattaggatggtcctaaactccccatcttaaagaactgtaacgggagacccaaggagattaagtaacatcccagcgttttatcgcgaggaagtggccacgcgcgtggggtgcagggaggccgagtgggcgagctcagagccccggagaccctaaaaccaggcgagacgcgacccgaccaagtcccaaacaccccggggacgcgaggagagccccaagcccaagaaggctccactgacgagaacgaaaacagcggccccgctccgccaaacctctgctctccgacgaggtttcttttcccctaattcgatcaccagttcgttaaggatccaatgcgtaggtccaggaaattcagaagggtctcgcggaactgacccaaactaccagggacaaaactgcagcaacctcacagtaacggagcggaagtggcccgctactccactgagtgtctggactccacttcccagaattcctgagacaaactgaccgcgacgaccccgagcgtctggactacacttcccagaattccctgggatccacctgccggagtcaaattgaccgagactccactgagcgtctggactacatttcccagaaatcccctgattcgcctgccggagccaagctgaccgctactccactgagcgtctggactaccattcccagaattgcttgtatcctccttctggagccagtgtgtacgactccacagagcatttggattacactcctccgaatgctgaaggaaaaacgctcaaaatctcattcttcagggggaagcgttgccactccgaggtgcccactgggaacgaatcccaaagccacgagcgcctgcctagtggggaatgtgaactgttatcctgagagtcgtccttctctctccctggtccaggaca

SEQ ID NO: 21897 - DNA, 2300 bp, Homo sapien
ttcactatgttggccaggctggtctcaaactcctggcctcaagtaatccgctggccttggcatcccaaagtactgggtttacaagcgtgagccactgcgcctggccgagatggagcatctcaataaattttgtcatttggaagggccgactagagcaacaatacagctgtaactagtatagaaatagcagtcagtcaattttcaaagagggggatgtgtggcattgtgtggttagcatagtaaccttgtttttatgtaaacacaattgtgaaaaggtatttttttagtttataaaatgaatctagaatgtgagacttcattttttaaaaaacaaaaatatagattgataagtgtattagtccattcccccattgctataaagaaatacgtgagtctgggtaatttataaagaggtttcattggctcacacagagtcctgcagcctgtaaaggaaacatggcagcatcagctcagcttctggggaggcctcaggaaacttacaaccatgctgcaaggcgactagggagccagcacttcacatggccagagtaggaggaaaagagcgaggagtgagatgctacacaattttaaacaagcagatctcatgagaactctatcaggagaacagcactagagggatggtgctaaaccattagaaacctccccggtgatccaatcgcctcccaccaggccccaactccaacactggggattacatttcaacatgagatttgggtggggacacagatctaaaccatatcaataggccaatgtatgtttatggggagaaaaaaatctggttatctttttttttttttttttttccgtgacagagtcttgctctgtcgcccaggctggagtgcagtggcatgatctcggctcactgcaacctctgcctctcaggttcaagcgattctcctacctcagtctcccgagtagctggaattacaggcacgcaccaccatgcccggctaatttttgtattcttagtagatatgggttttcaccatgttctcctggctggtctcgaactcttgacctcatggtccgcccgccttggccttcccaaagtgctgggattacaggcgtgagccaccgcacccagcccctggttatcttgaagaaagattttagatgggtttttttctgattttgctttattctattatttatttgtatcaaccaatgtaagccagattccaaattgctaactataatgacgatattttaaccaaaaaatataaaggaagaaaataaaatatgttccttcacgtataggatcctccttaatgctactgcattaaataaatcataggcattgggtgtctgacatcaatgccaagcgcttcaccagttatacttgctttgaagtattgggcaatttaagagcttctctgaaatttggtgtttttacctcttcagtagacataataccatgaaaagtgtaaacgaaagaagatagcttttccatgaggacagggcttccccactggccctctcaaatgatgattgtttttcctgccaaaccagtggtaccacagcgtctggagtaggggctggcaccttctttgttcttcattgcctctcccaaaccattgtacttgctcactcttccaacttttagttttggcctcatattatcagtttatagtaatcaatcatcaatcatctactgacccctaaaaagtcattccccatttagtccttgaagattgtatctcctcgcttgttctctttccaataatcctccgtagtcctgggaggcgtttagacttcaggaattgctgtctattcaatattttcgctcaaggactcaggcagagggaaggacgactctcagggtcacagtccacattccctaccaagcgctcagcgatataggattcgttccccatgggcagtgcgggaatcgtaggcaaggagcaccgcggagtcccatcgcttttccctgaagggtgagattctgaacgtttttccctcagcattctgagtgtaatccaaacgctcagtggagtcgtggtccatttgacccacgcagggggatccggggaattctgggaaatgtagtcccgccaatcagtggagtcgcgggcacttccgctccagggaagagggggcgattgtcacggcacattccacggtagtttcttccagttccgcgactcgcgggcccctcctaatgtcagggacttaagattggggctcgctgggacctggtggtccggttatgggaaaagaagcctcgtgggagagcagaggtttggtggggcgagggcggcggcttttgttgtgtcagcgga

SEQ ID NO: 21898 - DNA, 2300 bp, Homo sapien
ttgaggctgggaagtccaaggtcaagatgctggcaggtttaacatctggtgagggctgctgctgtctgcttccaatatggcatccagttgctgcatcctctggaggagacagatgctatgtcctcatatggtggaagtgatgaaaaagcaagaagggattaagttttaacaagggaacaccatcaaactatagcatgttgcaagcaggccttttaagtacaacagtctcaggcctatgttaactcttttctgaacaaagggcttcagaaatccagtacctatattcttttctttctttttctttctttgtatcaccagataccacattaggtcatcttccttcaaggtaatttgtaaccaaaaccagtagactaaaccaaataatttcttgcccctctgccccataactgataagactgtaggtacagtctacatctaccctcctcatgaccagagttttcaggttagtcacaagacagctgtagaagctgggagctatctggctttgtttttggttggttgttgtttgttcacagtcaagaggagagaactgtttcatttgtaatattgtatagttcatgtctcccaaaatgcatggctactctaactcccattcacacacaagattaattccttagctcttacctagtatgcccagcccttgtgggatcattcagttttttcatctgtgggcctaacttgcctgttcatctttggccgttgggatttccctgtcttagctttgagtttagctacattttaacgctttaggggatattgtcacataacatttttctatctttgaaaagatccacaatattatgtaatgattaccactatctaatcctagaactctttcatctgctcccaaaagaaatcccctacatgagctgggtgtggtggtgcatgcctgtagtctcaactacccagggggctgaggcgggaggatcacttgagcccaagaatttaaggctgcagtgtgctatgatcatgcctgtgaatagccactgtactccattctgggaaacataacaagacgctgtctctaaaaaagtaagaaaaaaaaaaccctacatattgacagtcactccccattcccaactacatctccccagccttggagacaactaatttactttctgtctctatggacttgcctattctgcacatttgatataaatggaatcataccatatatggtatcttgtgtctggcttctttcattggacataatgtcttcagagttcatctatgttataacatgaatcaatattttgttcattcacattactaaataatattgcattatatggctagaccacattttgtttatccactcatcagctgatggacattgggtcttctccactttttgactattatgactaatgctgctatgaacttttttagaacaagtttttgtgtggatatctttcagttctcctgggtatttacttaggagtgaaattgctggcacataagccccagatcgggtgccagcagattcagtgtctggtgaggtcccgctttctaagtcatacatggtccttctggctgtgtcctcacataactaaagaggcaaaggagctccctcaggccacttataagagagcattaatcctattcatgagggcattgccctcttgatctgatcacgtcccataggttccacctcctaatatcttcttgggagttaggatttaaacatacgaatttggtgggggccataaacactcagaccataataatacctaaagagaagtgagggattctgggaaatgaaaaccaggagctcaaggtagttggacacttccacatcagaaggcttggacattccggaagtgtagtccaggagggcggtactgttctgtttttcccccaactccagcattctgtgatatgtagtccggagttccgtgtagtcgcgcatagctcagctgcagtaaggctgtaaatgtttcccctgcggaatcctgggaactgtaggtccaatcgttctaggtagttgtaggcacttccggctcgaggaaggcagtgctgtggaattctgggaagcgtagtccaggtcctcctgatactcgcaggcacttccgcccaggaagacgacgtagcagccatcttttccctggctttggtgattcaggtcagcttctcaggaacctttcaaacttccccgaaatgcacttgtggtcagcagctagcggtcttttgtttggggaaaaaaaggagtagcggctaagagcggaggtttgaggggccaggatgctgttttgcgtttccctgggcggagcttgttagaa

SEQ ID NO: 21899 - DNA, 2300 bp, Homo sapien
acagaagaaatggaagcactagtattttaatctagatagctttatactaaggctgtaatattagctactacacactacttttattagtctacaaggcaagaacccacagtaagtcttattagagcagggaatatttaagctatggatgaagaccgtcacccaggagggaaaagagtagcaggttatgacagaaggaacaccaaatacaaagaattagaggctttttgtaggagtacaagtaatccactatggctggacatgtagagtggaaagtggattccaagagagaaacagcatctggaaaattcctgtttgtgcgacttgttaaagcatttgaaccttctcttaagggcactggatagacatgcaggtgaaaataatcaaatttccatcttaggagatatacttaacctctctctgcctctggatcccaaagagtaaactagaggacattatttgttttaaaaaagttgtgaaaatgggctaagtgtggtggctcatgcctgtaatcctagcactttgggaggccggggcgggtggatcacctgaggtcaggaattcaagactagcctggccaagatggcaaaaccccgtctctactaaaaatacaaaaattagctgggcgtggtggggaggggggtgcctataaccccagcgacttgggaggctgaggcaggagacttgcttgaaccttgtgtgagggcggaggttgcaatgagccgaggtcatgccacttcactccagcctgggcaaaagagccaaactctgtctaacaacaacaacaacaacaacaacaacaaaacagaacaaaaaaaaaaagaaaaaagttgtgaaaatgtagtgagggtcccatagtctgaatagtttgaactagttcctggcacatacttggttctttataagagatagttgtatataacagaataaagaatatatatttagtaaatgagaactgcaaacatgtactgtagtagatatgtggatatttttaggtattgctctcttctttcaaccctcaattcttggaaacatcaattccattatacatttaagcaaataaagatcaaggtttaaacactgaagtaataaatttgttcatctttcaaattcagaaactccttgaggaatgattacagaggccctagttgctttgtggagttgatctaccatatgccaaagcttgtgttttctatgtctagctatcctcagtaagcaagttgttctgaattatatgactgtgctattaagaaaagtggaaatccataatatattctgccttcgttgcattttttgattgctctttcattcttttagtatctaaagagtagtttttctattagtcgatcctgttaaatgtaaaaacttaaagggtttcctctgccctttttttttttttttttggaagtggtgggtataattctattagtacaggatcacgtgatctgtttcttataatagttttttttttcttttttttttttttgagacagagtctcactctgtcgcccaggctggagtgcagtggcacgatcttggctcactgcaccctccagggttcaagcgattcttatgcctcagcctcccaagtagctgggactacaggcgcgcgccaccacgcccggctaatttttatatttttagtagagacggggcttcatcatattggccaagctggtctggaactcctgacctcgtgatccgcccgcctcggcctcccaaagtgctgggagtctttttttattttagggctccaattcttcacatatttgctgttactttttgttaataagaaaaacctaaattccactgacatcagagaactgcttcagcctggctaaacagcaataagccgtgaagaggattctggatgttgtagtccgggagctccgagaattttgtcacactctccgtaaccctctctcactcgctcgctccgtttttttttttgtttttttttttttcaagcgcgaagagggcggcacctggatggtttttccttctggaagttctgggaaacgtattccagaactctgtccggaaacaattgggccgcaggagcgcgggccttctgggaagggtagttcaggagctctgggcaggcagagccacttccgccccggaaagcgaggccgccaccatcttttgggtccgggaggtgagtcagccctgcacccccacgacccctcttgaaccttttcagcctgtgcttgggaataggcgctccccagccatcagtcttgggatggagaggtcgcggccgcggcggaggccgagaggccgagggcgggaagtttgctctc

SEQ ID NO: 21900 - DNA, 2300 bp, Homo sapien
agaagatataacaatacagacattacacagctagtccccaaatatatggtgtgaaaattgatggaactgaagggagacataaatatttctacaatgttttcagacttcagtatctcactttcaataatggatacaacaaccagacaaaagatcaataaagaattagaggatttggaaacataaaccaaactcctagcagatatatacaaagcaccccacctaaaaccagcagaatacatatttttcttaagtggtcatgaaacattttctgggatagatcatacattaggccacaaaacaggtctcaataaaaataaaaaatctcacgtatcaacagaaagataaagtcacatgaaatgtattctcaggccacaaaaaaatgaaactcaaatcagtaatgaggaaaactggaaaattcacaaatgtgtggaaattaaacagcacactcataaaaaccgatggggatagaagttacagggaaattagaaaatactttgagatgaaaacaaaacatgattcaggattcctttggtgctaaaataataaaattctgctgactgagctaaaaaaatttgtgatagaaaatatcaaaggcagttccccactctatacacaatacccacccccataacttaaataaaacaactttctcctttctagagaaaatcacattggaaacaaagcctctgcaagaagtcctgatatatgtgcttttacaaggctgctaaatattacttcatttttgataccacattgacttgatctattgatgatcattctattgcatttatcatctcaagagcaagctgagtggatacaaaaaaaaatttaaattgaaataagggaagaagcattttcaagatataatttagatgttgtttttttccaaattacaatacagttggctcttgaacaacacaggtttaaactgcatgggtccacttatatgtgaattttttttcaacaaatatattgcaattttttttggaaatttgcaacaatttgaaaaagctcacagataagccgtgtagtctagaaatatcaaacaattaagaaaaatttaggtatatcatgaatgcataaaatatatgtagatattagtctattttatcatttactaccataaaatatacatgaatctattaaaaaaaggtaaaacttataaaaacttacacacacaaacacagactgtacgttcacagtcaagagaaatgtaaaacaaagatgcaatattaaatcaagcctgcataaagttaactgtagtacatgctgtgctactgtaataatttaatagctatctcctgtcactgttgtggtgagctcatgtgtgtaaatatctgcttaaaattccaagtaatgctaatcatctcaaagtgagcagttcatctctctagtaaattgcgtattacagtaaaaagtgatctaaaggtttcttattttttattgtgtttagtgcaatactataaaacttgaatactaccatgggacctatgtgaactgccactagtgatgttgcaagtgctcccaagatgcatagaaaagtcatgacattataagaaaaagttgaattgcttgatatgtactgtagaatgaggtctgaagctgcagctgcctgccatttcagaaagatggtttattttgtaaacagatggtgtaaacttacagtatcaataccgtacagaactgtaaatatttctcttcttcttgattttctttttttcttttttcttttttttttggagctggagtctcactgtcgcctaggctggagtgcagtggcacgatattggctcactgcaacctctgcctcctgggttcaagcaattctcctgcctcagcctctggagtagctgggattacaggcatgtgccaccacgcccagctaatttttgtatttttagtagagacggggtttcaccatgttggccaggctggtctcaaactgctgacctagtgatccacccccccttggcctcccaaagtgctgggattacaggcgtgagccactgcacctggcccctcttggtccctcttggctgggcagggcggtagcctgtttccgctcgggcattctgggaagtgtagtgcagaagccgttgcaaccttgtgtacttccgctgcaggagggcgaagcagccgtcatctatcccctctgggaggtgagtcagcgcggaacctctgcatctacggcgagctttcctggcctgggcgttggactcgcaggtgcctgccctcgctctcagtgaagggaagtcgcagagggcggggacgacggtttgcttgccctttgtttttagggc

SEQ ID NO: 21901 - DNA, 2300 bp, Homo sapien
tatctcacaggcaaaacagatgcttgatttactaattataccccaaatgccccagctacgctgaaggcttccaagaggagggattacaagagaaggacagggaagctggtcctctctggaggcagagtggcaggagcaaaggcacgagaggacttgacaacctaggaatgaacaaagtctggaaattcaggcctcgaaaagtggccctggtacatgtagtgagcagagctgagccaggcaccccaaaccccatttgtttttttctactaaatgtcgtgaaatgtcaagtcttgcaaaatcctgttactgagcagagcaggagggtgcaggtaaatataggaccagaacaaagggaattggatattaaaaattgatctctctccctagctttcagaagagaatacattgctctcgtccctactagagtgtttctgcctgaagtaggaggacccacgaacaggagtagctatctgtattgaatgctatcttgtatatactcactgaaacctcttaataaccctacgaggtagatactgttattgtcctcactttatgggtgaggaaataggcacaaagagctagtaagtcagaagagtcaattaggatattaggttcctcatcatctggctccagtatccctcagcagatcattttcagcagttcataccctccaacttccccttctctgatctctaagacatgattccttccatgtcttcatatttctgattagagaaggagacacgattaagagacaggctctggactcagctggattcagatgcagtctcacctcaccagctctgtgaccttgggcaacttaatctcagtaatcctcagcttcctcatccattaaatgggaacgacagtcatcatatcatcacttattgagagcttatataatgtgccacagacagaaccaaggcttttaccccatttaaaaaattgagtcataattcatataccatataattcacccttttaaagtgtgcaattcggtggtatttagtgtatccacaatgttaggttgtacaaccatcactattttctaattgaagaacatttgtatcacccccaaaagaaacctcatatgccctagccatcactctttactatctcttctctcagcccctggcaactattactttttgtctctatggtttagcctagccaagactattcgatttgctcattaatccccaaagcaactgtaaattagaatctgttattagtactacagtatttttcatttaagtgagacagatactgtcaaacttttgtttaaaaaaaagctagcagagacacattttaaattagtatttccttacgacagtgagcacgggaaagggagatacaccattgagactctcctggctacatgaagaaaattcataagtatttataccttttacaaaactgaatgctgatatcaattaaatattataggacaacaaagtagtaagtaatatagccaatcagaattatagacttttcagaggtaaaggtgaatttcataagataaagcattgtacagtctttgaaatctggatgttataaaagactctcttattggaaatgatggcaaaagacatttgcaacaacaattttatgatgcataatatcatctgcttttctgcagcttgcagggaaatcagttatacgagtttccatctgttcacacatttaacccttacaataatcttgcaagaaagcactatttttctcatttgcaggtgacaaatttgaggaatggggaggttaattagcttaaacagagttagtagccatgccaggatttgaccccagaccttgtgaccccagaatccacttttgtagccagtacattctgctgcaagtagctgggattacaggtgtgtgccaccacacccagctaattattgtatttttttgtagagatggggtttcgtcatgttgcgggctagtctcgaactcctgagctcaagcaatctgcctgcctcggcctcccaaagtgctgggattacaggcatgagccaccatgcccggccaccttttaaaaattcagccagcacagccatgtgggctagggcctgtttctcatggcttctttctcttttcccagttctgccttcccaggaccctgcccttccccagaaggagcaggagaaaatgaccaagtttcaggtgagttgagttttgatttttatctcttaaaatgacatctcttttcctcaaagattagacacttttttttctcttccttgggaaagataaaggaggaaaacaggtatttggaatctgctagttacttgattttcgat

SEQ ID NO: 21902 - DNA, 2300 bp, Homo sapien
ctgtgaaggtgccaacgctccgtcgaagtgttgttctccattactgcaatcaacaataaattctgttttttgtcttatcaacaggttgagttgatgatatttggggagccggcatttgacacaagtttgagatctggtgttccttaacgttcagcgtccatcggagctcagcctaagtcacttttacgcttcccattttagcctaccctctgcttctgcgaaaaattttggtttctaacttattttaataatacaagctgcacttttcatttttatatgtcatcactttaaaaattttacaattattttctcatgagcttttaaaaatgaataaaacaaaaacgaatctcacagtagtagcaccagagaagtggctcaaacccaaccggcttgagtcaaaacaaagcccagctggtgggaagcgctgcccttggagcattctgggaactgtagtccaggagtgagagaactctgagacgcttccgcttaggaattctgggaagtggagtccacgaaccgtgggcactcggaggcacttccgctccaggaaggcgaggtcggatctgagatatctcccagggaggtgagtcagctccgggtctccaagacttctccgagccctctttgcctaggcgtggggccagcaatgaacccgtccttggcttggggaagagaagccgcggccagcgctggagggcggggttgggaggctgcgggagtttgcgtcccctcggcagaacctcttgcgtgggaggcgggctcgcgtcgtccttcgaggttgagggtctgctgccctagccgtcctcacgcacctaccagccagtcctgcctgctcctcgcagtaaaatattgggcaagttacttaatctctccttgtctcagtttcctcgtgcctgtaaagggttagtgcgttcccagtgatgttcttgtgagaattaaatgaggttttatagaaataagcttaaaaccagtgcataggaaaatgttggatgccaccgttaattctgttataatactgaaaaagacgcctgttgtttggaaactcctctgagtctaggagatccagctacggagccgctgtcccttctctaatccttgcctgatgtggggccgttcctggattcttggacttttctagcctcttgtttaggagacaggaattagttccagcggagcctggggaatgtcctgtgtgttttatctcagataagcgatcgtcattacggatttgcagagtgccagaggtgtcctgaggccctaataaatgttcagtataatgtggttataaccaataatcccgtgtggttaacttaagtgtaacaccatttcttagagagttttaggtttttattagtcattgctttcatgcatgtggaaaaagagactttcttgaggctcctccagcttagtaacatttgcaagtaattacatctgttggaggaaaaaaaaacctgtggcagtttaactatcattaccaacggaactaattatgttagacaaccaatcacagttacagacttttctgagggtaatggtaactcacaggacagagcaattatttttgagttctgggtttcttaaaagattcattttctagaaagcatactcaaaagggcagttttatgaagcataatagcacttgcttgtcagaagctgcaggaaatagagaatacaggcattattattgtccccattcacaggtaactgaattaaggcacagagagattaataattcgcttaaggtttatactgctgatcagttgaaaataggtagaaatgccaaaatttgaagccaggcattttggctctgttacattcccctgcctgtctgtgtctcatttccttggaaactaaagttcagaaggagtacacagagagctgtatttgatttaggtctgttaatatgaaatgttcatgaacaaaagcagctggttgagggggccgaggggtagctgggagctagctcccgttctcctcactaagccgtgtgcaactgtgtctgcctagagacagggggacctttctctgaagtgtcacataaaagtgccatggtgactaatgccatccctaacctatctcatgatgcctttccctccctcaggttcacttccccggaactctgccttttcccagaaggaggaggggaaaaatgaccaagttccaggtaagtttggtttgcctttgtgtttcttaaaatgacatctcatttcacaaagattggacacatttttcctgtttgggaacagtaaaagggaacgaaaggcacttggaatgttgttatatgccaggttgttgccttt

SEQ ID NO: 21903 - DNA, 2300 bp, Homo sapien
cttaatttcatttatgtcaggatcaggatcaaagtatgtaatgaaatatttgaagccgaacacaaattagaaaacaattcaagattttacacatgcccatattacaacgttgtcttagattcccggccaatggagctgcttttgtttgccataacagtacacatttaaaataaatgaagttcaagatatttctctggcttaatatttatattgcctttttgtgggttcttagtatattagaacgaatagcacattaaacaaaacactgtcatgagcccttaggtaccttgaggaataatggagggaaaagagtcaaacactttactcccttctctccttgtcaccgacccctaaatatacacaacttggacactaaggactaaaactccatcctctttccctgcccctcactgatacggaagaggggaatggaagtgctggaggggagaagggtgtggtccctgactagggctctacccccaggcctgtggccacggacctaggtgaggacaggcattcctgcctttgtgcccaaatattgcatttcccaagaccaccctggcccaccacgcccccatcctgtgcctataaaaaccctgataccctagcaggcagagacacaagctgctggacgttgagaggagagcattggcggacacacaaacagctggctgtcgagaggctgtcgaggggagcgggtcggcaaaagagcacactgaagagaccggcaggccagcaggccattaaccggtggaataacgcagtttggcctgggtagtcggaggagcgcccaggccgctgagaggctgactccaggcgaaaaccatctcccttctggctcccccttctgctgagagctacttacaaatcgttctccaaggtttctccaatccttgcactctttctccaagcctatgtgtgatgcgattcttctggtacaccaaggcaagaacctctgggatacagaaagccctctcttgcttgcgataagtcaggggtctaattgagctaacacaagcctcctacagatggctgaactaaaaaagcaccctataacacacgcccactggggcttcaggagctgtaaacattcacccctagacactgccgtggggttggagccctacaacctgcccgtgtgcatgctcccctagaggtttgagcggctgggcacgaagaagcgagccacaccccatcacatgccctgggagagggagaagtgaacttttcccgtttcatcacaatttactttcggcactaacatgattgttcagctgtcttcatcagcaggcctttattccaggagattcctgcccaagcaaactgtttaattgttcattatgggaacttccacagagacccatcaaattttcaatctcttccaaagaaagtgtcaatagattgcaatttaagattctttgcttcaaaaatccttgctatatccaccaatcctggactgtagtatcatgatcattatgcaatactaataaaatcccttgcattgaaagacccgccttaaacatccagttctcaatcagttccaaccttgccttgacactttgctctgtgaaggtgccaacgctccgtcgaagtgttgttctccattactgcaatcaacaataaattctgttttttgtcttatcaacaggttgagttgatgatatttggggagccggcatttgacacaagtttgagatctggtgttccttaacgttcagcgtccatcggagctcagcctaagtcacttttacgcttcccattttagcctaccctctgcttctgcgaaaaattttggtttctaacttattttaataatacaagctgcacttttcatttttatatgtcatcactttaaaaattttacaattattttctcatgagcttttaaaaatgaataaaacaaaaacgaatctcacagtagtagcaccagagaagtggctcaaacccaaccggcttgagtcaaaacaaagcccagctggtgggaagcgctgcccttggagcattctgggaactgtagtccaggagtgagagaactctgagacgcttccgcttaggaattctgggaagtggagtccacgaaccgtgggcactcggaggcacttccgctccaggaaggcgaggtcggatctgagatatctcccagggaggtgagtcagctccgggtctccaagacttctccgagccctctttgcctaggcgtggggccagcaatgaacccgtccttggcttggggaagagaagccgcggccagcgctggagggcggggttgggaggctgcgggagtttgcgtcccctcggca

SEQ ID NO: 21904 - DNA, 2300 bp, Homo sapien
aaatgcacacatgaatcatttagttgtatttttattgatttctagccaaatttcattgtattcaaaagcatatttagtatttcagtattttgaaatcccgtatcattttgctaatttgtgcaaatcttatgtgcacttgaaaagatgcgaattttagtttttgctagaatcttttgttcccccagcttcatataggtgtcaaaagtgctgcagagcttctaggcttttcagatcctaaactagaccatcatccccaggagaaaagtagccccaaatgcatgactctcccaagtgtttctgaattttggcccaccatttctccattatcttgtcttttgatgccttttgacatttaaaaagtttgctcatctttcctctgccagatgtttgttccaaatcactcattttattattactggaagtggaagtacacaaagtattattctgtcccttttatttttaaaatttcctttcattttataaaaaaaaatcccctattatcagattgatcctctttaatatgtaaaccgtatgtattttcagaaacatttccttggaaaggagttgttaaataaagaatcaaatagtctcatctcttaatagtgtctttttttttttcttttgagacggagtctcgctctgttgcccaggctggagtgcagtggtgcgatctcggctcactgcaagctccgcctcccgggttcacgccattctcctgcctcagcctcccgagtagctgggactacaggtgcccgccaccacgcccggctaattttttgtattttttgtagagacggggtttcaccatgttagccaggatggtctcgatctcctgaccccgtgagcattttcacagattggtcgttatgtctttttattttcctcttccttttctggattgagtcaacccattcaccgtcctccctgaatcatcctgtcctccataagacaacttacaatatttgctatatcaagagcagggtgaaaataggtgatagatttttctcaaagaagaaaaaaatttcgaggttttacaagagacttatcccttcccataataataacattttgtctgtatcagtacagcccttctatttgccttatgacttgcatttcatcatcagtagttaaagcagaggaaacgtgggaaccatttactgtttctgcttatggcctcatcaacggttgcatctgtttttttgtggattcttggcatccacgttcttgtggatcttgcaacaaacacattatggtaggtagcagcagcactatcagtttcagacgcgtccacaccaaaatggaataaaaaggtaatcgagtcaaagaaaggttgagatcctgtattccttaaattcggtgtccagtacaaatcagcccaatttcctttaagtacctgcatttttagcgcacacatcgcttccattctgtaattcttttcttttttcttcctgtattgcaagcttctctgttctctcctttatgggatattttcttggtaagtaggtaggtaggtaggtaaagtccgctttggttgagtttatttgggtttgtgtcgcgtttgaagaaaaataaattcaaactctagggggaaggcagtagaactggactagcagtataaaattggatggctaaccaaaagagaatagtgactatacaaatactgactatccaaacgagaaagagacgacttaagggaaagtgctaccctgcaagaaattccgggaattgtccagaagatccacagggtcagagacacacgcgccaggaaaggcgcctttcatgcacggtccgctgggtaaaacagagaaatatatatacgagctctctgtctttggaagcatttcggttccaggaagggggagttaaggaattcctttgggaccggcacatgtgaaatatcatccaggctctcagcttggcacccggtacttgcgtcctaggcaggcagataagtggagagtttttctaggaattctgggaaatgtagtttgggagccccgtgtagtcgggtaacttccgctctaggaggctgaggccgtctccctgatcccgtcgggaattctgggaagcgtagtccaggaggtctcggtaggcagagccacttccgccccaggtacgctaggccgcggccttcgttcctcccagaaaggtgagcgctccccgccctgcttcctgctccttccgtccatactgatgttcgttttgttggggtccagtagcaaccgggcagtagctctaggggaggataatccacttgcggcgaagggcgggatttgtgttatctttgaatgagccttctc

SEQ ID NO: 21905 - DNA, 2300 bp, Homo sapien
cacaacttttaaaaagtaaagccatttgtatacctagtaacttgacttttgaaaaatgaagcaggctgggcatggtggctcacgcctgtaatcccagcactttgggaggccgaggtgggcagatcacaaggtcaggagatggagaccatcctggctaacacggtgaaaccctgtctctactaaaaatacaaaaaaattagctgggcctggtggcgggcacctgtagtcccagctactcgggaggctgaagcaggagaatggtgtgaacctgggaggcagagcttgcagtgagttgagatggcgccactgcactccagcctgggcaacagagcaagactcagtctcaaaaaaaaaataaaggaaataaataaataaataaataaataaataaagcaaatgctatagagaggaaaatgacaaatttaccattataggcttttttttctttcacttttttcttttttctttttttttggtgacagagtcttgctctgtcgcccaggctggagtgcagtggcatgatctcggctcattgcaacctccacctcctgggttcaagtgattctcttgcctcagcctcccaagtagctgggactacacgtgcttgccaccatgcctggctaagttttgtatttttagtagcgatggggtttcaccaccttggccaggctggtcttgaactcctcaccgcgtgatctgcccacctcggcctcccaaagtactgagattacaggcttgagccaccacgcccagactgggaacctttttgacatgcacttttcaatcgttgacagatgcataatgaaaaaatctaagtaagcacaaataagcatgtaggaaatttaaatagcacagttagcaagtctggggaaaatataaatgtatgcatatccatctgatagagaagacacattgttttccaacagacacagatgtcacaaaaattaaccttgtattaggtcaaaaataaaaatgttcctgaactcgttttttaaaattcaagtatgtcaaattaaatcaagtaatccttcaacttagagcaatatataagaacatcaaacatgtaaacatcaaaagacagagataagccaaaacaattgcactgtccctttatgtgccctaagctgcgatgtcaagctatagttggatattattcaaccatttcctgcccattgcgtagaggtgggggtcttcacttctctatctagtctaggactggaaccgcctcaccacccctacagcttgagggtgcgtggaaaagggaatgccagccagatattccaaacagagcctctgccagcaggaccaggtgacctttcctaggagacagattgttctcacacgttatcagggctttcctccaggctaaaactgtgggcctctaatggaattcttattcaattttcttaccccatttagggtacccaaatttttctttaatagaaatcttaaatcttaaatgcaataacatgaagtaaaataaagcctaagtctcaacaagggcaaattttcaaaaagaatctgaaaacttcccgcgttttcttgttatgttgtaatgtgtctcttttaggacactctcagtactcctgcaattcccctattaaggattcagacaatagttgttaattccttctgcttcttctgagactaggaaataaattacagggctatgttatatcgcaagtgtagattatccagagttttcatcaacagaaataaaacatggggggggcggggagggaattatttaagtgaatgttaattgaaaagtttcgtggttttaacgttaaaagacatgcctataaaataagaacctataaaagtcttcactaaaacggtaaagtgcccatttccaagtagtaaaatattgaaacttcttttcatcgttgatagtgatttatttaacatttcattattttatcgttattatgattgtcgttattttagacgaatgcacggaagtcaaaggacttccaaatgcacggaagtcaaaggccaccttcaccagggtagccttgcgaatggccactgctgcgcgcggggctttctggggattgtaggccataggcctccttgcgcatgcgccgtggtactggacgcacgctgcgggcgacattgtttgggacgctggggtgagtcccgtctgtaccgcgcccctcttggaggcgtagccaggagtaggggtgtaggatgtgcagctgtgacccgtccctgtggactgaagtaggaggagtggaagaggggactggtaaccaatgataaggcctcgtaggtggggtagactagggaagttcagcggc

SEQ ID NO: 21906 - DNA, 2300 bp, Homo sapien
ccgggttcatactattctcctgcctcagcctcctgactagctgtgactacaggcaccccccaccatgcccggctaattttttttgttttcttttttgtatttttagtagagatggggtttcaccgtgttagccaggatggtctcgatctcctgacctcgtgatctgcctgcctcggcctcccaaagtgctctgattacaggcatgagccaccgtgcccggccaagacacttgattgaattgcttaagtgcttcccatgtgccagagccatgaaaggtaaataaagaaaataaagaaaaagaagagtcaattattttgatgacttagagatctgaccatggaggccatgtgaaaggtggtaaccagcaatttaaaccatgtgttgctggatcccagagtaatataatttattgatttctcggggaaatgagaatgttctgagagtggtatttaacatccactacactcgcatgaaattctcccaatcacagactgatctgttcattgaattatgatatagagttcaaaaacactcgatagaggaaattatattcaagttgtgtcttaaatatggagtaagattttaatagtacaggaaaggatggacttacagagggaagaacaatagcagcaaattcagacatttgtaaaactggaggacacaggatgggaagtaggactgtgtctacccaagcaaagaggggtgggtttggaaccaaatatctgaagggcttggatgctttggagtcaattggcaattttttagaatttatcaaaacaattcgataatctgtttataagagagagttctagaacttctaggatgaaatttttgaaacacaacaaggagggagagataaggaaatgagttatcactgtaactgaaacctttcatcatggcacagaaaaagcaatctctatcttcagaacacacttgtatcccagaaaatatttcattatatatatagtaatgtagtaagtgattaggatgccgtttaaatcagaaaggaaagaattaatatttatgtaaattttgttaagaaaagtagacaatcctttggtgaaacaggaaactccatcttcctttcatatcatacacttaaatgaatcacgcggtgattcaaaagaaaaatgaaagagcctgaaatgaatatagatatgcacttattgggaatcaggctaaggaatgtctttttggtcatactggagaaaaaaaagaagccacaaatgaaaagactgatataccttgtcagatgaagttttttgtttttttttttttctaaactactttataaatgttgaaactgggggagcaattcatcacttagaagcgatatcattcatacacagagagtgtatgacaataaaagatgacaatgaaatgcaatcggtaataagcatatttactctgtcaaattgggaaaataagacaggatatttagtccatcaaattgggaaaatattaaagaaagtgattgtgtgtagttttgatatcataaaattagaagtgtaagttcaatgcaggacaaaggggtaacttccctaaaaactaaagaatgctaggcaagtattgcaaataatttgtgtttttttattatctctatgtatctctacgtcttttgtgacatacagaactatccacgatatatgacctgtggcaagaaatgattacaaaatattatgatgccatttgggaaatgggattcttaagaattcatatttactcacataaaccagggattaagtaagaattttttttaaaccattctttacatgtaatatgaactacttttgaaataaatatttagttggcttttacaccagaaaatcaataatgctttatatccctggtgatgggatgatgggcttgtttgagaatatagtcaggtttgctacaacgcgaatatgttagtactgagtaaagacattcttttcaactcagaaacaccttgcatgccgcctcccgccgcctcgcagtgggcgtgactcgaggtggacgcgcatttacgacaccatcgcccctaggatcggactgcgctgcggagggttctgggaaaggtagtcccacacctcgagtcgactacttccgtttccggtgggcgcgtcaccttgattgcttcttaggcagtggtgaggcgtcttagagacgtgcatctccatgcggttgtactgtcaggccatgggaattaggatcggctctataggaccagtgtgaagggacaacgtgcggcggagggtcgaagcccacggatttccatgagctcggcctggtgaggcaggggtgtaaggaggcgcacgtat

SEQ ID NO: 21907 - DNA, 2300 bp, Homo sapien
tatgtttattttattattattattttttgagatggagtcttgctctgtcgcccaggctagagtgcagtggtttgatctcggctcactgcaagctccttctcccgggttcatactattctcctgcctcagcctcctgactagctgtgactacaggcaccccccaccatgcccggctaattttttttgttttcttttttgtatttttagtagagatggggtttcaccgtgttagccaggatggtctcgatctcctgacctcgtgatctgcctgcctcggcctcccaaagtgctctgattacaggcatgagccaccgtgcccggccaagacacttgattgaattgcttaagtgcttcccatgtgccagagccatgaaaggtaaataaagaaaataaagaaaaagaagagtcaattattttgatgacttagagatctgaccatggaggccatgtgaaaggtggtaaccagcaatttaaaccatgtgttgctggatcccagagtaatataatttattgatttctcggggaaatgagaatgttctgagagtggtatttaacatccactacactcgcatgaaattctcccaatcacagactgatctgttcattgaattatgatatagagttcaaaaacactcgatagaggaaattatattcaagttgtgtcttaaatatggagtaagattttaatagtacaggaaaggatggacttacagagggaagaacaatagcagcaaattcagacatttgtaaaactggaggacacaggatgggaagtaggactgtgtctacccaagcaaagaggggtgggtttggaaccaaatatctgaagggcttggatgctttggagtcaattggcaattttttagaatttatcaaaacaattcgataatctgtttataagagagagttctagaacttctaggatgaaatttttgaaacacaacaaggagggagagataaggaaatgagttatcactgtaactgaaacctttcatcatggcacagaaaaagcaatctctatcttcagaacacacttgtatcccagaaaatatttcattatatatatagtaatgtagtaagtgattaggatgccgtttaaatcagaaaggaaagaattaatatttatgtaaattttgttaagaaaagtagacaatcctttggtgaaacaggaaactccatcttcctttcatatcatacacttaaatgaatcacgcggtgattcaaaagaaaaatgaaagagcctgaaatgaatatagatatgcacttattgggaatcaggctaaggaatgtctttttggtcatactggagaaaaaaaagaagccacaaatgaaaagactgatataccttgtcagatgaagttttttgtttttttttttttctaaactactttataaatgttgaaactgggggagcaattcatcacttagaagcgatatcattcatacacagagagtgtatgacaataaaagatgacaatgaaatgcaatcggtaataagcatatttactctgtcaaattgggaaaataagacaggatatttagtccatcaaattgggaaaatattaaagaaagtgattgtgtgtagttttgatatcataaaattagaagtgtaagttcaatgcaggacaaaggggtaacttccctaaaaactaaagaatgctaggcaagtattgcaaataatttgtgtttttttattatctctatgtatctctacgtcttttgtgacatacagaactatccacgatatatgacctgtggcaagaaatgattacaaaatattatgatgccatttgggaaatgggattcttaagaattcatatttactcacataaaccagggattaagtaagaattttttttaaaccattctttacatgtaatatgaactacttttgaaataaatatttagttggcttttacaccagaaaatcaataatgctttatatccctggtgatgggatgatgggcttgtttgagaatatagtcaggtttgctacaacgcgaatatgttagtactgagtaaagacattcttttcaactcagaaacaccttgcatgccgcctcccgccgcctcgcagtgggcgtgactcgaggtggacgcgcatttacgacaccatcgcccctaggatcggactgcgctgcggagggttctgggaaaggtagtcccacacctcgagtcgactacttccgtttccggtgggcgcgtcaccttgattgcttcttaggcagtggtgaggcgtcttagagacgtgcatctccatgcggttgtactgtcaggccatgggaattaggatcggctct

SEQ ID NO: 21908 - DNA, 2300 bp, Homo sapien
tagacaagcggcaacataatgtaaaagttaagagcatggactctagagttcaacatcttggtctcaaatgcacaacataggtggaaatacagatgaaacaagactgagtgaaaatatttaagttggatgacataggtcatggggagtcattaattgagtccctacttttgttttgaaatttacaaaataaaaggttaaaaaaataagctacttacttcaatgtagaaaccgatgtcacatttaaccctcaaacttcagagatatgtccattaaaagaacacaaacaagaatgcctcttttagtaatacttttttggaaatggtagccaatataatccaacatgaaagagaatgtctaatttaaaatactggtaaggaaaagatgaaattgtagataactgtctcaatagaaaagccaagagagtcaactggagtattgtaagaattaataacattgcagtaggttaaccagatacaaaataagtattttttaaaagatcaaccacaataaccaataataagaagctttggggatagagattacatttcaaatagtaataattcattgtttttaaaggtcagaatttacgtgaagaaaactacaggagtgctttgacaagcattttaaaaactaaaaaattatgtattttcatacagcagggctccaattttcagctacctccctggtaggatgaaaattaacacaactacctcataggctgattgggcttggtaatgaaatattaaagtgtttaatacagagacaggaacctttatttagtcaacgaatatttattgagcatctattatgtgccaggtctctctcttttttttttttttaggtgttggggatgcagcagtgatcaacatcgataaaatgcttttccttatggaattgacatcgtagtggtaggtcggacagtagaccaaataaataattaaaatatatagtgtgctagatagtgaaaagttctttagagaaaaaaataaaagatgaagggggaggcacagagcatgtggggagggaagcgtttgcttgcaagttcacaacgggtggtggggcaatgcctcatgagaagatgatattcccctaattaccagacggtgagagccaaatgaatccctcaggagaggctgctagggagtgcaaagagcacctgcaaacgaccaggggctggagtctgctggatctgttggagaatggggaaaatgtgccaagcaaatgggcaagaaatgagggcaaagagaaaaggggactacgcctgtaatcccagcactttgggaggccgagggcggatcacctgaggtcaggagttggagactaacctggccaacgtggtgaaaccccgtctctactaaaaatacaaaaattagccgggcgtggtggctggcgcctgtaatcccagctattcaggaggctgaggcaggagaatcgcttgaatccgggaggtggaggttgcagtgagccgagatcgcgctattgccctccagcctgggcgacaagagcgaaattccgtctcaaaacaacaaaacaaaacaaaacaaaaacagagaaaaggggagaggtggggggaacagatccttcaggccttataggcagagaaagaactcaaaatttaaaaataaaatgattatattttagtattattaaatgtaaaaacatagattcctgaagggttcggtagacgctccctccactgtaaaatggggatgtcgcaactgtctcacaggtttcccctaggactagaggagacaaggggtcgcgcgcagcgtctgacaggcagggggcacccagaaagggtccccgccatttctattggattctgacgtcacgccagagcgactccccatgcgtcgctgcactggcctcggcctcccggcgccgcggctggtcttagtgctccccctagacctgcacatgcacaggtgtggcgcccccccgggccccggacgaggacgccctcttagcttctggcccggtcccccgccccacttccttggagaagccggaaccccgcctactgaccgtccgcgccgcggaggcttctgggaattgtagttctggctctccgagcccaagtgcacttccgggttcggccacaagagcagccattgtcccgcgcgcggacgcttgctgtcgccgagcagctcggcccttcagacttaacccccagcggccttgcggatgctgactaggagaggggaccgaactagcttaacccgagtcggccgtgttgcagaatcggggcagggggttgcctaacccgagttcgtcctgccgcagagccgtgctaggcactg

SEQ ID NO: 21909 - DNA, 2300 bp, Homo sapien
ggacctgattacctcccaaagtttctgcctcctaaaaccatcacgtgcaggatcaggatttcttcaacatctgaatgacagagagacaaacattcagtccacagcagtaacagagtgaatgaatgcgtaccccctcacagggctgcagtgagattatgatgcagggcagtcatgacatccagtgggaattcacatttgttgatggcttacgctgtgccaggcattgctctgagcactttcctggcactcactcattcgatcctcacaaccgtcttgtgcggggagtctgtgatttctcccagtctgcagatggagcacacggaagcatgcaagggtgacaaatttttcccaatgaaccatggctgggatgtaaaggactgtcttgccagcccaggcagccagctagcctagtgcttgtaaatggtgccacaagcaagggtgacagatggcctggcacactgaggtcaagtgctcataaccacagagcttcctaggagacaaaagcatcatcatctactctgctttattattttattttaattgagatggggtctcactatgttgcccaggctggtcttgaactcctgggctcaagtgatcctcccaccttagcctcccaaagtgctgggattacagatgtgagccagtgtgcctgggcatcatctccattttagagctgaggaaagtagtccctagagaggggagctgacctgctgaggccacccagttagcaagtcggggagtcaggatttgaacccatgcactctggctccagagccagctggctcggccttatgctttatcagggcagatactttgtgactgcctgtagcaggagcaagacggaagcagggcagcaaaacgaggcagctgagtgagtcacgatctctttcttgcaatgccaagctgcccctcataccctaagtaacagttccagagttttctaagccgcctgttgaatcatccatcctctctcacttcctctattctagacccacctgaccttccttctgtgccccaatttcaaaaacttttcacatgctgctccccctggctcacccctatgttgttcaggtctcagctaccatgtcccctcttccaggaagctctccctgatcctgaagctgagccaggcgccccctttgaattcctccatcccagccctgcccactctgggttgtcactgtctggggacagttctgtctcccccactggactgtgagcctctgtgagaacagggttggggctgtcttagtcagagctgtgtccccagtaccaccaggagcaggggtcagcataggagagaattcaggactgggcgcgacggctcacgtctgtaatcccagcacttcgggaggctgaggcgggcggattgcttgagctcatgagttgaagaccagcctgggctacgtggtgaaattccgtctctactaaaaatacaaaaattagctgggtgtggaggcgcacgcctgtagttgcagctactaggcaggctgaggcaggagaattacttgagcctgggaggtggaggttgcagggaggggaaatcatgccactgcactccagcctgggcaacagagcaagactccatctcaaaaaaaaaaaaaggaagagaattcaggaagtatttgttaaattaatggatggatacatggattaatgatagttccctcagctggtcggttctgttaaatcttctgggtctaggtctatacactgtcaaagaccaccagcttgtcttgtcatagagatttttttttaagtaacttttatatatggaacctttactatgttctcgaagtttcagctcagatgtccactcctccaggaggccctccctgccccttctcccaagaccacgtcaggctcctcctggaggtcccccagtcctgctcagtctgagattcctgccggtctgactccagagcttttgtttatgaccaggatctatatcacaagcatgattccggctcatttaatatttattggctgcttataatgaacttggcactgggactggttattaagctctcggggacaaggagctggtcattgttgttttttattatcattgctattgactatcgtaatcgcagttcccggtctccagggttcctggacttcccgctctttgtgctgggcagggaaggaaagtgagccctgggggtagagggcagaggtggggtcaaagttactttcctgccaccacccctgtctgtcctgggagctgcagttactgcagtgtgtgtgtgagtttgtagcagggtgggagaggagagaagggaggtggaggggctgca

SEQ ID NO: 21910 - DNA, 2300 bp, Homo sapien
aaggtatcatttgtctttcactgctttcaagattttaaattcatctttagctttcaacagtttgattatgatatgccctggcatagattcatttgggtttattctgtttgggtgtattagtttttttttttattatttattgctgcctaacaaaattatcacaaatttggaggcttaaaataacatttattttactattatttcttaatatatcaactatttacaatcataaaggtatatcacaagatcagttattacatcaaacatgtattttccatctacactctgtcctgtagatgagagcccaaatgagattttcactgaaacatttattttttgtttttttttgttattttttcttgttggtctttaatgaaggctaggcataaactgaattgactttcatgcagttgcttttcatttttcatttttcatttttttttttgagacagagtctcaatctactgcccaggctggagtgcagtggcacgatctcggctcactgcagcctttgcctcctgggttcaagcgactcttctgcctcagcctcccctgtagctgggattacaggcatgagccactgtgcctggctaatttttgtattttttagtagagatgggatttcgccatgttggccagcttggtctcgaactcctgacctcaggtgatctgcccacctctgcctctcaatgtgctgggattacaggcatgagccatcgcgccttgccatgatttttatttttcattagtgctcatggtatatgctgcccagtgagttgtaccaactacattattgtaacatctgaatcaactgtgggctacattgtttgatcaagattgatagattgctttatttatttattcttcttttacaactatagcctacagataaacaaccattattacagagattaaacttgattatgctacatatcatattacatgaatcactctgtgtctacaaaggcaaattgactggataaaattcattaaggtgtaatgccaaataattgctttatcatgatacaatacaatacttatgtctcacttccttttttttttttgagatagagtcttgctctgtcgctcaggctggagtgcagtggcaggatctctgctcactacaacctccgcctcccgggttcaagcaattttcttgcctcagcctactgagtagccgggattacaggcacacaccaccatgcctgactgatttttttatttttagtagagacgggtttcactatattggccaggctggtctcgaactcctgaccttgtgatctacccaccttacccgccttgacctctcaaagtgctgggattacaggcgtgagccaccgtgcccagcctatttttttttttttgagagagtctccctctgttgcctaggctggagtgcagtggtgcaatctcagctcactgcaatctctgcctccaggctcaaatgattttcatgcttcagccttctgaggaggtgaaattacaggtatgcaccaccccgcccagctaattttgatatttttagtaagagacggggtttggccatgtcggccaggctggtctcgaactcctggcctcaagcaatccacctgtcttgccgcccaaagtgatgggattacaggtgtaagccaccatgcctggccaggtcttacttctaaattggttaaaataactcatttatagtatgtgaacatactataaatgggaaaatcatgcttctgcatttttgggttttattgaacactaaattagctgcttaggagttgatctttgccaactcaattatcatattttgtcctgtcttttttttcctataatttttctactaaaattataccagactaatcattcaattataatttggtgagggtttaccttgagaaaatatatttcgtgagattctattttttctttgatcttactttggtatgccctgactgctacaaaacaagtaagtgctgttgctataccgataacagagatttatttggtccctcaagctgatcaactgagggatttaggtctgtaaccatgtctagaaaaaatgcaaatgtgggtatttgataatgttttcttactgtcagtatgcatttggaaagcattcagcattacttcttggagttaattgttttatagagctaattatgaaggttttaagacctctttgcgtagatgttgttttattttttagaataaatttattcctacacctattttccagaaagacactggtagaatcattctaataataagatggagtggaatgaaggggacactaatagaaaatgaaaggccat

SEQ ID NO: 21911 - DNA, 2300 bp, Homo sapien
tagcctccctgtttccatttagaaattcacctacatacatccagggtgagagaccccaagcatcagatgtgtcatacacaagcatcagatccaagttagagagggcacccggggacagaaacctccaagccagccaaaagccaaaggaaggattttacagaaagatacaggaatgtggggccaggcacagtggctcatgcctgcaatcctagcactttgggaggccgaggtgggaggatcgcttgcggccaggaattcaaggccagcctgagcaacatagcgagatcctatctctacaacaaatttaaaaactagctgggtgtgatcacatatgcctgtggtcccaactacccaggaggctgaggcaggagttgagcccaggaggtggaggctgcaatgagcaatgatggcgccacttcactccagcctcagtgaaatagtgagaccctgtctaaaaataataataaaaataaaaaacatataaagatgtcagagcacagggaccagagctgttagtcggcctcatggagaccctggccaggacagccacctctggggaccaggaagtctctcagtttctgtctctgagggtttggctctctgagtctctctgtcacctctcatttctctctcatctccctctgtctatgctgtgtctctatctctttcaatctctctgtctctgtctcccagcccttatctctgagtgtgtctgtttctctctcatttctctctctctctctctctctttctctctctctctttctctctctctctttctctctcccccctccctcctcccctctccctactgcaggctggtccataacccttatcttccccagacctgatggagttctggtattaatctgtttatggtctgtttccctccactagaacacggtcttcattaaaggcagagatttttgtctgtcttattttctgctgtatacccagtgcctgggatactggctggatcaataaatatatgctgaatgaagaatgaatgaatgaccattctcatgaacattattatttgatgccaactgtaaagcaacaataataataattgtcactgccactgctgctattgttggtatatcagctttttatttagtacaaactatatccccgaaattgagctaggcagtttcttgtttaagttttacagaccacgctgtgaggtaagtactgttagtatgcccttttttctttctttttgagacagagtctcactctgtcgcccaggctggagtgcagaggcccgatcttggctcactgcaacctctgcctcccgggtacaagtgattttcctgtcttagcctccccagtagctgggattacaggcatgtgccaccatgccggctaatttttgtatttttagtaaagatgggtttttgccatgttggccaggctggtcttgaactcctggacctctggtgatcctcctgcctcggcctcccaaagtgctgggattacaggcgtcagccactgcgcttgctcccccagcccccaaacttttttttttttttttgagacaggtctggctctgccacccaagctgtagtgtagtggcgcaatggtagctcactgaagcctctaactcctgggttcacacagtcctcctgcctcagcctcccaaaatgctggaattcaggcctgagccaccgcgccctactatgcccatttttcagataaagaatctgagggccctcgaggagaaaccacttgcccaacatgagccctggtcttgtctgaccccaaagcccatgggaagtttaggctgcgtggaaggacagcctggtgggctcaggatctgtcccatcacgagttggaacctcagctctgccactcggcaaccgcgagccgttagtaagttgctgaatctctccgtgtgcctccgtttcctcacctggaatgtgggcgacctcacacaggaagccgcctcttctagtgggcaccgacggagcgagcgcgcgtctgcagcgggactgagcgccgggagagacctgcgcaggcgcaggcgcgcgggaagggccagcctgggtggcccaccccgcgcctggcgggactggccgccaactcccctccgctccagtcacttgtctggagcttgaagaagtgggtattccccttcccaccccaggcactggaggagcggccccccggggattccaggacctgagctccgggagctggactcgcagcgaccgcggcagagcgagcgggcgccgggaagcgaggagacgcccgcgggaggcccagctgctcggagcaactggcatggcccgagccatggc

SEQ ID NO: 21912 - DNA, 2300 bp, Homo sapien
aggctcaagcaatcttcccacctcagcctctcagaggggtaggattacaagtgtgggtcacctgtgcctccctaaatttatatttaaatagccacatatgactaatagctatgatattaaacagcataacactagaccctccattatccaagctctgttgatccaaccaacagagcacatttgatctctcctacctcccagcctcacacacacaggccccacaccctccttcctggctccactcacccaagatattgcaacctcctcaatacaccttgatgactatctcagcctccacatccttgcattgctatttatgctgcctggtgcacctcatgctgcctcaccccatcatctgcctcatttctactcttactccaggtctcagctcagatgccccctcccccaggaagccctccctagccgtcaggttgaatgaggtgtgtctccttgggctctcccagactcctgggctcctccatcccagccctgatcactctggatcataattgtgtgagaggggtctgcccccccaaaccctacaggattgtgtgccctactgtggacagagggcagagcagaggtggtctcaatcatcactgtgtcaccaacatcacccagcacacacaactgggcactgggaatgtgtgctggaatgaatggaggatgctttttaaaaactaggctaagccaggtatggtgagtcacatctgtaatcccagtactttgggaggctaaggtgggaggatcacttgagcccaggagttcaacaccagcctggggcaacatagtgagatcccatctctacaaaacatataaaaattgaccagggatggtagcacacaactgtggtcccagctactcaggaggctgagacgggaggattgcttgagcccaggagttggaggctgcagtgagcaatgatcatgcaactatactccagcctgggcaacagagcgagaccctgtcttaaaaaaaaaaaaaaagaataacacacttggaataaacatgatccaaaaaagtacaaaacatacactctggggctgggtgcagtggctcatgcctatactcctagtactttgggaggccgaggcaggaggatcatctgaggtcaggagtttgagaccagcctggccaacatggcaaaaccccatctctactaaaaatacaaaaattagccaggcatggtgacgcatgcctgtaatcccagctactcagaaggctgaggcagaagaatcacttgaacctgggaggcggaggttgcagtaaactgagattgtgccactgtactccagcctgggtgacacagcatctaaaaaagaaaccaatccaaaaactacaaaatattcttgcaattataggtgacatatttaaatggtaagacaaccaatgttcatgaatggaaagacagagcaagaccctgtctcaagaaaaaaaaaaaaaaaaaaaaaaaaaaaaaacaggctgagcgcggtggctcacacctgtaatcccagcactttgggaggccaaggtgggcagatcacctgaggtcaggagttcaagaccagcctgaccaacatggagaaaccctgtctctactaaaactacaaaagtagccgggcgtggtggcgcatgcctgcatttccagctactccctgaggtgggaggatcgcttgaacccaggtggcagaggttgcggtgaactgagattgcgccattgcactccagcctgggcaacaagagcgaaactccatctcaaaagaaaaaaaaagaaaaacacgaggctaagagcttttttttttttttgagacgaagtctcgctctgtcacccaggctggaatgcagtggcgcgatctcggctccctgcaacccctgcctcccaagttcaagtgattctcctgcctcagcctctccagttgctgggattacaggtgcccaccaccacgcctgactaacttttgtatttttagtagagacagggtttcaccatgttggccaggctggtctcaaattcctcacctcgtgatctacccaccttggcctcccaaaatgctgggattacaggcgtgagccaccgcacccagcctgcctcagagccttcaagtgagtcagccacaggtgaaatcccacctctgtctattggcagacttgcctcttttcctgggcctctgtttccacatctgtgcaatgggaacagttatttatggtggctgctgaatgaggcagtgtgtgtttgaacaaacccaggggaattgttcaaacagaggctgttatgactattgctacagtgactgctgttgtagtcacgctgagtgaga

SEQ ID NO: 21913 - DNA, 2300 bp, Homo sapien
aaacatacactctggggctgggtgcagtggctcatgcctatactcctagtactttgggaggccgaggcaggaggatcatctgaggtcaggagtttgagaccagcctggccaacatggcaaaaccccatctctactaaaaatacaaaaattagccaggcatggtgacgcatgcctgtaatcccagctactcagaaggctgaggcagaagaatcacttgaacctgggaggcggaggttgcagtaaactgagattgtgccactgtactccagcctgggtgacacagcatctaaaaaagaaaccaatccaaaaactacaaaatattcttgcaattataggtgacatatttaaatggtaagacaaccaatgttcatgaatggaaagacagagcaagaccctgtctcaagaaaaaaaaaaaaaaaaaaaaaaaaaaaaaacaggctgagcgcggtggctcacacctgtaatcccagcactttgggaggccaaggtgggcagatcacctgaggtcaggagttcaagaccagcctgaccaacatggagaaaccctgtctctactaaaactacaaaagtagccgggcgtggtggcgcatgcctgcatttccagctactccctgaggtgggaggatcgcttgaacccaggtggcagaggttgcggtgaactgagattgcgccattgcactccagcctgggcaacaagagcgaaactccatctcaaaagaaaaaaaaagaaaaacacgaggctaagagcttttttttttttttgagacgaagtctcgctctgtcacccaggctggaatgcagtggcgcgatctcggctccctgcaacccctgcctcccaagttcaagtgattctcctgcctcagcctctccagttgctgggattacaggtgcccaccaccacgcctgactaacttttgtatttttagtagagacagggtttcaccatgttggccaggctggtctcaaattcctcacctcgtgatctacccaccttggcctcccaaaatgctgggattacaggcgtgagccaccgcacccagcctgcctcagagccttcaagtgagtcagccacaggtgaaatcccacctctgtctattggcagacttgcctcttttcctgggcctctgtttccacatctgtgcaatgggaacagttatttatggtggctgctgaatgaggcagtgtgtgtttgaacaaacccaggggaattgttcaaacagaggctgttatgactattgctacagtgactgctgttgtagtcacgctgagtgagaaaaagaggttgaagagggtcaggggaggagtcctgggaagttccccagtcaccctgaaaaactggttcaacctctgtctgtgctcccatcccagggagtataggtggagcctccagagcccatggacagggcatgctggggctgggccagccccagcggtgtctctaaggcacccctgggatccccactgagctggcctacttcagacagccagggcccacccctctggcccccttagtgtccagctcgtggccccttggcatttccacaagacgccaagatggagattcccatggggacccagggctgcttctcaaagagcctcctgctctcaggtaaggaggaaatagaccctaaaggccaaggggagaaatggggactcagcccagagattgaagtttcctcttagaagtagggaaagattacctgagaggatgaaattagaataagatgggggaggggcaacagaatcacagcctcattgccattttatctatggaattttctataatgttaggaccatgaaggcaggaatttatgtatgtttggttccctgctatatctccagtgtctagaaattgaaggaagtttagatgtattacatatagttggtattatagcttatatattacatatgcctataagtattggttgaataaatgaatgaatgaatgaattcagagagtccatgtgtttagaagcaggccacacagcatctcaaggtagaaaaacctctggatcaacaggatggcaaatctgtggtaaccatgcctgtgttcccactcctgcacccagggcagacatcactaatcaatcccagcattgtttccaatgagcagcactcagagtccttgctccccgctgaagatctgtatctagagaggagcatgccatggtccctggcaacacccctgatctcagcccttccctgtaacttcccacagcctcaatcctggtcctctggatgctccaaggctcccaggcagctctctacatccagaagattccagagcagcctcaaaagaa

SEQ ID NO: 21914 - DNA, 2300 bp, Homo sapien
gaaaaagcaaagcagattgggtctgggctcggtggccacgtctgtaatcccaacactttgggagaccaaggcagtagaactacttgagtccaggaatttgagaccagcctaagtaatttagtgacaccccttctttacaaaaaatttaaaaattagccaggagtggtagtgtgtgcctgtagtcccagctacttgggggactgaggtgggaggatggcttaagccgaggagttggaggctgcagtgaaccgtgatcatgccactgcattccagcctgggcaacagagtgagacgctgtttcaaaaaaagaaaaaaaaaaatcagtttgatggggtagggttggggagcatgtcagcaagcagattttggatgtgctgaggatcgtatgaaatcctagggaagcagcaacatcgagatataggacagctaaggagttccatctgggacatgttgaaattttttttttaatagagatagggtctcactatgttgcccaggctggtcttgaactcctgggctcaagtgatcctcccccatcggcctcccaaattgctgggattacaggtgtgagcaccacgcccagcccgctgggacatgttggattttatgtgccacccagatggttggatactcagatctgaaaagcaggagaaagctctgggctggaaataggaaactgcacctcagttctccatgcagtcactgatatagtcggtgagggactgggggagccctcaggagacatcgcacagtcccccctctctctttctttctctcacccctcagaaaagaataaggagctgcccagtacacacctgcccaccaacgctgggatcctggcggccaccatcattggatctcttgctgccggggcccttctcatcagctgcattgcctatctcctggtgacaaggaactggaggggccagagccacaggtacagggtccccaagtgtccctctcctgtctgctcccactgtcttctcaagccccatggattcttccacaagtcacatcatccggctcatacacaatctcatcaaatcttggaactcctggggtgaaaagaatctttctatcctgtattaaacagaattctgcattgcaagggacagaaaacctattcttaaactgacttaccaaaaagaaggaattttagtcagggtctcgctctgtcacccaggctggagtgcagtggcacaatcacgactcactgcagcctcaacttccccggactcaggtgagtctttcacctcagcctcccaggtagctgagactacaggtgtgcaccaccaagcctggctaattttttttatttttgtagagatggggttttgcccaggctggtctcgaactcctgggctcaagtgatcctccagctttggcctcccaaagtgctgagaatacaggcatgagccactgttccctgcccaaaaaacaaggaattgtttaatactacataacttattcaggtaggctgcatccaggggctcaatgttctcaaatgactcctttatatactcgtcaactctgtatttttcttcggtggcttcattctcaggcaggctctcccctgttgccacaagatcactcccagggggcccaggctcatactccactggtttagccattcctagcaaggagaccaccttgttcctggtagttccaacaagagccccaagtctacctctcattggcttaactcagatcacatgacttttcatgaaccaatcactgtggccaggggttggtggccagggaaagctctgattggccaaagttgggctatttgtgcagccccagagactgggctagatccaactccgtttaatcaagtggattgagagtgtagaccggctctccaaaggaaaacaaaactggttgctattgtcaaagaaggggagtgggcagcagcaggcacagctatcagatgctacctacttgtatggagagagagagagagagagagagaggagagagaggagagagagacagtcctgtttcccccagggagagtctattcgtgaaaaattcctttcttatgacatcagcgtcttcagaactttgtctcttgaaattgattctgaactgattgtagataagatgtctaatttttctgccactcaccagttcccagaatatgaaagcagcaattttgtctcctttctcaactcttccttatgtgccatggattctgttttcttcttcttcttttttttttttgagacagagtcttgctgcagtgtagtggcgcaatcttggctcactgcaacctccacctccgggactcaagcaattct

SEQ ID NO: 21915 - DNA, 2300 bp, Homo sapien
cccagcccttcgaagctcccaccggacccatcacatcttctcccctctacagtcctgctaggttggaaccactgcaccagctgccctgggatgccaggagtgggacaggcttgggtgtccttcccaccctacctctgagggtccccaccctaagcctcgcccctccaaacctcagctttcctttctgtgcattgggatagtgctccacacccctctcctgtgtctgagggtccccaggggtggggttggatgggcagggaacacagcccccagcctgtccaaccgaattcctcccctcttcccttgctgtggcccccacaacaccagcaggcaggggttgccattggtcccattttccagaagaacaaactgagtctcaaggcaggggatggcttgtctgaggtcccaccgggagcaaggggtggaggtggaattaacacaggtctgtgctcgggatgtttcgccatgaagggggataagggagatccagagagaggtcgaaaggaagggaaggggtgaggcctctccacacagccacttctcacatcctgggttaacgatccactcgggtggggcccgagtccggccaaagtcccttcccggggccccaatacccactttcaaggtcccaggggacacagagacagcaacagagatggggagacagagacagagggcggggcaggagacaaccagagggaggtcaggcaagtttcgaagacagaaggagaccgggggagagaaccagagagacgccgcgtgccccctgggcaagtccggggtgcagcccccatgccccgccccctgtgtccccaaagcctccctctccgcctcctgtgactcagtgacccggactcaaccccagcggctgccccgcccccagggaaatccgggaaagccccggaccttcggggccccaccccggggcggggagagggagaggaggggaggagacggggaagagtcccgcctccctcctccctccctcccatctccagcctgagtcatgcccccaacccgcctagcctgttccccacccatcaacccctcctcgaggtgggaggggaagtcggggggaagccaaactgctccccgctcctgcagcaccggcctcggtcgcgctgactctggcctggtgtccgtgtctcttgctatctctctttctctcaagatctctgcgcctgtctccatgtctctttctctctgtgcacctaggattttccgagcacccaccccggtgccccgcgggccccggctgggggcagggcccccaacgagtgcagagacacaatcagtggagcgctccccaccctcaccccacccccagcccctttagacccacagctgatgaggcacgtggagtggcagagatggaagaggggagggagaggaatcgttcctggccgcctgccgagtgccagtccctgccccgggtgcgtctcttcactcccactaaggaggaaacggctcagagaggggaagtgtttggccaaggtcacccagcgagtaagtgggaaccgagattccaaaccccgtcccagagatgccaaggcctcctgagagacagagaagcagacagcaactgagaggcagagagatggtgacagacacaaagagacaaaagagagagacagagacggaacagagcacacagagacaaacgcggggttgcggagagaaacacctactcagacaggagaaccagagagacagttacagactcagagatagagatgttgagagatagggccagaaagacaaaaacagaggcagagagagcggcccttggcagcaggggtggggacacccccccaccccccgaccccgcctcctctccccccacccctcctttcctctccctcccccgccgaggcctggctgccccaggcgccgcgggccgggagggggcaagcggggcgcggcgcgggcggggcgcagggcaggctgcacctcagagcggcgggagcagcggcgggtccaggaaacccctggggcgtacgggtggccccgggggggccgggggcggggaggcgggcggccggcaccgccccggccgacaaaagtcccttcagttcagccggctgcaggggaagtcccggcgcccggcgaaaccaccctcccgtgcagccgagcccagccgctctccggccgccgtccccggcggccccatgccccgatgccccgcgggggccatggacgaggggcccgtggacctgcgcacccggcccaaggccgccggactcccgggcgccgcgctgccgctccgcaagcgcccgctgcgcgcgccctccccggagccc

SEQ ID NO: 21916 - DNA, 2300 bp, Homo sapien
acctcaaaggacttttgagaattcagtgtgccaatgtttgcaaagcattacacacagggcctgatagacagcaagcattcaataaatgctagctatggccgggtgtagtggctcatgcctgtaatcccagcattgtgggaggcccaggctggaggattgcctgagctcagaagttcaagaccagcctgtgtaacacagtgagacatcatctctactaaaaactaaaaaaaaaaaaaaaaaatagccaacgtggcagtgcatgcctgtagtcctagttactagggaggctgagacaggaggaccacttgagccccagaggtcaaggctgcaatgagtggtgatccaacaaccactgcactccagcctaggagacagagcaagaccctgtctcaaaaaaataaaataaaataaaataaaagttagttattactattattctctgattcaaagttctctagatatgtgcacatttgcgatcagaacttggcctggtctgaccaggcatggtggctcacgcctgtaatcccacctctttaggaggccgagcaggcaggattgattgagcccaggagatccaggctgcagtgagctatgatcaggccactgcactccagcctaagcaacagagcaagaccaagcaagaccctgtatcacaggaaaaaaaaaaaaaaaaaaagaacttggcttggcctaggatggggcgcggccagaatgccttgcttaggggcgaggcccacagcgccccgatggctgcccagcgagcaactgagcaaccaggctgatgttacaggttctacaggttgggtgaaagccacgcccggccacccctacacaaatgagttgctccccgcccccacagtcttgaacgccatcctcccgcctggcttcttcgggactcaggagtatcttaactctggcctgatttctcccatgccacaccattaggggcacccagaaatcttgttgccaaattcctgccccctcagacacccactttcaaacccttgcttctagggaacccaagggcctggtggctctgtgcctccttcctcggagacagagagagagcaatgcctccctgaccggttcctccttgaaatctcagttatctgacctttaatcccatgccacgaccaaagacccataccttcgacaaggcgctgtgtccaagtcccacctctcggtagctcccagcccttcccctcccctctccaagaagagtcccgtggcagggcaaaatggctcacgcctgtaatcccagcactttaggaggccgaggcggatgcatcgcttgagctcagaagttcaagaccagcctgggcaacatggtgagaccccgtctctactaaaaatacaaaaaataaaataaaataaaatagccaggactgctgatgcgcgcctgtgaccccagctactcaggagggtgaggtgggaggatcacttgagcctgggagacagaggttgcagtgagctaagatctcaccactgcactccagcctgggtgaaaaagcaagaccctgtctcaaaaaaaaaaagtcccaggcctcccctagccccttgcccctctctgaagggacccagatatcctacctgcacttcccacccacacactgagaagccccctcctaccgctacccaccaaagccaccccaccctgctcctttttgagaatcaaactcaaaccgcaccagctaatttttttttcttttttgtatttttagtagagacacggtttcaccatgttggccaggctggtctcgaactcctgacctcaggtgatccgcctgcctcggcctcctaaagtgctgggattacagttgtgagtcatcgcgcccagccacattttattttatttttaaaaattttttagagatagggcctcactatgttgcccaggctggttttgaactcctgggctcaggtgatccttccacctcggccacccaaagtgctgggattacaagcatgagccaccgctcccggcctccaaatcccacctcttgaagacccacgtgccaggtcctccagcccccgccccctttggagacactggtacctgcaggcccctccccggttctctaggacccgccctctcctttcactctgggcgaggccgcccctatcccagccgcaccggtccttcccggcacacgcgaggctcccatggctctggcggtggccccgtgggggcgacagtgggaagaggcccgcgccctgggccgggcagtcaggatgctgcagcgcctagaagagcaatgcgtcgacccccggctgtccgtgagtcccccttcgctgcggga

SEQ ID NO: 21917 - DNA, 2300 bp, Homo sapien
ctcctaaagtgctgggattacaggcatgagccacagcgcccagcctcagctggctgggttcttgagggaggtggaagtgggcgatggctgctgagagggcatgtaccagggtccagcccaaacagaaggtgcacaggctggggacagaagagctagggtatgggtgtcggtgctcacagtgtgtgagcttgacagcacctgggactgtcttggagtgccgccgcattccccatgagtgagtttgtattgtatatcctgggatgctccagtctggatggaatctgcacgtgagtttgtgtgccttgcaaacaaaccttccctgagcacctgcactgtgtctggtcttgtgctgggcggggtgcccaggggaggagcccttagctcaccacagtgatcaagacatccctggccctgccctcacaggctcacagtccactgagggagacagacctatccccagccagggacccccagagtgtgccgggctcaggtgggggagcccagagggggaacctgacccagccagggaaggcagaggggacttcctggaggaggggatggtacagttaatcctaaaaggtctttcccaatgtaacagttgctctgtaggatggatgcagtggctcatgcctgtaatcccagcactttggaaggcaggaggatcacttgagcccaagagttggagaccagcctgggcaacatagtaataccctgtttctattaccaaaaaaatacaaaaattagctggacatggtaacacaagcctatagtcccagctacttgggaggctgaagtggaaggattgcttgagcccaggcggttgaggtttgaatgagctatgattgcgcccactgcattcccggctgggcaacagagcgagaccctgtcaaaaacaaaacaaacaaacaaaaaaaacgttggtctcctgtatgaccaatggataaagtaaccttgaccagtctaataactcccaggctgacctgtaatccaagccttctctgtatgtctgagcaggcaaagcccagctccagggctacctcaacccccaggctgatcagaagcttgggtaacctctcccagtgtggccagcgaccccccaccctcccacgttctgaccactgtcctgggcaactagtgacatctagtgggggattttgtcccagtctgacctggcctgtaggggccttgggcagtcggacctgtgacccacgcttcctagcagtggctggactcctcccccttcccgcaggtgccctggcctcttcccctgccctcctcacctgctctggccagtctgactcctcccttccccacaaggttgggagggaatgaaggagagagcgggaaggaggaagggagggtggcattcctgggattccctggatagggggaagagtgggagggccttccatgggtgagcaagcagagagggcaccccgtaccccacccccagccccatcatcgaagcggcctaggaggacctggatttgaagaccattgaaaataagagattaaaccggttgattccaggctactggtcagacgaggaaagcagcccagagcactgaccacaggggaaaacatctccgggcatactgggagcagctgctgggggccactggtcaggctgcgggggtcactggttggactgggagaggccagtgcaggccactcggacggcacgcttggggccattagttacactgggagaggccatcgcaggccacaggttgcagtggggtcctctggttaaaatcgacgatgccagcccaggctgctggtcacagtggggacgagtccccaaggcccctggtcagaataacgaggagaaggtccgcgattgcctggtgagatcccagctcgggtcactggctacgctggtcgatcaggccccccgctgcaggcgctggtcagtaagcccggacagctctaggcttgggggcggacgagccccgagcctggccccgtgcactgggaggtccgctccgggcagtgggaggtcctggccccgcgcccgggcatcgggggacgaggggggcctggagggcggggcggggcggggctgccgggggcggggcctctggctcccagccccgcagcggccgagctgcagcccgggctcagtctccgccgccgccgtgaacatggagcccccggacgcaccggcccaggcgcgcggggccccgcggctgctgttgctcgcagtcctgctggcggcgcacccaggtatggctcgggctgagggcaaggtgggactggggagaggcccctggggaccccgggaaagcgaggagaaaggg

SEQ ID NO: 21918 - DNA, 2300 bp, Homo sapien
agtttgagaccagcctgaccaacatggtgaaaccccgtctctactaaaaatacaaaaattagccgggcgtggtggcgcgcgcctgtaatcccagctactcaggaggctgactcaggagaatcgcttgaacccaggaggcagaggttgcagtgagccgagatcgcgccactgccctccagcctgggcgacagagcgagactccgtctcaaagaaaaaaaaaaaaaaaggatcataactaagactcgaatgcggagggataacagcctctgctacttgaaacctagtccttctggggaggaaagcccaggtgtgtggcaggtggaagggagggcgagcctaggtggtcctcttgctagggcaagaagcccccaagcacctgcccccagctgagcagctccgcgcctcctggccctggacgaacttgggcccagactggcgctccgtggcaccccctcccccggcctcccgcttcgcgccctcatcccgccccccggcgcggcctcaccagctccccctgggcagcccaaagaatgcgaagaggtaggtgggggtagggaggagggcgagccgctgggagagacaaagggcccgagtctgagcgagagacacaaagacgcgaggaggctggggagataggggaagtgggacaaggacgcggggagtgaccaggtccggaggccggactggagcccagccccacccagcccggccgggccagcgcagcgcgggggccggtctctgctgccccctggcgggtggctgcggtgagaaggcggcgcggagcaggtgttgggaggggaggaccagggcgcgcagggaggtagggagggaaggaagcagagaacagagcagggacagagagacagcgagagagactcgcacgcagagacaagagacgccgagagggagacacagagaaagagacagggacagagagacacagatagagacagagagagacacacggagagacagagacagagaagcacagagatagagaggcacagagatagagacagagaaacacagagacagagaggcacacagagacagagaggcacagagacaggccgatagagacagagatacacagaaatagagacagagacagagaggcacacagatagagacagagagacacagagacagagtcaaaggatggaaagagacatggggaccaagtgacccagaaacagtgacagacaggccgggcttggtggctcacgcctgtaatcccagcatcttgggaggccgagccgggaggatcgcttgaggccagcctcagcaacatagtgagaccccgccgcccccccgccccgtctcttttattgaaataaagaaacagtgactgacaaaggaagaccagaaacagagcgacaccgaagcatgaggacggaaagacccagagaggcagaaatacagggacagagaggaagacccaaagagagtgagagagacacaaagacacgtaagagagacagagaaatccagaaagaaacgagtgcagcgacacctagagttcggggcagagattagaaacgcacgagggtacgagaaacaggctcagggcgatgggctcgacctgcggggaggtcgcacaaccgggacgtgctgggggcagaaccgtaaagccccacgtgcctcaggcaactgtgatgagaggacccgggcaggcaggaaagggcaggattcgaactgtgggtgggacagaggccaggacggactgagctaagagaccgagagaactccggctagggcgaggggcggggctggtggaggcggggctggtgggggcggagtcggccggaagggccgaaaggggcgtggcaagaccttggcgaggcggccggtaggcagggggcggggcgtgggaactactcgggagcagagggggcgtggctagaccttagggggcgtggtttaacgccgggagcgaaggagacagaattctttggcaggggcgaccttagaatcctggggaggagcgagaatggaatcccggggaggaacaggggtggaatccggggggcggggtcagaacgccaggagggggcggggccggagccagggtcggcttgactcgggggagcagcgggtggatcctgtgacgtcagcgggttcgaaccgccggagctgagcgagaggccgggggtgccgagccgggcggggagagctgggccgggagagcagaacagggaggctagagcgcagcgggaaccggcccggagccggagccggagccccacaggcacctactaaaccgcccagccgatcggcccccacagagtggcccgcgggcc

SEQ ID NO: 21919 - DNA, 2300 bp, Homo sapien
ccttccggggaaagtgggtcatctgaattgggggtagcaattgatactgttttgtaaactacatttcctacaaaatatgaatttatactttgaccaggtcttgccttttctgtgggatgtgaaggggatggggtgagacatgaaggggaatgaggaaggagtctaagggcttgagagaatcagtgaactggggtcaagagagttaaagacaaaaacaaagggaccaaagatacaaaataagaattgagagagtaatgagcaaaaatgtatcaatcaaaaacaaaattttttttttttttgaggcggagtctcgctctgtcgcccaggctggagtgcagtggcatgatctcggctcactgcaagctccaccttctgagttaacgccattcctctgcctcagcctcccgagtagctgggactacaggcgcccaccaccacgcccggcttattttttgtatttttagtagagacggggtttcaccgcgttagccaagatggtctcgatctcctgacctcgtgatccacccgtctcggcctcccaaagtgctgggattacaggcgtgagccactgcgcccagccctaaaaacagaatgttgagtaatggaatggggaggggtccagggcatgctgtttaatgaacattcataattgcaacagcagtatgatgaatgggacaaagataaaaatagcaattggccagatgcagtggctcattcctgtaattccagcacttcgggaaactgaggcgggaagctcgactgagtccaggagttaagagaccagcctgggaaacacagtgagaccccgcctctacgaaagttagccgggcgtggtggcacgcacctgtagttcagctactctggaggctgaggtaggaggatcgattgaggccagaagttcaaggctgcagtaagctatgatggcgccactgcactccagcctgagtgacagagtccaaccttgtctttaaaaaaataaaaattaaaaaagcagtaacgaaagtataagaggctcaagtttaatgaataaacggcaagtaaaagtagactaaaggcaaaatcatgaataatgttgtaataggagcccaaggcatgacggataataaacctgaatgaatgggccagaggcagagtgatgaataatggaaaaatagggaccgggggcaagggaggtaacggacaggagttcatggatccaaaacatgatggctaattagagaagggccggaagaacgacgaaagtgagcaggcaggctggagctaaaagtagtctgggcaatgaagctcaaatgaatggggcagaggcatgatgggtaatgggagaggaatgaatgggccaaagatagaagccgcagtgacgcgaggaacaagaggcatgatgggtaacgaaaggggtgggtctaaggcaactgtttcgctaagaggtgatgagggcattgtgggtaacgaggagcagcgcagggttcgcagaacagattagaattctcccgaggcactctgggaagggccagcacttccggttttaggtcggctactccgaaccagaggtggggtgggggcccggctgccgcggtgcctggtgggacgcgaggcctgaccttgctgcctagccgcctctgccgcgcaacccacctttacctgtccttcgaccctggaacgttagccaatgagagtaccaagctgatacgccaccaaggtcgaccccgtacacgctggagccaatcaaaatgctgcaagggtcaaagccgaccaattatcacagcaacctcgccgcggggcggaatcaaaagagggcctcctccaggagagaggcggggcgatgcctcagcgggcgtggcaaaatgctcagcacagaccaatggcgggttagcaccggaacccgcggcgacgcgagccaataggcgcaggcgctgcgagccaatgggaagggtgggaggggcgccgtggctaccctgcgagtgagaaccaatacaaaaggacatttcagggaaagtgggcgggactttatgcacaagtccaatgggaagaccgagtcttgacgctggtgggcgggcctcagggcacactaaaccaatgggctaggtggggcggggcgacggtggtggcggcggcggcagcgggttcggttgcgcgtggcgcacggggtgggagcggagcccaggccgggagcaggcgccgccgccagtgagaaccggggccggagccgggtgcggatttgctggggctgagtcgggggcgcgcgggccctgacctctgccctctgacctctcccctagcaggcgaccatggggaacgtgttg

SEQ ID NO: 21920 - DNA, 2300 bp, Homo sapien
aaaaacgatgggaggcctccgttttctcaagtgtgtctggcctgttttgagcatttcatccggagtctggccgccctgaccttcccccagccgcctgcagggggcgccagagggccggagcacggaaagcagcggatccttgatgctgccttaagtccggctcagaggggcgcagcgtggcctggggtcgctatcttcccatccggaacatctgccctgctgggggacactacgggccttcccttgcctgagggtagggtctcaaggtcacttgcccccagcttgacctggccggagtggctatagaggactttgtccctgcagactgcagcagcagagatgacactgtctctgagtgcagagatgggggcagggagctgggagagggttcaagctactggaacagcttcagaacaactagggtactaggaactgctgtgtcagggagaaggggctcaaggactcgcaggcctgggaggaggggcctaggccagccatgggagttgggtcacctgtgtctgaggacttggtgctgtctggattttgccaacctagggctggggtcagctgatgcccaccacgactcccgagcctccaggaactgaaaccctgtctgcccccagggtctggggaaggaggctgctgagtagaaccaaccccaggttaccaaccccacctcagccaccccttgccagccaaagcaaacaggcccggcccggcactgggggttccttctcgaaccaggagttcagcctcccctgacccgcagaatcttctgatcccacccgctccaggagccaggaatgagtcccagtctctcccagttctcactgtgtggttttgccattcgtcttgctgctgaaccacgggtttctcctctgaaacatctgggatttataacagggcttaggaaagtgacagcgtctgagcgttcactgtggcctgtccattgctagccctaacataggaccgctgtgtgccagggctgtcctccatgctcaatacacgttagcttgtcaccaaacatacccgtgccgctgctttcccagtctgatgagcaaaggaacttgatgctcagagaggacaagtcatttgcccaaggtcacacagctggcaactggcagagccaggattcacgccctggcaatttgactccagaatcctaaccttaacccagaagcacggcttcaagcccctggaaaccacaatacctgtggcagccagggggaggtgctggaatctcatttcacatgtggggagggggctcccctgtgctcaaggtcacaaccaaagaggaagctgtgattaaaacccaggtcccatttgcaaagcctcgacttttagcaggtgcatcatactgttcccacccctcccatcccacttctgtccagccgcctagccccactttcttttttttctttttttgagacagtctccctcttgctgaggctggagtgcagtggcgagatctcggctcactgtaacctccgcctcccgggttcaagcgattctcctgcctcagcctcccaagtagctaggattacaggcgcccgccaccacgcctggctaacttttgtatttttagtagagatggggtttcaccatgttggccaggctggtctcaaactcctgaccttaagtgattcgcccactgtggcctcccaaagtgctgggattacaggcgtgagctaccgcccccagcccctcccatcccacttctgtccagccccctagccctactttctttctgggatccaggagtccagatccccagccccctctccagattacattcatccaggcacaggaaaggacagggtcaggaaaggaggactctgggcggcagcctccacattccccttccacgcttggcccccagaatggaggagggtgtctgtattactgggcgaggtgtcctcccttcctggggactgtggggggtggtcaaaagacctctatgccccacctccttcctccctctgccctgctgtgcctggggcagggggagaacagcccacctcgtgactgggggctggcccagcccgccctatccctgggggagggggcgggacagggggagccctataattggacaagtctgggatccttgagtcctactcagccccagcggaggtgaaggacgtccttccccaggagccggtgagaagcgcagtcgggggcacggggatgagctcaggggcctctagaaagagctgggaccctgggaacccctggcctccaggtagtctcaggagagctactcggggtcgggcttggggagaggaggagcgggggtgagg

SEQ ID NO: 21921 - DNA, 2300 bp, Homo sapien
cccagttctcactgtgtggttttgccattcgtcttgctgctgaaccacgggtttctcctctgaaacatctgggatttataacagggcttaggaaagtgacagcgtctgagcgttcactgtggcctgtccattgctagccctaacataggaccgctgtgtgccagggctgtcctccatgctcaatacacgttagcttgtcaccaaacatacccgtgccgctgctttcccagtctgatgagcaaaggaacttgatgctcagagaggacaagtcatttgcccaaggtcacacagctggcaactggcagagccaggattcacgccctggcaatttgactccagaatcctaaccttaacccagaagcacggcttcaagcccctggaaaccacaatacctgtggcagccagggggaggtgctggaatctcatttcacatgtggggagggggctcccctgtgctcaaggtcacaaccaaagaggaagctgtgattaaaacccaggtcccatttgcaaagcctcgacttttagcaggtgcatcatactgttcccacccctcccatcccacttctgtccagccgcctagccccactttcttttttttctttttttgagacagtctccctcttgctgaggctggagtgcagtggcgagatctcggctcactgtaacctccgcctcccgggttcaagcgattctcctgcctcagcctcccaagtagctaggattacaggcgcccgccaccacgcctggctaacttttgtatttttagtagagatggggtttcaccatgttggccaggctggtctcaaactcctgaccttaagtgattcgcccactgtggcctcccaaagtgctgggattacaggcgtgagctaccgcccccagcccctcccatcccacttctgtccagccccctagccctactttctttctgggatccaggagtccagatccccagccccctctccagattacattcatccaggcacaggaaaggacagggtcaggaaaggaggactctgggcggcagcctccacattccccttccacgcttggcccccagaatggaggagggtgtctgtattactgggcgaggtgtcctcccttcctggggactgtggggggtggtcaaaagacctctatgccccacctccttcctccctctgccctgctgtgcctggggcagggggagaacagcccacctcgtgactgggggctggcccagcccgccctatccctgggggagggggcgggacagggggagccctataattggacaagtctgggatccttgagtcctactcagccccagcggaggtgaaggacgtccttccccaggagccggtgagaagcgcagtcgggggcacggggatgagctcaggggcctctagaaagagctgggaccctgggaacccctggcctccaggtagtctcaggagagctactcggggtcgggcttggggagaggaggagcgggggtgaggcaagcagcaggggactggacctgggaagggctgggcagcagagacgacccgacccgctagaaggtggggtggggagagcagctggactgggatgtaagccatagcaggactccacgagttgtcactatcatttatcgagcacctactgggtgtccccagtgtcctcagatctccataactggggagccaggggcagcgacacggtagctagccgtcgattggagaactttaaaatgaggactgaattagctcataaatggaacacggcgcttaactgtgaggttggagcttagaatgtgaagggagaatgaggaatgcgagactgggactgagatggaaccggcggtggggagggggtggggggatggaatttgaaccccgggagaggaagatggaattttctatggaggccgacctggggatggggagataagagaagaccaggagggagttaaatagggaatgggttgggggcggcttggtaaatgtgctgggattaggctgttgcagataatgcaacaaggcttggaaggctaacctggggtgaggccgggttggggccgggctgggggtgggaggagtcctcactggcggttgattgacagtttctccttccccagactggccaatcacaggcaggaagatgaaggttctgtgggctgcgttgctggtcacattcctggcaggtatgggggcggggcttgctcggttccccccgctcctccccctctcatcctcacctcaacctcctggccccattcaggcagaccctgggccccctcttctgaggcttctgtgctgcttcctggctctgaacag

SEQ ID NO: 21922 - DNA, 2300 bp, Homo sapien
cagggtgccctatctcaccacatccccagtcagatccagaggtgggacaaggatgggaaggaggttccagaacaaaggctggcagggagtcgtatgggacaggagctgacccagcaaccatccacagagacatcctggagcctgggaaggagaaggacaaagagcccccttttttaaattttttttatgtttttgagacggagtctcactctgtcacccaagctggagtgcagtggcacaatcttggctcactgcaacctccacctcatgggttcaaacgactctcctgcctcagcctcctgagtagctgggaccacaggtgcacaccaccatgcctggataatttttgaatttttggtagagacggagtttcaccatgttggccaggcaggtctcgaactcctgacctcaagtgctccgcccaccttggcctcccaaagttctgggaatacaggcgtgagccactgcaaccagccagtagcccccatctttgcccctcgctgagccctactggatgttcttggttatgcgacagtttccccatctattaaagagaaacccctatagcagaggggaggatgaggttggaaaagcaggagcattgttatgctattcttgtggggtctgggaagcagacatctgggtggatgtttggggggtgctgggcttagttggggaagtaggggggcccctggggctgacagggactggaagctctgagctggccagagggatgttgcaatcctgccagggtcttgtctatgctgtccttttcacaaccatccccctactgccaggctgacacgtggttgcgggggcacaaggccagccaacctagagtctgaggctaggcggaggacaccctccccaccagctgccagggtcactggcggtcaaaggcagctggtggggaaggcattggactccagccttgggggacggatgtagtgatggtgggaagcaggcttggtgccaggaggggcgtcagagggtgaataaaagcagatagagtgtttgggggaggtagccagccaaagggggtgaggcccggtggaagggaagaagggacatacacgcagagctttgcagctgagggttttaattttttgagatggggtctctgtcccaccaggctggagtgcagtggcacaatcacagctcactgcagcctcgaactcctgggctcaagcaatcttcctacctcagcctcttgagtagctgggactacaggcatgcgccaccacgctcggctaatttttgaacttttttgtagagatgaggtctccctatattgcccaggctggtctcgaactcccaggctcaagtgatcctccctcttcagcttcccaaagtgctgggattacaggcatgagccaccatgcctggctaatgcaggtgaggtttttgcagtgtcatccagctaaggcgacccgttcccctcccaaaaaagggagactgagaaccatgaagttaagagcccagagaatatcacggtggtctggggtgcttcaagggctggtctggaataaattggaggtggcacgcagggtaggagcgccgggccaactgggagacccagcaacataaaggaaaagttgttggggctgaggaggcttgctgagagaggggaagtgagggaaagaggtgatctagggacacggtgtgaatgagggggggatgagatcacagggttattactgggagacccctgagggaagatggccacagggacaggacaaggctgtcttcttaagggaggagaccacccctcatattgtcttatgcccaatttctgcctccaaagaaagaaaaagtaaaaactaaaaggcagaaatgaaatccacaagcagacagcccgcgccacaccctgggcctggtggttaaagattgacccctgacctaatccgttaggttatctatagattacagacattgtatagaaaagcactgtgaaaatccctattctgttttgttccgatctaattaccggtgcatgcagcccccagtcacgcatcccctgcttgttcaatcgatcacgaccctctcacgtgcacccacttagagttgtgagcccttaaaaggaacagggattgctcactcggggagctcggctcttgagacaggaatcttgcccattccccgaacgaataaaccccttccttaactcagcgtctgaggaattttgtctgcggctcctcctgctacattctgagtggggaaagggactaaggtggtctgaggaccccacagagtcaggaagattgagaggtgagagtgctgaacggggaggggctttgggg

SEQ ID NO: 21923 - DNA, 2300 bp, Homo sapien
taaagagaaacccctatagcagaggggaggatgaggttggaaaagcaggagcattgttatgctattcttgtggggtctgggaagcagacatctgggtggatgtttggggggtgctgggcttagttggggaagtaggggggcccctggggctgacagggactggaagctctgagctggccagagggatgttgcaatcctgccagggtcttgtctatgctgtccttttcacaaccatccccctactgccaggctgacacgtggttgcgggggcacaaggccagccaacctagagtctgaggctaggcggaggacaccctccccaccagctgccagggtcactggcggtcaaaggcagctggtggggaaggcattggactccagccttgggggacggatgtagtgatggtgggaagcaggcttggtgccaggaggggcgtcagagggtgaataaaagcagatagagtgtttgggggaggtagccagccaaagggggtgaggcccggtggaagggaagaagggacatacacgcagagctttgcagctgagggttttaattttttgagatggggtctctgtcccaccaggctggagtgcagtggcacaatcacagctcactgcagcctcgaactcctgggctcaagcaatcttcctacctcagcctcttgagtagctgggactacaggcatgcgccaccacgctcggctaatttttgaacttttttgtagagatgaggtctccctatattgcccaggctggtctcgaactcccaggctcaagtgatcctccctcttcagcttcccaaagtgctgggattacaggcatgagccaccatgcctggctaatgcaggtgaggtttttgcagtgtcatccagctaaggcgacccgttcccctcccaaaaaagggagactgagaaccatgaagttaagagcccagagaatatcacggtggtctggggtgcttcaagggctggtctggaataaattggaggtggcacgcagggtaggagcgccgggccaactgggagacccagcaacataaaggaaaagttgttggggctgaggaggcttgctgagagaggggaagtgagggaaagaggtgatctagggacacggtgtgaatgagggggggatgagatcacagggttattactgggagacccctgagggaagatggccacagggacaggacaaggctgtcttcttaagggaggagaccacccctcatattgtcttatgcccaatttctgcctccaaagaaagaaaaagtaaaaactaaaaggcagaaatgaaatccacaagcagacagcccgcgccacaccctgggcctggtggttaaagattgacccctgacctaatccgttaggttatctatagattacagacattgtatagaaaagcactgtgaaaatccctattctgttttgttccgatctaattaccggtgcatgcagcccccagtcacgcatcccctgcttgttcaatcgatcacgaccctctcacgtgcacccacttagagttgtgagcccttaaaaggaacagggattgctcactcggggagctcggctcttgagacaggaatcttgcccattccccgaacgaataaaccccttccttaactcagcgtctgaggaattttgtctgcggctcctcctgctacattctgagtggggaaagggactaaggtggtctgaggaccccacagagtcaggaagattgagaggtgagagtgctgaacggggaggggctttggggctaagggaagtgcccgggaccccacctgaccccaacgctcacgggacaggggcagaggagaaaaacgtgggtggacagagggaggcaggcggtcaggggaaggctcaggaggagggagatcaacatcaacctgccccgccccctccccagcctgataaaggtcctgcgggcaggacaggacctcccaaccaagccctccagcaaggattcaggttggtgctgagtgcctgggagggacacccgcctacactctgcaagaaactcaaaaagggagatgaggggatcgtgggagggaggtagggagggaggagggtgccactgatcccctgaacccctgcctctgcctccagagtgcccctccggcctcgccatgaggctcttcctgtcgctcccggtcctggtggtggttctgtcgatcgtcttggaaggtaaaagtgggatgggagaattgcggagttggagatttggaagagtgaaggtggctacaggcctggggtcccggcttagaggacctctgagagctccggggccccttctgggtcgtggtt

SEQ ID NO: 21924 - DNA, 2300 bp, Homo sapien
tatttatactaaaacgtcatgcactgttgatttgaaattcaaatgtaattgggcctcctctatttcgtctggcaagcgtagacaaaagaatccagtccaggccaggcgcagtggctcaagcctgtaatcccagcactttgggaggccgaggcgggcggatcacgaggtcaggagatcgagaccatcctggctaacacggtgaaaccccgtctctactaaaaatacaaaaaattagctgggcgtggtggcgggtgcctgtagtcccagctactcgggaggctgaggcaggagaatggcgtgaacctgggaggcggagcttgcagtgagccgagatcgcgccacagcactccagcctgggcgacagagccagactctgtctcaaaaaaaaaaaaaagaatccagtccatagtcccctgagccatgtgccctggggtgcagctgggtccttcaggagaaaaatgctctatttctggcactgggaccgagcctgatgtgggttttttgttggtttttgttgttgttattgtttttgagacaaggtctcgctccaccacacccggctaatttttgtatttttagtagagacggggtttcactacgttggccaggctggtcttgaactcctgacctcaagtgagccgcctgcctcggcctcccaaagtgctgggattacaggtgggagccaccgccctggccctgggcctgatgttgatgacctcctactatgtgcacctgcagctctcctgcataggcctcagccgtcctgcatgaggacactgggaggcaggtgctccctatcaaccccgtgttacagttgaacaaactgagccccagaaaagaaaacgtatttgcccaggtcacacggtgaagaagtgagggattcgaagcccaggtccatctgaagccagagtcacccagaggagaaagagttggaattgagaactcaaggaatgcttggaagtgatcgggctcgagcccacctaggaagaaacagaggctggagacatgagactgtgttgctatttcctctcatcaacccttgggccctattgaggccctaccacaagcctggccctgcagcccagtgactaggagaaattagacacaagataataataacagcaatgatcttttttttttttctgagacggagtcttgctctttcgcccaggctggactgcagtggcgcgatctcggctcaatgcaagctccacctcccaggttcacgccattctcctgcctcagcctcccgagtagctaggactacaggcgcctgccaccacgcctggctaatttttcatatttttagtagagatggggtttcaccgtgttagccaagatggtctcaatctcctgacctcgtgatccgcctgcctcggcctcccaaagtgttggggttacaggcatgagccaccgcgcctggccaacagcaatgatctttgagcacctatattgccagtctccacggtaagagctttcttcattttttgttttgttttgtttcaagacagagtcttgctctgtcacccaggctggagtgcagtggtgtgatcgcggctcactgcagccttcacttcccgggttcaagccattctcctgcctcagcctcccaagtagctgggattacaggcacgcatcactacttctggctaatttttgtatttttagtagggacagggtttttcaccatgttggccaggttggtctcaaactcctggcctcatatgatctgcccacctcggcctcccaaagtgctgggattacaggcgtgagccactgcgcctttctttgtatttgttcaagtaatatactgaaatatgtactgtgcctcccactttatggaggaggaaactgaggccagcaaatgaggctgtcatgggaggtggagacaggatttgaacctgcctcagtgcaggaggctcaagagcctctgtcttctctcagggcactgtgtgggagggtgagaaggagggaggcccacagaggcatgacctctgattgccactgtcacctgggccctgctctctgaagtctctgccaagcggggaggtggccgggggagggccctgctctgtgcagcctcccctcccccggcccgcagagttgagcacagagggacagaggcacggaacccccagaaatgtccctcctcagaaacaggctccaggccctgcctgccctgtgcctctgcgtgctggtcctggcctgcattgggggtgagaagaagtgggtggagggatgtggggcccacacctggtgggtgtgagtgtggctgtgtgtcctgtggctctgtagccacg

SEQ ID NO: 21925 - DNA, 2300 bp, Homo sapien
ccggccaaggcacacagctagctacatgtggcccccgcgtgacggctggtctctgtaggcgaggctttgtccagatgcgtgggtagaaggtctggcccggaaagaggaactgacagcaaggctaagccaatgtctgcccctgggggcagaaagtcacctcctgctctccctccactgtccacagaggtagctcagacagggtgggggtcacaggagaacgaagggagaagggggtagttcctgggcagcaaaatcaggtggtgaagggaggcatcagaggatggcaattagagaggccattagaggggaaccacaggcagacagggtgacaggagggactactgacacaaggtgaagagatggcccagccggacggggtggctcacatctgtaatcccagcattttgggagcccgaggtgggtggatcacttgaggtcaggagttcgaggccccaacatggcaaaaccccatctcttctaaaaatacaaaaattagccgggcatgatggcagatgcctgtaatccctgctactcgggaggctgaggcaggaaaattgcctgaatccaggaggtggaggttgcaatgagacgagatcatgacactgcactccaccctgggcaacagagcaagagactgactctgtctcataaaaaaaaagaaaaaagaaaaaaaaaaagagatggctgatggttaaagaggggttagcggtcaggggacacataagggtaaaggcaggaggcaagaggactggcagggggctgcccctgggccaccgggagcgacacaggatgagcatggagggaaagggagaaggggattctagggtcccagcctacccaagttgccctctggttccacctagcatgccagccagaggcccaggaaggaaccctgagccccccaccaaagctaaagatgagtcgctggagcctggtgaggggcaggatgaaggagctgctggagacagtggtgaacaggaccagagacgggtggcaatggttctggtgagggtgtgctgggctgggtggtgggaggggactcctgggtctgagggaggaggggctggggcctggacccctgagtctcagggaggaggaaagggtgggagtggggctgtgacccctaggtctgggaggagtggagggttagagctgagagcaggaactcctaggtcacagagaggagcggataaatggggcagagaacacctggggagagctggggcctccactgtgatgtcctctctcctgtaggagcccgagcaccttccggggcttcatgcagacctactatgacgaccacctgagggacctgggtccgctcaccaaggcctggttcctcgaatccaaagacagcctcttgaagaagacccacagcctgtgccccaggcttgtctgtggggacaaggaccagggttaaaatgttcataaaagccaggtgtggttgtggcgggtgcctgtagtcccagctactcaggaggctgaggtaggatgatggcttgagcccaggagttcgagaccagcctgggcaacacagcgagatctcttgggggtaaaacaaaaagaaaaaaaaaagttcatacttctccaataaataaagtctcacctgtgtccctgtctggatccttccccagtgtggccagaaaaaaacccaccccactgcctcccaggaatcaatgagtagaagaggtgacacctgatggggaaggaagagtagggaggtcgggaagggtatcaaggaataacaccctattgtgggcttgcggagaatgggggacttcaaggcgtgtcagtttcaggagggtgagggcaggagcgtgggtggagtcagcaggtccccatgatggccctcactgagagcttcgcccttgtctcctacaagctctgactccattcccagtgggcacccagcacctccaacccctccacagcccccaacccagcctctgtcggaggcgaattctcagagtgagggttccctgtcacttgagagaaggttccctgtgacgtgaccttgggggacgtcattgccctttctgtccccacccaccccctccgcagttctgttggccaggactttggcctagacaaaggatgggggttgtggctgtggagcggaagtgggtctcaaccactataaatcctctctgtgcccgtccggagctggtgaggacagcctgccagagtctggtaagaaagggactcagggtgcggggacaggggggcgtcagcagggagagggcaaagatcgataaagcaggaattttaagaggcacaatattagaagcccgtgttggaac

SEQ ID NO: 21926 - DNA, 2300 bp, Homo sapien
ccatgactgtgtgtgtgtgtgtgtgtgtgtgtgtgtgtgtgtgtgtgtgtgagagagagagagagggagatggagtctcgctatgtagcccaggctagactcaaactcctgggctcaagcaatcctcctgcctcagcctccccagtagctgggactacaggtgcaccaccacactccacaaatcacagaatttagaactgtagactatttgagcttctgcttagagttagggtggctgaggtggggaggatcccttgagcccaggagtttgaggatgcagtgagctgtgatcttgccaccgtgttccagcctgggtgacagagaaaccccatttctaaaaaagagaaagaaaaagggataggtacaatggctcatgcctgtaatcccagcactctgggaggccgaggcgggtggatcacttgaggtcaggagttcgacaccagccttaccagcatggtgaaaccgcatctatactaaaaatacaaaaattggccgggtgtggtagcatatgcctgtaatcccagctattccagaggctgagacaggagaattgcttgaacccaggaagcggaggttgcagtgagcccagatcgtgccactgtactctagcctgggtgacagagcaagactcagtcttggcggaaaaaaagaatgaaaaaatttaaaaaactaaaaaagaactgtaggctgggcgtggtggcttacacttgtaatccaaacgctttgggaggccaaggcaaacggatcacttgatgtcaggagttggagaccagcctggccaacatggtgaaaccccgtctctactaaaaatacaaaaattagacaggcatggtggtgcatgcttgtatttccagttactcaggaggctgaggcaggagaatcgctcgaacccggaagacagaggttgcggtgagccaaaattgcgccatcgcactccagcctgggcgagagaacaagaccttgtcttggaaaaaaaaaaagaattgtagaccatttgcttgtgttctttctccggggatcagatctcaccctctttctgccgtacttcctcatctcctacgtgtggatgatgatattgtgccctgtgcatgttcttcgtcaccaaaagtgcctctctcatagagcaggtgagaactcagtgaggagatgcagggacatgaggtctgacttagggcagagccctaaggtaacacatttgatctactgtaggtccttaatggtgtctgcagagcacctccctgcactgactcagccttagcaaagggcagaggctttgctgtgttccctgctgggcccagaactgtttaggtgctcaagaaagccttctaggctgggctcagtggctcacacctgtactcccagcaccctggggaggccgagatgggaggatcgcttgagcccaggagttccagaccagcctgggcaacaaaacaagtctcccatctctacaaaagaataaaaattagcagctgggcatggtggctcatgcctgtaattccagcactttgggaggccaaggcaggcaaatcacttgaggttaggagttcaagaccagcctggccaacatggtgaaaccccatctctactaaaaatacaaaaatcaggtggggcacagtggctcaagcctgtaatcctagcactttgggaggccaaggtgggcggatcacgaggtcagaagttcgagaccagcctggccagcatggtgaaaccccatctctactaaaaatacaaaatattagccgggcatggtggcaggtgcttgtgattccagctccttgggaggctgaggcagaagaattgctagaaccctggaggcagaggttgcagtgagccgagaacacgccactgcactccagcctgggtgacagagcgagactccatctcaaaaaatacgaaaacaaaaatcagccgggtggtggcgggtgcctgtaatcccagctactggggaggctgaggcaggagaattgcttgaacctgggaggtgggggttgcagtgagccaagattgcaccactgcactccagcctgggcaacagagtgagattccatctcaaaaaagaaaaaaataataattaaaatgttaaaatcaggagtagaatcacagaatgttggaaagtgaggcccaagaagggggctgtgtccaagtccatgcatgggaaacttgactgggacaccgagctcacacagagcaggatctcagtcccccccaccagagtggggcgtgaccacaggaacagccgcctccagtcagcctgccacatgacaccccctcaatgttccaggtctctggacactatgggc

SEQ ID NO: 21927 - DNA, 2300 bp, Homo sapien
tcttgctctgttgcccaggccggaattcagtggcatgatcttggctcactgcaacctctgcctcccgggttcaagcaattctcctgcctcagcctcccgagtagctggagttacagacgtccgccaccatgcccggctaatttttgtatttttagtagagacggggtttcacaatgttggccaggctggtcttgaactcccgacctcaggtgatccgcctgcctcggcctcccaaagtgctgggattacaggcgtgagccaccgcgcctggctgaggagcgaagttttctaaggttccttcttgtcctgtgttagccctcagagaggtaagtcactcaccttctgcacctagagagcctcatccccagggcaatcatccccagggcagtgctggagatacagcagtgaccacaacagtcccaggtcagcctgcccagttggggagacacacccatccctgacagtgatgacacaaagtgagcagggatggggtggaggagctgagggggcaagggaggataggaaaagggctcagagagagtttcctagagcgagagctactgttacagggctgagacctagaggaaagtggaggaaaccgataataaaatgataattatatattcagaatatcccaatgcaaagcttactctttttccaggtaatatataaggttcataatcacagcgctccaaatattgaccacttaagcatgaggcccagggcctgatgttttccattcgccatctaactacgtcttcccaataacacagcggggcaaaacgggaagacgaagaacgagtacgattatatccctggtttataaaaggggagaaactgaggctcaaacatagatgtcacttgtcaccagcctggccaacacggtgaaactccgtctctacttacaaaaaaaaaaaaaaaatgggaggctgacgcaggagaattgcttgaatccgggaggcagaggttgcagtgagccgagatcgcgccactgcactccagcctgggtgacagagcgagactccgtctcaaaaaaaaaaaaaaaattagccaggagtggtggcgtgctcctgtaatcccagctactcgggaggccgaggatgcagtgagccgaggttgcagtgagccgagatcgcgccattgcactccagcctgggggagagtgaggctccgtctaaaaaagaaaaaaaaagagagagagagacgtcacttgtccaggatatcttatccagtcagtagcaccacaagggttagaaccctggccagacatccacccaatttcacgggtgaacagttaacagcctctgagagtcttgtcctctctgggcctccgtaacaccctctccaaactaagggtctctcagcagatggccgggtttagagctgtacgaagacacacagctaatgaaaaattgtggaattctcagagcccgtgaagcctagcccacggatgcgaggtttggaccactgagggaacgcgcatgcgtgctaggcagggcagtccgaaggcttgggggtgtatcatagggtctcatcggaggtttgttggccgtaagacccctggaattggaactctaaaaacacagaaaggatatgagctcaggagacttgaacgaaagagttgtcttaggaagaggggtcagaagacaagggtgctgggcaaaaggctagttcttcgaatcagaatacggtggccagaaaggttcctctgacgaaagaggggcgtggttcgaagccgtacagtggccggtaaagctcaagaaacatggaacgaaaaggacgcgaagaatcggcagggagaagcggacaggatgtcccgaaaggctcatataaccgaaaaggcgggttaatgtgaagggacggaagggacagaacttgcgggaggcacatgctggccgagaaagtcctggagttcggagcatacagtgtttttattaggtggaaacaaacgggctgggagaaagacgagtacggtggccaggttggtccttccatagccggaagtggccttcctgagaggcgtggctgcggcactcttgccggatagggtggcccggcggggctaggaaagcgtgaaatctcgcgcgattgcgctgcgaagtcggggacggggcggggctggcggcgggggcggggacccggagcgggaagatggcggcggcgcaggaggcggacggggcccgcagcgccgtggtggcggccgggggaggcagctccggtcaggtacggaggccgagaggggactgagggggttcttccccagccggggggcctcccacggggcgtgtcctacctcttgt

SEQ ID NO: 21928 - DNA, 2300 bp, Homo sapien
tgacgtcctatgggagggctccaggggtgccgcctgtctggtgctctgggggtcacccaatgaatatgagagccttcctgggagagaggggtctcgttcagcacccctcctgaggacccagccccaccccagggtgtgaggatgcaggccaagggggcctgagggagctgcagtagggtctcagcacctcctcagcctcctggttcccccctaccccctgcgcacagatatccagttctggaacagccggcagtccctggagggcctgtccgtgcgctccgtcttcttcggcgttttccagtcattcgtggtcctcctctacatcctggacaacgagaccaacttcgtggtccaggtcagcgtcttcattggggtcctcatcgacctctggaagatcaccaaggtcatggacgtccgggtaaggctggggcgccatgctgtctcgggagctgcaggggttgggagggggtagtgtggcccagctggaccctggagctggcccccgggggattcccagcaagtgcctcactcccaggactgaggggattttctcaccaggggattttttgggtcacacatggggcaggggaactgggaacggtggggaagggcaggggctggttctggcttgtggggtgggagccagcgtagcaactgaccatggcacccacctcatccacagctggaccgagagcacagggtggcaggaatcttcccccgcctatccttcaaggacaagtccacgtatatcgagtcctcgaccaaagtgtatgatgatgtgagtgtcctgcacagtgggcccctgggggtggtctccaggtaccacgtatccctgaggcacccggggccggccatctgtctgccggacccatgctttacagcctgtgccacatcctctgtgtcccccatctgccataactgcttccctgggcgagtccggagtccccagggctacctggaaattccccctgcccggcctgccagaccaggtgtggtgggtgagggcggggagcagggctgccaggcagggctgaggagctggctgacagccccaccctgtggccccacagatggcattccggtacctgtcctggatcctcttcccgctcctgggctgctatgccgtctacagtcttctgtacctggagcacaagggctggtactcctgggtgctcagcatgctctacggcttcctgctgaccttcggtgagcggtccggccgccccaggagagagcaggccccatgctgcgcagggctcacagccccagtgtaggagacagacccatccccagacagggacaacctagggtgggcagagctgggatatagggaggcccgagggcacacatggccccatctggggtcagagaggacttcagggaggacatgaacagtacgcttcagtcctcattctcagggggcctttgtgtcttgggaacaagtaaacaagtagggccaggtgcagtggctcacacctgttatcccaatgctttgggaggctgaggcaggaggatcacttgagcccaggaattcgtgaccagcctgggcaacttggcaagacccgatctctacaaaaaaacacagaaattattggggagtggtggtgcgtgcctgtagtcccagctacctgggaggctgaggtgggaggatcccttgagtccaggaggttgaagctgcagtgagccatgattacgccactgcactccagcctgggtgacagagtgagaccctgtctcaaaaaacaaaagaccgggtgaatcacagccaatagtgagtactgtgaagggcagagtggtgggaggatgcacattaataggggtccgggggcccctctgaggacaggacatttaaacagaggcctcagatatccagggagagagctgtgcggatgtgacagaaggccccaccagtgcagaggccgctggtagagtgtgcccaggtataggaagtggtagagtgtgcccaggtgtaggaagtggtgagggggctggtatggccagtgcagagtgcacaggggagaggtgggagaggccatccctctgctcatgggtgctctcactgcaggcttcatcaccatgacgccccagctcttcatcaactacaagctcaagtctgtggcccaccttccctggcgcatgctcacctacaaggccctcaacacattcatcgacgacctgttcgcctttgtcatcaagatgcccgttatgtaccggatcggctgcctgcgggacggtgaggcccggtgggcaggtgggagctcccaccggaacagggccctgaggcagtctttagggcccag

SEQ ID NO: 21929 - DNA, 2300 bp, Homo sapien
cagtttcccgtctgtaaagtgggtctaataataggacggtcatgagtattaaataaaatgatgttaatagttagttgccctttggccaggtgcactggctcagcctaagcaacagatcctctctctacaaaaatagaaaacaggctgggcgcagtggctcatgcctgtagtcccagctacttgggaagctgaggcaggagaatcgcttgaacccgggaggcagagattgcagtgagctgagatcgcaccactgcactgcagcctgggtgacagagcgagactccatctctcaaaaaaaaaaagaaagaaaagaaaagaaaacattagccggatgcggtggtgtgtgcctgtagtcccagctactctggaggctgaggtgagaggatccccttagtccaggaggttgaggctgtggtgaaccatgttcctgccactgcactccaacctcggtgacagagtgacaccctgcctcaaaaaaaaaaaaaaagttcacatttgtatatagcacccacatgtgccaggccctgttctaagaattttgtgttttaaatatttgtgtctattaatttgtgtgaccttggagaaattaattttgccgggtttcagttttctcatctgctatgtggggatcaataacaccatatacttcacacaattgttgtgaacattcaacttacagagttatttctttttctttttgagacaaggtctcactctgtcacccaggctggagtgcaatagcgtcatcacagctcactgcagcctcaacctcccaggctcaagcaatcctcctgcctcggcctcccaaagtattggggttacaggtgtgagccaccgtgcctagccagaacacccaaattttatacaagcaaaggaaagacaacaaaccctgcatctgtggtctgagagcgcctggcatccaacttagaacctaatagatcacctagtcgttctcaggaatatgagaggcttaggaatgtgatctagccaaatggctgcccctctttcagcctgagtcccttctgcaataatcctatcatatgcttctggcgctggtgatagggatgagctcagggtttaggcacacagctcaggatgtatacggaggctacactgctgccattcgcagactgaataactgagcttttgagctcaaagtggtctgggctatttatgggtaactttcaggggctgcagggaggaacaaaccaataaataaaacatccatgcattcatccaataaacttttttttttttgagatgggagtctcgctctgttgcccaggctggagtgcagtggcacgatctcagctcactgcaacctccgcctcccaggttcaagctattctcctgcctcagcctccggagtagctggcattacaggcgcacaccaacacgcccagctaatttttgtatttttagtagagatgggatttcaccatgtcggtcaggctggtctcgaaatcctgacctcgtgatgtgcctgcctcggcctcccaaagtgctgagattacaggcatgaaccaccgcgcccggcctccaataaacatttattgggcacctacggtgttccaggcgctggtctaggcgttggggttacaacaacgcacaaaacataaattctgaagctgacacgctagctttaaacgttccttaaatatcttcatcctcaatttacggttgaggaaactgaggtgtagcgagaccttggaggtttccgaaatattattatggatggcaggtgtagagccctgccaacctctcgatcctgaagctccccttccagcctgagaaacggcaggttcaagtcccactgggagaccaaagcggggagcggctcagtttgccggcttgctcaatgggtaaggcgtgatggctctaagcaggcctcagttgtctcgtccagagcaatgggcagcgacgcctgcccaacccctcctgagcgcccagcctccctttcccggccggccccgcccccgcgatcacgtgacgcgtgggggttttcccgttccccaggcgtgacgtcacggcggggtgcagaccaatgggcgcgcaggccggcggcgccggggaattccgccgccccgcccccgcccgccgcccgcccggcccggccccgcgccccgcgcagccccgggcgccgcgcgtcctgcccggcctgcggccccagcccttgcgccgctcgtccgacccgcgatcgtccaccagaccgtgcctcccggccgcccggccggcccgcgtgcatgcttcggtctgggccagcctctgggccgtccgtccccactggccgggccatgccg

SEQ ID NO: 21930 - DNA, 2300 bp, Homo sapien
atctgagaatggtgatagtcccacacggattctccttgggattaagagggcacctaaggccaggcttggtggctcacacctgtaatcccagcactttgggaggccgaagcaggtggatcacctgaggtcaggagttcgagaccagcctggcaaacatggtgaaaccccgtctctactaaaaagataagaattagctgggcatggcacatgcctggcctgtagttccagctactcaggagactgaggcaggggaatcaacttgaactggggaggcagaggttgcagtgagccaagagcacgtcattgcactccagccagggtgacagaatgagactccatctcagaaaaaaaaaaaaaaaggccaccttgatatcacattttgcagggagtagggcatttgatttagggcctgatcagaagttagccctaaatcacactacacttctcttgtcttcatccccgtaggcccgttcctcccgccgtcagccctgctgccagaccctgacttcttctctggcaccgtgtccctgcccggcctggagccccctggcgggcctgacctcctggacgatggctttgcctacgaccctacggcccccacactcttcaccatgctggacctgctgcccccggcaccgccacacgctagcgctgttgtgtgcagcggaggtgccggggccgtggttggggagacccccggccctgaaccactgacactggactcgtaccaggccccgggccccggggatggaggcaccgccagccttgtgggcagcaacatgttccccaatcattaccgcgaggcggcctttgggggcggcctcctatccccggggcctgaagccacgtagccccgcgatgccagaggaggggcactgggtggggagggaggtggaggagccgtgcaatcccaaccaggatgtctagcacccccatccccttggcccttcctcatgcttctgaagtggacatattcagccttggcgagaagctccgttgcacgggtttccccttgagcccattttacagatgaggaaactgagtccggagaggaaaagggacatggctcccgtgcactagcttgttacagctgcctctgtccccacatgtgggggcaccttctccagtaggattcggaaaagattgtacatatgggaggagggggcagattcctggccctccctccccagacttgaaggtggggggtaggttggttgttcagagtcttcccaataaagatgagtttttgagcctccggggtttcgtctgttctgggcttgggaaacgccctagtcccttagtagcaaagaaagcctccaggctgggggctcaggcctgtcatcccagcactttgggaggccaaagcaggaggatcgcttgagctcacgagtttgagaccagcctgggcaacatgacgaaacctagtctctacaaaaaatacaaaaattagccgggcgtggtgctgcgcgcctgtaatcccagctactctagaggctgaggtgggaggatcgcttgagcccaggaggtggacgttgcagtgagccaagaccgcaccactgcactccagcttgggcgacagcgcgaggctgtgtctcaaaaaaataaaaaatgaaaatgaaaataaaaaatgagaccgggcatggtggctcatggctgtaatcccagcactttgggaggccgaggcaggtggatcacctgaggtcaggagtttgagaccagcctaaccaaaatggtgaaaccccatctctactaaaaatacaaaaattagccgggcttggtggcgcgcgcttgtagtcccagctactcgggaggctgaggtgggagaatagctgaaacccaggaggcaaaggttgcagtgagcctagatcgcgccactgccttctagcctgggagacaaagagagactccgtctcaaaaaaataaaattaaataaataaataaaataaaaaagataaaaagataaagcatccaagctcttcccttctccgctctcccacttcttcctcgggatcccgcccctctcgactctaggacccgcctctctcgtcggcggaagtgcgctgcgcggccctccaccatgctccgccccctccccctagcgcggcctttcatttccgcttccggtgcgggccgcgcgcgagcgcagcggtgggaggcggcgaccagccggtgagtgcaggctgcggctcgacctcccggttttcgggcaggcctcagcccagcttctccctttcctcaggctctccccatgctgctgtgggcttctgctgcgtcccggccccgaggatcgctcgtccctc

SEQ ID NO: 21931 - DNA, 2300 bp, Homo sapien
tgtacatatgggaggagggggcagattcctggccctccctccccagacttgaaggtggggggtaggttggttgttcagagtcttcccaataaagatgagtttttgagcctccggggtttcgtctgttctgggcttgggaaacgccctagtcccttagtagcaaagaaagcctccaggctgggggctcaggcctgtcatcccagcactttgggaggccaaagcaggaggatcgcttgagctcacgagtttgagaccagcctgggcaacatgacgaaacctagtctctacaaaaaatacaaaaattagccgggcgtggtgctgcgcgcctgtaatcccagctactctagaggctgaggtgggaggatcgcttgagcccaggaggtggacgttgcagtgagccaagaccgcaccactgcactccagcttgggcgacagcgcgaggctgtgtctcaaaaaaataaaaaatgaaaatgaaaataaaaaatgagaccgggcatggtggctcatggctgtaatcccagcactttgggaggccgaggcaggtggatcacctgaggtcaggagtttgagaccagcctaaccaaaatggtgaaaccccatctctactaaaaatacaaaaattagccgggcttggtggcgcgcgcttgtagtcccagctactcgggaggctgaggtgggagaatagctgaaacccaggaggcaaaggttgcagtgagcctagatcgcgccactgccttctagcctgggagacaaagagagactccgtctcaaaaaaataaaattaaataaataaataaaataaaaaagataaaaagataaagcatccaagctcttcccttctccgctctcccacttcttcctcgggatcccgcccctctcgactctaggacccgcctctctcgtcggcggaagtgcgctgcgcggccctccaccatgctccgccccctccccctagcgcggcctttcatttccgcttccggtgcgggccgcgcgcgagcgcagcggtgggaggcggcgaccagccggtgagtgcaggctgcggctcgacctcccggttttcgggcaggcctcagcccagcttctccctttcctcaggctctccccatgctgctgtgggcttctgctgcgtcccggccccgaggatcgctcgtccctcaccccattaggcctgacgggcctcaggccgagcccgtgccccggctgtgggccagaagttgccgcgtcgaactcggccttcggcccagcagcttatcacaggccccgcccccttgtcaaaaaaaaaaacaacaaaaaaaaaacccagcccaaatcctcaggccgcgacgcgatccacaagccccgtccaaaccttcggtctccgccctttcccgcaagccctgcccccaagctcagcccacgccctcctgtcagccagctccgcctctctcaggctctacgctctttttctttggatgctctccccaccccgccatctagatcccatctttagacctcagcttcactctggtctccttgcaacactccctccccgtgttcccactccctctagcatcttcatcttccgccacgcccttcacctgtcctcgacctccaccttcatacaactgcactgttcccttaaaagctttctccgatttcctccacctgccttcatccttattctccttatccctctaccacccagactcatacccaaccccacgcatggcccctagtgggagccttttcagttcttctctttctcttgagctccagccttaagtgctcagggtttgccttctgaccctacttcaaacactgctgatgtttcaaaacctttcattcccgactccagcgcgtggaatctaggacacccctttcccagtgatgctcacctcagaatcacctgagggtttttcagaatgcccaagcttctagatcgaagttgttagggatggacttgaacatctggcatactgttctgcagcttcacttctgctccctgaagctaagagatgtgttgtttgggatcgactctgccaccaacttgttagatgactttgattctgcccatacgggtttcacagaccatctgactttcctggtcccttcatccctcaggttgaggccccaggcttggcctcaccacaatgtggcacgaggctcggaagcatgagcggaagcttcgaggcatgatggtcgactacaagaagagggcggagcggagacgggagtattatgaaaagatcgtgagtaactggccttttgtctggggtgagggaccctgggttggggggcacagctggtcatcctggtaaaat

SEQ ID NO: 21932 - DNA, 2300 bp, Homo sapien
tcctgtgggcctttgctttccactagatcaccaaggcctagtgccaggtacacaatttggtgctctgcaaatatctgttgaaagaatatcatcagacacatagtaggtgcgcaataaatatttgttgacttaactatgaacgagtaggggttgtatttatgaacaagacagactcccatcctgcctcctagaacctacgttctagtgggggtagaagggacagaatagggtaaaatgagcaaatatgtaaacaagatccttcagggtttgatcaaagtgatgtataaagaataaaataggccgggcacggtggctcacgcctgtaattccagcactttgggaggctgaggcgggtggatcacctgaggtcaggagttcgagaccagcctggccaacatggtgaaaccctgtctctactaaaaatagaaaaattagccgggcatctgtaatcccagctactccggaggctcaggcaggagaatcacttgaacccgggaggcggaggttgcagtgagctgaggtcgtgccactgcactccagcctgggcaacaagagtgaaactccatctcaaaaaaaaaaaaaaaaaaaaagagtaaaataagggcaatgggatagtgggtggctgggttgccatggaacttaaaattgggtggtctgaggctgagtgcagtgtctcacacctgtaatctcagcactttgggatgctgaagcaggaggagcgcttcaagccaagagtttcagaccaaccagggcaacaaagcgagtccctgtctctatttaaaaataattttttttgaaaaattaaaaattacaaaaaaaaaaagggtgatcagaggaggcggcagtgaagaagaaaccacctcagataaccctctagttccaacctgccctacctcctttgacagatggagaaagtgagatccaagagggaactggggacagatggaggtcatggagtgtaatttgcaaggccttcagcagggtggggctactttagatactgttggtcagggccctctgctctcaggaggacaatggaacccagacctgaataacaatgtgcagaactccaagagatcagcatctgaaatcagcatctgggctgaggacagctgggggaggacaggttcttgccctgacctcagggggcttgcattgggtgggggagaggacagtccacaagccgttctatactgtcgtgcagtcggtgccaggaagaaaagaatactcatcagggattgagggtggggcagggtgtcgatgccacttcaaacagtgagcagacagaactgcttaggggagggaagttcaaggaggcggagtggaggcaggtgagctgcttggctatttggttttaatggcgacttctggtctaggaacagagtcgatgtgtatgattacagtcctcctctgctcaaaaccctcctaaggctccggtctcaggaaaaccaaaagaccttaaagcgatcaaaagattgcttggatctgcccccatattttcactgaactcaatccccaacccgtattgcctctccctttccttgtaattcctcaatgcccaggcccactggctgggcttccttccctccagcctcagctccaccatgccctttcccatcataggggagaaaattgaatccctcaaccccagtaaccctctccgcctttccagctttcttttgctccatggcactggtcatcatgaagggccatctatattttacgtaattatgtttatagtgtcttcccccaccgtctgaactccgtgcaaacaaagattatcttctgtttattccctcctgtattctcagggcttcaaacagagcctggcgcacaggaggcactcagtgaatgcttgcaaaatgaatttttattgtaatgcatttaatgaaatagcccagattactatcaggcacctaataagaaacgtgaccgactatttttctcgcttgggggtgcgtgtgggcatgccgtgtctcagtttcacccgccctaaaacgggatcagggatagctgtttcaatgccttgtgggaactcggtgtgattaaatttggtcactaagccaaacgcacgggacactgcctagattgagttaggccgccgtcagggccccagcagggcggctcggtcccctcccatgagccccgccctggtaggcggagccacgggcccggccagcacgtgtaagagttcgcggcgggtcgccgcagtcactcacctgagcgcgcacggtccgcgcgtcctccgctcgtgcgtcctccgcccgcccgcctgcctgcctgcccgcccgctcgctcgc

SEQ ID NO: 21933 - DNA, 2300 bp, Homo sapien
caatacgggttggggattgagttcagtgaaaatatgggggcagatccaagcaatcttttgatcgctttaaggtcttttggttttcctgagaccggagccttaggagggttttgagcagaggaggactgtaatcatacacatcgactctgttcctagaccagaagtcgccattaaaaccaaatagccaagcagctcacctgcctccactccgcctccttgaacttccctcccctaagcagttctgtctgctcactgtttgaagtggcatcgacaccctgccccaccctcaatccctgatgagtattcttttcttcctggcaccgactgcacgacagtatagaacggcttgtggactgtcctctcccccacccaatgcaagccccctgaggtcagggcaagaacctgtcctcccccagctgtcctcagcccagatgctgatttcagatgctgatctcttggagttctgcacattgttattcaggtctgggttccattgtcctcctgagagcagagggccctgaccaacagtatctaaagtagccccaccctgctgaaggccttgcaaattacactccatgacctccatctgtccccagttccctcttggatctcactttctccatctgtcaaaggaggtagggcaggttggaactagagggttatctgaggtggtttcttcttcactgccgcctcctctgatcaccctttttttttttgtaatttttaatttttcaaaaaaaattatttttaaatagagacagggactcgctttgttgccctggttggtctgaaactcttggcttgaagcgctcctcctgcttcagcatcccaaagtgctgagattacaggtgtgagacactgcactcagcctcagaccacccaattttaagttccatggcaacccagccacccactatcccattgcccttattttactctttttttttttttttttttttgagatggagtttcactcttgttgcccaggctggagtgcagtggcacgacctcagctcactgcaacctccgcctcccgggttcaagtgattctcctgcctgagcctccggagtagctgggattacagatgcccggctaatttttctatttttagtagagacagggtttcaccatgttggccaggctggtctcgaactcctgacctcaggtgatccacccgcctcagcctcccaaagtgctggaattacaggcgtgagccaccgtgcccggcctattttattctttatacatcactttgatcaaaccctgaaggatcttgtttacatatttgctcattttaccctattctgtcccttctacccccactagaacgtaggttctaggaggcaggatgggagtctgtcttgttcataaatacaacccctactcgttcatagttaagtcaacaaatatttattgcgcacctactatgtgtctgatgatattctttcaacagatatttgcagagcaccaaattgtgtacctggcactaggccttggtgatctagtggaaagcaaaggcccacaggatccctgcgtaaagaggaccccgcaaggagaaagtgaattctgactgggcctggaatagggaggttcatattccccattcaaggcctcagtttccccctttgtaaaatgggactgcagggagagctggaggacaaaatgaccgcctctgatccagcccagctactttcttagtatgcggcatctgaaaccatgatctccaggtttcctgtagaggagcgggggttcccactggaagcaaggggttaggagtgggtatgtgtagggggatggggatgcaaagaccgagctctgcccttaacccagcagggaggaagtcttcccctctctgaacctcagtttcttcctgcctaaaatgggcatcccagacgcccccaactcgcaggcaggaagatcggtcccaagtgccccgcaaagccgcgggccaggtggcgacccgggctgtgctggcttccaagcctgcgagccagcccgcgaccacgtggggcagtggcggcggcgcgggcggaacccaggctccgcggcttgcggcctgcccgggcctctgcagcgggggcgccggcggaagtggggacaccagtagccgcggacctcggtgagtacaaggtggtggggggtcgccagcaggttccctctccccggccccagctctggacgctcaccccagtgcaacgccctgagtgacggaaagaggtaggaccgcgcctgcagcgccggctggagggacgttctggtccccagacgctcctatcagggactgtttgatcccgatcgc

SEQ ID NO: 21934 - DNA, 2300 bp, Homo sapien
cctgaagatactccccagtgctcccctcctgctaaagaaccagttaccccaggaaaattcgactcctgtttttctttaattaactataccgacggggatggagtcatctttaggggctggtagggtggttatccaagggctgaatccagtggagctgggccaagtacgacaggagtccagataaaggtgtaggggctgcacggccgcaagtctcctggaaaggctggagtgaccggcatgccgggattgggagattaggatttgatttcattttggggcgggcggtggctcgtgctgggtcacgtggtcgtgcccaagcgctcctcctgttgccccacctgtggttgctgtggactgcacacgacagcagattcgctgtcccctcgttggaggcgaatggtcggaccccgagtggcggcgcccctgataaaaggccgaggattcgcgatcagggtgcaacttcactccctcctcttttctctccagccttgcagcgtggccgttcacatcacgcgcttcactaagcctcctatcactagtaacctttcagcgcattgtttaaaaagaaagcagtttctgtccctttctgtagttcctttaagttcaggatgtaagcgaagccttccattaagtaaaggtgagtgtcgtttcgtctcagtcgcgaaagtgcggcggccgatgatgaaccgcgccaggagcagcctcagcggccatcagtccattcgcagcgccggctccgccgaggcccggacttagctctcgagttgccttggcgacgacgcagctcgctccgccccagttcccttttatggtttcagccccgcctcctctagttagccgggtgcgcttcggcaagcgtggcgaaagtgcggcggcgaatgtcaagcgttgggtctgagcctaggggtgtggcttgagctcacgctggttctttcttgcctcggtgatccaccagccttgtcacccaggatttaggttggcagattcgtctctcgcctttggaatttctaccttctcctaggttttgttttttaaaatcaggcctatgataccgctcatgggctcatatttattttagcattgtaatttaagttgtattttatgcaactctaccccgatacagagagctgttgatgtaactgcagcgagcaaatggaggactagagactagcgaaggggccgagacttcgtctccagagtatccctgtcagcatccatcaactgcactcatatattgaatgcagctcctatccgcctttcttttcgacttcttcatgccgttaccactcttcatcagttagtctagcctcaatgttttcatttatttcctttgttttttttgggggggggggaacggagtcttgctctgtcgcccaggctggagtgcagtggcacgatctcggctcactaaaagctccgcctcccgggttcacaccattctcgtgcctcaggctcccgagtagctgggactacaggcgcccgccaccacgcccggctaattttttgtatttttagtagagacggggtttcaccgtgttagccaggatggtctcgatctcctaacctcgtgatccgcccgtgtcggccttccaaagtgctgggattacaggcgtgagccaccgcgcccggcccatttctttcctttcgttgagacagggtctggctctgtctaccaggtcggagtgcaggggcgcgatcatagctcagtgcagcctcaacctaccgggctcaagcgatcttcccacctcccaagtagctggaactacaggctcctgtaaccagaccctgctaatttttaaattttttgtaaagacggggccttgctatgttgcccaggctggtctcgaactcctggactcaagcgatcttcccgcctcagccttccaaagtgctgggattataggcgtgtgccgccgcgccccgccaggtgttttcagttctatgcactccattccctgggctcttgacgaatgtgcgggagctgaatattcgttatttggactccggcaggaaggcgtgggctcagcttcgcgcttgcgcgctgctcttggagacggcgtctacttcgccccgcccctcatagtctgcagttccggctctgcagattcgctgctcacgtttcttttttccgtggcccttcctgccctttgtttctctcttcatgtcacccgcgggacaactctacgtgcaagtcgctgaaatcgattttctgcttcttatagtaagcggcgggctcgccagcctcgagcgaaagtgtgactgcgaacgggcaggcgcgcgcggggctcggcggaggcgcg

SEQ ID NO: 21935 - DNA, 2300 bp, Homo sapien
ctttcaccttaatgtgtgagttgtgtagtaatacggtcctatatcacttaatgatgacacattctgagaactgcgtcgttaggtgatttcatggtcatgtgaacatcctagtggacttacacaaacctaggcctggtcaggcctggtggctcacacctgtaatcccagcactgtgggagttctagatgggcggatcacctgaggtcaggagtttgagaccagcctgaccaacctggtgaaaccccatctctattaaaaatacaaaattagcctggcgtggtggcgtgtgcctgtaatctcagctactcggaaggctgaggcaggaggagaatcgtttgaacctgggaggtggaggttgcagtaagctgagatcatgctattacactccagcctgggcaagaagagtaaaactccatctcaaaaaaaaaaaaaaaaaaaaaaaaccctaggtggcatgcctactgcacacctgggctacctggaatagtctagtgctcttgggctccacacctgcacagcatgtggctgtgctgagtaccctcggcaagtgtaacacagtggtaggtatttgtgtatatgaacgtagacaagggacagtaaaaatatagtgggaaatcttatgggaccaccggctgcatatgcagtccatcattgactgaaatggctttatgcggcttatgactagacctgtatgtgcctcagtattcaaaagatgtaaaaaggtggacagagattcaacataaagaaatgatcaatgtttgggccgggcgcggtggctcacgcttgtaatcccagcactgtgggaggccgaggtgggtggatcatgaggtcaggagatagagaccatcctgactaacacagtgaaaccctgtctctactaaaaatacaaaaattagccaggtgtggtggcacatgcctgtagttccatctactagggaggctgaggcaggagaatcccttgaacccgggaggcagaggttgcagtgagccgagatcgtgccactacactccagcctgggcaacagagcgagactccatctcaaaaaaaaaaaaaaaaaaagataaatgtttgaggtgatatgctaattaccctgactcaatccttgtatgcatttatcgaaataccacatgtaccccataaatatgtataataattatgtattaataaaattaaacattttaaaaaatgtatatagagagaaggaagtttctctctccctgtcctcctttggctttgccagctcaccttcctaaaagcagtcacctagtttattgtatgtccttctggaaggatctctgatggagcttagctaatgacaatccacagcagccacagcccaggccagccgacagagtttgtaaataaagttttatttgcacatgtccaggctcatttgtttatatactatctattactcttttcatgctacaaggcagagttgagtagttgctgcagagcctagtctgatcatttaagcaaaatattgtgatgcctgcagctgtgtgtgtttaaagtcaaggcagggtggtagaggcagcggcagcagcaggcccagaggcagcggttgggtttgcagcgagaagacaaggttgagtcagtgtgtttgcgagagctggaatcgaagcctcttaaaatggcagatgatttggacttcgagacaagagatgcaggggcctcggcctccttcccaatgcagtgctcagcattatgtaacactggcttcgtggtgctcaaaggctggccctgtaaggtctttgagatgtctgcttggaagactggcaagcacagccgcgtcaaggtccacctggttggtattgacatctttactgggaagaaatataaaaataactgcctgtcaccttataatgtgggtgtccccagcatcaaaaggaatgactcccagttgattggcatccaggaaggtacccctcactgctccaggacagcagggaggtgcgagaggaccttcttcgtctgccagaggagaccttggcaaggagatgagcaaaagtaccgctgtggagaagggaccctgatcaccgtgctgtctgccatgacagaggaggcagctgttgcagtcaaggccatggcaaaagaactggctcccagggtgacagtggtggcagcagtgatcttctgagactgcagaggccccctcctctggccttctgtaggctggactcttcctacacaatgtatttgatgttttattttgtttttcccaccccttcaatctgtcggggagcccctgcccttcacctagctcccttggccaggaacaagcaaagccatggccttg

SEQ ID NO: 21936 - DNA, 2300 bp, Homo sapien
ccccaaggccccctcctcgggaacccccgttgttggccactcggcatttcctggccttttctgtgcgttggcaaggtggctattgaggggtacctgctggttttccatttggtcgctctcccaccctgccggtcccccagccccctccctcggcacctctcctgtgggccccggcctggcgcctagtcagtgaagcaccgctcgttccgagggttccagggttgcctgtcctcgggctgttgtaccctcagctgtgctggaagcaaccacgctccttgtccatcagtgttcactggagttagggtaggttctctggaacattccagaagaggggcttgtcaggtcccaggaagggtggctgctcagtgtggcagctgagagggtgggtccttggaccccatcggcctggttcagaccagccctgcagcacccaccctgcaggtgatgtgtgtaagctcagagcgcgggtgctggcatctgcgggacggtgggttctgactgggtgctgggccccaggccctgccttcaccaagaagcctcctgtgcccagccttgccatcttcccaggctcatttcctgcctcacagcctttgcacagactccctcctctgctgggacatacccagagatgctgggcccactccctcactcggtcccgctggggcagagggcttcgcccaggcctgcctggctgcagtgctggctggtcctcagttgtgtgggtgcagagttctctcgctgtctaaggccctgtaccccaggttccagctggtgggtggcctctgagcctctgttcagtgccttcgcccaaaccccaccccagaaccctgcctgacctcaggcatagcagccatttggggcctcggctgcccccctgttcaagtgtcttcctgccttaaccccactctactttctcaggaattcacagacctcgggcaccgcctcgactgtctggacctgaaaggtgtgtgtctggctaggggttgagagcccttgggtcatgggcaggtcgggggctccctagagctgggtctgaggacctgcctggggttagcggcttctggagctgagctcagccagggcaggggctgggcctggtggggggtgggaggttgggggcagagggcccttccagccatgcaaaggtgcactgtcttagacatgcgcacggctgctgtctccccccaggtgagaagcttgactacaagacctgtgaggccctggaagaggtcttcaagaggctgcagttcaaggtcgtggacctggagcagacaaacctggatgaagatgtgagcggccctgccaccgcccacttggctccctgagctcccgggccccttcgaggtttgggtggggagaggacactgcaggaggagggggtcccctagacaaaggctgaggggtggcgcaagggcggggcctcttgcagggcaagagggagacatccaatatgaccagagtggatgtggagggcgcgttggggcacctatggcccaccctcataagcaaggagagccttagggagctgggctgaggggcaggcgtgtggcccccaggagccctttcaggaaccacgctggagggtccagctcctacagggtgggcttgggaagcattctgagagcagcctcccatcaaggcccaagggccctcacctcctcagccttgggagtccccaggcaccccaggtgtcgggatccaggggcaggggacctggagaactgaggcccaggctcaggaacaccaaggcctgtcctggtcactcagcacgtcagtcaaggactttggagggcaagtgacagaaaacaaaactgactacagcagagaaggaaagggtttgtccccgtggctcacggggccctgtctgtgcttgtcctcctctcccgtgtggctctctccagaccctggacccatcgtctctcggtggggcccggtgtcagggcccacgcctctcctccagggcagcccagagctgaggctgagcccccgaatctctatgcgcagggtgcctcggccctcttcgacatgatcgagtactacgagtcggccacccacctcaacatctccttcaacaagcacatcggcacccggggctggcaggcggccgcccacatgatgcgcaaggtgggcgcctctcggcttccaggaagaggcagctcaggctcccagcacggggaggcactttctcagggcatggcccgtaggctctgactgcatgagctcttgagtgtgggctgttgtggggatgctgggcctggccctcaggccaggagaacagggccgagaggtgtcctggcccc

SEQ ID NO: 21937 - DNA, 2300 bp, Homo sapien
tgtgtccccaggtggcaggcccagaccccactctactgagcacctgccaagggccatggctgtcggcccctgggctcagctcggagggagacacagggctctgcccttgggagtttgtactccagtctagagagacaacgataagatgagtgaaatctccagcctgtcagatggtgggatctgcattggagggagacagtggtgactgtgggtgggagtgagctggctgtgaggtgaggtgggccagaggtggtcacatttgagcaaagatcagaagcatctggtggaggctgtcatccaggcacccaggcccaggggtcacagatgtgtgcccaggggtgccaggccgaggcagggctgcagggcaaggcctgggactgcggggcctccatggaggtcctaagcagagggggttgctcctaccctgcagtcccctccccaggaagcacccggaccccagacagggctctgactgccggcctcctccaggtctggcctacatctgcgagggcctcaaggagcagaggaaggggctggtgaccctggtgctgtggaacaaccagctcacgcacacaggcatggccttcctgggcatgacactggtgagtcaggctggcagggaagggaggcacctcggtccccgctgccacctcccactccagctctcagcacagttgcctctagctgacggctcctgtcctgcccatcctgcaggttcaagacgatttaaactcagccccacctgcttcctcattcagcttctgtgcctgttttccctgaggaggagcccttctttcattatctcctttttttttttgagaccgagtctcatcctgtcacccaggctggagtgcagtggcgccatctaggctcactgcagccactccagcccccgcctcctgggttcaagccattcttctgcctcagcctcccaagtagctgggactacaggtgcccgccaccccgcctagccaatttttttattttttatttttattttttttgagacggagcctcaatcgcccaggctggagtgcagtggctcgatctccgctcactgcaagccccacctcctgggttcacaccattgtcctgcctcagcctcccgagtagttggaactacaggcacccaccaccacacccagctaatttttttgtatttttttagtagagaggggatttcaccatgttagccaggatggtcgcaatctgaccttgtgatccaccctcctcggcctcccaaagtgctgggattacacgcgtgagccaccgcgcccggcctaatttttgtatttttagtacagacggggtttcaccatgttggccaggccggtcttgaactcctgacctcgagtgatcccccccacctcggcctccgaaagtattgggattatgagtgagtcaccgtgcctggttttcagtttttatgtggtgcttaaagcaagccactcaggtacagagactctcagggcgagcactcgtgtgctcaaaccccgggataagagttgccctccttgggggcttcagggcgctcaaggtccaggccctggccaggggcccaggctgtggggggtagggactgactgggtgcctggggagctgggagtggacgggggacctggcatttggggagacttcaggcacaggagggacttcaggccaggcctgcggcagggcaggacggcgccggtgttcacgcaggcgcgcgaaagaaaaggagcgcccgggcctggctctcttcccggcttctttcctgacttggcctcctgggtctcctccgccatcacggcctcctcctcaccctcacaccccctccctccagccgcacactcagagcctggagacgctgaacctgggccacaaccccatcgggaacgagggtgtgcggcacctcaagaacgggctcatcagcaaccgcagcgtgctgcgcctcgggctggcctccaccaagctcacgtgcgagggtagggtacggggccgggccagggtgcgggctggtgggctcagccgggcggccagccgggtgtggggcccgtggccagcccctgcggtgcccccccaggcgcggtggcggtggcggagttcatcgctgagagcccccgcctcctgagactggaccttcgggagaacgagatcaagacaggcgggctcatggcactgtcgttggccctcaaggtgaaccactcactgctgcgcctggacctcgaccgtgaacccaagaaagaggcggtgagcaggggacggtcctgcagccctggggcgggcggaaggccgggtggtggggccggcctgagagccct

SEQ ID NO: 21938 - DNA, 2300 bp, Homo sapien
cactctgccacgtgccggtccctgtgaccgtgggtttctatgcccctttcggctgccgcctgcacatgatgctggacaagatcacgggtgaggagctgtgtgtgtttgttggggggaggatgagaaacagggcctctggtccccgcccagctccaggcttcccccagatccccccacccctgtggccagcctgccccagcccaggccctccccaagcccatgcctctaccccgggctctgcttctctggcctcctggctgcccccaagttttacccttccctgcttctgccaccaaatccactccaaggactctttctgaaggacagatctgaccctgtccctcctgtgcttggtgccttccatgctccccagcacctgaggcagaaagcccaggctctttattgaggctgcaggctcctgccaagcccctactggcctctgtgccacccagacccacctcttaaggcttggtggtcacaaagtacctgatacatagatgccaactgaagacatgaactgcaacccgccaggttccccagcagctttttttttttgagacggaatcttgctctgtctccaggctggagtgcaatggtgcgatcttggctcactgcaacctccgcctcccgggttcaagtgactctcctgcctcagcctcccaagtagctgggattacaggcgctcaccaccacgcccagctaattttttgtatttttagtagacggggttttaccatgttggccagatggtctcgatctcttgacctcatgtgatccgcctcagcctcccaaagtgctgggattacacatgagccactgcacctggccttttttttttttttttttttaaatggagtctcactctgtcgcccaggctgtactgcagtggcgcagtctcaactcagtgcagcctccacctcccaggttcaagcgattctcctgcctcagcctcccaagtagctgggactacaggtgcccaccaccaagcccggctaatttttgtatttttagtagcgatggggtttcaccgtgttggccaggctggtcttgaactcctgacctcatgtgatccgcccacctcggcctcccaaaaagtgctgagattacaggcgtgactcaccgcgactggcctccccagcagctttgatctggatcaagccctgctggagctcagacctcagccccacgtggggccagaggggctgggactgacgttcctcctacgtgtgcccagccctggtgcaggcccaatagcctttccttcctgtactgactgtccattgagcactcactgtcctgtcctgtgttgtcacagggtcccgggaggagaagaggatataaagaacagagagtccctactcctcctgctgggtgctgtagacactcccgctcattcactctgtgacctcagatttctcatgatctattgttcaggcattccctaagcaccttctggtgcccaggggacacggtgaccaagacaagcaggaccctgcccttccggctcacagtccagcaggggagagagacttgtcctcagacagtgatgacccagagtaggaatggctgagggcccccgacccagcctggggatcagggagggcttcctgcaggaggagcagttaagtcaacaagataagaccgagggtgtatcctgctgcctagcatagctcctcctcagcatctcattcattcatcccttacaccgaccacttgtcccctgccccactctcagaaccttcccggtgccctccacaccctcgctccgcctccagcctcttgcccatccctggctcttcctcgtatctctttttgcctcctcccatctctcctctgccggctctacctctgcccatcccgaccccacagcctggccttcagaccgcttccggtccaagcccggctccaggcctctccacgcccccgcttctgcaccggcttccagctctttaaggagcggccgcggctcgcttccagcccctcgcctctgctgggcgcccctcgcctctccaggagcgctccgccctgcccgtactaggccccgcccaccccggcgggtctgcggctcacgcggctcccgggctcccttcccgcagcgctgatgcagcaggaggccgcgcagcgcgagagcgaggagctgcagcacgtgcagtggcggccgcgtgccgtgagcggctggggcgtcccgcagctactgtggtacctggtgttcctgcagcccatcatcaccgaggtgcacctgcggcgcaggaacgtgcagttccttttcatccgctttagcgcctggcagtacgcgggca

SEQ ID NO: 21939 - DNA, 2300 bp, Homo sapien
acacacacacacacacacacacagtcccgggccagtcacggtagttcacgcctgtaatcctagcactttgggaggcccaggcgggagaatcacttgagcctaggggttcaagaccagcctaggcaacatggcaaaaccccattatctcttttttttttttcctgagacaagtctcgctctgtcgcctaggctggagtgcaatggcacaatcttggctcactgcaacctccgcctcccaggttcaagccattctcctgtctcagcctcccgagtagctgggattacaggtacccgccatcatgctcggctaatttttgtagacacggggtttcaccatggccaggctggtcttgaactcctgacctcaggtgatccgacggcctcggcctcccaaagtgctgggagctacagcgcccagccggcatatttcattttattatttgactcccctagtgaaatgtaagcttcacaaggaagggattctgtcttagaacggtgcctggaatacaacagacgctcaataagtgggtgtcgaataaataaatgtcccacgctgaggcttaggtacgttatgatactcattttacaaaagagaaaactaggacacacaaagattaagtcattgggtcgcacacctagtaagtgggggaggcgagtcctcagcacacgcccaataacagcattattatgattactagccgcttactcaggccttgagctaagtgctttaccctgaatcatcgcgctcaatttagcaataaccccgagccggcaccgtcgcgaacgccactttccaaaggaggaagccagggccagacgttgccctgcaaggccggggctgggccgggttcgaacccggacgcctgacgcgccctccgctctcccagaggcgttaccttggtggcccccgcttcctccccacggagcccggcgctcacccccgggccggggtcggggtcgtgagcccacagctcagccaccatctccgtgtgaagaaactcaaacaacacagtatccgccatgccccctcctcgcacgcctaaagatgcgcccagcgcttccagctctcattggccaggcttggtaagccacgcctcttgcgtcatggcgcgagccctcctactccggcttccattggtgttttagactagccccgcctccccgccccggactcaggtggtgtgcgcgtgagcctgggacactagggggcgggcctacgccttctctggccacatgtggcaacatcttctgctcttactgccgtcccttccctatttccgggttctcgagcattcctattggccaaattactggttacacgtgacatactcggcttttaaaatccctattggtccactccagactttcctcgtcgcacaacctggaagagccggcccagctgtttctctattggcggttcctccattcatgtgactcttctgcacgctcactcaaagctgatgctgagaacttgcttcctgattggtagccgggcgaatccacgtgacttggccgctaatgcccgcccaacccgctcccctattggttgaaatcacagcccttcagctgccacggtgagaacgcagcactcgggttaggaagcggatctcgcaagctccgagcgtcagctgccgggtacggtctttggcgttagcgcttctcccatcccatgagtgcccccagcagagtccagtcggactgtcatcctttctgcgactctggcgctggtcccgagcagctcacgggcccgtgtgcttccgggtctgagattggcatggtggaccaggtggagggtgtggcctctactaggaggcaaattcgtaaagacctcggcttgggactccgggaactcgggccccagatccttgttcgagctggtcttcagtttccccatctgtacgctgaagagcctggggtccagtaacccccatcatcacccagtttacagaagaggaaactgaggcccagacggggagcagctgacaccaagtcgttaagagaatcagcgaaggggctgggaatccaggacctgcgccttttacccaccgcggcgccggtctcacgtgcagtcccttcgctcttctcccctagttcggtgccatggcgtcccagggtcgtcggcggaggcccctgcggaggccggagacggtggtgccgggggaggcgaccgagacggattccgagcgctctgcgtcctcgtcggaggaggaggagctgtacctgggtccttcgggcccgacgcgcggccgccccacggggctgcgggtggctggggaagccgcggagaccgactcggagcc

SEQ ID NO: 21940 - DNA, 2300 bp, Homo sapien
ggtcgcacacctagtaagtgggggaggcgagtcctcagcacacgcccaataacagcattattatgattactagccgcttactcaggccttgagctaagtgctttaccctgaatcatcgcgctcaatttagcaataaccccgagccggcaccgtcgcgaacgccactttccaaaggaggaagccagggccagacgttgccctgcaaggccggggctgggccgggttcgaacccggacgcctgacgcgccctccgctctcccagaggcgttaccttggtggcccccgcttcctccccacggagcccggcgctcacccccgggccggggtcggggtcgtgagcccacagctcagccaccatctccgtgtgaagaaactcaaacaacacagtatccgccatgccccctcctcgcacgcctaaagatgcgcccagcgcttccagctctcattggccaggcttggtaagccacgcctcttgcgtcatggcgcgagccctcctactccggcttccattggtgttttagactagccccgcctccccgccccggactcaggtggtgtgcgcgtgagcctgggacactagggggcgggcctacgccttctctggccacatgtggcaacatcttctgctcttactgccgtcccttccctatttccgggttctcgagcattcctattggccaaattactggttacacgtgacatactcggcttttaaaatccctattggtccactccagactttcctcgtcgcacaacctggaagagccggcccagctgtttctctattggcggttcctccattcatgtgactcttctgcacgctcactcaaagctgatgctgagaacttgcttcctgattggtagccgggcgaatccacgtgacttggccgctaatgcccgcccaacccgctcccctattggttgaaatcacagcccttcagctgccacggtgagaacgcagcactcgggttaggaagcggatctcgcaagctccgagcgtcagctgccgggtacggtctttggcgttagcgcttctcccatcccatgagtgcccccagcagagtccagtcggactgtcatcctttctgcgactctggcgctggtcccgagcagctcacgggcccgtgtgcttccgggtctgagattggcatggtggaccaggtggagggtgtggcctctactaggaggcaaattcgtaaagacctcggcttgggactccgggaactcgggccccagatccttgttcgagctggtcttcagtttccccatctgtacgctgaagagcctggggtccagtaacccccatcatcacccagtttacagaagaggaaactgaggcccagacggggagcagctgacaccaagtcgttaagagaatcagcgaaggggctgggaatccaggacctgcgccttttacccaccgcggcgccggtctcacgtgcagtcccttcgctcttctcccctagttcggtgccatggcgtcccagggtcgtcggcggaggcccctgcggaggccggagacggtggtgccgggggaggcgaccgagacggattccgagcgctctgcgtcctcgtcggaggaggaggagctgtacctgggtccttcgggcccgacgcgcggccgccccacggggctgcgggtggctggggaagccgcggagaccgactcggagccggagccggagccggaaccgacggccgcgccgagggacctgcctccactcgtggtgcagcgggaatcggcggaggaggcctggggcacggaggaggccccggcgcccgcccccgcgcgctcgctcctgcaacttcggctggcggagagccaggcgcggctggaccacgacgtggcggccgccgtgagcggtgtctaccgccgtgcaggccgcgacgtggccgccctggctagtaggctggcggcagcccaggcggcggggctggcggcggcccacagcgtgcgcctggcgcgcggggacctttgtgcgctggccgagcgtctggacatcgtggctggctgccgcctgctgccggacatccgcggcgtgccagggaccgagcctgagaaagacccggggccgcgggcctagccatgattctacttcccaacctgactgcaatttgggggtaggccttgctgcctctgggacctgactctgtctcctgtgtctcttatcaccccccacccccgctcccatcttggtgtcacccatgggggctaatccggtccccttggataatgctttatattggatatagttcaacccctactgcggagaccagggccccactatccttagatctgg

SEQ ID NO: 21941 - DNA, 2300 bp, Homo sapien
ccaggaggtcgaggttgcagtgagcagtaatcccgccactgcactctagcctgggtgacagataaacaccctgtctccaaaaaaaaaaaaaaaaaaaaaaaattggtgagcccccagggtggaaacagattaaggagcaactatgtaacaaaggctggagccaagccccaggggaaggctcagaaccaggcggcagggtcaggatcgggagaggaaccagatctaaggatagtggggccctggtctccgcagtaggggttgaactatatccaatataaagcattatccaaggggaccggattagcccccatgggtgacaccaagatgggagcgggggtggggggtgataagagacacaggagacagagtcaggtcccagaggcagcaaggcctacccccaaattgcagtcaggttgggaagtagaatcatggctaggcccgcggccccgggtctttctcaggctcggtccctggcacgccgcggatgtccggcagcaggcggcagccagccacgatgtccagacgctcggccagcgcacaaaggtccccgcgcgccaggcgcacgctgtgggccgccgccagccccgccgcctgggctgccgccagcctactagccagggcggccacgtcgcggcctgcacggcggtagacaccgctcacggcggccgccacgtcgtggtccagccgcgcctggctctccgccagccgaagttgcaggagcgagcgcgcgggggcgggcgccggggcctcctccgtgccccaggcctcctccgccgattcccgctgcaccacgagtggaggcaggtccctcggcgcggccgtcggttccggctccggctccggctccgagtcggtctccgcggcttccccagccacccgcagccccgtggggcggccgcgcgtcgggcccgaaggacccaggtacagctcctcctcctccgacgaggacgcagagcgctcggaatccgtctcggtcgcctcccccggcaccaccgtctccggcctccgcaggggcctccgccgacgaccctgggacgccatggcaccgaactaggggagaagagcgaagggactgcacgtgagaccggcgccgcggtgggtaaaaggcgcaggtcctggattcccagccccttcgctgattctcttaacgacttggtgtcagctgctccccgtctgggcctcagtttcctcttctgtaaactgggtgatgatgggggttactggaccccaggctcttcagcgtacagatggggaaactgaagaccagctcgaacaaggatctggggcccgagttcccggagtcccaagccgaggtctttacgaatttgcctcctagtagaggccacaccctccacctggtccaccatgccaatctcagacccggaagcacacgggcccgtgagctgctcgggaccagcgccagagtcgcagaaaggatgacagtccgactggactctgctgggggcactcatgggatgggagaagcgctaacgccaaagaccgtacccggcagctgacgctcggagcttgcgagatccgcttcctaacccgagtgctgcgttctcaccgtggcagctgaagggctgtgatttcaaccaataggggagcgggttgggcgggcattagcggccaagtcacgtggattcgcccggctaccaatcaggaagcaagttctcagcatcagctttgagtgagcgtgcagaagagtcacatgaatggaggaaccgccaatagagaaacagctgggccggctcttccaggttgtgcgacgaggaaagtctggagtggaccaatagggattttaaaagccgagtatgtcacgtgtaaccagtaatttggccaataggaatgctcgagaacccggaaatagggaagggacggcagtaagagcagaagatgttgccacatgtggccagagaaggcgtaggcccgccccctagtgtcccaggctcacgcgcacaccacctgagtccggggcggggaggcggggctagtctaaaacaccaatggaagccggagtaggagggctcgcgccatgacgcaagaggcgtggcttaccaagcctggccaatgagagctggaagcgctgggcgcatctttaggcgtgcgaggagggggcatggcggatactgtgttgtttgagtttcttcacacggagatggtggctgagctgtgggctcacgaccccgaccccggcccgggggtgagcgccgggctccgtggggaggaagcgggggccaccaaggtaacgcctctgggagagcggagggcgcgtcaggcgtccgggttcgaacccggcc

SEQ ID NO: 21942 - DNA, 2300 bp, Homo sapien
gtatttttagtagagaccaggtttcaccatattggtcagtctggtcttgaactcctgacctcaggtgatccgcccaccttccaaagtgctaggagtacaggcatgagccaccgcactcggccttcacatcaatctttatgtcctttccatcctcagctttcacctacattcccctcccccacctctccaacctcatccctacccagaccccaatgtcattcttgcctctttcccatttctgtccagactcccacctgacctcatcctaaccctaaactccctcatcccaacccccaccttcaccccatcctcacctccggccctatccccatccgtgtcccaatccccatcttaattcaccgccacccccaaccctgcctttatctctgctcccgtgcctgagcccggcttttagccccgaggcccgaactgctccagggctggggacctcaggagagccttttctgtcctctgatgccctccacgttctggccagaggctatttcagccccagctccctggggactgggagggcactggagggaggtgaggagggggtgactagagccccgccttctggaaacggatgggcagaaatagcgctggccaggaaatagtttctctgccagggaggaagtggaggggggtggaggtgtcgagggtaaccctgggctgccaggaccctccttcagcctcagaggccttccagcccgactcgcctttctcgaggcagtctgaactcatcagagggccagatcagcccacagccatccccaccccaaaaagaccccatcagtggtcccatatcctctccccatctccaagtcaccaccctgcccctcctactcccaccggctgcctccatctctctcccccttacgtggctcctctctcaaccttctcgcctcctccgacccctcctccatttttccgccctgcaacctccccagatcccctcctcagtcacaggcatttttcttttccccctctctcttttttatttatttatttttgagatagagtctcgctcaacatgttgcccaggctggggtgcagtggcgcgatctcggctcactgcaacctctgccttccgggttcaagcgattctcctgcctctcgagtagctgggattataggtgtacgccactacgcctggctaatttttgtatttttagtagagacgaggttttgccatgttggccaggctggtcttgaactcctgacctcaagtgatccgccggcctcggcctcccaaagtgctaggattacaagcatgagcccctcaccctgacccctcccctacatccttcactcaacatccttctttcttgctcttctccgggctcttctctgcccccacactttcccgcctcctgtaacccttttcccctcatctctctccccttcctaagcacccccaaccccgcgtccggcatcgccctcctcccccccgcgcactgctgacctcccgctttgctcccgcagtgctggagatcctgagcctgatccagcagcgcgaactagcgcgtgcggacgagcacatcctggagctagaggccgaggagctggcgccgtcgaggggcggcgcgcctgggcctcccaaggccgagggcgctggcgggggccgccgggcgcgggacgtggcgctgctgtacgaggccctgcagcgcgagctgtgggcgctggtgcgcgagacgctggcgggccccgggccgggagcgtgcgccggggctggcgcggtggcgcagctgggccaggtgctggtacaggaggaggcggccgacgggcgtcggggtcccggggcggcccgcaaactacgcgcacgctgggccgaagccgtggcgcgcgcggcccgggagcgcctagaggcagcggctcccggggcgcccgggggcctggccgggcagctggaggcgctgcgggcgcggctgctggaggatatggccgtggtgcggggccgcctggcgcccgcctaccccgccggcctgggcgccttcggcgtctacctgcgcggctaccacggggccctggccgagtggctgggggcctccgcccgtcgcaggctgccgctggccgaccgctacgcgctgctgcactggcacaatcaggtctaccccaggtaagctggactcagttgcccaaggtcacgtgaaaccctcagccctaccccctagcactggcttcttcagaccttaaggaccttgggacagctgaccctacagtcctagcactttaacaccattaacccatccagtcgtcagcaccgctgacagttacaatcctagactctcactgctacc

SEQ ID NO: 21943 - DNA, 2300 bp, Homo sapien
gctgctattatttttcggagacaggaaaccacagtggttgagagagggtccaagttctggaacttgggagcacttggattcaaattgtagccctgccactaatttgccgtgtgaccttcagcgtgtgacgtttctcccttccttgggcctctgtttcctcatctgcaaatgggattgataaagatgctccctacctcttggggtggcagaaaggagaaactgctcagagcctggcacaagggcaactgccatgagtctgtgttgctcatagtatcaagcagtgctgtgctttcacaaccagcttttggctgagtgcagggtagtcccagcactttaggaggccgaagtgggaggatcgcctgagcctgagagttggagatcagcctgggcaatatggctacaaaaaattagctgggcgtggtggtgcacacctgtagtcccagtgacttggtggggctgagctgggaggattgcttgagccggggatgtccaggctgcggtgagccataatcgtgccactgcactctagcctgggtaatgcagtgagaccctgtctcaaaaacaaaacaaagcaaagcaaaacaaaacacccccagctctctgcaggtgggggtgtggagccttaatttgtagcatttgccaatttccatggtgtaaatattcccaccatggctaatttcaagctaccaaggtgatatcacatggcatttttgccccccattatatagtaattttactgtgcagctacaatagacgtaggtaacctcaagatcacagataatggcaaatgtagtaagataactaggacgtgatgagtatgtattacttgtacctttaatgtaatttaattgtatgtttgcataatttaatttttaataatggctgtgtttaacaaccagttccaaaattcctgagacataacaatcagctcgctccagccagatccagcacactgctgttttagaaggggaaactgaggctcaggaaaataagcctcagatagaagaaggcagggcacagaccccttcccaaaaccatgtgactcccaggccaagactatgtaatgcctgtctttctttcatcccaccctggtccacagagcatggatggtccccacagcgctgtgtggcctccgagaggctcttgtcctctctggtctcagcctgcccgcatggggagtggctgtgccctgcaggcgaatacctgcacagggttccttcgcacctgccagtgagcaacacacggattcttcctttcactttacaaactgggaaagtgaagcccagaaagggcaagtgcttgccccgggtcatacaggtggacagagagggtccccacaccccagctggggtgcaaaggagtggatgctgcagccccaacctgcgggtctggatctatgtggctgagtggaggcagcctgactagggaggtcactgagccctcagcagtggccaagccccgcacaccatccccttcacccaccccacccttaggcctccgaggggagagcttcccccgctcccccccgccaactggggagagaatgggccagggggagggacaatgtgggcagcgcctctggggtcttctctggctcagtccctttatctctatctcttcacagatctctgcgtctctgtatctctttgtctctccctgtgtgtgtgtggggtctctctcagtctttgtccctctgcgtctctgggtctctctgtctctgtctccctgcgtctctctctctctgtcatctggctcttccttcatctccttgcgcctctccacccttttgtaactcgtctctctctcttcgtgtctctctatctctacgtctctcgatctctctctctgcgtctctggcgctctgccccggcctctctctccccttctctcctctccagtgcgcctctcgtctcgggcgagaacacgctccccgccggcgtgcccagacccgcctccgcccccggagcccccggagcccccggcgccccgaccagcccgggcctgcgcctttaagggccggcggcggggggcggggtcccggcgccccgccctgcccgcccctccccctgacgtcccttcctccctccccagcccctccaccgcctccctccgccgccgcttgggccggctccgcgccccctccgcggcccccgcccgcccgcctgcccgccgcccccatggcgcccggggtccccgctgcacggggccactaggaccctcggcgtcccttcccctcccccgccctgccccctctcccgccgcgcggacccgggcgttctcggcgcccagcttttgagctc

SEQ ID NO: 21944 - DNA, 2300 bp, Homo sapien
cccacatccactcaggcagctctggagcagcgtcagccaggccctgctgtggaataaggatatttctctgcagaagtgagggtggcagtggagacagtgaggacagcttgtgcaaaggccctgaggccctgagttccccatccacagggtatggcccagagtgagggctcttctgggagagggggcaaaggaaggatatcccagggtgatctgagctgggccagctggagtgcagtgacgtcatcttggctcactgcaacctctgcctcccaggctcaagcgattcttccaactcagcctccagagtagctgggattacaggtgcctgctaccacacctggctaatttttgtatttttagtaaagacagggtttcgtcgtgttgaccaggctggtctcgaactcctggcctcaagtgatcctcccgccttggtcttcccaaaatgctgggattacaggcctgagccaccatatccagtggggcttgtggcaccttgaccgtccctcctcctttcctccccctctaggttgccatcaagattatcgacaaaacccagctgaatcccagcagcctgcagaaggtgaggctggggagacgggggagagcaggagccaggcttccggcacagccgggtgacccacctgacccttcctgcgggggcccggctggggaaaggatcccccaagccacccaccctcactctcctctgtcttcctttctggccacgcccagctgttccgagaagtccgcatcatgaagggcctaaaccaccccaacatcggtgaggagggaatgggagcaggggcaggccaccaactggaacacttgcaaaggagttgggggtggtggcagtggttagaatagttggagacccaccaggcgcagtggctcactcctgtaatcccagcacttagggaggccgaggcgggtggatcacttgaggtcaggagttcgacaccagtctgaccaacatggtgaaactctgtctctactgaaaatacaaaaattagcagggcatggtggcgggcgcctgtaatcccagctactcgggaggctgaggcaggagaattgcttgagcccaggagccagaggttgcagtgagctgagatcgcaccactgcaccccagcctgggcaataaagcgagacttcatctcaaaaaaaaaaaaaaaagaaaaagttagagacctggtttctcatagttgcatcactgctgtgtgaccttgggcaagtcacttaacctctttgagcctctattttctcttctggagtaggggtgataagagggcctattaccaggtcattgtgaggattgacaaagatgatgcatccaaaatgcttagtttgggctgagctatgggacttggtccagttatttccaccagcatcaacatcctcactgtcattatcattgggcagaggcgggagtgaggggtctttagtgagagaagcggagtttagctccgcctggatgtggctgcagcatttgttcattcattcattcatttactcagtaattattgattgagtggccgctatgtgccagaccctggggacacaacagggaagacaacaagacacaaatctctggcctcatggagctgacattcttgtgagagagaaagtggaaagggtggctgggcgcggtggctcacgtctgtaatcccagcactttgggaggccgaggcgggtggatgacctgaggttgggagttggagatcagcatgaccaacatggagaaaccccgtatctattaaaaatacaaaattagccggatatggtggcgcatgcttgtaatcccagctactcgggaggctgaggcaggagaatcgcttgaacctgggagggtgagcagagatcgcgccattgcactccagcctgggcaacaagagcaaaactccatctcaaaaaaaaaaaacgaaagtggaaagggtggtagagggggctgaggagtttggaaaatcttgctgtcagtagggagccattgagtgttgagttggggtgggggtgttatggttggcacatttgcatagttactgaggacaggttaggaggggccctttctccctaatgccctacactgttcccaaccattatagtgaagctctttgaggtgattgagactgagaagacgctgtacctggtgatggagtacgcaagtgctggtgagccgcccaccctctccgccctgcccctgtgccacctccccctgccgctgcacctgaccctgaccccgctcggcctctgccctgcaggagaagtgtttgactacctcgtgtcgcatggccgcatgaaggagaag

SEQ ID NO: 21945 - DNA, 2300 bp, Homo sapien
tttattggggcaggagctggggaagagtggtccagaaataaaccaggagacatagggagacctgggaggaagccagggatgctggtgacctgggcgagggaaggaccgcagttgggatgggccagacgcgggtgacattttgaaaggtggaggtgtgcctctgtttgtagtcagaaggctggaggcttcttcctccgcgcactgtggaaacgggtggccttgtttagattctagttgtgctgctttcttgcaatgggcatgagttgtggcctcccacagcttctgtttcctcccctgtgaaatggcaattgcaagaccgcatgccgcaaaaaaatagacaaaactttataacaatacaaaacgtttatttatttatttattcacttatttttgagatggagtctcgctgtgttgcccaggctggagtacagtgatgcagtttcagctcacgcgattccttgcctcagcctcccaagttgctgggattacaggcacccgccaccacgcctggctaatttttgtattttcagtagagacagggttttaccatgttgcccaagctagtctcgaactcctgacctcaggagatctgcctgccttggcctcccaaagtgctgagattacaggcgtgagctaccgcgcccggccatgaaatgtttactgatcactgactgtgctctaggggccgctgtgagcactttacgcttaaacccacaaccacgcttgaggcaggtgtcgagatcaccctcagtttacatacaaggaaactgaggcacagagaggtctggtaacccacctaaagttcacacagcgagtgagtggtggagctgggatttgcagctggaattctccgagagtctgtcgtttcaccttcacgttatgcagacagacactgttataattgatagtccacagagcccagtgcatggtagatatgcaaccaggattaaattattgctttcgttttcctgggtcttgagcaatcaggccttattttgtttctgctgggtaacttgaggctccaagaggggcaggagattacctgaagacccctagatctgcagaccacatggggtaatagtgatattacatagtactcgctgggtatgaaatactgttctagcttttctttttttttgagacaagttctcactctgttgctcaggctggagtgcagtggcacagtctcagctcagtgcaacctctgcctcccaggttcaagcaatttttgtgcctcagcctcctgagtacctgggactactggcgcacaccaccatgcccggctaatttttatctttatgtttttttgagacggagtttcgctcttgttgcccaggctggagtgcaatggcatgatctcggctcaccgcaacctccacctcctgggttcaagcaattctcctgcctcagcctcccgagtagctgggattataggcatgtgccaccacgcccagctaattttgtatttttagtagagacggggtttctccatgttggtcaggctggtcttgaactcccaacctcaggtgatctgcccacctcggcttcccaaagttctgcgattacaggcgtgagccacggtgcccagcccaatttttgtatttttagtagagatggggattcaccatgttggccaggccgatcttgaactcctgacctcaggtgatccacctgccttggcctcccaaagtgctggtattataggcgtgagccactatgtctggcctgtgctaggttttctatgtggattaactcataattctcaaactacgctatgaaataggaactaagattatccccattctatggatgaggaaactgaggctcagtgaggtaaagttactacctaaggtcaggtagagagtaaaggacaggcccaagagttgatccctgtgggccagccctagagcctgtgctcctgtctgcctcccacgtccatgaaaggctttggccttgagtcccactttccgccctctccttctctccctgcaggctgagaacctcttgctggatgccgaggccaacatcaagattgctgactttggcttcagcaacgagttcacgctgggatcgaagctggacacgttctgcgggagccccccatatgccgccccggagctgtttcagggcaagaagtacgacgggccggaggtggacatctggagcctgggagtcatcctgtacaccctcgtcagcggctccctgcccttcgacgggcacaacctcaaggtaccgagaggggctgggtgcaggggcatcagcccctccccacagtcaggcccctatcccccccacacctc

SEQ ID NO: 21946 - DNA, 2300 bp, Homo sapien
tggtgagatcctatctcttaaaaaagagaaaaagggtggaggcagtttgagaaagtggccgggactctgaagccacgtagagtttgaattacattaatgagccgtgtgaccttgggcaagtaacttcacctctctgatctttgatatctcactatgtgaaatgggctcattaaagaacctgggtcattgtgaggatcttgtaagatctcatacgtgaagtacttcacatactggcacagtaagcactcagtgaatgagagctattgttattgctaaacgaaacccacaccttaagaaggtaaaaaaggaaaagcaaataaacctcaaagaaagtagaagggaccggaattggtggctcatgcctgtaatcccagcagttcgggaggctgaggcaggaggattgcttgagcccaggagttcaagaccagcctggacaacatagaccctgtctctgccaaaaataaaaattagctaagtgttgtggcacatgcctgaggttctagctacttgggaggctgaggtgaaaggatccacttgaggccaggaggtcgaggctgcagtgagccatgatcaccccactgcactccagcctaggcatcagaacaagaccccatctcaaaaaaagtagaagggaggaggcattaaagagaataaatcagtgaaggagaaagaagaggtacaataaagcaacaaaacctaaagttggttttttgaaaagattaataaaatcagtctgggcgtggtggctcatgcctgtaatcccagcactttgggaggctgaggcgggtggatcacttgaggtcaggagtttgagaccagcctggccagcatggtgaaaccccatctctaccaaaaatacaaaaaattagctggatgtggtggtccacacctgtaatcccagctactcgggagactaaggcaggttcacttgaatctgggaggtggaggttgcagtgagctgagatcatgccattgcactccagcctgggcaaaatgagtgaaactctgtccaaaaaaataaataaataaataaaatccaatggacccctggtaaaaatcaattaaggaaaaaagacagcaaacatgaatcaccagtatccacaatgaaaaggggaactttgttctaacattaaaagatagtaagatgatattaggaactactttgtgccaataaatttaacagcttagatgaaatggacacattactttaaaaacacactgtatcaaaactgacacaagaagaaatagaaaacctgaacagtcttatattcttgttaaagaaattgaattcgtaactgaaaaccttccctataaagaaaatttttggcttggatgactcccaccagtggaattcttccaaacacttaaagaagaaataacactaaccttagacaaacttccagagaatagaaaaagagggctctcttcctaacatgtttatgaggcagcataatcctgatattccctgtgttcccagagctcacagcccagtatgggatggggacatatatgagaacagacattgacagcacagtgattgaagctgcagtggggagcccaggggcctgtgggaacccaaaggaggaggcacgtgactcagcctggggccgggggtggtggtagattatgaactgacacctgaaagatatgtaggagtgagtcaggggaaaaggtaggagtaatgttctaacaggtgagacagccagtgcacaggctagtcacagtgacagaatgtggcatgaataagtacattagcaaacgtttggtgtggctgggctggacctcaagaaggtgggcattgctgggagaagagcggtggacaaggatgccccctggaaaccttccctgcctcgttttccctcagtgcccccctcttctccggtctccaggggtctcccctgactcagcctcggtggctgggattactcatgaacctttcacatctttgggacctttcaccatctcctactcaccctgggttcccacatgagcccctgacttattcatcgatggggagggcagagaagggaagagggagaagctcaggggcatgtcttcaccccctcactcccttcctggctgtgtctcctgcagaacaacctccctcctagcatgatgacccgcagaaacacctacgtttgcacagaacgcccgggggctgagcgcccgtcactgttgccaaatgggaaagaaaacaggtacggagggggcagcaacagggtgaggggtgggaagtagggggtaggtgaacaggacctcccttgatctgagatgataggcattggaggctggtgccatgg

SEQ ID NO: 21947 - DNA, 2300 bp, Homo sapien
catctcagctcactgcaacctccacctcctaggttcaagcaattcttatgcctcagcctcctggctagctgggattacaggcgtgtgtcaccatgccaggctaatttttgtacttttagtagagatggggtttcaccatgttggccaggctggtcttgaactcctggcctcaagtgatccacccgcctccgcctctgcctcccaaagtgctgggattacgggcctgagccactgtgcccggcccatctaacattttcactgtcaatcacaatgggattaaaactcctcccacagcccctagggcaccatgggtctgctcctgtctcccctccaacctcatcttcttcctcccactctctccttggccccatctgctccagtcccctggcctccttcctgtctgtcctcagatgtgcccagccattctcacctcagcgcctttgcacctgctgttccccccagagccgcacatggctggctccctgttctccttcaggtctctgctcagatgtcatcttcccaaagaggcctgcctcgacctcccctgctgctgtgccgtcccctcatctgtgaccctcttgcactatcacctccaggacggcgggggttttgtgttttgttgtagcctcaggaagtgcctgatagatccctgtttcgagaccagttccatttggttttctgggcctcagtttccgtaaccgtgaaggagaccctcggcaatctgagcttgctgggaaagggctgggccccatgtaaatatttctaaagcacccctctcccctcccccctcagatcaggagtctgagggagaggcacagaggctccctttctctaagccagtcctcacctgcctaagaagatgtgaaggagacccaggagaccctgggatagggaggaactcagagggaagggacattcttttcttcgtcgcaatcctgggagctccctggaggaggagacccgatcagcctgcaatcctggcgcgtcccaggaggagaaagcggcttcctctatactgtactctcctccacagaacccccctctcagccctggaagtccttgctcacagccgaggcgccgagagcgcttgctctgcccagatctgcgcgagtctggcgcccgcgctctgaacggcgtcgctgcccagcccccttccccgggaggtgggagcggccacccagggccccgtggctgcccttgtaaggaggcgaggcccgaggacacccgagacgcccggttataattaaccaggacacgtggcgaacccccctccaacacctgcccccgaacccccccatacccagcgcctcgggtctcggcctttgcggcagaggagacagcaaagcgccctctaaaaataactcctttcccggcgaccgagaccctccctgtcccccgcacagcggaaatctcccagtggcaccgagggggcgagggttaagtgggggggagggtgaccaccgcctcccacccttgccctgagtttgaatctctccaactcagccagcctcagtttcccctccactcagtccctaggaggaaggggcgcccaagcgcgggtttctggggttagactgccctccattgcaattggtccttctcccggcctctgcttcctccagctcacagggtatctgctcctcctggagccacaccttggttccccgaggtgccgctgggactcgggtaggggtgagggcccagggggcacagggggagccgagggccacaggaagggctggtggctgaaggagactcaggggccaggggacggtggcttctacgtgcttgggacgttcccagccaccgtcccatgttcccggcggggggccagctgtccccaccgccagcccaactcagcacttggtcagggtatcagcttggtgggggggcgtgagcccagcccctggggcggctcagcccatacaaggccatggggctgggcgcaaagcatgcctgggttcagggtgggtatggtgcgggagcagggaggtgagaggctcagctgccctccagaactcctccctggggacaacccctcccagccaatagcacagcctaggtccccctatataaggccacggctgctggcccttcctttgggtcagtgtcacctccaggatacagacagccccccttcagcccagcccagccaggtactgcacggggcgggaatctgggtgggggccagagtaggggatttctgtgggtgctagaggcttggcttgggaaagggtctgtgtgtcaccccttgctccaccaacatcctcctatacaaaggcaggtcggtgcgtgggaag

SEQ ID NO: 21948 - DNA, 2300 bp, Homo sapien
atgacccagagttggcagggctggatgtgggagcccaagagcctggaaacctgggaaataagaaagggcttcctggaggaggaagcatcagcactggggctcagacaacagggaagtagagggcacgttggctgcaattcggagggagcgcggagctgtgccgagtctggagtttggtccacggaccagcagcgccctctgctggaagcatttcatagtgtagtgaccggggtaccgcgcgcattgagccatgtatgtatgtatgcatttatttatttttgagatggagtttcgctcttgttgcccaggcaggagtgtaatggtgtgatctcggctcactgcaacctctgcctctggggttcaagcgattcgcctgcctcagcctcccaagtagctgggattacaggcgtgcgctaccacacccggctaattttgtatttttagtagagatagggtttcaccatgttggccaggctggtctcgaactcctgacctcaagtgatccagccccctcggcctcccaaagtgctgggattacaggtgtgagccactgcgccgtcctcaagttatattagaatcgtgtcctcccagctttggccagcttactattctaggacttgattccttcattcagtcacaatttattgagcaccgactttgcatcaagctcttgctgaagataacagtgctgacaatatacagccctgccctcagagcttatatagtagaggagaaaaagtgaacccataatatacagtcagtagcgagtatttactaagtactttctatttgcgaggccctgataaaagtactgtcctggccaggcgcggtggctcacgcctgtaattccagcactttgggaggtcgaggtgggcagatcacctaaggtcaggagttcgagatcagcctggctaacatggggaaaccccgtctctactaaaaatggaaaaattagctgggcatggtggcgggcgcctgtaatcccagctactcgggaggctgagacaggagaatgacttgaacccaggagttgcagtgagccaagataagatagcgccattgtactccagcctgggtaacacagcgagactgtgtctcaaaaaaaaaaaaaaaaaaaaaaaagtactgtccctgtattagttaacattcaattctcaaagccttagactatttatattttattgactagggaaactgaggcacagagaggttaagttacttgcccaaggcctgcacagcaagtaagtgccggaatcaaatttgaaccctgagcccaattcttagatatcacattcccttgccaataacataatatataacataacataatgatgtgatatatgttatataaaataactttaggggccgggggcggtggctcactcctgtaatcccagaactttgggaggccgaggcgggaggatcacttgaggtcaggagtttgagaccagcctggccgacatggcgaaaccccgtctctactagaaatataaaaagtagccgggcgtggtggcagacacttgtagtcgcagctactcgggagactgagatgggagaatcgcttgaacttgggaggtggaggttgcagtgagccgagatcgcgctactgcactccagcctgggtgacggagcgagactccctctcaataaataaataaggtaattttaggccctgaaaagttttgtgaacaaaatcaagaggagtatgtaatgttttggtggaagggtgccatttagaagggggcaatcagggaaggcctgccggaggaggtggcctttgagaagagacctaaagacgatgagatctgtgggaagagagatcgaagcaggccacacaaccaaggaaaaggctctggggcaggcactgcaagaaagccacctgtctgggatctaaagtttccaaagttttagcttggccaaggcccctgcgctacaatcaccctgattcgaggtgtcctggaggttaccagttccgcgtgcgaagttctgccattcccgcggggctggagccccgaggctgaacttcccacgggcggtgggcgtggccggctcacctgcgggggcgtggctcccggctgccccgcccctcggaggagccgcccgaggtcccagacgcccggcgcagcgggagcggcggggcgtgcctggcctgcgggacgcgactgatcgcagtggggcgaagcggggccggagccgcccgcggtcaggtgggtgccgggagtggggcgcgggactctcggagagccgcgatgatggggggcgggggcaaccctgggcccgctcgccctgagacggggaag

SEQ ID NO: 21949 - DNA, 2300 bp, Homo sapien
tctgcgtgggttggcttttctttcttttttttaaataatattatcactttttgacacggagttttgctcttgtcacccaggctggagtgtggtggcgtgatcttggctcactgcaacctccgcctctcaggttcaagcaattctcatgcctcagcctcatgagtagctggggactacaggcgcataccaccatgcctggctaattttgtatttttagtagagccggggtttcaccatgttggccaggccagtctcaaactcctgacctcaactgatccacccacctcggcctcccaaagtgctgggattacaggcgtgagccaccgcgcccaggcttggtttttatttctaagagaatatacctgtgtgttgggagtgtatacagattgtttttgaaagaatagtatatgtgtgtgcctgagtcagtgtgttgtcttaggttgtatttctaaaaggaaaatgtaaatgtttttactgagttgtatatttaataggagaaagtgagtgcgtgttctaagaggagaatgtatattatgctgtcctttctttctttcttttttgactgggtcttactctttcacccaggctgagtgcagtggcactatcatggctcactgcagcttcaacctcctgggttcaagcaatccttctacctcagcctccaggtacaccatcaccacacccagctaatttttttatttttatttttgtagggatggggtctcactatgtttcccaggctggtcttgaactcctgggctcaagtgatcctcctgcctcagccaaaatcccaaagtgctcggagtacaggtgtgagccaccgcacccggcctacattgtgtttctaatgagggagtgtgtgtgtgtgtgtgtgtgtgtaactgtatttctgggagggtgtgtgtgtgtaccgtcttttttttttttttttttaaatgaagtctcactctgttgcccaggctggattgcagtggtgcgaccttggctcactgcaacctccgcctcccgggttcaagcaattctcctgcctcagcctcccaagtagctgggactacaggcatgcgccaccatgctctgctatttttttttttttttttccagtagagacagggtttcaccctgttggccaggctggtcttgaactcttggcctcaagtgatttacccaccttggcctcccaaagtgctggcattacaggcgtgagccactacacctggccccatgttgtattggagagaagggagagtgcgtgtgtgtgtcaaattgtatttcggagaggaaaatgtgtatgttgcattgtgtctttaagaagggagggtgcgggtgtgtgaggtgtttctgaggagtgtgtttgtgtgtatatgaggaccccagaggcaccaccagctaagtttctgtgaccttgtcacccacatacaaccacatgaagtcccatagaggggggcccccacccactatgagctgggcttcagactctcagctgtcacatggccagtgtgacatacctggaccacacctatcacacgtgtgtcccgacaggccctgggctggctaagcttgtccgatggaggagggcggagcccctgttcccccagggtccatctgttgcctgggagccaacacatggccccatcctcattccccccaacctagaggcctcctgggcttctgggggccctggcccctcggccctctcctcccaccccacccacccccagtggtctgactggttcccgacaaaaacaccctaagaatgagctcacgcagaggctgccgcctccacacgccccgcctcactctgccggcagaggagggtgcctctggtcccaggtcacacggccaaccgggagctctgggccaggggatccaagggccttggggtggggaaggctggccaggtgagctgagggcagatgggggaccccaggctagctgtttgctttctcttggttaattacacataggatttgggaactgtcctcagggcagaaccctgggttgggaggacagacgaaggtagacaagactgttccagatgagagctggctgggatgggtgtggagactgggatggagagggtgtggaggcagagggctggccaggatgggtggagcagggaagagccaggatggggagaagttaggggtcctgatggccattatgggaatagaggctgggggccaactgactggcccgggcaatgattccccaaacccctcaccattgctccccaggagcagcaatgtctgtgcaggtagcggctcctggaagtgcagggctgggcccagagcgcctgagcc

SEQ ID NO: 21950 - DNA, 2300 bp, Homo sapien
ccctgtgctcccatcccaggctccaagaaccaggctgtttcccgttcatttcccaggtggggtgggttgcagggtggagagtggcccaggctccccgaatgaccttctgtccctggcctgcgcttctgcccacagcggtttgcccgtggggacaagcgggggaagctgccccgctggatccaggagcacctcacagatgccaacctcaacctgaccgtggacgagggtgtccaggtggccaagtacttcctgcggcagatggcacagcccttccaccgggtgaggcctgcgtccccctcccggcaccctcccaggctgagcttctcctccagaaagtccccttggattctccccactccccaccctcagcctgcctgtcctcctgccctcagcaaagagaagtttatcgtgcatctacgtgccaggctctggggggaagggggagattcgaggggccacagatgccagcaggtggcccaggcacggcagggtgagagaagttggggtgaggaggcattgggcgttttcaggagagacggtgctggcctggagaaagccggtccttctccgactccctagctggctcctccctcagccccatcttatgttgacagggatggcccgctctggattatacggacatctccaaattcattcaaacatcctgtccctactggccattcgggggggtggttggggaagtgcagcagctgcctgggcccctgcccaacagtgcccccctctccctttcctctgttctctgcaggaggatcagctgggcctgtccctgctcagcctggagcagctagaatcagaggagacgctgaagaggatagagcagattgctcagcagctctgagtggggcgggtggggccataaacggttcctggtgactcctgagtcttgcctggccctggttcccagcggcggtggtgctagaaggtcttatgaagtcaggtgacatttctcactgtcacgtccacagcctttaatcgcaggagaaggcagctatccaccaggtacccagaggcaagggggggccaggagatgatagaccccctctcaccccaccagcccatccctcctgcactgttcccaagaagctgcggccagcgcagttcactggacgttagtgggggctcaggtcctgggtgctggcgctgagggtccgaggggccttgtccaggtgccagctgggaaactggagacaggcacaggggatggttggaggggaggtgaggggcaagtgttacatccaccctccagctccaggtccagcctggcagccaactatccaaccccctcgcctctaccccaagtaaaacccatctttgctcctgtcctgggtctcttctgacaccaacccaccacctgctgactccaccactggcccgaccgccctgcctttgcctcatctctgcacctacccacatggcctcctctatttttgacccagatgtccccctcacctgagtcccaggagcccttggagcatccacgttcagtgtgttgagtgacatggctctcttcattctgcaaagagggcagcagggaggaaatgagtgaatccaggagtggcccccctccacgagggacctttccagcacagggtttgatctgtgtgtatcacaggggagatgggagccatggaaggttcttgagcaagatgggggtgggggtggggtgggctgtggattctgctgatgtcagggctctttgccgacctgatcaacactcacccggctgctcctgccgccgcctcgcctcggagccgggagaccagcttctcacttcctcgcctgatagactcacggatcttggagagtgagctgctgcggcgaagggcctggggaggggccggggatgctgctcagtcccccaggcccatgcagtccccacgcccaccccaggagccgaagcacagcccatcctcacctgttctgcgtcaccagctgtgcctgtgttgggggcacctagggggaaagatgggggacactgagatggggacatagagaagccaccaggagggaagacagacaggggctaggggctcaccgagaggggcgggtaggtcctccttgtggaggatttctttgtacagctcttccgcttgttgatacttgttctgtttcaggtaggctgaggcctgcggagaagggagtgtctgggaacttttcggaccccagttcccaacactgcatccagtcccgcctttttttttttttttgtagagacaggggtcttggtatgttgcccaggctggtcttgaactcctagcctcaagtgatcctcctgcctt

SEQ ID NO: 21951 - DNA, 2300 bp, Homo sapien
tgggagtccccagaagagttggatgtaaccaggatggctgtgccctgaacccaccctgacctccctgggtccttccccaggggatccttgagaacatccagaggaacaagctgctctttattgagacccaggatggtgccgaaaccagtgtcgccctggagaagtaccaggaggtgggtgtgcgaggccagcgtggagaggggtcggggaggtggctctgaggagtgacctaacttgcgtctcggtctccccacctcaggcctgcgagaatggccgcggggccatcctgctgtcagtggcccggggcaaagtgtccgagggaatcgactttggtgagtggactgggctcttcctccccaggtgtcttcccagagctctctggaacacctgcccgctctgctgtctgctcccgcggggaaccacccacccccagcctaggtgcacagaggggccctcccctcccctctgtccctaggcacccggcgggaacacaccctctccccccaactcagacacagcatcctgggtcgcgtgaggctgtccctgtcccaccagccacacttgtaacccccctcgccccctctcctctgcccaccagtgcaccactacgggcgggccgtcatcatgtttggcgtcccctacgtctacacacagagccgcattctcaaggtgagtagctctgtctcccagggagtcccacagtgttaggatcaagggaggagtggctcccccacctccccagcttctcatcctccgtatctgcaggcgcggctggaatacctgcgggaccagttccagattcgtgagaatgactttcttaccttcgatgccatgcgccacgcggcccagtgtgtgggtcgggccatcaggggcaagacggactacggcctcatggtctttgccgacaaggtgcagcttcaggggtgcccctgtgctcccatcccaggctccaagaaccaggctgtttcccgttcatttcccaggtggggtgggttgcagggtggagagtggcccaggctccccgaatgaccttctgtccctggcctgcgcttctgcccacagcggtttgcccgtggggacaagcgggggaagctgccccgctggatccaggagcacctcacagatgccaacctcaacctgaccgtggacgagggtgtccaggtggccaagtacttcctgcggcagatggcacagcccttccaccgggtgaggcctgcgtccccctcccggcaccctcccaggctgagcttctcctccagaaagtccccttggattctccccactccccaccctcagcctgcctgtcctcctgccctcagcaaagagaagtttatcgtgcatctacgtgccaggctctggggggaagggggagattcgaggggccacagatgccagcaggtggcccaggcacggcagggtgagagaagttggggtgaggaggcattgggcgttttcaggagagacggtgctggcctggagaaagccggtccttctccgactccctagctggctcctccctcagccccatcttatgttgacagggatggcccgctctggattatacggacatctccaaattcattcaaacatcctgtccctactggccattcgggggggtggttggggaagtgcagcagctgcctgggcccctgcccaacagtgcccccctctccctttcctctgttctctgcaggaggatcagctgggcctgtccctgctcagcctggagcagctagaatcagaggagacgctgaagaggatagagcagattgctcagcagctctgagtggggcgggtggggccataaacggttcctggtgactcctgagtcttgcctggccctggttcccagcggcggtggtgctagaaggtcttatgaagtcaggtgacatttctcactgtcacgtccacagcctttaatcgcaggagaaggcagctatccaccaggtacccagaggcaagggggggccaggagatgatagaccccctctcaccccaccagcccatccctcctgcactgttcccaagaagctgcggccagcgcagttcactggacgttagtgggggctcaggtcctgggtgctggcgctgagggtccgaggggccttgtccaggtgccagctgggaaactggagacaggcacaggggatggttggaggggaggtgaggggcaagtgttacatccaccctccagctccaggtccagcctggcagccaactatccaaccccctcgcctctaccccaagtaaaacccatctttgctcctgtcctgggtctcttctgacaccaacccaccacc

SEQ ID NO: 21952 - DNA, 2300 bp, Homo sapien
ctgcctcagcctcccgagtatctgggactacaggcgcatgccactatacccagctaatttttgtatttttagtagaggtggggtttcaccatgttggccaggacggtctcgatctcctgacctcatgatccaccggcctcggcctcccaaagtgctgggattacaggcgtgagccaccatgcccggcccagagttgtgctttggaaagatttcttctgggtgctgaacgcagtggctcatgcctgtaatcccagcactttggaatggttaggcaggcagatgacctgaggtcaggagttcgagactggcctggtgaacatggcgaaaccccatctttactaaaaatacaaaaattagctggggccagacatggtggctcacgcccataatcccagcagtttggggggccgaggtgggcagatcacttgaggtcaggagtttgagaccagcctgaccaacatggtgaaaccctgtctctactaaaaatacaacaatttgccaggtgtgatggtgggctcctgtaatcccagctacttgagaggctgaggcaggagaattgcttgagcccaggaggcagaggttacagtgagccaagattgtggcactgcactccagcctgggcaacagagcaagacttcgtctcaaaaaaaaaaaaaaggccgggcgtggtggtttacgcctgtaatcccagtactttgggaggccgaggcgggcggatctcgaggtcaggagatcaagaccatcctggctaacatggtgaaactccgtctctactaaaaatacaaaaaaagttagctgggcgtggtggcgggcgcctgtagtcccagctgctcaggaggctgaggcaggagaatggcgtgaacccaggaggcagagcttgcagtgagccgagatcgtgccactgcactccagcctgggcgacagagcgaagactccgtctcaaaaaaaaaaaagaaaaaaaataggcctggcatagtggctcatgtctgtaatcccagcactttgggaggctgaggtgggtggatcacctgaggtcaggagttcgagaccagcctgaccaatatggtgaaaccccgtctctactaaaaatacaaaaattagctggacgtggtggcacgcacctatagttccaactactcaggagcctgagacaggagaattgcttgaacccgggaggcggaggttgcagtgagccgagatcacaccagctgcactccagcctgggtgaaaatgagagtctgtctcaaaaaaaaaaaaagagttcttctggcagggactagaggcaggagactgggtggcaggcagggacctgagcaggaggggaggggccttggccaggatgtggccatggggagagagaaaggtatggtttggagagagatgtgggaggtagagaggctgggatatggggagcgtggtgcctgggttttgggaccagggacaagaggagtagaggctgatgttcagattttcaggttacgagagagggacatcattctggaggctttatgggccggtgttccctccccatcctcagcgtgaagctgaccaggggctcagtctgcctcctgggggtttctcctgtacccaggaaaccagatcgggcctcatgtcctgcggcagggcctgacaggaggatggagatctgggcccttgccctggggctgggtagcgaggccggctggctgctgcttctgcctctgtctctctgtcctgccccatcttccatccctacctttgtcattctctacccactatttcccatctgccaacacctcatggtctttcacctggatcatccttcctcatcttcctcatcccccaaccacctccccctcatccttaggttctcagcttagtagagatgtcttgtcctccaggaagccctccctgacccccaggctgagtcaggcccctcctctgggcacctctgtcccagcactgcccactctcagtcatcactatctgaggacaagtctgtctcctactggactgcgaacccatgcgagcaggggcaaggctggcttggtcaccactgtgtccccagcacagaggacttgattttttttcactgtgtgaaaccgaatatgtaaattcattcattcatttatttcttcaacaaacaggccaggctcagcactgtggaagcagcaggaaccaaaaaagatctcatccctaaccccccagaacttatattccagatgggaaaaccagtagcaaagatgcagccaaataaacaaggaaataattccagaaagtgacagttatcatgaaaaaaaatacattgttgtgttggaata

SEQ ID NO: 21953 - DNA, 2300 bp, Homo sapien
gacgcccacctggccaaccccgtgctgcccgacgaagtgctgcagggtgagccccgaccccccgctgccccccagtccctttcccgcctccccgtcgccgctgatagcgtctcctcgcagaggcagtgcctggctccatccgcacggccgagcatttcctgggcttcctgaggcggctgctggagtacgtgaagtggcggctgcgtgtgcagcatgtggtgcaggagagcccgcccgccttcctgagcggcctggcccagcgcgtgtgcatccagcgcaagcccctcaggtgcggccccagacagcgcgcggggtgggggcccggcaggtcccggttatgcagagccgtgtcctccacgcctgtagccccaggtcaccactgcagcatcaggagtgagtgagctgggcgaggcacgtgggaccttgtctggtctgacctgggaggtccgggagcaaggttggagctgatcctgggtccgtgcgtcgggcaggggcctggcaggcaacacctggctggattggagaatctcccccacccaagagagagtgggagcaccatttacagaggggcgggctgggggaggagccaaggagggtgggaggtgagagctgggagctaagccaggccacagcggcagggagggagtgtgttgagaaccaactggtgggggcctggacaggggcttctgctgggagcagaaaccagtaccagggcctcgcaggctgggagctggaggaggtgtccccggcccatgtatcttcccaccgatgcctctaatcttccaaacctgagggcaggggcgtccccatggagtagtctgggcgcattttgggggagtcagtctcttgaggcacagggcaggcagagaatgaccaagggatacgagggggcttttcctttgggtaagtcatgggtcttctttgaactgcagtttcctcctttgtaaaatggccaaggagtcgggtctttacttcacagggttctttggtgggttaatgagagagcagcgaagccaatcacctaccctgccctgagcactaaggaggagctaagccctttatgttccttacctcagttgcacccccagtacagcatccccaccctgcaaatgaggacactgggactcccagaggggaagcctttgcccagagccacacagcactgtgcccggtagttggggcttgaagccatgcctgtgggctccaaaggccctggctgccctgcctctgtgggtgaggccaccttccatgtgggtttgcccatcttccccaggattggagacttgtgagggcaaagaggggatctcagtcactcaacacacattccccaagtgcctgcttcatgctggggacacagccgtagaggctccatggcccagtggaggggacagactcatcctcagctagcgaccagccggggtaggcgcctggggttagaggagccaggctgggagggctgacgtgcgggaggcaggtttgcaagtgtgactgcccacctggcttcaaagccagctgctctatgaccctgcctcggccctgcctgtgtgtggttgtggccgagtggccctgcacatgcgtgagtgtgtggacgtggtatccgtgggactctgtgggatgtgggtgttgactgcattcctctgtgagcccatggggttccgacaccgtgtgtgtccccataggtgcgtgagaggcagtgggagaggctctgggtgtgaatgcgtgaccatgtggccatgcgggattaatgccatgactggggggttctgggtgtgattgtgcgtctcttgttttgatcagaacccacttagggccaggtgcagtggctcacacctgtcatcccagcactttgggaggctgaggcaggtggatcacgaggtcagaagttcaagaccagcctggccaacatagtgaaagtccgtctctactaaaagtacaaaaattagctgagtgtggtggcaggcacctgtaatcccagctacttgggaggctgaggcaggagaatcatttgaacccaggaggcggagtcgagatggtaccagtgctctccagcctggatgacagggcaagactccatctgaacaaagaaaaaaaagaaaaagaaaaaaagaacccacttaggaggtcgtgctagcaggtgtgacaagtgaccacatgactctggagtgtctgattattgctctgtctgtgccattatgcggcaatggctatttgtgacatgcaggtgtacagcgtgggggtgcaagtttccaaaacaggcccagtgcccaccctcactgagtgctcattggctggggagacag

SEQ ID NO: 21954 - DNA, 2300 bp, Homo sapien
tgtcacgcaggctggagtgcagtggcgtgatcttggctcacttctgcctcctgggttcaagcaattctcctgctttagcctcccgagtagatgggattacagatgcatgccactatgcctggcttttttttttttttttttttttttagtagagatagggtttcaccatgttgaccaggctggtcttgaactcctgacctcgtgatccatctgccttggcctcccaaagtgctgggattacaggcatgagccactgcacccagcccataatcaatctttatggtgacttgaagttttccttcacagcacttttgtacttgtgattatacacgtgcgcacacacacacacacacacacacacacacacatttgagataggttttcactcctgttgcccaggctggagtgcagtggcacaatcactgcccattgcaacctctgcctcccaggcccaggtgattctcccacctcagcctcctgagtatctgggactacaggtgcacgccaccacgcccagctaatttttgcattttttgtagagacgggttttcaccatgttgcccaggctggtctctagctcctgagctcaagcaatgtactcgccttggccttccaaagtgttggaaccacaggcacgagccaccactccaggctgtaatcatatattcatttgtatatttaatatctgttctttgaggccaggcctggtgcctcacccctgtaatcccaacaatttgaaaggctgaggggagaggatcacttgaacctgcgagtttaaccagcctgggcaacgtggtgagacctcgtctctaaaaaaatttaaaaaataaaacttagctgggcttggtggtgcacacctgtggtcccagctactctggaagctgaggtgggaggatcgcttgagcccaagaggtggaggctgcagtgagctgtgactgtgccactgcactccagccttggcgacagagaaagaccctgtctcaaggaaaaaaatctgttctttgagggcaggtgctgaggctgtcatggtcacctttctgttcccaggggccagcacaggatcagacacatggtagatgccacatagctatttgttgaagaaacaaacaaaagctagcatttatgttttatttattagttattattattaatatttgaaatggagtttcgcttttgttgcccaggctagagtgcgacggcgccatctctgctcactgcaacctctgcctcccaggttcaagcaattctcctgcttcagcctcccgagtagctgggattacaagcatttgccagcacgcccggctaattttgtatctttagtagagacaggttttctccatgttggtcaggctggtcttgaactcccgacctcaggtgatccacctgcctcagcctcccaaagtgctgggattacaggcttgagccaccgcgcccggcctgcaaagccatttctaactcttgggcccagaaaggatcaccaatttccctgtcattctccgttagactattcgctactgagacgatttttttttttttttgagacgaggtggaggggcgggggttctcgctatcttgctcaagctgatctcgaactcctgggttcgatcaatactcagacaatcttggcaggcgcaggaggaccaaattctagtgaatgagatcgagtctctcggctctttcccttccatgttttctttttgattggccctcgacgatcctcagtgacgcctcccgcaccgcctcacccgagagtcagccgccctcgcttttccgtgcgcacgcgcagtatcccgattggctctgccctagcggattgacgggcaggttagccaatggtctcgtaatataggtggagcgagccctcgaggatgtccacgacccggcctctcgctgaatattcatgagggaggcgggtcgaccccgctgcacagtccggccggcgccatgaagtgagaagggggctgggggtcgcgctcgctagcgggcgcggggggtcttgaagatggggtcatcggtgggcgcgcctgggtccccaagggggcgaggggagggtgaaggggtgggacgggggcagccgcagggagcagcagtgatagcgaggagacactgagggggccccgaggctcctgaggacctgagggttaccgggggcgccgggcccgtcacccttctctgggctcgacgaccgggcactgtggaggcgggagaggggctgaggggacgggaactgacccagcagcccctgccgccaggctcaacgtggacgggctcctggtctacttcccgtacgactacatcta

SEQ ID NO: 21955 - DNA, 2300 bp, Homo sapien
agtagtggtgcgcacctgtaatcccagctactagggaggctgaggccagagaattgcttgagcctgggtggcagaggttgcggtgcgctgagattgtgccactgtactccagtctgggcgaaagagtgagaccttgtctcaaaaataaataaattaagaattaattaatttaaaaaagagatttcgatctgcccctgccttcccctccagctgccctttctctgctccctgtgctcaactcagagctccacccccacaggcttcctttcagcactcacaggcctcagctttcttctggcctagagcttttgtgtatgatggtctctctccctggaacacctttctcacttctctcatccatcccctcttgctggttgatctcttctaattattttctggctctactcaaacctcgcttcttccacgaagccttctctgatcacttggccaacactcacaccccacagttgacagtagacatcctgtcataataagtcttttttttttttctttttctgggacggagtcttgctctgtcacgcaggctggagtgcagtggcgtgatcttggctcacttctgcctcctgggttcaagcaattctcctgctttagcctcccgagtagatgggattacagatgcatgccactatgcctggcttttttttttttttttttttttttagtagagatagggtttcaccatgttgaccaggctggtcttgaactcctgacctcgtgatccatctgccttggcctcccaaagtgctgggattacaggcatgagccactgcacccagcccataatcaatctttatggtgacttgaagttttccttcacagcacttttgtacttgtgattatacacgtgcgcacacacacacacacacacacacacacacacatttgagataggttttcactcctgttgcccaggctggagtgcagtggcacaatcactgcccattgcaacctctgcctcccaggcccaggtgattctcccacctcagcctcctgagtatctgggactacaggtgcacgccaccacgcccagctaatttttgcattttttgtagagacgggttttcaccatgttgcccaggctggtctctagctcctgagctcaagcaatgtactcgccttggccttccaaagtgttggaaccacaggcacgagccaccactccaggctgtaatcatatattcatttgtatatttaatatctgttctttgaggccaggcctggtgcctcacccctgtaatcccaacaatttgaaaggctgaggggagaggatcacttgaacctgcgagtttaaccagcctgggcaacgtggtgagacctcgtctctaaaaaaatttaaaaaataaaacttagctgggcttggtggtgcacacctgtggtcccagctactctggaagctgaggtgggaggatcgcttgagcccaagaggtggaggctgcagtgagctgtgactgtgccactgcactccagccttggcgacagagaaagaccctgtctcaaggaaaaaaatctgttctttgagggcaggtgctgaggctgtcatggtcacctttctgttcccaggggccagcacaggatcagacacatggtagatgccacatagctatttgttgaagaaacaaacaaaagctagcatttatgttttatttattagttattattattaatatttgaaatggagtttcgcttttgttgcccaggctagagtgcgacggcgccatctctgctcactgcaacctctgcctcccaggttcaagcaattctcctgcttcagcctcccgagtagctgggattacaagcatttgccagcacgcccggctaattttgtatctttagtagagacaggttttctccatgttggtcaggctggtcttgaactcccgacctcaggtgatccacctgcctcagcctcccaaagtgctgggattacaggcttgagccaccgcgcccggcctgcaaagccatttctaactcttgggcccagaaaggatcaccaatttccctgtcattctccgttagactattcgctactgagacgatttttttttttttttgagacgaggtggaggggcgggggttctcgctatcttgctcaagctgatctcgaactcctgggttcgatcaatactcagacaatcttggcaggcgcaggaggaccaaattctagtgaatgagatcgagtctctcggctctttcccttccatgttttctttttgattggccctcgacgatcctcagtgacgcctcccgcaccgcctcacccgagagtcagccgccctcgc

SEQ ID NO: 21956 - DNA, 2300 bp, Homo sapien
aatattttgaggtgtgagatcagtgagttaagcagatgggctggagtctctcttcactgctaacttgctgtgtgactgaagataaattacttgtccgaaactctgtttcccgtctgtgaagagagattaataatatctaccctatagaattgtgacggggattcaatgaaataatgtgtatgtgtgtgtgttttggggtttatttatttatttatttttgagacagagtttcactctttttttttgagacagagtctcgctctttcttccaggttggagtgcagtggtgcttgctcactgcaagctccgcctcccgggttcacgccattctcctgcctcagcctcccgagtggctgggactacaggcgcccaccaccacccccagctaatttttgtatttttagtagagacggggtttcatcatgttagccaggatggtctcgatctcctgacctcatgatctgcccacctcggcctcccaaagtgctgggattacaggcgtgaaccaccgtgcccagccaagatggagtttcactcttcttgcccaggctggaatgcagtggtgaggtttcagctcactgcatcctacacctcccaggttcaagcgattctcctacctcagcttcccaagtagctggggttacaggcatgcaccaccacacccaactaattttttgtgtttttagtagagatgaggttttgccatgttggccaggctggtctcgaacccctgacctcaggtgatccacccacctcagcctcccaaagtgctgggattacaggcatgagccaccatgctcagccgtgtgtgtgtgtgtgtattatttatatgtatatgcatactatataaaaatatatatacactatatatataatgtgtgtgtgtgtttgtgtgtgtgtgtgtatatatatatattttgagatgaaatctcactcttttgcccaggctggagtgcagtggtgcagtggtgcaatctcggctcactgcaacctccgcctcctgggttcaagcgattcctgtgcctcagccttccgagtagctgggattacaggcatgtgccaccacgcccagctaatttttttttttttttttttttttttgtatttttagtagagacagggttttaccatgttggccaggctggtctcaaactcctgatctcaagagatctgcctgcctcggcctcccaaagttctgggattacaggtgtgagccactcgactcagccaataatgcatatttttatttccacctgctttactgtcagaatgagtaagacagagaagaaatcattaaacaccaggattctacttcctgctggagttttctgcctgagatgttaggagaggaaactctcaggatctcagaaaatcacatctatcacggttggtagaagtagattctagagtcagccagaactgagttcaagtcccaactgcatggctttgggcaactgacttgtcctctctgaggcccagattccctttcggtaatgtggagatggcagtgtatctacctcacaaagcagtggtgagattacaataaggtaggcatgtaaagcgccaggcacatactaactgctcaataaatgggaggcatcataattgtatattattcacagcccaaggaaagtgtagcccagagagggcaaggaacttccctgaggtcacacagaaaatcatgtgctggttgtatgccctggaagttgtggagagggagtgttgggtgtctcctggggacctgtcctctgatgggctcttgttccggctaggaccccccaaaccccccaccgagctggagcctgagccggagatagaggggctgctgacaccagtgctggaggctggcgatgtggatgaaggccctgtagcaaggcctctcagccccacgaggctgcagccagcactgccaccggaggcacagtcggtgcccgagctggaggaggtggcacgggtgttggcggaaattccccggcccctcaaacgcaggggctccatggagcaggcccctgctgtggccctgccccctacccacaagaaacagtaccagcagatcatcagccgcctcttccatcgtcatggggggccagggcccggggggccggagccagagctgtcccccatcactgagggatctgaggccagggcagggccccctgctcctgccccaccagctcccattccacccccggccccgtcccagagcagcccaccagagcagccgcagagcatggtaagtaatacaggaggaaaccggggtatgtttgctacatgaatccaggagctgtagcaaagagccc

SEQ ID NO: 21957 - DNA, 2300 bp, Homo sapien
gccagggaggttgaggctgcaatgagccgagatagaaaagaaagaaagaaagaaagaaagaaagaaagaaagaaagaaagagagagagagaaagcaagcaagcagggagggagggagggagggaaggagagagagagaaaggaaggaaggagagagaggaaagaaagaaagaaaagaaagagagagaaagaaagaaagaaagaaatagaaaagaggggaccagtggaagtggacatctaaagggaccctcagaaggaaagaggtgtttacctaagtggcataaaggtgacatagagtaatgggctagccacagtgctgattcagggctgtctccccaccactactcacctgggctctctgtgcctgaatttccatggccggtcagcctcctctgggttgacctccagtgatctctcttgacacccccgcccacacaccaacccttccactaatgtctcctttgatccatccctcaatgccctggcctccccacagccgccccggtacagctccagctcgatccctgagcccttcggcagccgagggtccccccggaaggcggccaccgacggcgcagacaccccgttcggacgatcagagagtgccccaaccctacacccctacagcccgctgtcccccaagggacggccgtcgtcgccgcgcaccccgctctacctgcagccggacgcctacggcagcctggaccgcgcgacctcgccccggccccgcgccttcgatggcgcaggcagctccctcggccgtgcgccctccccgcggcccgggccaggcccgctccgccagcagggtccccccacgcctttcgacttcctgggccgcgcaggctccccccgcggcagccccctggcggaggggccccaggccttcttccccgagcgtgggccgtcaccgcgcccccctgccacagcctacgacgcgccagcgtccgccttcgggagctccctgctaggctccggcggcagcgcattcgccccgcctctgcgcgcgcaaggtgaacccaggggcccctcgcggggcctttgactcgcggggtcaaagcgggcaggatccggggctcgccacccctcccgtctcatcctccctggaaacttctccccagacgacctgacgctgcgccggcggcctccgaaagcctggaacgagtctgacctggacgtggcgtacgagaagaagccttcgcagacagcgagctatgaacgtgagtggtggaggcccggggaatggaggacccggaggagaggcagccccacagaccctaatgattcccgccccgcaggcctggacgtcttcgcaaggcctgcctcgccgagcctgcagctgttgccttggagggagagcagcctggatggactggggggcaccggcaaggtgaggaggcgacgcctggggaggagaggctggggaaggtcgaggagtggggtgggggagcggggtcaaggccagtctccccctcggggctgcgatctgggtctcggcgcccgttcccacgctctcccttcactgtgctgggtttctgctccttcctcaccctttcttctccctcactcccagggcttccctcacctcctctcccttctcgtcttttgtctttacctcccctccaccttccctctctcacccgatccccttctcccttccctcttccccaggacaacctcactagcgccaccctgccgcgcaattacaaggtctctcctctggccagcgaccggcgttcagacgcgggcagctaccggcgctcgctgggctccgcggggccgtcgggcactttgcctcgcagctggcagcccgtcagccgcatccccatgcccccctccagcccccagccccgcggggccccgcgccagcgtcccatccccctcagcatgatcttcaagctgcagaacgccttctgggagcacggggccagccgcgccatgctccctgggtcccccctcttcacccgagcacccccgcctaagctgcagccccaaccacaaccacagccccagccacaatcacaaccacagccccagctgcccccacagccccagacccaaccccaaacccctaccccagccccccagcatccccaacagacatggccccctgtgaacgaaggtgagtcagcaatgagggccctagaggactgggtgaagggaggacaaatggcagggggaccagaccagccctgggaggtggggagatcacagccaaatgcctctttacaagcactgtccctgcagagagctaggccaggtgagtttgggaatttgggtaggagccagggatagctcaaaggt

SEQ ID NO: 21958 - DNA, 2300 bp, Homo sapien
cagaatcctgaccctacaaactctactgcctgtgtgagctccaagcctcagtttaccccttcctctccgtgtaatggttaaatgcccggctatgcaaacctcccagaatccaatagccgctttccggaattctgccctgggttctagaactacctctgcaaacccagctgtttcccaccccataaggcaataggggagcccacctccgccagggggtgccctagggcggatgtcccttctctggttaggcaggtctgacgcccaggttaatgacatgttgggttcgctcagcggcacagaggaggttggagatctgcctcggtgttttctctcctaccccgcccccatccccgagccgaaaagtcgggggagagccgggacacagcctccggagggaccccgggtacctgtcctgctccacttcaggaacccaggctccactatccctgccccacccttaattctgctcagagacctagaagatcggtcgagacagcagcttgaggctggcagggtggtcacccattccaccttgagccccaccagtctgagcctctcatttctgaccaagactcggggattcgaacccctatactacccaaagactcggcttcctagagccccccagttcgagggactcaggaattccagctccaacgtctccccgggatgaaggggtagaatccctccattccaagaattcaggcatccgaacccgctttccttccctccagtaaaacaggcaacggagtttccttctaaggatccaggtgtcggcgcgccccaaattccgccctgggacctggcgtccgagtcccctcccaatcctcccagggacgcgggtgttgggctttttcagggcctctggtccccaggagggtgaaactcacggatccgggcagatcctggcacctgggggcttcctccagctcgggctccggcttggggagcggagaacggggcggggcaggagctgggaacaggttagacgacgtgacttgggctggagggaggcgggtcccggtggggagggggagccaaggtcgcctcgagcaccttgggacttgtagtcccggagggacaggacgtagcccaagacgatcccatttggattcacccagagtccatttcacagacaggaagggcgaggcccagaagccgagagcgaccaggccagggagatacagaagagccgagacgcctgcctcgctgtggctggagactgactcctgagcccttgccccaccccttcaggcgcactatcccctttcctgatcagtatcccccagggtctctgagcccgaatctccccgtcgataaaaagcgcgggttggatcttcaaaggatgtcccagcaagagttcaaaatcttagtttggactacaacccccagcagcctccgcgaccgccctcgggcgactctttgcctcgggtcctgtgggaattgtagtcctggagcccgcaggggctgcaccccggtgtctctctcgcccacgcgaaggaaaccgtctggagatcctggataggggaaacatttccccttccccttgaccctccctccgctctggaaagcctctcccacctggggagaaggggtgccccaattctggagtaggatcctaaatcttggcagagggggcgggaagtggcgctgacacactggccaggaatgcagtcgggtcaccctgtctagccaccgtctcgcggctccaaccgccgcccaacgcggggcggccccagtgggaagggaagtgggtgcgtcccccaaatctgtgtccacgtgccgctgtttacacgctccctggggcagggaggagtcgccgatcaggtcccttcctgaaagtcatcgaggtttcccacgcatgagactaaacccccgagggcatctacaagtcccatttgatccacaaacgctacaccgtgcccagcaccactccacgcgtgtggggctcctgggtccgaggctccgccctcgagaaccacaagctcctccccctatgtttcccgctcccccggagtccagaagccccgcccctggctggaacttcacgccctccggacggattgcccctatttctccattttcccgcttctcccagtcaagttctgaacttgtgaggcatctgggcctccccagaagacatttaacacagaaagcacagccctactaactagtattcttacctgtctcttcaagaatttcagaccaatcgaccgtcctgtctctttaaggcttaggaagagcagtgtggctgcccctttaaggaggcgttgcaacaaaccatattggacagacgatgg

SEQ ID NO: 21959 - DNA, 2300 bp, Homo sapien
ggggcttcgcggtaaagttggggggacaagagaaccgagcagcatctgcagcagaaggggaaatggggtcgactgacacctccttgccggtccaatcttgcagggcgcgcctatcggtccattggtcttaacctcgtgagcactccagtcccctcaacctggtttctcctttctgcccacctgttccccaggggcgacctcaatttcaccgatccaacccctgggggcgccttgctctccacgggtagccccccacaagataaccctctctccgttcgaattcccgttcgcccactgggaatgcacgctcttcgcaagtcctgcttgcaggtacgcctccttttccgcccgaaccctctcggacgcccctttctccttccaccaacgcaccctccgcaccccgtcaacccgcaccctcaccgccggcctggggctcctccatcctgggacccacacctcaggcaaccctgtagcccgggctgctcgcaccaggttgcagaccacgtggatccaaaggggtagggcatcatccgggagcgcccaactggtgcgggagcgcgggggtaggcattgctcgactcccgatctgcaggaaaaactggggaaaatttcaacgtgtgcagagcagaaaaccgaggaagaagtctttttccgaaaaatgtattcccgaaagccgctgattcgctgtattgctggagtcagaggcccgtcgggtcccgatgggtcgcccccatcgtctgtccaatatggtttgttgcaacgcctccttaaaggggcagccacactgctcttcctaagccttaaagagacaggacggtcgattggtctgaaattcttgaagagacaggtaagaatactagttagtagggctgtgctttctgtgttaaatgtcttctggggaggcccagatgcctcacaagttcagaacttgactgggagaagcgggaaaatggagaaataggggcaatccgtccggagggcgtgaagttccagccaggggcggggcttctggactccgggggagcgggaaacatagggggaggagcttgtggttctcgagggcggagcctcggacccaggagccccacacgcgtggagtggtgctgggcacggtgtagcgtttgtggatcaaatgggacttgtagatgccctcgggggtttagtctcatgcgtgggaaacctcgatgactttcaggaagggacctgatcggcgactcctccctgccccagggagcgtgtaaacagcggcacgtggacacagatttgggggacgcacccacttcccttcccactggggccgccccgcgttgggcggcggttggagccgcgagacggtggctagacagggtgacccgactgcattcctggccagtgtgtcagcgccacttcccgccccctctgccaagatttaggatcctactccagaattggggcaccccttctccccaggtgggagaggctttccagagcggagggagggtcaaggggaaggggaaatgtttcccctatccaggatctccagacggtttccttcgcgtgggcgagagagacaccggggtgcagcccctgcgggctccaggactacaattcccacaggacccgaggcaaagagtcgcccgagggcggtcgcggaggctgctgggggttgtagtccaaactaagattttgaactcttgctgggacatcctttgaagatccaacccgcgctttttatcgacggggagattcgggctcagagaccctgggggatactgatcaggaaaggggatagtgcgcctgaaggggtggggcaagggctcaggagtcagtctccagccacagcgaggcaggcgtctcggctcttctgtatctccctggcctggtcgctctcggcttctgggcctcgcccttcctgtctgtgaaatggactctgggtgaatccaaatgggatcgtcttgggctacgtcctgtccctccgggactacaagtcccaaggtgctcgaggcgaccttggctccccctccccaccgggacccgcctccctccagcccaagtcacgtcgtctaacctgttcccagctcctgccccgccccgttctccgctccccaagccggagcccgagctggaggaagcccccaggtgccaggatctgcccggatccgtgagtttcaccctcctggggaccagaggccctgaaaaagcccaacacccgcgtccctgggaggattgggaggggactcggacgccaggtcccagggcggaatttggggcgcgccgacacctggatccttagaaggaaactccgttgcctgttttactgg

SEQ ID NO: 21960 - DNA, 2300 bp, Homo sapien
ccgaggcctcaggccaggagggatctgtggtgggggacttgctgggatgggctgcagagggctccctgacagggattgctggggaccctcaaggatccttagggtgccctggggggctgaggcacaggtgagtccacctcctgcctccgttgagggggccagcagggtcgcttctccagcttggggacagctgctgaggactcgatagcggtgccgcttgcctgccaatttgcccttgacgatctgggagccagagagaggcacatgccgcccattgaagctacagagagaaacagggagggcagaggcttaagtggaacaggagagggaaggttttttgattttttttttgtttttttttgagagagtcttgctctgttgcctaggctggagtgcagtggcatgatctcggctcactgcaatgtccacctcctgggttcaagcgattctcctgcctcagcctctcaagtagctgggattacaggcacctgccaccacgcccagccaatttttgtatttttagtagagacaatttcactatgttggccaggctggtcttgaactcctgacctcaagtgatctgctcgcctcggcctcccaaaggatgggattacaggcaccagccactgcgcctggctggcctctggtttttaataaaacatgactagagtgactccatcttaaagtgagtagctaggcacttacaaggttcatgcttatggcctgaaaataaccacatcccaggctgaccaccaattataattacagaatatttatggccatacagaacatgttccaccaagcctgcagaatgtccaaatgtcctaagaatgcagcccccattacttaaatataacataaatgagcaagcttaggttgcaggattaatggtcgtggataacaccaatagcccctacctttagtgagcttatctgcacactccaagtttaactatagttccttatagtttcttataagtagaaatactaacaaagggctgtgggtttctccccctgctttctgaggacactctactctgtaaaggagtagtttccaataaacttgtttctttcactgtgctctgtgactcacctctaattctttcctgtgacaaattcaagaacccgctcttggggtctggaccgggaccctcttttccgtcaacaagaccactcaccattctggggcaaagtctgcaggggcctgaataagccacagctccgtatctggacccgtcagcgcctccaaggagaaacgaggggactctgaggctgggggcttcgcggtaaagttggggggacaagagaaccgagcagcatctgcagcagaaggggaaatggggtcgactgacacctccttgccggtccaatcttgcagggcgcgcctatcggtccattggtcttaacctcgtgagcactccagtcccctcaacctggtttctcctttctgcccacctgttccccaggggcgacctcaatttcaccgatccaacccctgggggcgccttgctctccacgggtagccccccacaagataaccctctctccgttcgaattcccgttcgcccactgggaatgcacgctcttcgcaagtcctgcttgcaggtacgcctccttttccgcccgaaccctctcggacgcccctttctccttccaccaacgcaccctccgcaccccgtcaacccgcaccctcaccgccggcctggggctcctccatcctgggacccacacctcaggcaaccctgtagcccgggctgctcgcaccaggttgcagaccacgtggatccaaaggggtagggcatcatccgggagcgcccaactggtgcgggagcgcgggggtaggcattgctcgactcccgatctgcaggaaaaactggggaaaatttcaacgtgtgcagagcagaaaaccgaggaagaagtctttttccgaaaaatgtattcccgaaagccgctgattcgctgtattgctggagtcagaggcccgtcgggtcccgatgggtcgcccccatcgtctgtccaatatggtttgttgcaacgcctccttaaaggggcagccacactgctcttcctaagccttaaagagacaggacggtcgattggtctgaaattcttgaagagacaggtaagaatactagttagtagggctgtgctttctgtgttaaatgtcttctggggaggcccagatgcctcacaagttcagaacttgactgggagaagcgggaaaatggagaaataggggcaatccgtccggagggcgtgaagttccagccaggggcggggcttctggactccgggggagcg

SEQ ID NO: 21961 - DNA, 2300 bp, Homo sapien
cacccgcctaggcctcccaaagtgctaggattacagacattagccaccatgcccagaaaaaaaaaattaagtaaaatgggaaaatgtagacacagatagacacccatagatgaaagactgatgtgaacaaagaaacagagggatgtcatgtacatgcaggcaagaataaataaaaagatcaatgaacataacagaaatgtcagaaatagacgtgtgtgtatgggaatttggtatgtgataaaggtagaatttcagaacagtggagaaaagatctacctttggtcaacttgagacaattggttacatcactcataaacaacgacctcggtgcactttcaaaaataaatcttggccaggcaccgtggctcatgcttgtaatcccagcactttgggaggctgaggtgggcagatcacttgaggtcaagagttcgagaccagcagggccaacatggtgaaactccgtctctactaaaaatacaaaagttagcctgtaatcccagctacttgggaggctgaggcaggagaactgcttgaatgtgggtggcggaggttgcagtgagcctagattgctccattgcactccagcctaggcaacaagagcaaaactccatctcaaaaaataataaataaataaataaatcttacatagattaaagccagatgacctgctcattctaggtcattactgtttgggaccgtgtctgtgtccctcactgaactgtaagctctgggaggacaacacggggcttttatcttttacgtagataaaagaaatgatagaatatatcattatagccgtgcactgtaatcccagcactttgggaggtcacaaagtgacctcaggatcagctgaggtcaggagtttgagaccagcctggccaacatggtgaaaccccgtctctactaaaaatacaaaaaaaaaaaaaaaaaaaaaaaattagccgggcatggtggcacatgcctgtaatcccagctactaaggaggcaggagaatcgcttgaacccgggagggggaggtgcagtgaactgagatcgcgccattgcactccagcctgggtaataagagcgaaactccgtctcgaaaaaaaaaaaaaaaagaaaaaaaagaatttatcattatgaccctgggttatggcagggctcttaacacaccaaaagcaaaagtcagaacggaacagattgataaatagttgcgcataaacacaaataacttctgtgccaaaaataactaaagttaaagcccaaagtagaaactaggaggaaatgtttgcaatatgggtaactaaggattagaatcagaatccataaagtacccctagaaattaatagtaataaaaaagccatacaacccattttaaaaatggacaaggaatatgagcaagcaattcacagaagacaaaatttacaagaccaatactttcacaaaaaacattccatttccttagtaatcagagagctgcaagttagaacagtgtgatactatcctttcaggaagtgactaatactaactcatcagccaggcccctgctcagatgtcccttcctccaggaagcccttccggactccggggctgagtcaggcgctccccctgacccccatcccacggctctcccgggatctcccatcccagacctgcccattctgggtcagcactgggaacgtgtctgtgtcccttactgaaccgtaagctccgggaggacaacacggggctgtcgttggtcactgctgtgtcaccagcacggactcgcacaggaccgggaagagaggaagcgcgtggggggaataggtgtggaataaatgaatgaatgaggaaactgaagccaagtcaatgtctgagttggattcaaacttaagtctctccttactgagaggagggaccaagttggatctcctgcgatctgttctccactgagccctgccaggattctgggcacacagaagcgctcagtaagggctttgaaacttaacagtttgggagccagatcctcaggccacatctctctcctcccacgacctccgcggtcctccagaaccatagagagttgtacagagatcgccctgctctatgctctactctcctggggagcggggccagagaggccggaagtgctgcgagccctgggccacgctggccgtgctggcagtgggccgcctcgatccctctgcagtctttcccttgaggctccaagaccagcaggtgaggcctcgcggcgctgaaaccgtgaggcccggaccacaggtgcgggaggcggagactgcgggtggagattggcgccgcggaagccaatcattgccgagtc

SEQ ID NO: 21962 - DNA, 2300 bp, Homo sapien
gagcagcctgaccaatatggagaaactctgtctctactaaaaatacaaaaaaactagccaggcatggtggcacatgcctgtaatcccagctactcgggaggctgaggcaggagaagcacttcaacccgggaggcggaggttgcggtgagccgagatcgtgccattgcactccagcctgggcaacaagagcaaaactctgtctcaaaaaacaaaacagaacaaaacaaaaattagccaggtgtggtggcgcacacctgtaatcccagctactcgggaggctgaggcaggagaatcacttgaacccaggagatgtaggctgcagtgagccgagattgtggcactgcactccagcctgggcaacagagtgagactctgtcaaaaaaaaaaaaaaaaaacgtcagattcatgaaccccatttgctaagaagatttgctcaggtagtcacctgtacccctgtgagccaagattgcaacagtacatgctaagagcagtaagaaggagattgtaaagcttagaaagacctgacaggccaggcgctgtggctcacgcctgtaatctcgacacttcgggaggccgaggcaggcggatcaccaggtcaggagttcaagaccatcctgaccaatatggtgaaaccccgtctgtactaaacatataaaaattagcttgacgtggtggcccgcgcctgtagtccagcaactcgagaggctaaggtgaggcggaggttgcagtgagccgagatcgccactgcactccagcctggcggcagagcaagactccgtctcaaaaaaaaaaaaaaaaaaaaaaaaaaaaagacctgacaagtgaaagctactaatattgccattatcatttaaaaaaaccccagacacaggtttttcagggagtttcatccaaccaggcaggtctcagaaatcagaaaagaaatggaaagggtaggaaatctggagtttgacaattctgagtttgaatttcttgtgatgggatcttgggcaagtcatttaacctccctgagtatcatttttttcttttataaaatgaagatttttctctcttaaccttccagagctgttttaaggattacaaatcttctactgaaaggcgtagcacaggagctgtgcttggcaagtgccaaatacaaggcattaattattattattagaattaataataatatcccctccctcttacacattctttgtctccgggtggattaaaaggtggaaggagaggctaccaacaccatcagaagagaggcttctctctaagtttcatttcccatctcctccaaatccgcatccctcccaaacgccggacctgtaaggccagcagggtccaagacacacatcctttgcccagcggggaagattaaagctaaagctcagagagggaaaacatttcctaagctcgcacagcgaatcaggacagaaaccaggacgagcctcggaatccctccattacctccactttcacctgagcatcacagcccgctcgggactcagtttccccacctacgtgaccacaccacactaatcagggtctccttttggagatctgctcttcttctcgaatgggggcgctgcaccatcggtagaacagggtaggtgggggcgccagaggtgaaggggacctgcaggctggggtcttccccgcccgggtcagcggggtccctgcggggctagtctaagcgcctattattaccagcccccggggcggcgttgcactgcgcaggcgcgggcggggcgcgggcgcgcgcgcgagcgagcgagggattccctctgacgtcattgctaggataccaaacaaacactccgccgcgccggccgagctccttatatggctaattgcgtcacaggaactccgggaaggcggggccgggatcccctcccgccgagtggcccggaacgcaacccccgagacccccagggccccgagggtcatgcaagtgaccagatcgagtctagaacagacctcttgctggacagtgcgggactcgatttggcggggccggagatttggggaagtttgtccagcaaggggcgggtgacgtaagcaggggggcgggtcccgggcatataaatacaggctggcgggtctgtgcttcattcataagactcagagctacggccacggcagggacacgcggaaccaagacttggaaacttgattgttgtggttcttcttgggggttatgaaatttcattaatctttttttttccggggagaaagtttttggaaagattcttccagatatttcttcattttcttttggaggaccgacttactttttttggtcttcttta

SEQ ID NO: 21963 - DNA, 2300 bp, Homo sapien
cccagggccccgagggtcatgcaagtgaccagatcgagtctagaacagacctcttgctggacagtgcgggactcgatttggcggggccggagatttggggaagtttgtccagcaaggggcgggtgacgtaagcaggggggcgggtcccgggcatataaatacaggctggcgggtctgtgcttcattcataagactcagagctacggccacggcagggacacgcggaaccaagacttggaaacttgattgttgtggttcttcttgggggttatgaaatttcattaatctttttttttccggggagaaagtttttggaaagattcttccagatatttcttcattttcttttggaggaccgacttactttttttggtcttctttattactcccctccccccgtgggacccgccggacgcgtggaggagaccgtagctgaagctgattctgtacagcgggacagcgctttctgcccctgggggagcaacccctccctcgcccctgggtcctacggagcctgcactttcaagaggtacagcggcatcctgtgggggcctgggcaccgcaggaagactgcacagaaactttgccattgttggaacgggacgttgctccttccccgagcttccccggacagcgtactttgaggactcgctcagctcaccggggactcccacggctcaccccggacttgcaccttacttccccaacccggccatagccttggcttcccggcgacctcagcgtggtcacaggggcccccctgtgcccagggaaatgtttcaggctttccccggagactacgactccggctcccggtgcagctcctcaccctctgccgagtctcaatatctgtcttcggtggactccttcggcagtccacccaccgccgccgcctcccaggtaagtttttgatagtaggggtgctgctttgtaggttttattttttaagtcaagggtgaaaagaataaaccccaacccccacaaaaaggcgcatcagaaccctagatctgagatggaaaaggctcacagcgcactttgcaaactgcaaagagtcgggagatgtttgcaattggttgcgtgcgtggagcgcaaggagggaacgcggcagggagggtaggctttggggcgaggtgggggtggggtgggtaatgcgctgctcaatgcaacgtgtatgcggtagcggggctgagaactttgagccggccccgggactgccccctgctcgggtcccagacctgaagctagcgcagttaggcaggtgggggaaatcccggggaagcttccagcagtctcttttcctttcctcctccttcggagcgcccacttcggtgccgggtcgccctccacccatcgggaagaggggcctcgaaccctcagccgcgctgcctccgcctcctgcgcggagacgtaacgggggacccgtgcgtaacggctgacgcgctggaatcctccgtctgacgcggggcacgcacggcgcgcggcgcccccttcgtccgccccgcccctgacgtcccgggagcgttctattttggaacgccggggccacgttgctaagggagggggcagcccggcgtttcgattggccgccggggcgcacgccttggccaatcagctttcccttcctatttgtagggtgcattttccttcccccctctctgtccccggaacccgtggttccttggcggctgggtctcttttcggcgcctctagaggcagagggaggggatccctgtcgtgacaagagcgcctgtctgcgacccaatggatctgcgaggcccttgcggggatctagtccctgggctctcaggagaagggggtgtctgcttgtgtgctggcgtttcttggagagatacggtggctgtcaccctcttctccaggcacacacagacacattcccactccctctgctcctcatgcccggttcctccggtgtgtcccaagacaggactagaaccgcgaaccgaagggcaaccagccaggtggtctccaggagctccgccccctctgggttcccaggactctgattggtcggcgagccagcccttccctcaccacgccccccgagagagtagttaagccttcagagcagttccaggagtccatttacgggaggggggagatgagcgctgctgaggcttgggggctcaggtcccgcaccattccccctccgcgacaatctgagagagctccagtggttacttttatctacctgtccgttcaccctaaactgtcactcgtcagtctcactctgagaagagacagtaacttgaaacgttgttctaaactcctaggcccgtccc

SEQ ID NO: 21964 - DNA, 2300 bp, Homo sapien
gcttgggaggtcgaggctgcagtgagccgtttttgcgccactgcattccagcctgggtgacaaagtaagatcctgtctggaagaagaatgaaaaaaagacagtgatgatattcttttattcattccacaaacatttactgaacatctgctatgttctcaagcactttttaggcactagagatacagcaatgatcaaaaataaagtgcatagtttcatggtgctgatattctacagaagcagacagacggtaagcaaatagacacagaaaatggcaggtggtgatcagagtggtggggaaatgtctagcagggtaaggggatagagtgacagagctcgctttttaaaaatttttattttatttattattattattacttttatttggagatggagttttgctcttttcaccaaggctggagtacaatggcaccatctcagctcactgcaacctctgcctccccggttcaagcggttctcctgcctcaaactcccgagtagctgggattacaggcgtgagccactatgcctgactaatttttgtatcattcgtggagacggggtttcaccatgttggccaggctggcctcgaactcctgacctcaggtgatccacccgcctcggcctcccaaagttctgggattacaggccctgagccaccgatcccagccactagctattttatttatttattatttattgagacggagcctcgctctgtcccccaggctggagtgcagtggagcaatctcagctcactgcaagctccgcctcccgggttcactccattctcctgcctcaggctcccgagtagctgggactacaggcgcccgccaccacgcccagctaatgttttgtatttttagtagagacaaggtttcaccgtgttagccaggatggtctccatctcctgatctcgtgatccacccgctttggcatcccaaagtgctggggttacaggcgtgagctaccgcgcccggccgccactcgctattttaaactgggatcagggaaggccccactgagtgctggtcactcagtgagtttttggtattgacatttgatcagatgacagagtgaagggaggcgatgagccatgggaacatgtgaagaggagatccaggctaggggatcggcaagcacaaagtccctgtggtggtagcatgatccatgtgtgcagcaagacatctgtgtgcctaaatccaataatatccaagggaagaggagtatgtgagacagggtcagagggaccaaaggggctggattacagggatttgtaaagcagggtgagtactttgacttttactctgaaatggaagtcatgggagagtttcatgcaggagaatggtattgtcaaagaatcactgacttagaatattgaataatttttcgtgatgagtacacctaaaagcccagatttcaccacgatgcaatcaacatatgcatgtagaaatcggcacctgtacctcctaaatatgtaaaaatttaagaaaaaagaatcaccttttttgtaataaaaattgtaacacaagttcgatttccctaagtggatgggctgttttaaccggaatatggtactatccgtttctgagtctgtctcagtttctccaaccataaaacgcaagtgcagaaattggttatgtctagtgtttaaactcaatcgggacaggatgtctgtcgtcaccagcaccgagacagttcctgggactcagtagacgctcaataaacgtttgaatgaacgcggagctccatcggcctacgcaattccataaaagaacagcaggtgtcgcaccagccctatagccgcctgctcagagcctttggggccagggtgaatcagactctaacaggaacccactcaccactcctccgcagaaagagaattcggaattttccgagaaggcgcttctgaatgccgaatcatgaatctctcctcttaaaaagctgacttttcattttggaaaaagggggtcctgggccctttaacagcttgccaggtgctcaaacgctgcttcccagaatgcgtggcgctatgtaaatgagacggtttggggagcgaggatgattcatactatatgaagtgaaggcaacgttttacaaggacatctctcacgataaatgagtggggagaacttatagcccttgaagtcaaccatctcacacctttccaaaggacgcgaccataactctaaaaggtaagcttttgcgatccttatatagctgcgcgggaataaggttgtcctgcccggatgatcctcagtggtctggggtgcaggcttcaaacctgtagctgtctagcgac

SEQ ID NO: 21965 - DNA, 2300 bp, Homo sapien
gatttggacttcaaagactctgagcttcatcaggcagtgatgctaggttttagagtctgtgtgcagaatgttctaaaaatcccgtgattcaaatattctaagattccaggactgggacacttctgtgattcggacagtctaagcttctaagagtcttcgattctttccctctcgcagaagaagctccgtctacagcctcctcaactcctgattccacagaaggtaagtggtggggagcatgtgaaggggctcagggctgggcagctcagggacctgctgagggaaacaaggctctccttcacccactgcaggagggaacgacgactctgattttcgagagctgcacacagcccgggaattctcagaggaggacgaggaggagaccacgtcgcaggactggggcaccccccgggagctgaccttctcctacatcgcctttgatggtgtagtgggctccgggggccgcagggattcaactgcccgccgcccccgcccccagggccgctcagtctcggaaccacgagaccagcaccctcagcccagcctgggcgacagcttggagagcatccccagcctgagccaatccccggagcctggacgacggggtgatcctgacaccgcgcctccatccgagcgccctctggaagacctgaggcttcggttggaccatctgggctgggtggcccggggaacgggatccggggaggactcttccaccagcagctccaccccgctggaagacgaagaaccccaagaacccaacagattggagacaggagaagctggggaaggtgagatgtccgaggtgctgggaccaaagccaagaggggtgggtggtttctccttggggcacctccaagaagaaagctcacggcctcctctctctaccgtatcagaactggacctacgactccgacttgctcagccctcatcgcccgaggtcttgactccccagctcagtccgggctctgggacaccccaggccggtactccgtccccatcccgatcgcgagattcgaactctgggcccgaagagccattgctggaagaggaagaaaagcagtgggggccactggagcgagagccagtaaggggacagtgcctcgatagcacggaccaattagaattcacggtggagccacgccttctaggtaagcaacgtgtatgaagatgctgcattggcccacagaaggcaaaaggtgagaggattttgaattaaagggaccaacctcgcaaaggaacagtacatagtggaaaagggaagagatagacgtgatatcacatctggctagacgtgataaactccgctttttaaaaaaatttccccggccgggcgcggtggctcatgcctgtaatcccagccctttgggaggccgaggcgggcggatcacttgaggtgaggagttcgagatcagcctggccaacatggtgaaaccccgtctgtactcgggaggctgaggcaggagaatcgcttgaacctggaaggcagaggttgcagtgagccaagatcgcgccactgcactccagcctgggcgacagagcgagactccgtctcaaaaaataaaaataaaataaaataatcctccctcttctggagtgctcctcctagtggctgattttggacaggccaaatccctgaaaaaatacagttctctccttatttagatgtggccgtagaatatttataagtaaactctgtgccttttaaaaactcttctttttggccgggcgcagtggctcatgcctgtaatcctaaacactttgggaggccgaggcgggaggatcctttgaagccaagagtgcaagaccagcctgggcaacatagggagactcgatctctatttgaaaaaacaaacaaaaaccctctttttcctgaccacatctattggccagttgtaaaatgacccagccttactttaaaatatgctccgcctccaggaacagctatggaatggttaaagacatcattgcttttggctgtttacaagacggttccaattttggaattgtccccacctctgtggacagccattggctgggtccaaaggggccccaccccccctactcctgtcctccgggttctactgaagtgggcaaaatccccgagaagcagcggtgtccccagcctctcactcggagccgatatggggagtaaaggtgggcttgcggaacgggctggacgggggctgaggtcggcggaacggggtccaaactcgcccttatctcctgcacatccggagcatttttattactgatctgcttccgcagcgctgcaggctggggctagggggccgaggggc

SEQ ID NO: 21966 - DNA, 2300 bp, Homo sapien
gcgcgtcctcgctcccgggcggggccgggcggtacgtcccagagcgcagcgcgccccccgcctgctgtctcagtgccccctcacctccgccctgtttcgtccaggtcctccgggtcaggctacccccgtcgccgccagagcgcgggggaggggagagcttcctttgtctcctatgcctcctccccccatcccggctctcctgcgggcaagcgccgaggggacaccggggagtaccccacctgaacctctggggcccacaccaggccccagtcttcctctactcactgcagtgggcgaagaccggcaggacctgccccatggcccccctcgggcctgcatcgggacccccgcccactccggctgtgccgccctgggcccggggtcgcgggcgctcatctccgccgcgcccacgacgccgctgccattctcgccgcctcctcctcccgggctgctccagccgccgccgccgccgccgccgccgccgccgccctggtgctcggctcggcgggggcgggcggggccgaggtggggaaggcactgcagcgcgcggccgggggcggggccagaagacgggcggggcggtaccagagggagggtgaggggcggggaaacgccgaggatcaggcggaggggcgtggccttcttactaaaggggcggaaccaagagggtgggctacggagccaggaaggaggggaaagcggcctgaagggcggggcctagatcgcagagggcgcagcctttaggggaagagggaaggaggcctggagtctggcgagggacttgggagaggatggtgaacgagccacggcagagaggatgagagcgtggatccctgggtgggttggggtggtgctcggggtgccattgaggagggggtggaaagattctaatgctctgaggtagggtccgagcctagatttgcagagggagcgagaaagggggccgaatgaaacgattcagaaacttttggggcacgcggaggagctcaaacgtgggcagggctaaagcaacagggaattattcaaatataactgggtggggtcggattccaggcgattccaggtctgcgaaaattagaagggtctggagctgtgtgcctgaatcctggatgggcggggcctggaagagaaaataagcgaagccccagaggggaggggtcgaactaaaaacagtaaagaaaaaaaaaatatgtatatatatatatatatatatatatatatatatatatatatatctttttgagacagggtctcgctctgttgcccaggctggagtgcagtgatacgatcacggctcactgcagcctcgacctcccgggctcaggtgatcctcccacctaagcctcctgagtagctgggatcacaggtgtgttccaccgcgcctggctaaatgttaatttttgtagagacggggtctcgctatgtttcccaggctggtctcaaactcctgggcttaagcgatccgcctgcctcggcctccctaagtgctggggttataggcgtgagccaccgcgcccggccaagtatggtatttacaggttttgaggctgggggctgtaccactgaggtgggaggagcttggactgagtgttgtgttgagaacacagattctagaattagtttccctggaacaccggttacttctgtgactctgtttcttcttccatatgtaaactggagatgatgatgtataacagtgtgtgacacattagtactatgtaatagtttgccactggtacagtattatcttttttctttttttttcctgattcagatcccaaaccccgctttgtaggtgcaggaaacaggagacccagaagtgtaattccttctagtgacccgcctaaagagcaggtcaaaggacaggaaggagatttagatggtttaaaatctcacagcggaggggattaatggagggggcgggcaggtgtacagggtggagccttcctgatcccagggctgaaggatggcggtcctggcccgccagctgcagcgtctcctctggaccgcttgcaagaaaaaggagagggagaaggaggggagggaggaagaggaggaggaggaggcggggcgcagggcccccgaagggcctcggtctctgttgacagcgccgcgccgcgcccagcggccgcacgggggtgccgaggcgtctgggggcctgcgcttcggggcgagcgcagcgcaaggctggcgcgcgcgcatggaggatgctcactgcacttggctttcgttacctggtctgcccccgggctgggccttgtttgccgtcctcgacggccacggtggggctcgagctgccc

SEQ ID NO: 21967 - DNA, 2300 bp, Homo sapien
gacacggccagagagccctcgacgcggcggcggcggatggtgccgccagcggcgtggatgcgctcgcgttcccggggtcgaaggggccggtggtcctctgtgctgaaggccacggcgccagcgcggctcagcaccgcgcgggagtcaccgcagtgcgccaggtacagaaaccgcggggagaccagcaacaccacggccgtgcagccgcccgtttccacgcggggccagagggagcgcaggcgctcgtcggcgctcaagaaggctcggcgcagcgcctcgcgcacgccctcgggctcgctaggctccgggcccagctcctggagcacatggcctggcaaatggcgtgcaccgaagcgggcagctcgagccccaccgtggccgtcgaggacggcaaacaaggcccagcccgggggcagaccaggtaacgaaagccaagtgcagtgagcatcctccatgcgcgcgcgccagccttgcgctgcgctcgccccgaagcgcaggcccccagacgcctcggcacccccgtgcggccgctgggcgcggcgcggcgctgtcaacagagaccgaggcccttcgggggccctgcgccccgcctcctcctcctcctcttcctccctcccctccttctccctctcctttttcttgcaagcggtccagaggagacgctgcagctggcgggccaggaccgccatccttcagccctgggatcaggaaggctccaccctgtacacctgcccgccccctccattaatcccctccgctgtgagattttaaaccatctaaatctccttcctgtcctttgacctgctctttaggcgggtcactagaaggaattacacttctgggtctcctgtttcctgcacctacaaagcggggtttgggatctgaatcaggaaaaaaaaagaaaaaagataatactgtaccagtggcaaactattacatagtactaatgtgtcacacactgttatacatcatcatctccagtttacatatggaagaagaaacagagtcacagaagtaaccggtgttccagggaaactaattctagaatctgtgttctcaacacaacactcagtccaagctcctcccacctcagtggtacagcccccagcctcaaaacctgtaaataccatacttggccgggcgcggtggctcacgcctataaccccagcacttagggaggccgaggcaggcggatcgcttaagcccaggagtttgagaccagcctgggaaacatagcgagaccccgtctctacaaaaattaacatttagccaggcgcggtggaacacacctgtgatcccagctactcaggaggcttaggtgggaggatcacctgagcccgggaggtcgaggctgcagtgagccgtgatcgtatcactgcactccagcctgggcaacagagcgagaccctgtctcaaaaagatatatatatatatatatatatatatatatatatatatatatacatattttttttttctttactgtttttagttcgacccctcccctctggggcttcgcttattttctcttccaggccccgcccatccaggattcaggcacacagctccagacccttctaattttcgcagacctggaatcgcctggaatccgaccccacccagttatatttgaataattccctgttgctttagccctgcccacgtttgagctcctccgcgtgccccaaaagtttctgaatcgtttcattcggccccctttctcgctccctctgcaaatctaggctcggaccctacctcagagcattagaatctttccaccccctcctcaatggcaccccgagcaccaccccaacccacccagggatccacgctctcatcctctctgccgtggctcgttcaccatcctctcccaagtccctcgccagactccaggcctccttccctcttcccctaaaggctgcgccctctgcgatctaggccccgcccttcaggccgctttcccctccttcctggctccgtagcccaccctcttggttccgcccctttagtaagaaggccacgcccctccgcctgatcctcggcgtttccccgcccctcaccctccctctggtaccgccccgcccgtcttctggccccgcccccggccgcgcgctgcagtgccttccccacctcggccccgcccgcccccgccgagccgagcaccagggcggcggcggcggcggcggcggcggcggcggctggagcagcccgggaggaggaggcggcgagaatggcagcggcgtcgtgggcgcggcggagatgagcgcccgcgaccccgggcccagggcggcacagccgga

SEQ ID NO: 21968 - DNA, 2300 bp, Homo sapien
taaagcaacagggaattattcaaatataactgggtggggtcggattccaggcgattccaggtctgcgaaaattagaagggtctggagctgtgtgcctgaatcctggatgggcggggcctggaagagaaaataagcgaagccccagaggggaggggtcgaactaaaaacagtaaagaaaaaaaaaatatgtatatatatatatatatatatatatatatatatatatatatatctttttgagacagggtctcgctctgttgcccaggctggagtgcagtgatacgatcacggctcactgcagcctcgacctcccgggctcaggtgatcctcccacctaagcctcctgagtagctgggatcacaggtgtgttccaccgcgcctggctaaatgttaatttttgtagagacggggtctcgctatgtttcccaggctggtctcaaactcctgggcttaagcgatccgcctgcctcggcctccctaagtgctggggttataggcgtgagccaccgcgcccggccaagtatggtatttacaggttttgaggctgggggctgtaccactgaggtgggaggagcttggactgagtgttgtgttgagaacacagattctagaattagtttccctggaacaccggttacttctgtgactctgtttcttcttccatatgtaaactggagatgatgatgtataacagtgtgtgacacattagtactatgtaatagtttgccactggtacagtattatcttttttctttttttttcctgattcagatcccaaaccccgctttgtaggtgcaggaaacaggagacccagaagtgtaattccttctagtgacccgcctaaagagcaggtcaaaggacaggaaggagatttagatggtttaaaatctcacagcggaggggattaatggagggggcgggcaggtgtacagggtggagccttcctgatcccagggctgaaggatggcggtcctggcccgccagctgcagcgtctcctctggaccgcttgcaagaaaaaggagagggagaaggaggggagggaggaagaggaggaggaggaggcggggcgcagggcccccgaagggcctcggtctctgttgacagcgccgcgccgcgcccagcggccgcacgggggtgccgaggcgtctgggggcctgcgcttcggggcgagcgcagcgcaaggctggcgcgcgcgcatggaggatgctcactgcacttggctttcgttacctggtctgcccccgggctgggccttgtttgccgtcctcgacggccacggtggggctcgagctgcccgcttcggtgcacgccatttgccaggccatgtgctccaggagctgggcccggagcctagcgagcccgagggcgtgcgcgaggcgctgcgccgagccttcttgagcgccgacgagcgcctgcgctccctctggccccgcgtggaaacgggcggctgcacggccgtggtgttgctggtctccccgcggtttctgtacctggcgcactgcggtgactcccgcgcggtgctgagccgcgctggcgccgtggccttcagcacagaggaccaccggccccttcgaccccgggaacgcgagcgcatccacgccgctggcggcaccatccgccgccgccgcgtcgagggctctctggccgtgtcgcgagcgttgggcgactttacctacaaggaggctccggggaggccccccgagctacagctcgtttctgcggagccagaggtggccgcactggcacgccaggctgaggacgagttcatgctcctggcctctgatggcgtctgggacactgtgtctggtgctgccctggcgggactggtggcttcacgcctccgcttgggcctggccccagagcttctctgcgcgcagctgttggacacgtgtctgtgcaaggtcctgggggcgtggcgtggtacctttggggcttggtgcagcagagggagagagcctcggggttttggggaggagggctttgatagagaggcaagagtaaagctagcaaaggaggggataggactcaagcgaagggcgtggcctgaagtgggcagggccaaaatacaggggcggagcctgagggatgctttgaggcacgggagagttagtggaagggacttaagagaaagggcgtggtcttttggaaaggggcgattctgggtcgtaggagccgggccggaagtattgattagtgctggaaggtggaagagcaggtaaacatcagagcgggcggagctttagggaaaaggcattgttctctcaattgggagcgcctaggaccgggtttggtcccagta

SEQ ID NO: 21969 - DNA, 2300 bp, Homo sapien
cggctgggcctggtgactcacacctccaatcccagcactttgggaggctgagccaggctgatcactttagcccaggagtttgagaccagcctgggcaacacagctaaaccctgtctctacaaaaaattagcctggcatggtggtgtggacctacagtcccagctactcagtgggctgaggttagaggatcgaatgagccctggttatgctactgcgctccggcatgggcaacaaagaccctgtctccaacaaacaaacaaacaaaaaaccatgtttgctgactgttgttgtagtgtaggtggcacccagaaatgccacccctcctatgtcacagatgggaaagctgagacccagagaggagaacacagttacccaaggtcacactgaactggtaactcattcaactaggtaagtttgttgagctgctgagccgggcgggcctggctggggtgagtgaggtccagaaattgattaagtcaactgggtgcagtggctcatgcctgtaatcctagcactttgggagactgaggcaggcagatcacctgaggtcataagtttgagaccagcctggccaacatggtgaaatcccatctctactaaaaatacaaaaattagttgggcttggtggcccgtgcctgtaatcccagctactttaggagggtgaggcaggagaattgcttgaacccaggagggggaggttgcagtaagcggggatcgagccagcgccctccagcctgggtgacagcgagagactacatctcaaaaaaaaaaaaagaaaaaaagaaatttagtctacccattctcccagacaactcagcctgaggaaacacactgagaaacaatgataacctccgaggaacagggttcaaggtctcccagagtggggtggagaaggggaggggaattaatgtcaaagcttggcctggaaggatgacgtgctccccaggtaaaggaggtcaggacaacatcaacatccggacatgggactcggcttggacatacgctggaaaagtggattctctcacatagtcagctggccctgagaattgttggttttacactcagaccttggtggctttccgggttctgggggctcaggcaagagggccataggccagattcattccctgtctccaggcctcagtttacccgtgtgtaaatgtggaactaactgatttcccagggctcgggcgcctcacccgggccaggtggcgctctacccaaggggcgcgaccaaatcagtgacgtcactcggggcggggccggcaagacacgctgcggaagcctcagagggtgtctgggctcagcccggagccggcgtgtgggggcgggggctcccgggagggtctcctcacctccgggccctcctgagggctgggatgatcctgctgtcctccgcaggcgaaactgagtcagagcggggcgtgcgtgggccggaggctttacacaccaaagaagccggcgcctcctgcccaccccgggcgaatgccgggccccccactcccgcactcctcgccagtccccacctccaccccaccccacccccgaccctgcggctgtgagtcagcgaccgaccgcgcccccttggcccacttcctcctcaccttcccggggcgggcggggtggggtgagaggggttgggccctactcccccgacttccactcccgtgcgggtgggggtctcgcccccttagtaacctctccgaaattgacagaagagaaacgctggggaggggcggtgttccgaagatgggatttcagggagaaaatctgagaccacttgcttaacttgagggtcctcctcgacccccaaaattgagcggagtacgagatggagaagtcgatggggaaagaaatcgcgccccttccgagaccctcctcagaattcccacagtgggagcgaactaggaagcaagggaggtccccttccccttcaccaacttgcccctcaggtgggggtgattcccagggtgcacccctgggctacaacattggggagaggagcgagatcgcggaagccgagggtgcagagttgcccttttaagcgccctccaccccctcgcctggaggcgcacgcggcccctttaaggcgcggggcattgtgggtgcggggagtggaattttggaacgaaatgtaacgaagagaagtacagtagtaagagtaacactgtagccgccaccggcaaggggtgcgcgctggggagcggacgctgcatcccctttctgctgcaggaacctctcatcagaccgcctgagggaagcggcgcccggagacccgccccggcccggtccacattctc

SEQ ID NO: 21970 - DNA, 2300 bp, Homo sapien
acctcagcctaccaaagtgctgggcgtcagccaccacgcccggccaattttttttgttttgttttgaaacagagcctcgctctgtcacccaggctggagtgcattggcacgatctcggctcactacaacctccgcctcccgagatcaagtgattctcctgtctcagcctctggagtagctgggattacaggtgtgcgccaccacgcccagcgaattttttgtatttttagtagagatggggtttcatcgtgttggccaggcttgtctcgaactcctgacctcacatgatccgcctacctgtgcctcccaaagtgctgggattacaggcgtgagccactgcgcccggcctggggacagaaattttatgttttttgagacagggtcttgttgtgttgcctaggctggagtgcagtggagctcatggctcaccacagcttcaacctcccaggctcaaacgatctgtaaaatgggaagggggctggtcccaaatggatgatggaccttaggtagtcccaagtttctgcataccttccgtgtggaagggaccctggaaaaggttgtttttatggaatcctggcattcttagtaattcagaatatcagggttcacacacacaccagcaccatcagtaaagatgaggaaacgcaggtccctcagtgccaggagcttgacaaaggacactcagagagtcagactggataccaaagaagtccagagccccctgattctgtgtcctgaatgtatgtttcctcctacacaccactcctctgttcctgttttccttttttttttttttttttttttgagacggagtctcgctctgtcgccaagactggagtgcagcggcgtgatctcggctcactgcaacctctacctcccaggttcaagcgattctcctgcctcagcctccagagtacctgggattacaggtgcccgccaccatgcccggctaaatttttttttttttttagtggagatgggatttcacgatgttagccaggttggtctcaaactcctgacctcaggtgatccaccctcctcagcctcccaaagtgctgggattacaggcgtgagccatggcggccagtcctctgttcctgttttcttctgtccctctgcctccgagaatctctcaattacccatcagcactccatcatccaggaatttctctcaaccccttcctgacattgtttatatgattttactccctgctgggtaagaaaggacagtctgggacatgtccttaaatttatttctgaactagctccctggggaacctacctcctaatgaaggaagttgggttgcttgagaacgggtatggttttattggccaagatgccaggctatcaacctctgcaggaaccttgtgccaccccctgccctgctctgggcctcagtttccttgtcagttacttgggaaagggttggattcgctgcttctgggggtgaaatgcaccctcaggctggatttagcattaataatgcaatcatgacctgtatagtaagaagggctatttactgagcgcttaactatatgaatggcaccattctaaccacttcccatggtccactgttttacactcaagattagcatagaagcctcacaacaacccaaagaggcaactgctattaggattcccatttggtagacggtaatactgaagtccagagaggttatgccactcatctaatattacacagcgaggaaatggcagagctgggatcccagccaaagtctgtatgaccgcgcggcttcctcttaatcccaatgagagccctagcttgcagaggaaggtgtatttggggctcataggactaattaggactaattaagagcctcctttgggtggggacgccaactcggaacgtgacatcacgaaggagtacagtgacgttggccaaggcgggcgtgggaatccacacgccttccagcatccgtttaacggcaccgccccctgacccgcctcacttccgtgtatatttgcatattcagcgaacggacgtcgctacgccagcgtcgacggggtgacgtcaggatgcgcctctgaagtttccctcgagcgtacgtacatacgtactgacgcacgcatggccacgagagggcgggggaggagtgaagaggttgaggcgccccgcccagtcagcaaggttgcgcgtgccctgtgagaccgccaagatggtggtgggcgcgttccctatggcgaagctgctatacttgggcatccggcaggtcagcaagccgcttgccaaccgtattaaggaggccgcccgccgaagcgagttcttcaagacctatat

SEQ ID NO: 21971 - DNA, 2300 bp, Homo sapien
aaacaaaaaaattagctgggtgtggtggtgcatgcctgtatacccagctaccagaggctgagacaggagaattgcttgtacccggcaggaggaggttgtattgagctgagatcatgtccctgcactccagcctgggcacagcaagactctgtctcaaaaaaaaaaaaaaaaatcaaacctgacagctatcattttttagtgttatatgccacatctatctgaagtcccttgaccaataatgaattctcatgattagtttatgaaagatgtgatgttaataataaaaataagctaatgttttaggagcacttatcattcatttgttcactccctgaaaacaatgttttttgttttttgttttgagatggagtcttgctctgtcacccaggctggagtgcagtggcgcggtcttggctcactgcaagctccgcctcccgggttcatgccgttctcctgcctcagcctcctgattagctgggacaacaggcgcccaccatcacatctggctaatttttttgtatttttagtagagatggggtttcactgtgttagccaggatggtctccatctcctgacctcgtgatccgcctgcctcagcctcccaaagtgctgggattacaggcgtgagccaccacgctcggccagaaaacaatgtgtttcacacctatcacctgcccagcagtcttctaggcaacagacatgcaacagtaaacaagccagacacaaaaatgacactcttcctagtaggaaggcagacaactagaaaaaaataagagaatgttgccttccccaaagggtaggggaaaagtgaggcagagaaagatggggagtgttggggtctggttggcatattttacagacttgatagcattgacaccattaaatgagaccgccaggagaaaaggaccatgatggccggcctcggtggctcaggcttataatcccagcactttgggaggccaaagcagaaggatggcttgagcccaggagtttgagaccagcctagacaacatagtgagacccctgtctatagaaaaaaaaaattttttaaattggccaggtgtggtggcacacgcctgtagtcccagcaactcaggaggctgaggtgggaggatcacttgagcctggaaggttgaggccgcagggagccatgatcgtgccactgaactccagactgggcaagagagtgaaaacctgtctcaaaaaaagaaaaaaggtggggcacggtggctcacgcctgtaatcccaacactttttggaggccgaggtgggcagatagctggagcttaggagttcgagaccagcctggccaacttggtgaaaccccgtctctattaaaaatacaaaaattagccgggcgtggtggtgtgtgcctgtaatcccagctactcgggaggctgaggcaggagaatcgcttgaacctggaaggcagagattgcagtgagccaagattgtgccactgcactccagtctgggcaacagagcatgactctgtctcgaaagaaaagaaagaaaaaagcaaagcaaagcaaagcaaagaaaagaaggaagcaagcaggcaccatgagtgaccaccttgattcaaagaggaaactgaggcacggagatgtcactagcctaaggtctgaccaagagtcaggctggaaatgcaaccccagagctccttctaggggtggccctgactttggagttggggacctaacagaaccctttattctctccgttgttggggaggaagatgcagaaggttaatgaccagaggatgaatgactgaagcctggggtctctaagggaggaaatggcttaacccagggaaggtcagtagcgggggcctcctcttcccatagccgaggacctgataaatttgggggtgtgtggttggagagaggggaccttccagctggggacttggaaggattcgggggtgttccagtagcagatgagcctcacccgtggctggaggcgtttaatggggtgaagcctgaaaggggttaaggggcagcggcaaaggtggggttaatgggggcgggcctggccggggcggggcctcggctggcggctctggcccgggggccgggaggagtagccgctgttctgccccgcgggggcatccgctgggtccccgcgccgttgtcaagaccggggacctggacgcagcggagagaggtgccgccgcccgccccgtccagtcgccgcgcgcaggtaagtgccgggtcctccccggctgcccgcgatgctgcggggtctcactaggttgccctgctcgtggcgagaccgctcctccccgccccctcgggggc

SEQ ID NO: 21972 - DNA, 2300 bp, Homo sapien
cagagccttggagggaccaatcttgaggtggcacggtaacagtggaaggtctgggagggcggagtcaatattgaggggcgtggccagagtttttagaagctggacggtcaggtctactgggtgaggaagtcagggaggagcttggcttatgggcgtggttattaaggtacaggagaggccccgttgagtttcagggatgaagtcaaggcagcagccacagagtttctacaaggaaagagggagtctgaggaatttaagggtgcagccacagtgttcgcctgggcgaaattaaaatctggggtacggagtaacagaggctgagaccaggtggaggcattccagattccagaagctttgacatcaaaatcggggggcactgccaggttgaaaagggcgtggcttaaaggttgggcggggccgtaggggcgtggtcaaatgccaagaggtgcagccaacttggaggcctcgaaggtattcacataaggaatacgtgaaaatggacgtaatcagaatgcctggcgggccggagaaggagcgttggcgggaggtagcagtcaattctcaagcaactgagtcaactcagggacagggttagaagggaggctcagaatgacaggcgtggtcaactccagaggcggggccatactgaagatctggacagagtcaaaaactaaggctatataattctagcagtttgggaggcggaggcgggaatcatcgcttgagctcaggagttcgagaccaggctgggcaaaatagcgagccctcgtctttactaaaaatgaaaataaattaggcctggcgcggtggctcacgcctgtaatcccagcacttcgggaggcctaggcgggtggatcacaaggtcaagagatcgagaccatcctggccaacatggtgaaaccccctgtctattaataatacaaaaatgggcgtggtggcgcgtgcctgtagtcccagctactcgggaggctgaggcaggagaatcacttcaacccgggaggcggaggttgcagtgagctgagatcgcgccactgcactccagcctgctgacagagcaagactccgttaaacaaacaaacaaaaaacaaaaaacaaaaaacaaaaaaaaaaagagagagaaagaaaatagccgggcgtgctggccttcgcttgtagacccagctacttgggaggctgcggcaggaggctcacttaagcctaggaaattcgaggtttcagtgagccatgatcacgccattgcactccagtttggtcgacagagccacaccctgtatcaaaaacaaaacaaaacaaaaatcaccctaaggctggagttatggtgcagtgggcgtggtcagcgctaggaggccacgcaagggcaagaccaaggtcaaaagctgcacatttcaactctgctcaaacatagcaaacacaaatacagcgttgtgtatactccaggcacttcccaataattaaccaatttcaccctcgcaactacccccgggaggtgtgagtactcttatttatttatttattttgagacggagtcttgttctcgttgcccaggctggagtgcaatgacacaatctcagctcactgtaacctctgcctcccgagttcgaatgattttcctgcctcagcctcccaagtagctgggattacaggcgccagccaccacgccaggctaagttttgtatttttagtagagacggggtttcaccacgttggccaggctggtcttgaactcctgacctcaggtgatctgcccgcctcggcctcccaaagtgctgggattacaggcatgagccaccgcgcccggccgggtactcttattatccccattttttaaatgaggaaaccgaggcagaggttggacgacctgtgtacactgctaggaattagcagaactggggttttaactcaagcaggcgcgctcccgagtccatgttctcaaccactctcccccacccaccccgaaagaacctgggatcgggagtccacagcccgggatgtgtgacccggtgggaccctccggctccaggggtggctgtggagggcggggcaggggcgcggcggcccgggcgcctcccagggccggaagcggcagagccggtcccggctccacccccggccccgaagctccgccacccgccgccatgagtagctttggagctgggtgagaccctttcgcagaccaccccccatctcctctccgcgctcccggggcttagatctcaggtttcacccaacccctgggacccagaccggcgtggggacacgccccttcccttaaactctccccgtttctccctctgcttgac

SEQ ID NO: 21973 - DNA, 2300 bp, Homo sapien
gggagagtggttgagaacatggactcgggagcgcgcctgcttgagttaaaaccccagttctgctaattcctagcagtgtacacaggtcgtccaacctctgcctcggtttcctcatttaaaaaatggggataataagagtacccggccgggcgcggtggctcatgcctgtaatcccagcactttgggaggccgaggcgggcagatcacctgaggtcaggagttcaagaccagcctggccaacgtggtgaaaccccgtctctactaaaaatacaaaacttagcctggcgtggtggctggcgcctgtaatcccagctacttgggaggctgaggcaggaaaatcattcgaactcgggaggcagaggttacagtgagctgagattgtgtcattgcactccagcctgggcaacgagaacaagactccgtctcaaaataaataaataaataagagtactcacacctcccgggggtagttgcgagggtgaaattggttaattattgggaagtgcctggagtatacacaacgctgtatttgtgtttgctatgtttgagcagagttgaaatgtgcagcttttgaccttggtcttgcccttgcgtggcctcctagcgctgaccacgcccactgcaccataactccagccttagggtgatttttgttttgttttgtttttgatacagggtgtggctctgtcgaccaaactggagtgcaatggcgtgatcatggctcactgaaacctcgaatttcctaggcttaagtgagcctcctgccgcagcctcccaagtagctgggtctacaagcgaaggccagcacgcccggctattttctttctctctctttttttttttgttttttgttttttgttttttgtttgtttgtttaacggagtcttgctctgtcagcaggctggagtgcagtggcgcgatctcagctcactgcaacctccgcctcccgggttgaagtgattctcctgcctcagcctcccgagtagctgggactacaggcacgcgccaccacgcccatttttgtattattaatagacagggggtttcaccatgttggccaggatggtctcgatctcttgaccttgtgatccacccgcctaggcctcccgaagtgctgggattacaggcgtgagccaccgcgccaggcctaatttattttcatttttagtaaagacgagggctcgctattttgcccagcctggtctcgaactcctgagctcaagcgatgattcccgcctccgcctcccaaactgctagaattatatagccttagtttttgactctgtccagatcttcagtatggccccgcctctggagttgaccacgcctgtcattctgagcctcccttctaaccctgtccctgagttgactcagttgcttgagaattgactgctacctcccgccaacgctccttctccggcccgccaggcattctgattacgtccattttcacgtattccttatgtgaataccttcgaggcctccaagttggctgcacctcttggcatttgaccacgcccctacggccccgcccaacctttaagccacgcccttttcaacctggcagtgccccccgattttgatgtcaaagcttctggaatctggaatgcctccacctggtctcagcctctgttactccgtaccccagattttaatttcgcccaggcgaacactgtggctgcacccttaaattcctcagactccctctttccttgtagaaactctgtggctgctgccttgacttcatccctgaaactcaacggggcctctcctgtaccttaataaccacgcccataagccaagctcctccctgacttcctcacccagtagacctgaccgtccagcttctaaaaactctggccacgcccctcaatattgactccgccctcccagaccttccactgttaccgtgccacctcaagattggtccctccaaggctctggcaccgtccccgcttttgaactagctggccccactctaggttacgacctcgtggcctggggcatgactacatttctcgaccatttcctccctatctctttctgcggcttgacgccgccccagtccttacccttcctttttggcgctacagttgctgctggaggatgtggtccggctgcgggggtcctcacggcgcaccgaggcgaggcgctctggtgacaagtagcggcggacactgctaaaagagagcacacaggtgggggcagagccttctaggccagcaggcgagtgccgtgagcaagcgagattctccctgcaccctctgctgctggagctcaggcaaacaaaccacctctgt

SEQ ID NO: 21974 - DNA, 2300 bp, Homo sapien
ggcactcggcaggctgaggcaggagaatcaggcagggaggttgcagtgagccgagatggcagcagtacagtccagcttcagctctgcatcagagggagaccgtggaaagagagggagaggagggagaggagggagaggagggagagggagagggagagggagagggagagagctataatcatgttactgcactccagcttgagcaacagtgggagacccagtttcttaagaagaaaaaaaaaaaaggaaaaagtatcccagcactttgagaggtcgaggcgggcggatcacaaggtcagaagtttgaaaccagcctggccaacatggtgaaaccccgtctctactaaaaatacaaaaattagctggaagtggtggcaggcacctgtagtcctaggtactcgggaggctgaggcaggagaatcgcttgaacccaggaggcggagattgcagtgagccaagatcgcgcctctgctctccagctctgttgcccagactggagtacagtggcacgatcttggctcactgcaacctccgcctcccaggctcaagcaattctccacaaaatatttttaaaatataaaaaaataggccgggcgcggtggctcacgcctgtaatcccagcactttgggaagacgaggcgggaggatcatgaggtcaagagatcgagaccatcctggccaacatggtgaaaccccatctctactaaaaatacaaaaattagctgggcgtggtggcgtgcgcctgtagtcccagctactctgaaggctgaggcaggagaatcgcttgaacccaggaggcggaggttgcagtgagttgagattgtgccactgtactacatcctgggcgacagagagagactccgtctcgaaaacaaacaagcaaacaacaacaacaacaacaacaaaatagggcttttggtgaggataactgagtgctttgcccatagtgactgctgattaaacgttaggtattgttatttattttgtgtatgattgtttacctcttccattaaatgaacaatacatgagaggaaacaggttcacttggtcattccgaaaacttcagcacctagaacagagcctggcccgttaggcactcagtaaacatttttgaatgaatgaatgaggcaggcgcgattatgagcccccactttccagatgaggaagtggagctttagggtcacgaaaccagaaagtggaggagtcaggattcaaacccaggtcaatctgcttccaaaacttctacttttcatctctgtgtccagagggaattctttttcggctccggacttcacttctcctgcctatactctaggtgtttaccgtcgttggagacttgaggaaggcggtccaatattcttgaaatccattgtcgggttttgtaccctccccttttcccccacaactttcgagccatctctgcctgacacgcgggctagtccaagcctcacaactgggcctgtgccaaagcccggactggataatgcggttgtgggaggctagggctctaagggcggagctaagggcctggggccgcagacagagcggtggggaaagttagggagggactaccagaccgcggggggagggatttaaattccgaggccagagctaatcctataagaaggtcctgtccagagctctggagaagtactatactataaacccttggcggttcaggggcggtgctaatgattccgtgggtaggaataaaactttagcacccgcaagattctgggggtggggctaagagcctgggggtgggcctagatgtcataaacaagagctccctgggcgggtttggggctctaaggtcgggccctggccttacggagggggcttttggaaaatccaatgaaagtctgaagaggttttggggatagtggagtgtcttcctccacaccatcctcctcccggagctcggggctgcgcttcaggctgaaagcaggaaagaccctgccccttccaatccctctgcatccctattggtgaagggccctgcgcgacaggctctcattggttctgaacgggcgaggaggggggtctagagagactatactccggttgtgggcgggaccagacggtacctagggggatccgggcgcagccaatcctggccctaggattgtgttggggggcttggcaggcggtgtcccgacccccctttctgggcatcctggggatgaccccagcgccgggcccggcgccggccgcctgatgccaggcgagctgagctggggatgctggaacgaagggcgttgctatggcaacgggaggcagggcctggttggggggaccgg

SEQ ID NO: 21975 - DNA, 2300 bp, Homo sapien
ggtgacaggcgctggcagcccggggtgatgggagggggcggggccaaggcgggacagggaacggaagcggggagctctggggcagagagccgagcagggggcagtcatcaaggtcatgagggagggcagttactgaattgtccttatcgtcctgaggacccctgcaccaagtgtgtacaatctctcatgctgtcccacccacaggtacccgcccccaccgccactcattcccagagcctcagtcactcaatcaaacatgcagtgtcacacacaatcccataggctgagccatggaaaggcacagtcacagaacctcacaagctgttactcacacagtcacacattcagtcacacccatacagtcccatggtcacacccagacagccacagtctctcactcacaggtggacagtcatccactgtgacacacagtcatgtacccagggctatggactcctgcacacacacagtaacgctcacagtgtctcacagttccaacaacactgtcaatcacccacacattcacgcaatcaccgggtttcatcacaaacactgttgccctgctagcctgtgtggcccaggagggtagagccaggacatctgggtcaccactgggtccccaaaatcgttaagagcaggggttcaaggaaggattgtcatgaaataaatatacgcagtatgcagttgtgtggttactcgcagacatagaattttttttttttgagacagagtcttcctctgttgctgaggctggagtacagaagcatgatctcagctcactgcaacctccgcctcctgggttcaagcaattctcccaccgcagcctcccaagtagctgggattccaggcacacaccaccacaaccgactaatttttgtatttttagtagagacggtgtttcaccatgttgcccaggctggtctcaaactcctgacctcaggtgttccacatgtcttggccttccaaagtggtgggattacaggcgacagccaccacacccggcccatacaatcctttttacattttatttatttatttatttatgagagtggagtgcactggaacaattatagctcactgcagcctccacttcctgggctcaagggatcctcttaactcagcctcttgactagctgggactatgggcatgagccaccatgccccaccattttattaaaaaataatttcaacttttttttttttgagacagggtctcactctgtcacccaggatggagtgcagtggcgccatcttggctcacttcaacctccgcctccagggttcaggagattctcctgcctcagcctcccgagtagctgggactacaggtgtgtgccaccacacccagctaaaatttttgtatttttagtagagatggggtttcaccatgttggccatgctggtctccaactcttggcctcaagcaatcctcctgcctcggcctcccaaagtgctgggactacagggatgtgccatcacacccagcctcaacttttatttatttatttattcatttattttaattcattttatttattattttttctagacagggtctcactctgtcacccaggctggagtgcagtggcgccaacttggcaacctctgcctcttgggttcaggcgattctcatgcctcaaccaccagagtagctgggactacaggtgtatgccaccacgcctggctgatttttatatttttagtagagatgaggtttcaccatgttggccatattgttctccaactcctggcctcaagtgatcctcccgccttggcctcccaaagtgctgggattacaggtatgaaccaccgcgcctggccttaacttttattttagattcagggggcacatgtgcaggtttgtcacgggggtgtattgcacgatgcggaggttgggggtataaatgatcccatcatccaggtagtgagcatggcacccaacgggtagttttttaacccttgtctccttccctgccccctctaggagtccccagtgtctgttgttcgcatgttggtgtccatgtgtacccagtgctcagctcccacttataagtaagagcatctggtgtttggatttctgttcctttgttaattcacttaggatactggcctccagctgcatctgtgttgctgcaaaggactttcctttccttttcctctcccctctcccctctcccctcccccctcccttcctccctttctccctttctctctttctttcttgggatggagtctcactctgtcgcccaggctggagtgcagtggcacgatctcagctcactggaacctctgcttcccag

SEQ ID NO: 21976 - DNA, 2300 bp, Homo sapien
aaacaccagatgctcttacttataagtgggagctgagcactgggtacacatggacaccaacatgcgaacaacagacactggggactcctagagggggcagggaaggagacaagggttaaaaaactacccgttgggtgccatgctcactacctggatgatgggatcatttatacccccaacctccgcatcgtgcaatacacccccgtgacaaacctgcacatgtgccccctgaatctaaaataaaagttaaggccaggcgcggtggttcatacctgtaatcccagcactttgggaggccaaggcgggaggatcacttgaggccaggagttggagaacaatatggccaacatggtgaaacctcatctctactaaaaatataaaaatcagccaggcgtggtggcatacacctgtagtcccagctactctggtggttgaggcatgagaatcgcctgaacccaagaggcagaggttgccaagttggcgccactgcactccagcctgggtgacagagtgagaccctgtctagaaaaaataataaataaaatgaattaaaataaatgaataaataaataaataaaagttgaggctgggtgtgatggcacatccctgtagtcccagcactttgggaggccgaggcaggaggattgcttgaggccaagagttggagaccagcatggccaacatggtgaaaccccatctctactaaaaatacaaaaattttagctgggtgtggtggcacacacctgtagtcccagctactcgggaggctgaggcaggagaatctcctgaaccctggaggcggaggttgaagtgagccaagatggcgccactgcactccatcctgggtgacagagtgagaccctgtctcaaaaaaaaaaaagttgaaattattttttaataaaatggtggggcatggtggctcatgcccatagtcccagctagtcaagaggctgagttaagaggatcccttgagcccaggaagtggaggctgcagtgagctataattgttccagtgcactccactctcataaataaataaataaataaaatgtaaaaaggattgtatgggccgggtgtggtggctgtcgcctgtaatcccaccactttggaaggccaagacatgtggaacacctgaggtcaggagtttgagaccagcctgggcaacatggtgaaacaccgtctctactaaaaatacaaaaattagtcggttgtggtggtgtgtgcctggaatcccagctacttgggaggctgcggtgggagaattgcttgaacccaggaggcggaggttgcagtgagctgagatcatgcttctgtactccagcctcagcaacagaggaagactctgtctcaaaaaaaaaaaattctatgtctgcgagtaaccacacaactgcatactgcgtatatttatttcatgacaatccttccttgaacccctgctcttaacgattttggggacccagtggtgacccagatgtcctggctctaccctcctgggccacacaggctagcagggcaacagtgtttgtgatgaaacccggtgattgcgtgaatgtgtgggtgattgacagtgttgttggaactgtgagacactgtgagcgttactgtgtgtgtgcaggagtccatagccctgggtacatgactgtgtgtcacagtggatgactgtccacctgtgagtgagagactgtggctgtctgggtgtgaccatgggactgtatgggtgtgactgaatgtgtgactgtgtgagtaacagcttgtgaggttctgtgactgtgcctttccatggctcagcctatgggattgtgtgtgacactgcatgtttgattgagtgactgaggctctgggaatgagtggcggtgggggcgggtacctgtgggtgggacagcatgagagattgtacacacttggtgcaggggtcctcaggacgataaggacaattcagtaactgccctccctcatgaccttgatgactgccccctgctcggctctctgccccagagctccccgcttccgttccctgtcccgccttggccccgccccctcccatcaccccgggctgccagcgcctgtcacctctcccagagccgagacaaggcagttggaggcagcggtggcaggggctgcaggagcaagtgaccaggagcaggactggggacaggtgagggctccccaatcccagcccattctccctgcccccccttgacctctcaagtctctggcactctccctctctgcttctctgccctgcctttgtctctctgtctctgtgcccaccaccatctctgctcatctctgtctcttga

SEQ ID NO: 21977 - DNA, 2300 bp, Homo sapien
gcggaggttgcagtgagctgagatcatgcttctgtactccagcctcagcaacagaggaagactctgtctcaaaaaaaaaaaattctatgtctgcgagtaaccacacaactgcatactgcgtatatttatttcatgacaatccttccttgaacccctgctcttaacgattttggggacccagtggtgacccagatgtcctggctctaccctcctgggccacacaggctagcagggcaacagtgtttgtgatgaaacccggtgattgcgtgaatgtgtgggtgattgacagtgttgttggaactgtgagacactgtgagcgttactgtgtgtgtgcaggagtccatagccctgggtacatgactgtgtgtcacagtggatgactgtccacctgtgagtgagagactgtggctgtctgggtgtgaccatgggactgtatgggtgtgactgaatgtgtgactgtgtgagtaacagcttgtgaggttctgtgactgtgcctttccatggctcagcctatgggattgtgtgtgacactgcatgtttgattgagtgactgaggctctgggaatgagtggcggtgggggcgggtacctgtgggtgggacagcatgagagattgtacacacttggtgcaggggtcctcaggacgataaggacaattcagtaactgccctccctcatgaccttgatgactgccccctgctcggctctctgccccagagctccccgcttccgttccctgtcccgccttggccccgccccctcccatcaccccgggctgccagcgcctgtcacctctcccagagccgagacaaggcagttggaggcagcggtggcaggggctgcaggagcaagtgaccaggagcaggactggggacaggtgagggctccccaatcccagcccattctccctgcccccccttgacctctcaagtctctggcactctccctctctgcttctctgccctgcctttgtctctctgtctctgtgcccaccaccatctctgctcatctctgtctcttgatgtctctgtctgcgtgtttccatctctggttagctgctagataacttctctttcccctgctctgtctccctccacgtctctgcctcttctttgtctcctagcccacatctgcgtctctttctctgtttgtttttctctggtctctggctgggggtctcattctgtccctccgtctctgcgcctctcagtctttacatttctgtctcttgtgtctgtgacgccgttgtctgtccttctgaggctcgacctgagatcctctctgcttccgtctttctctacgtggagccgcgggggcgcgggtgagtgggtgtcgggcgttagaccgatttccaggcatctgcacatctaaccccggatctgtcgcttctctagtccctaagtatttggatgctgggaaagggttgttccacttactctgggctttatctacccccagcggggaaagttttgtaaggtcaggttcctatgtgtgctagaaaaccctttgggcttggagagtgggagctcggatgggcgtttcaagttctccaccaggctgtgggaactcagatgggcgtttcaagtaccccactagggggtactgaaaaccttcaagtttttcagttccccatagaaaaggggtctaggctgacggtttctaccccctcctctccaaggcggtccccgggttcccaggagtctgtaggtccagacttcggtgacactgacacttccgcccagcgtagctctagggcaaccgcccgctcagcaaacaccccccccttccacctttgctgccccaacaacagtcaggggaggccggggaatcacttaaggggccccgcccaccaccggagttccacccactccgcgtgcctctccctccccccagatcatcacgcctgggagttgcgggagcgggtgcgctgcctcggagtcccgcgtgtatacggctccccagccgtctgcccctgtgtgtgaatccctgaggcggggtgacgctggggttggagtaggagggcagaggtgctgaccttgccctgggaccctccaggcctgatcgcccctgcacgaaccagacccttcgccgccctcacgatgactacctctccgatcctgcagctgctgctgcggctctcactgtgcgggctgctgctccagagggcggaggtgaggaagcgaggagccagaggagctccaggcttggagggaggtatggggacggttttagggcttccgtcgtcagggcgctgtcgctcacgcctgtaatcccagcactttgggaggccgaagcgggtgg

SEQ ID NO: 21978 - DNA, 2300 bp, Homo sapien
agagaccaggtttcaccatgttggccaagctggtctcaaactcctgacctcaaatgatccacccgcctcgaccttccaaagtgctgggattacaggtgtgagccaccgtgtctggtcggggttttactttctacactgagatggggggaggatgggagggttttcttttgttttgtttgtttgagatggagtctcgctctgtcacccagattggagtgtagtagcacgagctctgtctcctgggttcaagcgatcttcctgcctcagccttcaaagtagctaggattacaagcatgcgccaccatgcccagctaattttttttttttttttttttttgagacggagtctcgctgtcgcccaggctggcgtgcagtggcgcaatctcggctcactgcagcctccgccccctggggttcacgccattctcctgcctcagcctcccgagtagctgggactacaggcgcccgccacctcgcccggctaattttttgtattttcagtagagacggggtttcaccgtgttagccaggatggtctcgatctcctgacctcgtgatccgcccgcctcggcctcccaaagtgctgggattacaggcgtgagccaccgcgcccggcctaattttttttttgagatggagtctcactctgtagcccaagctggagtgcagtggcgcaatcttggctcactgcaaccttcgctgctggggctcaagcgtttctgctgcctcagcctcccaagtagctgggactagagggatgcgccaccacacctggttaatttgtttgcatttttagaagagacagggtttcaccatcttgccctgggtggtctcgaactcctgagctcaggcgatccacctcgcgtcggcctcccaaagtgctgggattacaggcgtgagccatcgcatctggcctaatttttgtattttctaatttgtatttatttattttttgagacaagagtctcgctctgtcacccaggctggagtgcagtggcatgatctcacttcactgcaacctccgactctctgagttcaagcaattcttctactttaacctcccgagtagctgagattacaggcgtgcaccaccacgcctggctaattttctgttggttgttttttttattgttgttttgttttgttttgttttgtatttttagtagaaatggggtttcaccatgttggccaggctggtctcgaactcctcacatcaagtgatcaatccaccttgacctcctaaagtgctaggattacaggcatgagccactgtacccataccctgggagggttttgaagagtgacatgttatgatttaggttttagcacaaccccctcagaccactctgtggagaacagactgtcagggaacgtgggtggaggcagagagaccagaaagattccaggacagagatgacagaggcttaggccatggtaagaaacggccatttcctacagatttcatgtaggatgtgagggaaaaagaggaatcaagttgacaaaagagtttttgcccagagaactagaaggatggagttaccatcaaagcagatggggaacgctgtagatagggtaggcttgggtggttgggtgatctggatcccgacctgagacatgcagagttgaaaatgtctggctgggcacggtggctcacgcctataatctcagcactttgggaggtcgaggcgggtggatcacaaggtcaagaaatcaagaccatcctggccaacatggtgaaaccccctgtttactaaaatacaaaaattagctgggcgtggaggtggtgcatgcctgtagtcccagctcctcaggaggctgaggcaggagaatcgcttgaacccaggaggcagaggttgcagtgagccgagatcacatcactgcgctccagcctgggcaacagatcaagactccgtctcaaaaaaaaaaaaaatgtctgttaggcatctagctgatgatactcagaaggctgaacaggaggacagatgtggtgggacaaggttggggagacactgaagccaaggccctgatcacccatcctcacagctccagcctctcaactccagcctctctcacttattggttccatgtttgtccatgcaggagcctcctcaacaagcccaagagtgagatgaccccagaggagctgcagaagcgagaggaggaggaatttaacaccggtccactctctgtgctcacacagtcagtcaagaacaatacccaagtgctcatcaactgccgcaacaataagaaactcctgggccgcgtgaaggccttcgataggtgagtgctgggtcctggga

SEQ ID NO: 21979 - DNA, 2300 bp, Homo sapien
gtaatcccagcactttggaaggtcgaggcgggtggatcatttgaggtcaggagtttgagaccagcttggccaacatggtgaaacctggtctctactaaaaatacgaaagttagctgggcatggtggtgggtgcctgtaatcctagctactcgggaggctgaggcaggagaatcgcttcaactcaggcggcggaggttgcagtgagctgagatcgcaccattgcactacagcctgagcaacagagcaaggctccgtctcaaaaaaaaaaaaaaaaagaaaaagagaaaaagatttttcttttcccttggggactagaggtttcattcactgatgtatcctatgtagcttaagcagtgtctgatacataagcattcaatgtaatatctgctgcactaataaatgcgcaaaatcatgtcaatgactcgttcgttatccgtgtaagttgtgaatcaagtcgaaaacgcacccgtctccagctcaaatgatcaagataagtcccttatttcaaataattatttctaaaagtcctaacttccctcccccattattcgttttatttcttttgtttcgttttgagatggagtcttactctgtcgctcaggctggaagtgcagtggcgcaatctcggctcactgcaacctccgcctcccgggttcaagcgatcctccggcctcagcctcccgaatagctgcaattacaggcgcccgccactacggccggctaatttttgtatttttgttagagacggggtttcaccacaatggccaggctggtctcaaactcctgacctcaggtgatccgcccgcctcggcctcccaaagtgctgggatttacaaacctgagccaccgcgctcggcctcccccagtattcgtaaaatcgctgccccttaacattcatttcaataggactaattatctaggaccactcccgttatcgtttaaaacatgtttttcataattaaatttttttttttttttgtagagacgggggtctcgctatgttgcctaggctagtctcgaactcctgtgttccagcgatgctccgccttggcctactaaagtgctgggatcacaggaatgagcccccgcgcccagcccagggcgttatctgataaagctgtcccctctcccgaagtcacgatgcgtcaaaggccccacgcccgttctcaaactcatcaggagaaaagcaggacgctgcatccctaaaacatctgcccctgccccccccgctctgctcaacccttcccacactcaatcggtcaaatatccaccctcaacctcattcccgccgcctaagcctagcccggcctcacatgatggtcactacgctctccgttcactcccgtttcctccgcgttgctgctgcctgaggagagagaggcgggacttcctcttcctgcgacccacttccgttggcgcctgcgcaaagccaaccagtaagtggaggcgtggcctgttgccacagcattccccaccaacggtgcacaatgatggaataaaagcttcgggtaggggttcgcggccagtcagaaccacacgggggcagatgtttatgacaatgaagacaaaaggaaaggcagtctgattcaaaccgtttcttgaagaatggtacaggttgaaggagggaaatgacaagctatttccaaatgcccgccggccgtgacttcgggggcgcggcctccgtgaagccaatccgctcctcgcttcggagacaggcaccgcccctcttccctctgggacgcgttactgacgtatctactgatctttccgaccctgcgccaccaatcccctgcctacatccggaaggggcatggacctgcgcccgggagatcgaatattttccatgatcaaacgctgttcattggctttccctcctccgctaaggcggagcctacttctcttgcgctcccatttgggtcgtgccattctcaggggaaccaaccccaatacctaagggaggctgggaggcgtgtcctcaggaccgtagttcttattggtttcgctgctcgctgtggggtgggctggtgcagccgcagctgttgcttattggcccaccgattccatggggaggaacttggctgggcctaaactcaatccgtggtctggtacaggtttcagggcaaagcggccatgcgttccgggggccgcgggcgaccccgcctgcggctgggggaacgtggcctcatggagccactcttgccgccgaagcgccgcctgctaccgcgggttcggctcttgcctctgttgctggcgctggccgtgggctcggcgttctacaccatttggagcggctggcaccg

SEQ ID NO: 21980 - DNA, 2300 bp, Homo sapien
gcctcagcctcccaagtagctgggactacgggtacccaccaccacgcctggctaattttgtatttttagtagagatgaggtttcaccatgttggccaggctggtctcaaactcctgatctcgagggatctgcctgtctcggcctcccaaagtgctgggattagaggtgtgaaccactgcgcctggcctttaaatgactcttcatgctttctggaagacaacagatacattacagcaccagctcggagccaacctgtttgggttcaactctaggtctatgattttctaaacattgggtctcactaggttgactaggctagtctcaaacttctcaggtgattcttccaccttggcttcccaaagtgctgggattacaggcatgagccactgcacccggctaaggtctactacttattatctgtaggatttgtgcaatgtgtataacctctctgagcctcagtttccccatctgcataatgaagatcatattggtacccaccttatagggctgtctgttgcctatgcctagcacacagtaagcttttggtgggggcattaaggggggcagtacagcctggtggtttgttaccagcatggagtctagagtccgattaactccagtcagagccccagttcctcctcttagcttctttgggatcttgaacaggattcttatttcccattccctggagggctagggggtcagggactggaggtgggtccctttacctttctgacttggagatttcccgggctgcccggggttcgcacaaccagcagggggcgcagataagtgctccagagacgctgtggatccagttgtcccaccaccctccgcagccgggcttcggggaggcttccgatcaatgggaccttgggaaggaggtgggatagggaagggaagaatgagagcaacccccccatttcaaccctaccccgggcgccgtcacccgcgaggagccccgggttctcttcctaatctgccgcctccagcatcggagacttctaggataaatccaaggctcaggaaaagtccttccaagaccatccggtccagcctacctcaaacttgatggggaaatcgaggcccagtgagagagaggggagatggaggaagggactcttccaaatagttgactaaaggcgtagaaccctgaacccccccgtcttactatttcagacctttcctcttaaaaggaagctactgttgcagaaccagcccgaagccttattcctttggtaagggtcatgcgctcagatgacgaagacggtggcatctgcggttagggccgtacgctaaagccacgtcaaccctgggtaacagcggggagggaatgagggtccccgcggtgcccgggtccccgcccagcctcacccgcagctcccggcccagcggcagctcctcagtcctgcggtgccagccgctccaaatggtgtagaacgccgagcccacggccagcgccagcaacagaggcaagagccgaacccgcggtagcaggcggcgcttcggcggcaagagtggctccatgaggccacgttcccccagccgcaggcggggtcgcccgcggcccccggaacgcatggccgctttgccctgaaacctgtaccagaccacggattgagtttaggcccagccaagttcctccccatggaatcggtgggccaataagcaacagctgcggctgcaccagcccaccccacagcgagcagcgaaaccaataagaactacggtcctgaggacacgcctcccagcctcccttaggtattggggttggttcccctgagaatggcacgacccaaatgggagcgcaagagaagtaggctccgccttagcggaggagggaaagccaatgaacagcgtttgatcatggaaaatattcgatctcccgggcgcaggtccatgccccttccggatgtaggcaggggattggtggcgcagggtcggaaagatcagtagatacgtcagtaacgcgtcccagagggaagaggggcggtgcctgtctccgaagcgaggagcggattggcttcacggaggccgcgcccccgaagtcacggccggcgggcatttggaaatagcttgtcatttccctccttcaacctgtaccattcttcaagaaacggtttgaatcagactgcctttccttttgtcttcattgtcataaacatctgcccccgtgtggttctgactggccgcgaacccctacccgaagcttttattccatcattgtgcaccgttggtggggaatgctgtggcaacaggccacgcctccacttactggttggctttgcgcaggcgccaac

SEQ ID NO: 21981 - DNA, 2300 bp, Homo sapien
ttatggctgtcatgtgtagagatggtcgttttttgctttatctatttggaagccatagtatttggatcatgtatgttgagaacttttgtgtataatgggtcacttccacctccctcccccagccctagggactcatgtagagaagtaaataattggtcattttgtttcgtcatcatccattgcttttgtcagtttatttattttttatttatttaatttatttttaatttaatttaagacagtctcgtgctgtcacccagagtggagtgcagtggcctgatctgagctcactgcagcctctacctcctgggctcaagcaatcctcccacctcagcctcctgagtacttgggactacaggcacgtgccaccacaccctgctaatttgtgtattttttgtagtgatggggtttcaccatgttgcccaggctggtcgcagactcctgagctcaagggattgtgtcccccctctgcctcccaaagtgctgggattacaggtgtgagccaccgtgcctggccaagtttttttttttttttttttaaggggtaatgttactcctctacttgtctcttggttcgtgttttcccagccagttttttgccgtcttttgattttccatatttttggttcacaatgttttacaatgaatagattttcatggagtagttgctgaaggctgacctagtgtagggccttatgctgggctcagtgtgggggagttagaagatcctgtctcaggcctggagagagacccaccccagacgatgacccagagtaggcagggaagagggaacccagaggtcccctctgggcaggtgggtgatttccaggaagggagttggagaaggcctctctaataaaactgcatttgaacacagacctgaatgaagtaaggaattgagccttgcagagggggaatgtattgcagttggtgggaacagcaaatgcagagaccagggaaggcaagagcccggtaactttgaggaatagacagcaatgagcccaccgcatggacgccctgggtgaagcctgacctggcctagggggattgggggtgtcagcttcttagaggaggggtggtcgagctgaaaccccagggaatatatagtgaaacagtagggcacagtgactaggaaatcagattccctggcttcatatccctgctccagctcacactccagctctgtgtgaccttgtggtcaggagacctgccctgcgtcagtttcttcatccataccgtggagacgatcactcctaccggggatcagatgggtcctgagtattctatgtatgccagatcaggtgcccaccagggtgcactggggtattgcctgcggggcggaggagtggggagggatgcgactggacaggtggggtacctgggtgttttccagagggcactggggagccatggcaggttctcaccaggatagggacgggttcaggtttataggactgtgctttaacaggacttttctggctgctcttttgtactaagtgaggcaggtttggggcgcctgtttggaaaggctgaactggcagctccgaatggctacacggcttgagccttgaacgccaggcctagaggcttgttttcagttgccgtgggaaccttcgtagggttctgtccatttgtttttcagggtggggttatcccgatgcccaattccccccgcggaaatcctcagcccgccccccgcccccacagttcccaaccaaagctggatactctgatctctccgcctgcttccttccgccttggtgttcttaatccccgggctgcctggccctttaagtctcaagcgtcaatcagggcttctgttcgaggggacgtggtgtaataagcctcccctggagtgtcgtggcctttgccctgaccttgttccgtttagctggacgttgggagttgttccacgctcccttgcatccggctgtgtctaccccaccacccactcccatcacctctcgcctactcctccctatttcgaagttgggccccttcgccaaggcctgccttatatgggcacggccccgaatggcggccgctcattggctgagagcgtcacgcgcgcgtctgtcaacaaaagggcggagggaagctagttgctagtctgcccgcgcggtggccggagggaaggagcgagggggcgggcccttttacctttcgcgcgcatgcgtgtgggctgcagccttctcccgccgcctgggggggctgcgggtgagggctctttgggggcgtgtgtaggtttcgagggtcacctgaggggtttggaagatttctttgggggggcggttacaaga

SEQ ID NO: 21982 - DNA, 2300 bp, Homo sapien
tgggactgcaggcgcacaccaccatgcccggctaatttttaaaaaaatttttgtagagacagggttttgccatgttgcctaggctagtcctgaacaatgagactcaagctgtcgacctgcccaaactgctgggattacaggtgtgagccaccgcacctggcccacaagtgttttagttatttatttatttgttcatttattttttgagacagggtctggctctgttgcccgggctggaatgcagtggcactatcttggctcactgtgacttccacctcctgatcttacgccatcctctcacctcagcctccaaaatagctgggactacaggggcatgccaccacacctggctaatttttgtaatttttgtagagatgaataatacatgctgccaaggctggtctcgatctcctgagctcaagtgatctacccacttcagccttccaaagtgctagaattacagggttgagccaccgcagcctatttatttatttagagacagggcctgtctctgttgcccaggctggagtacagtggtgcagtcacagcttactgcagcctcaagctcctggcctcaagtgatcctcctgcttcagcctccagagtatctgggactgcaggtgcttgccaccatgcccagctaattaaaaaaaaaattttgttgttgatggggcacagtggcctcatgcctgtaatcccagcactttgggaggcctacatgggcagatctcttgaggtcaggagcttgtgaccagcctggccaacacggtgaaaccccatctctactaaaaatacaaattagccaggcgtggtggcgtgtgcttgtagtcccagctactcgggaggctgaggcacaagaatcacttgaaccccaggaggcggaggttgcagtgagctgagattgcaccactgcactccagcctgggtaacgagcaggcctccgtctcgaacagaaaaaataagaaattttttttttgtagagacagggtcttgctatattgcccaggctgctctcaaactcctggactcaagtgatcctcccacttcggcctcccaaagtgctgggttacaggcatgagccacagagcccagcccacaagtgttaatagagcacttaccatgtgccagcgcctgtattgggtgcagactcgaccctgccattggggaacttgctgttgtcataatggtagggcagttctgcaagtatgcgagcatttgtgctcattttcaagtttgggtttctctattcccaattcattttcagccccttatgccagcttggcctgcttgtcactgctttcatggattttttaacattctgtctccagccctcattgaattatctgaaaacctattggtttggggaaaagttgccagtctctcacttgtccctgatcctatgtgtcacatctggccaccctggggtgatctgacacttttttgttttccgttgccttcatttatttgtcttagagcatttgtctgctttccaagttattttgccttttcttgaaatcttaaatttgttttcagcctgtgcttgtctgaagcttactcatacaaaatggtatttttaccatctttatttcaaaacctgtgacatgtactaggaaacgaagaaaaaaattgtattttttaccacgtttaatgatgtatttctaactgctatggtaaagctgtcttactcctaaaagcacaagttttcttttttttttcttgaactcctgagatcaggagttcaagaccagcctggccaacatggtgaaaccctgtctctactaaaaatacaaaaattagctgggcgtggtggcgcacgcctgtagtcccagctactcgggaggctgaagcagaagaattgcttgaacctgggaggcagaggttgcagtgagctgagatcatgccactgcactctagcctgggtgacagagtgagactgcgtctaagaaaaaaaaagaagaattagttgggcttggcggccaaggaggttgaagctacattgagctgtgacagaaccactgcactccagcctgggtgacagcgtgagatcatctcaaacaaaaagcaaaacaaaacaaaaataaaatgaaaaagccagagtgcccagctttgagtcctggcttcacctctcatcagctgtgtgacctagggtaagtaatttgatcccgttggacgtcagtttcctcctctggaaaattagcgttcattccctaagtaatccacaagtgtttcattcatttatttacttagagacagggcccacctctgttgcccaggctggagtgcagtggcatgatcatagc

SEQ ID NO: 21983 - DNA, 2300 bp, Homo sapien
cgctccgagcgtgggtctccgcccagctccagtcctgtgatccgggcccgccccctagcggccggggagggaggggccgggtccgcggccggcgaacggggctcgaagggtccttgtagccgggaatgctgctgctgctgctgctgctgctgctgctgctgctgctgctgctgctgctgctgctgctggggggatcacagaccatttctttctttcggccaggctgaggccctgacgtggatgggcaaactgcaggcctgggaaggcagcaagccgggccgtccgtgttccatcctccacgcacccccacctatcgttggttcgcaaagtgcaaagctttcttgtgcatgacgccctgctctggggagcgtctggcgcgatctctgcctgcttactcgggaaatttgcttttgccaaacccgctttttcggggatcccgcgcccccctcctcacttgcgctgctctcggagccccagccggctccgcccgcttcggcggtttggatatttattgacctcgtcctccgactcgctgacaggctacaggacccccaacaaccccaatccacgttttggatgcactgagaccccgacattcctcggtatttattgtctgtccccacctaggacccccacccccgaccctcgcgaataaaaggccctccatctgcccaaagctctggactccacagtgtccgcggtttgcgttgtgggccggaggctccgcagcgggccaatccggaggcgtgtggaggcggccgaaggtctgggaggagctagcgggatgcgaagcggccgaatcagggttgggggaggaaaagccacggggcggggctttggcgtccggccaataggagggcgagcgggccacccggaggcaccgcccccgcccagctgtggcccagctgtgccaccgagcgtcgagaagagggggctgggctggcagcgcgcgcggccatcctccttccactgcgcctgcgcacgccacgcgcatccgctcctgggacgcaagctcgagaaaagttgctgcaaactttctagcccgttccccgcccctcctcccggccagacccgccccccctgcggagccgggaattccgaggggcggagcgcaggccgagatggggaatgtgggggcctgcagaggaccctggagacggaggcgtgcagaagctcagtctcggggcggaggcttcgcgcccttagtcctcctggacggcccgttaccttctgcgttgtcccgatggggaaactgaggccctgagccagaagcacacgctggggggaggcagaaagcgcggccagaggcggagggaaaacaaagggagaatcacagacagacgggagggggacggacacacacaaggggacagagacccgagtggagagctggatctcgccttcccggcgtggggcgcagggtcggccagaaagaagatcgagaagagcggggagtgggggcgaaaaggggggacaggtgggggaggaggctggggaaagcccgagggaggaagagagggagggaggaacttcccaaagttgcaaaacatggctaccttgcctgcggagccgagcgcggggccggcggctgggggggaggcggtggcggcggcggcggcgaccgaagaggaggaggaggaagcgcgccagctcttgcagactttgcaggcggccgagggtgaggcggcggcggcggccggggccggggcgggcgcagcggctgcgggagctgagggcccgggatccccgggcgtccccgggtcgccccccgaggccgcttccgaaccgcccacgggcctccgcttctcgcccgagcaggtggcgtgcgtctgcgaggcgctgctccaggcgggccacgccggccgcttgagccgcttcctgggcgcactgcccccggccgagcgcctacgtggcagcgacccggtgttgcgcgcgcgggccctggtggccttccagcggggcgagtacgccgagctctaccggctactcgagagccgccccttccccgccgcccaccacgccttcctgcaggacctctacctgcgcgcgcgctaccatgaggccgagcgggcccgcggccgcgcgcttggcgcagtggacaagtatcgactgcgcaagaagttcccgctgcccaagaccatctgggacggcgaggagacagtctactgcttcaaggagcgctcccgcgcagcgctcaaggcctgctaccgcggcaaccgctaccccacgccggacgagaagcgccgcctggccacactcaccggcctgtcgctcacgcaggtcagcaactggttcaagaa

SEQ ID NO: 21984 - DNA, 2300 bp, Homo sapien
acctccccaacctcgattcccctcgctgtctctcgccccaccgctgagggctgggctgggctccgatcgggtcacctgtcccttctctctccagctagatggccccccggccgtggctgtgggccagtgcccgctggtggggccaggccccatgcaccgccgccacctgctgctccctgccagggtacgtccggctgcccacgcccccctccgccgtcgcgccccgcgctccacccgccccttgccacccgcttagctgcgcatttgcggggctgggcccacggcaggagggcggatcttcgggcagccaatcaacacaggccgctaggaagcagccaatgacgagttcggacgggattcgaggcgtgcgagtggactaacaacagctgtaggctgttggggcgggggcggggcgcagggaagagtgcgggcccacctatgggcgtaggcggggcgagtcccaggagccaatcagaggcccatgccgggtgttgacctcgccctctccccgcaggtccctaggcctggcctatcggaggcgctttccctgctcctgttcgccgttgttctgtctcgtgccgccgccctgggctgcattgggttggtggcccacgccggccaactcaccgcagtctggcgccgcccaggagccgcccgcgctccctgaaccctagaactgtcttcgactccggggccccgttggaagactgagtgcccggggcacggcacagaagccgcgcccaccgcctgccagttcacaaccgctccgagcgtgggtctccgcccagctccagtcctgtgatccgggcccgccccctagcggccggggagggaggggccgggtccgcggccggcgaacggggctcgaagggtccttgtagccgggaatgctgctgctgctgctgctgctgctgctgctgctgctgctgctgctgctgctgctgctgctggggggatcacagaccatttctttctttcggccaggctgaggccctgacgtggatgggcaaactgcaggcctgggaaggcagcaagccgggccgtccgtgttccatcctccacgcacccccacctatcgttggttcgcaaagtgcaaagctttcttgtgcatgacgccctgctctggggagcgtctggcgcgatctctgcctgcttactcgggaaatttgcttttgccaaacccgctttttcggggatcccgcgcccccctcctcacttgcgctgctctcggagccccagccggctccgcccgcttcggcggtttggatatttattgacctcgtcctccgactcgctgacaggctacaggacccccaacaaccccaatccacgttttggatgcactgagaccccgacattcctcggtatttattgtctgtccccacctaggacccccacccccgaccctcgcgaataaaaggccctccatctgcccaaagctctggactccacagtgtccgcggtttgcgttgtgggccggaggctccgcagcgggccaatccggaggcgtgtggaggcggccgaaggtctgggaggagctagcgggatgcgaagcggccgaatcagggttgggggaggaaaagccacggggcggggctttggcgtccggccaataggagggcgagcgggccacccggaggcaccgcccccgcccagctgtggcccagctgtgccaccgagcgtcgagaagagggggctgggctggcagcgcgcgcggccatcctccttccactgcgcctgcgcacgccacgcgcatccgctcctgggacgcaagctcgagaaaagttgctgcaaactttctagcccgttccccgcccctcctcccggccagacccgccccccctgcggagccgggaattccgaggggcggagcgcaggccgagatggggaatgtgggggcctgcagaggaccctggagacggaggcgtgcagaagctcagtctcggggcggaggcttcgcgcccttagtcctcctggacggcccgttaccttctgcgttgtcccgatggggaaactgaggccctgagccagaagcacacgctggggggaggcagaaagcgcggccagaggcggagggaaaacaaagggagaatcacagacagacgggagggggacggacacacacaaggggacagagacccgagtggagagctggatctcgccttcccggcgtggggcgcagggtcggccagaaagaagatcgagaagagcggggagtgggggcgaaaaggggggacaggtgggggaggaggctggggaaagcccgagggaggaagagagggagggaggaacttcccaaa

SEQ ID NO: 21985 - DNA, 2300 bp, Homo sapien
actgccaagtacaatgacctcttcctctgaaacatcagtgttaccctcatccctgtccccagcatgtgactggtcactcctggggagagactccccgcccctgccacaagagccccaggtctgcagtgtgcccctcagttgagtgggcagggccgggggtggtccagccctcgcccggcccccaccccagctgcccttgctattgtctgtgcttttgaagagtgttaaattatggaagcccctcaggttcctccctgtcccgcaggacctcttatttatactaaagttccctgttttctcagcgggtctgtccccttcggaggagatgatgtagaggacctgtgtgtgtactctgtggttctaggcagtccgctttccccagaggaggagtgcaggcctgctcccagcccagcgcctcccaccccttttcatagcaggaaaagccggagcccagggagggaacggacctgcgagtcacacaactggtgacccacaccagcggctggagcaggaccctcttggggagaagagcatcctgcccgcagccagggcccctcatcaaagtcctcggtgttttttaaattatcagaactgcccaggaccacgtttcccaggccctgcccagctgggactcctcggtccttgcctcctagtttctcaggcctggccctctcaaggcccaggcaccccaggccggttggaggccccgacttccactctggagaaccgtccaccctggaaagaagagctcagattcctcttggctctcggagccgcagggagtgtgtcttcccgcgccaccctccaccccccgaaatgtttctgtttctaatcccagcctgggcaggaatgtggctccccggccaggggccaaggagctattttggggtctcgtttgcccagggagggcttggctccaccactttcctcccccagcctttgggcagcaggtcacccctgttcaggctctgagggtgccccctcctggtcctgtcctcaccaccccttccccacctcctgggaaaaaaaaaaaaaaaaaaaaaaaaagctggtataaagcagagagcctgagggctaaatttaactgtccgagtcggaatccatctctgagtcacccaagaagctgccctggcctcccgtccccttcccaggcctcaacccctttctcccacccagccccaacccccagccctcaccccctagcccccagttctggagcttgtcgggagcaagggggtggttgctactgggtcactcagcctcaattggccctgtttcagcaatgggcaggttcttcttgaaattcatcacacctgtggcttcctctgtgctctacctttttattggggtgacagtgtgacagctgagattctccatgcattccccctactctagcactgaagggttctgaagggccctggaaggagggagcttggggggctggcttgtgaggggttaaggctgggaggcgggaggggggctggaccaaggggtggggagaaggggaggaggcctcggccggccgcagagagaagtggccagagaggcccaggggacagccagggacaggcagacatgcagccagggctccagggcctggacaggggctgccaggccctgtgacaggaggaccccgagcccccggcccggggaggggccatggtgctgcctgtccaacatgtcagccgaggtgcggctgaggcggctccagcagctggtgttggacccgggcttcctggggctggagcccctgctcgaccttctcctgggcgtccaccaggagctgggcgcctccgaactggcccaggacaagtacgtggccgacttcttgcagtggggtgagtgcctaccctcggggctcctgcagatggggtgggggtggggcaggagacaggtctgggcacagaggcctggctgttgggggggcaggatggcaggatgggcatggggagatcctcccatcctggggctcagagtgtggacctgggccctggggcaacatttctctgtcctatgccaccactctggaggggcagagtaaggtcagcagaggctagggtggctgtgactcagagccatggcttaggagtcacagcaggctaggctgccaacagcctcccatggcctctctgcaccccgcctcagggtcagggtcagggtcatgctgggagctccctctcctaggaccctccccccaaaagtgggctctatggccctctcccctggtttcctgtggcctggggcaagccaggagggccagcatggggcagctgccaggggcgcagccgacaggcaggtgt

SEQ ID NO: 21986 - DNA, 2300 bp, Homo sapien
tcagtggtagaggtaggactgtccctgagttctttccccagcacctcagggtccctcccaagttagaagggagctccagtttccccctcccctcccacccttacccttaccccatggtctcactcaggatccgccaaggactttgattattgcgtgaaagtgctgactgccaggacaggaagctagctaagatgcaagttcccagcctagagcagtggcctctggggggtctagggcggacccaagggcaaggccagggtggcagcagctttggggactctgggctggctccctccccttgacactggctgaagcccaggtggtctctaacccctcccatctctccctctcatcttccccagggcatctcctcccaaccaggcaactccccgagtggcacagtggtgtgaagccatggatatcgggcccccccaaccccatgcccccagcctcctagccataaccctccctgctgacctcacagatcaacgtattaacaagactaaccatgatggatggactgctccagtccccccacctgcacaaaatttgggggccccccagactggcccggacacgggcgatgtaatagcccttgtggcctcagccttgtcccccacccactgccaagtacaatgacctcttcctctgaaacatcagtgttaccctcatccctgtccccagcatgtgactggtcactcctggggagagactccccgcccctgccacaagagccccaggtctgcagtgtgcccctcagttgagtgggcagggccgggggtggtccagccctcgcccggcccccaccccagctgcccttgctattgtctgtgcttttgaagagtgttaaattatggaagcccctcaggttcctccctgtcccgcaggacctcttatttatactaaagttccctgttttctcagcgggtctgtccccttcggaggagatgatgtagaggacctgtgtgtgtactctgtggttctaggcagtccgctttccccagaggaggagtgcaggcctgctcccagcccagcgcctcccaccccttttcatagcaggaaaagccggagcccagggagggaacggacctgcgagtcacacaactggtgacccacaccagcggctggagcaggaccctcttggggagaagagcatcctgcccgcagccagggcccctcatcaaagtcctcggtgttttttaaattatcagaactgcccaggaccacgtttcccaggccctgcccagctgggactcctcggtccttgcctcctagtttctcaggcctggccctctcaaggcccaggcaccccaggccggttggaggccccgacttccactctggagaaccgtccaccctggaaagaagagctcagattcctcttggctctcggagccgcagggagtgtgtcttcccgcgccaccctccaccccccgaaatgtttctgtttctaatcccagcctgggcaggaatgtggctccccggccaggggccaaggagctattttggggtctcgtttgcccagggagggcttggctccaccactttcctcccccagcctttgggcagcaggtcacccctgttcaggctctgagggtgccccctcctggtcctgtcctcaccaccccttccccacctcctgggaaaaaaaaaaaaaaaaaaaaaaaaagctggtataaagcagagagcctgagggctaaatttaactgtccgagtcggaatccatctctgagtcacccaagaagctgccctggcctcccgtccccttcccaggcctcaacccctttctcccacccagccccaacccccagccctcaccccctagcccccagttctggagcttgtcgggagcaagggggtggttgctactgggtcactcagcctcaattggccctgtttcagcaatgggcaggttcttcttgaaattcatcacacctgtggcttcctctgtgctctacctttttattggggtgacagtgtgacagctgagattctccatgcattccccctactctagcactgaagggttctgaagggccctggaaggagggagcttggggggctggcttgtgaggggttaaggctgggaggcgggaggggggctggaccaaggggtggggagaaggggaggaggcctcggccggccgcagagagaagtggccagagaggcccaggggacagccagggacaggcagacatgcagccagggctccagggcctggacaggggctgccaggccctgtgacaggaggaccccgagcccccggcccggggaggggccatggtgctgcctgtccaac

SEQ ID NO: 21987 - DNA, 2300 bp, Homo sapien
gcagtggcagtggtggggagaagcccagcggccctgttccccgcagccgcctggaccccgccaaggtgctgggcactgcgctgtgcccgcgcatccacgaggtgcccctgctggagccccttgtgtgcaagaagatcgcccaggagcggctcacagtcctcctgttcctggaggactgcatcatcactgcctgccaggagggcctcatctgcacctgggcccggccgggcaaggcggtgagtggccccacaccagcctgccggggacctggcaggacctttcgtgggaagaggcaggcattggcagagagagggctttgttgctgtcacagcctctggctccgtggggtgaggggaagccagggaaatcttagtgtctcagtacaagacctctcagatccttagagtgagggggtctagccctaggcagcaggcagcagaaagaggggtgggtgtgagagccagctaggaattggggcatccaaggctggccgtctgaagggcagcagatgggccccacatggccaggtcttactgcctgtcactcgaaccagaatctatttctgttgaacatctgttttttaaatcgtgaaacttttttgagtacttcaggccaaaactaggggcgagctcaagcctgtgggcatggctgccagcctgggtctgggactcaggatctgagcctcctgctgaaggcacaggctgggaatcccaggcctgggttccagtcccactccctctgtgaccctggacaagtcactgccccctctgacctccaactcatcacctcttagaacagagcctgtaggatgggcagtgggtggatgtgcttgcctcctgggtgggctgtggcgttgggaaggtcatagtaggcgaatcaggcctggcatcttgtaagttcggagctcgtcttgggtgtctcagcttcttagggcttggactcagttgcccagggtcctggaggccgtggcttggttcctcagatcctcagttttggaatcgtagagtcctgagtccctagaacttgagagcacagtctgagtgactcagaggcaagagtggtgggatttggggagtctggttgagtcctaaaagagacccctctgtctccgtagttcacagacgaggagaccgaggcccagacaggggaaggaagttggcccaggtcacccagcaagtcagtggtagaggtaggactgtccctgagttctttccccagcacctcagggtccctcccaagttagaagggagctccagtttccccctcccctcccacccttacccttaccccatggtctcactcaggatccgccaaggactttgattattgcgtgaaagtgctgactgccaggacaggaagctagctaagatgcaagttcccagcctagagcagtggcctctggggggtctagggcggacccaagggcaaggccagggtggcagcagctttggggactctgggctggctccctccccttgacactggctgaagcccaggtggtctctaacccctcccatctctccctctcatcttccccagggcatctcctcccaaccaggcaactccccgagtggcacagtggtgtgaagccatggatatcgggcccccccaaccccatgcccccagcctcctagccataaccctccctgctgacctcacagatcaacgtattaacaagactaaccatgatggatggactgctccagtccccccacctgcacaaaatttgggggccccccagactggcccggacacgggcgatgtaatagcccttgtggcctcagccttgtcccccacccactgccaagtacaatgacctcttcctctgaaacatcagtgttaccctcatccctgtccccagcatgtgactggtcactcctggggagagactccccgcccctgccacaagagccccaggtctgcagtgtgcccctcagttgagtgggcagggccgggggtggtccagccctcgcccggcccccaccccagctgcccttgctattgtctgtgcttttgaagagtgttaaattatggaagcccctcaggttcctccctgtcccgcaggacctcttatttatactaaagttccctgttttctcagcgggtctgtccccttcggaggagatgatgtagaggacctgtgtgtgtactctgtggttctaggcagtccgctttccccagaggaggagtgcaggcctgctcccagcccagcgcctcccaccccttttcatagcaggaaaagccggagcccagggagggaacggacctgcgagtcacacaactggtgacccacaccagcg

SEQ ID NO: 21988 - DNA, 2300 bp, Homo sapien
actcctgggctcaagctattctcctgctttggcctcccaaagcgctgggattataggcgtgagccatcacacccagccaagaaggacattctgagtatcggggccagctaggacaaatgcaggattgcacagaagccgtgtggccagtgcagttactgagggagagaagatggtagatgagttccaagaaataacggaggggctggctcatggagagtctggaaggtcacggagagattttgccttactcttagttggaagcctgtggaggagcctttctcattggggctcacctgagccctggaaggcagaagtgactagagtgattatttgttcagttctcccagggatgggaggcacctcatcctgggagagcagctccttagttgcatacactggctgcctgagagcattagggcctcaggctctggaaccctgcttgagagaggctgcgaagtgttcagagcaggacagtgccaggtgctggctgatacttcacagagcatcgctgtggcggctgcagaggacagacaggcccaggcattggagcctgaggccagtcacacagcattgcaggcttggggtggttgaatgggatggtgagaggaggtcagattctgggtgtattttttcttttttttttattttgaggtggagtctcgctctgtcgcccaggctggagtacagtggcatgatctcccctcactgcaacctccgcctcccgggttcaagcaattctgcctcagcctcctgagtagctgggactataggcgcccgccaccatgcctggctaatttttgtatttttagtagagattttgtatctctacttgtatttcaccatattggctaggctggtctggaactcctgactttgtgatccgcctgcctcagcctcccaaagtgctgggattacaggcgtgagccaccacgcccagccacttctgggtgtattttgaaggtcgagcccacaggatttgtggaaggattggatgaggaaaagaggggcagatgccgaggttttttgtctaagcacctagcgggatggggggttgtcactcatttgtccaggaattaccttcaagctgcctcctgtgtgcactgctttaaagaatagtgaaccaaacaaagatcgcttcctttggggagctgcctttccgtgaagaaatttcctacttgaagcctgacgtagtaaagatcgggggagggttagacagatacagtggtccccaaccattttggcaccagggactggtcttatggaagacagtttttccacagactgttggggggatggttttgggatgaaaccgttctgcctctgatcatcaggtgttagattctaataaggagcgcacacctagatccctcgcatgcatagttcatggtggggttcgcactcttacgaggattgaatggtgcgctgctccggtaggaggctgggctcaggctgtaatgcctgctcgcccaccactcacctcctgctgcatggcctggttcctaacaggccacggaccactactgttccatggcccggaggttgaggaccccgagatacaggacaattctgtggcaagcaggactgtcccctcgccaaagatgggacatcgaggctccttggagcaccctgtggccaccttgcagcagcctctgtttccccatgtttccatgacctggtgtccatctgtcttccccagtttgggagcttctctccgaggaggacctgggcctggtgtggcacctgctgtgtgagcggggccatgtccaacggccttcttggggactttgggtcggggagaagttctgcctgggttttactgccttctcccaaccccacactgtctcccctggcagcggttgatcgacaagaccaaggtgacatatctgaagtggctgcctgagtcggagagcctgttcctggcatcacacgccagtggccacctgtacctgtacaacgtcagccacccctgcgcctcggccccgccccagtacagcctgctgaagcagggcgagggcttctctgtctatgctgccaagagcaaggcaccccgcaacccgctggccaagtgggcggtgggtgaggggcccctcaacgagttcgccttctcgcccgatggccggcacctggcctgtgtgagccaggatggctgcctgcgcgtcttccacttcgactccatgctcctgcgtgggctcatgaagagctactttgggggcctgctgtgtgtgtgctggagccctgacggccgctacgtggtgacgggtggcgaagatgacctggtcaccgtgtggtccttcaccgag

SEQ ID NO: 21989 - DNA, 2300 bp, Homo sapien
gcctcattttaggtggtggatagtgtgaggagttagtggtgagatatgagattgaaaagaggttggcaggggccagatcacttggggcttaactttcccctgagagcactagggagctacagatgggttttgagcaggggagggccctgatcatattcatgctttagaaagacctctctaggcctagtgcagtgggtcacacatgtaatcccagcacttagggaggccaaggttggcggatcacctgaggtcaggagtttgagaccagcatgcccaacatggtgaaaccccgtctctactaaaactacaaaaaagtagctgggtgtggtggcaggtgcctgtaatcccagccactcaggaggctaaggcaggagaatcacttgaacccaggaggcagaggttgcagtgagccaaaatcgtcccattgcactccagcccacgtgacaagagcgagactctgtctcaaaaaaaaaaaaaaaaaaaaaaaaagccgggtgcagtggctcatgcctgtactcccagcactttgggaggccgaggtgggtggatcacctgaggtcaggagttcgagaccagactggccaacatggtgaaaccccgtctctgagccgagatggagccattgcactccagcctgggtgacagggtgagactgtctcaaaaaaaacaaaaacaaaaacaaaataaaacctctctacatgccaagtgaaaggtggaagtgggggtgagacagaaatctgggagaccaagagacacggttgatgtgggggtgggggaagggcttgggtagaggagaagcttggatcagggagaacaaggaactgagaaagaggaattccacgtggtcgaatgcaaaagacttggaggctgtaagcgggggcagagtgaagataaatggtacacatctaggaagacacccaggtctgtggcctggttgactgagtggacggcagagctagccctaaggtggggatgcaagagaggtggaggatttggtgtaagacgtcaatttcattgtaggattcttttttctttcttttttttttttttttagagagactgagtctgactctgtcccccaggctttagtgcagtgatgtgaattcatagcagtcttgatctcctgggctcaaacgatcctcccacctcagcctcccaaagtgctgggattctcggattccaggcatgagccaccatgcccgaaccattgtaggatttttttttttaagtgtgagatgcccttgggacactctagggagaaatcgtagaggccattgactacatgagactagaaagatctatgatggggctgggtggcttcagcagacatggggagcactggctatgagtaggagctgttgggatcagggggagactttgggttacgagtggatcactgggacactggggcaccgtggggatcaatacaatttgggaatcagaggtaggttttggaggacaagtgaggttgttgaaaataagaaaatcatggaaatatacattggaggttggtggaaaatatgaaggatgtttggagttagcattaatcaatagtgggtcagaggaagtcctctgagttgtgtggggacacagggatttggtgggtcaccaagggtggggaagaatggtagcagatgctgtggtcattcagggatttgaatatgtcagtgggaaacactggaggtcaggggagtgtatattgggcgtctaaggagagaccagggtcacttggggttggctgtgacttcatgggaaggctggactatggatgagggcttctttgtcgtgggggaaaaaaaaaaaaaaatccctccgttgctaggcaaacgttcccagggcgcggttgctaaggacttgagctttctaactggccacgcctctttccattgcgggctccgcccccgcagccaaccacaagtcggtcacaggctcaaaggccgcgcccaccttctcgccccgcccacagtcccagcaccgttacccgagcgaccgcggggattcgtcccgcctccggatctgggtgccaatcgaagaggcgttgcccgggcgacgaccccaccttttccggcgcgggccagcggcttccgggagggggcccggctgcgggcggcagtccggcagtggcggggcccggggggcgcccaagatggcggcgggcggcgcggagggcggctcgggccccggcgccgccatgggggactgcgcggagattaagtcgcaattccgcacgcgcgagggtttctacaagctactcccgggcgacggcgccgctcgcaggtcgggtccggcttccgcccaga

SEQ ID NO: 21990 - DNA, 2300 bp, Homo sapien
actcctcaccacaaccttcaaggctcctggcctgagacatataaggccttgctcatgcctgtgatcccagcactttgggaggctgaggcagacagataactcgaagtcaggagttcaagaccagcctggccaacatggcaaaaccctgtctctactaaaaatacaaaaagttagccaggcgtggtggcacacgcctgtgatctcagctactcgggaggctgaggcaggagaatcacttgaaccgggaggcagaggctgcagtgagccaagatcgtgccagtgcactccagcctgagcaacagagcgagactctgtctcaaacaaaccaacaaacaaaaggccttacgtggttcagcccctggccgctgaccaaacttgatttctagtcactacctgctccttcctcggatcctagaatctagtcagaattaacctctggctattccccaagtgccagctcttcagagcttcaggctctcttcctgagaagccctagccaaagtctcacctcttcttacccttcccaacttccatgatggcccaacaccacacccaagactgccaacaaaacagcttccgcaaagcaaaaggtgacacatacatgcttggaaatcagaccaacttggtttcaaaggctgactgtggccgggcctggtggctcacgcctgtaatcccagcagttggggaggctgaggcaggcagatcacttgagtccaggagtttgagaccagcctgggcaacatggcaaaaccccatctctacaaaaagtacaaaaattagccaggcatgttggcacacgtgtaatcccagctctggggagtctgaggtgggagaatcacttgaacccgggaaccagaggttgcagtgagccaagaccgagccactgcactccagcctgagtgacaaagtgagaccctgtctcaaaaaaaaaatacaaaaaatacaaatgttggccaggcacggtggttcacacctgttaacccagcactttaggaggccaagacgggcggatcacctgaggtcaggagttcgagaccagcctggccaacatagtgaaaccccgtctctactaaaaatacaaaaattagccggggatggtggtgtgcacctgtagtcccagctactcaggaggccgaggcaggagaatcacttgaacccaggaacccaggaggcagaggttgtggtgagccgaaatcacaccactgcactccagcctgggcaacaaagcaaaactctgtctctaataataataataataataataataataataataataataataatacaaatgttggccaggtgcggtggctcacgcctgtaatcccaacactttgggaggcggaagaaggtggatcacctgaggtcaggagtttgagaccagcctggccaccatggcgaaaccctctacaaaaaatacaaaaaaattagcgggacatggtggtgcatgcctgtaatcccagctacttgggaggctgaggcaggaaaatcgcttgaacccaggagacagagactgcagcgagctgaggtcgtgccactgcactccagcctgggcaacacagcgagacctcctctgaaaaataaattaaaaaaataaaattgcaaaccttctcccatccctggcacccccaggccccattcagtactatatgtgtcaccctaaaaattaccaccccatgcctgacacactgtatatattttgctcgtttgattagtgtctgtttccaccataagaatgtcggcaaggcgcggtggctcacgcctgtaatcccagcactttgggaggctgaggcgggcagatcacgaggtcaggagttcgagaccagcctgaccaacatggtgaaaccctgtctctactaaaaatccaaaaagtaaccaggcgtggtggcgggcgcctataatcccagctactcgggaggctgaggcaggagaattatttgaacccgggaggcagaggttgcagtgagccgagatgaaccactgcattccagcctgagcaacagagcaagactccatctcaaaaactaaataaataaaaataaataaataaatgtcagctacacctgggcagggaccttttcagttccctactgtgtccccagcaccaggcacagggccaggcacatgggagccagctcagtgagctgagtgagtgaggtccctctcctcccactcctcctgcgggaggcaggtacgagcacctggtgaatctgctgaccaagatcctgaaccagcggcctgaggaccccttgtctgtcctggagtctctgaaccgcaccacgcagtgggagtggttccac

SEQ ID NO: 21991 - DNA, 2300 bp, Homo sapien
aagagaacaaaaaaaccaaaccccgcaggactaatgtcgccccctggaggctgcggtgagaatgtacatgtgacccaggacaggtcccggcaccggcacggacctccgctgtttagcaggggtaatttcgccccctggaggctgccgtgagaatgtcatgagaggtgctcccgcagcacttagcctgggcctggcccagggggagctctggtaaaaggcggctgagttttcttccacccccttcccaagttgccctcgtggtccagccgcctggatcgggaagacaaaggcctctggagggaggtcggggctgcttgttgcccatccagaggaatcttggatggtgggatttgggcatggtcttggcaaggtctttctcccagtgtcaaggctcggggggatgcctgtgtgcctctcccgacggctccctccctccctggttcaggtgtggaagtaccccaaggtgtgggagggcttcatcaagtgctgccagcgcacaaagccccagagcttccaggtcatcctgcagctgccgccccagcagctgggagccgtctttgacaagtgcccagagctccgggagcccctgctggcccatgtccgctccttcaccccccaccaggtaccccttccccccaccaggtaccctttccccccacccagggtgtgcggtgggcggccccctgggtccctctggttggtggggactggatggaggcggacacaagaaggccctgcactgctgggagttctggagggttagggcccccggacctgaggtgtgcaaatggggtctctgtgccagagctgcccccagcgcccccttcctgctctccacccagcaagctcacatccctaactccatcatgaccatcttggaggccagcggcaagcaggagccagaggccaaggaggcgcctgcggggcccttggaggaggtgagggccctgcagcccacccatctggatccccagactcccaccccctaccccaagccagcaaggctcaccatggcctcctcctgaccccgagagactcaggccacccctgcctctgggccacccgtctcccaggggatgctcctgctgggagttgggggtctgggggacaactgccccttcctccccatgctcttggtgaagaactcaaagaccacctcagggtggttccttctctttccggccgtcctctgagccacccacctctgagcttctgtgtggccctccctatccccaggatgatctggagcccctgaccttggccccggccccagcaccccggccccctcaggacctcatcggcctgcgactggcccaggagaaggccttaaagcggcagctggaggaggaacagaagctgaagccgggaggagtgggagccccctcctcttcctccccctctccctctccgtcggcccggccaggcccgcccccgtctgaggaagccatggatttccgggaggaggggcctgagtgcgagaccccgggcatcttcatcagcatggatgacgactcggggctgaccgaggccgcgctgttggactctagtctcgagggccccctacccaaggtagggagagcagcctccgctgcgaaggaagaagccggatctgggccggggtgaaggtgggggaggaggggccatcagggggcagggcctgaaggggagcgtggaggtgaccgcgccctccacccggctgccctttccttccccggtcaccaggagacggcagcgggcgggctgaccttgaaggaggagcggagcccccagaccctcgcacctgttggagaagatgctatgaagactcccagcccggctgccgaggacgccagggaacccgaggccaaggggaacagctgacggggctcgagggggaaagggggtgggacagggactcggggctgggggacggggcggggcttgacctgcgggtgctttgccttaaaaagaaataaaagatgtgaacttgggcaagttactgaaaagaaaaaaaaaaagggatggcgggcctggggcgcgggtgccgtctcgagtctggcgcgacgtccaccgtggggctgcgcgggatcgggagtgcgcgcccagagcctgcgcggaacccaccctggcccgctccccgcgccctccacgggtaacggccccctctctcggtgctcagaaaccggcggtgtcgacaggtggctctcgcttggcctccttgtctgcaagcctttctcctagagatctgtgcctcctggcgaaccatgggagacctgccgccctaccctgagcgccctgcccagcagcctccgggccggagg

SEQ ID NO: 21992 - DNA, 2300 bp, Homo sapien
cttgtcaaagacggctcccagctgctggggcggcagctgcaggatgacctggaagctctggggctttgtgcgctggcagcacttgatgaagccctcccacaccttggggtacttccacacctgaaccagggagggagggagccgtcgggagaggcacacaggcatccccccgagccttgacactgggagaaagaccttgccaagaccatgcccaaatcccaccatccaagattcctctggatgggcaacaagcagccccgacctccctccagaggcctttgtcttcccgatccaggcggctggaccacgagggcaacttgggaagggggtggaagaaaactcagccgccttttaccagagctccccctgggccaggcccaggctaagtgctgcgggagcacctctcatgacattctcacggcagcctccagggggcgaaattacccctgctaaacagcggaggtccgtgccggtgccgggacctgtcctgggtcacatgtacattctcaccgcagcctccagggggcgacattagtcctgcggggtttggtttttttgttctcttttttttttttttttttttttttttttgagagatggtcttactctgccgcccaggctagagtgcagtgagtggcgcgtttcttcctcactgcagccccaaactcctgggctcaagcagtcctcctgtctcggcctcccaaagagttggcattacaggtgtgaaccatcacacctggccttatcgtggtatttctaaagcccaaatttctagcacctcttaaaaaactgggccatttttcagctctgggatgcatcctggccgggcacacagcggtggagggtgaggagcagccatgcctctcccgggtgcacaccccttgagggttaccacagctcctaccacccagctgccctccctcatcacctgggagctggcccagtcatacaccctggagcactgctattttcttggcaggaggcagagcagagcctgctgtcctccaccgggctccctccggggtcagacgggggaaggggagggcaagcaggctagaagctgctgtctgcagcctggaggcggggtggccggggatgggttacctgcttcatgatgaggcgggacaggatgttcatgacgaagccccccaggcgggggtacatggtcagggactggatgacggtcctcatgagcagcatgggcagggggctctgctccatcagctgctgcatcaccacggccagcacctctgacgtgtacacgttccgctccgcaaagcacaggttggtggctgcgaggaggcggagagtgggcctgtcctctctgcccagctgccccctgggaggtgggagtcccggcctctgctgtctgcccatgtgaggggaagacttctaaagccctgacttctaaagcccctgcgggagagaggagactcccccgacccagcagaaggcacactgcaagccccgcccttggaaaacctgcaggcttggttcaagggagaagacatccaactccaggaagccccaaaatgggtggaacagggaacccgtggcccctcactttaaggacgaccttgggaaagatgtgttgccaagccctgggggagtggcagggccccccacccctgctagggagggaaggcagctattggtttctaccagcccctccagagagaacagcagtccacagaccagcttgtcagagggccaagggactgcccacccagtcctgacaaggatacagggcttgcgctggtgctgggaagatggggggtgccaggctaagggctgtgttgggcatatgggcacaatcagagtaatagcgaagggagggacaagagaaggctggggccggggcatacgatgaccccccgactcaacacccagtgccagtaccagtaggacccagagggttggcacagcacaagcacccatgaaggcaggccctggggtctgttccccgagtgggtggccatgccccaatccacagtgctaatgggaggccccaggagctgcctttgaagcccttccccaaacaccacttgccatgtgagtgtcaaccaggaagtctttattgagccagaagagcaccccaaccccccaaatccttgagaggctaatggagaacaggggtggggtctctaagggggggggcgtagacaggtggggaggaggctgaatgggcagagcagacagtggaggtgaggacctgccagaaaccgaggaagcccctgctcctcgtcagggccaggtggtcactggtcctgcctgctcagccaccccaaggctccagaatc

SEQ ID NO: 21993 - DNA, 2300 bp, Homo sapien
attgtatttttagtagagacggggtttcaccgtgttagccaggttggtcttgatctcctgaccttgtgatctgtccgtcttggcctccgaaagtcctgggatttcgggtgtgagccaccgcgcccggccctagttttacctattcttgaacaaaactaaataggatcacaaagtctggtttctctggcttgccatatggttttttgtgtttttttgtttgtttatttttatttatttatttttttgagatggagttttgctcttgtggcccaggctggagtgcagcagaactttcttggcttactgcaacctctgtctcctggattcaagcgattctcctgcatcagcctcccgagtagttgagattacaggcacccgctgccaccattcccagctaattttttgtttttcacggtttttttttttttttgagatggagtcctactctgtcgcccaggctggagtgcaatggcatgatctcggctcaccgcaacttctgcctcctgggttcaagtgattctcctgccttccaagtagctgggattataggcatgtgccaccatgcctggctgattttttttttttttttttttgtatttttagtagagatggggtttcaccatgttggccaggctggtctcgaactcctgacctcaggtgatccactctcctcggcctgttaaagtgctgggattacaggtgtgagccaccacgcccagcctgctgtacatttttgagattcttcattgttgtcgtgtgaggtactagttggttttttattgctcagtagtattctgtcatatgaatatacaatcatttgtttatccacaccggtattgatggacctgtggcttctttccagtttttggccattgggaataaagctgctgtgaatatttgtgtccaactctcttcatgtacacatgctgtcatctgtcttgagcatataccaaggagtggaaccgttgggtcatagggtgtgatcagtgctattaaaaactgctacaggctgggtgtggtggctcacacctgtagtcccagcactttgggaggctgaggcgggtggatcacctgaggtcagcagttcaagaccagcctggccaatgtggtgaaaccccgtctctactgaaaacaaaaaaattagctgggtgtggcagtgggtgtctataatcccagctactccagaagctgaggtgggaaaatggcttggacccaggaggtggaggctgcagcgagtcaggatcaagccactgcactccagccttggtgatggagtgagactccgtctccaaaaaaaacagctgagggctgggcacagtggctcatacctgtaatcccagcactttggaagtccaaggcgggaggatcgcttgagcccaggagttcaagactaagctgggcaacatatggagacctcatctctacaaaaaaatacaaaaattagctaggtatgttggcatgcgcctgtagtcccagctagttgggaggctgagaggctgaggcaggaggattgcttgagcccaggaggtcaagactgcagtgagccctgattgcaccaccgtactccagcctgggtgacagagtgacacccagtctaaaaaacaaaaactgctcatcatgtttccaaagtggctgtagcatttgctgctccccccagcaatgaatggcatttctagtttgagcctcagttgtattgaaaagtggggataaaaagagtacccactccaggacagtgttgtgtggatttaaacgaggttttgtgtgtacagggctcagaacagagccaggcacacaggaggtcctcgggttggagcaggtgggtctgacgcactgggtgtctgtttgctgcctccccctcaggtgtagagcagaccaaacagtgcaaggaggagcccaaggaggagaaggtggtgaagacagagagcgtcctgatcaagcggcgcctgtcagcccagggccaagccatctcggtggtgggttccctgagctccatgtcccccctggaggaagaggcaccgcaggccaagaggaggccagagcccattatccctgtcactcagccccggtgagtcctcttctgggtgctagggcaggacaggagccctaccctgaaggtctggttctcagctcgtgtgcgtgtgcgtgtgcgtgtgcgtgtgtgtgtgtaactgagatgcagacagaaggaagtctggaataggttctctctgactcccgagtcagtgccataaccactaagcctttgctgttctctttcctgtaaaaaaaaaaaaaaaaaatccttttttatgtctaaaatt

SEQ ID NO: 21994 - DNA, 2300 bp, Homo sapien
ttgggaggtaagccctgttactatccctgtttcctagaagaggaaactgagagccagagaagttaaatgtcttgcctcaggtcattctgcgtatacataaacacatacttgacaaaaatggcttgaactgcatgtattgtcctctgatgcaacaggctgtcagggacctcttttcaggataatatactgagattcaccttttttttttgagatggagtctgtctttatgtcccagactggagtgcagtggcatgatctcggctcactgcaacctccgcctcctgggttcaagcgattcttctgcctcagcctcctgagtagctgggattataggctcagctaactgttgtatttttactagagatggggtttcaccatgttggccaggctggtctcaaactcctaacctcagacgatccacccgtttcggcctcccaaagtgttgggattacaggcgtgagccaccgcgcccggcttcaccaattttttttaccctgtttcctctgctggtttttggtttatcctttcagatttttttccttttttaacatatatattttttcccctttcttttttttgagtcaagttctcactctgctgcccaggctggagggcagtggcccgatcttggctcactacagcctctgccttcacctccctgagtagctgggactaccaggcacgccaccatgcccagctaatttttatattttctgtagagatagggttacaccatgttgcccaggctgctctccgactcctaggctcaagcgatctgcctgcctcagcctcccaaagtgttgggagtacaggcatgagccactgcacctggcctcatttttcttttttttttgtaaaacagaaacatacagtcaacactgtcttcagctttgcttgttttcacttaatgtatgcactctctatcagtgtctagagattgttctcatttttttgtttttttcttcctttcttgttacagttccatagtctttttcctttatttatatttatatgtttttcacttactttcacaggtgttgaagccccatggcctttgattatgtatgaactttttttcagccagtctccctatttgagaacacttgagttgcttctagtcttttgctattatgaatagttgtgtaattgacatatactgctacgttaatcattccataattttgcctgtgtgactgtgatggatgcctgaaagcccccttcctcccttttaaaaacagcttcatgatattccagagagtggctgaaacataattattgaagcaggccttttgtgatgtattgagtgcctactatgtgccggactctgtgcctgatattcctcagagctgtgtttttaaaagtttactctgggccaggcactgtggttcacgcctgtaatccctgcactttgggaggccgaggcaggtggaacacctgaggtcaggagtttgacaccagcctggccaacatggtgaaaccctgtctctactgaaaatacaaaaattagctgggcatggtggcatgtgcccgtaatcccagttacttgggaggctgaggcaggagaatcacttgaacctgggaggcagaggttgcagtgagctgagatcgcaccaccacactccaacctgggtgacagagcaagacttcatctcaaaaaaaaaaaaaaaagaaagtttgctgtggtgcccagtccaaagcatatcccagatggagagaggggacacacggagacctgcaaggtggctgttgcacgttcatgtggcccatcgttcagcagctgtttgtggttggcccacttgaggctgagacttctggctctgccttgggagatgtcagtctcccccaagttacaggccccgtgcacatatccataagccagagacagaccctggaggggagagggacttgagaaggcctgactggggaggaacagcctgggaaggaggcttgggccctttgtaggtgttcgggtgacaatccagcccagcccatccgctggttccctgagcttgatccatcctcttctttcctggggacaagctgacagcagccatggcgagcggcagtggagacagcgtcacccgtcggagcgtggcatcacagtttttcactcaagaggaggggccgggcatcgatggcatgaccacctcagagagggtgagcgtggcgggtagggcttggagtgaggaagcatagcccctggctttggcaatccctgtttaggtggcagagccctgggagtgccgagggggctgcactgggctggactgggctggcactatcccctgccactccccctc

SEQ ID NO: 21995 - DNA, 2300 bp, Homo sapien
ggagctgcccgcagcgacgctgcagataccaagggccccgaggtcagaactctggagcctttctacctcagggggcttcatcatctcggcaggagaggacgaagagccagagccctgcatgaccgtggcggaagaaaggggaatcagaacgctagggccactatgcgactacaaggacccgtaaaaggtccccgaaatcacatccccattggacagacaggaagactgaggcttccgacggctagaaatgcttaacttggccgggcgcggtggctcacgcctgtaattccagcactgcaggaggccgaggcgggcggacgaatcacttgaggtcaggagtttgagaccagcctggccaacagggtgaaaccccatctctattaaaaatacaacaactagctaggcgtgatggtgcgtgcctgttatcccagctattcgggaggctgaggcaggagaatcgtttgaacctaggaagcggaggttgcagtgagccgagatcgcgccactgcagtccagcctgggagagagagcgggactccgtttccaaaaaaaaagaaagaaagaaaagaaaagaaaaagaaatgcttcagactgttgaaagggtcaagaacaaagatggaggggatcggggcctctccgcagaccccactagggcaacagaccacctcccctccaagacccaggagcttcgctgcccgaactccgcactctccaagaccagccagccgtccagggactcagcaccactgagaactccatttcccagaatgctctagctccctttccgcccggtgcctccgaagggactacatttcccagaaggcctagccggacccagagccggaaatgaagggtctgctcgccgtagtatggaggcgggcagaatgccgctcgcacgggacgaggcatgggcggggtcgggctgtgctctggactccatttcccggcggccctgggtgtgtggcgcgtgcgcaccgttcccggcgacgaacggaagatggcggcggcggcggcggcggagtgtaggaagaggcactgctgagggggcgcgaggggaacggaggccagagctgcggtgagcgggaggcggcgtttgggcccggagacgaaaggaggaggctcctaaagaagcaggggctcgggcggggagggcatcgccgtggggagaggggaacagtggctttcgcgacccatgtttcttcccttgctcaggacccttccttggctccctagtgccctcgaggcaaagttccaacgtggccccccgggcgccaccgccccgcagacctcgcttgcttcgactcggcctctttgctttttcccccacctctaacagccgccctggcctttcggttccttaaacttgccatgcgctttcccgcttcggggattttgcacaggctgtcccttctgcctgcaacatccttttacccattcggcttggctaactcccatttcatccttcgggtctcggcaccaacgtcacttcctctgcgaagccctccttccctgccctccatccagaaatccgcctgttaaatgcttttgtcggtccgtgttccttcatgtcacgtgtggtctaatttgttatccgactcttatctgtgtgctgttttatgatgtctatgaccgtgtgttccatgaaggtagggactaggtttgtctctgtcgccactgtgttctcagcacagcgccaatcacgccggagacgcccagctaatgttcgttgaaggaataaaagatactcctagagccagtttggggaaacagggtagtcatcagattcctaggtagcagtggggcagggtaccacttcttaacgagtacatcgagagggaaggggaaacagtgatactgttcatcatagcaaaaggctacacgcatcccaaatgttcttaaataagaagattggctgaaagaaactataatacatccacataaaaaatactatgcaactctaaaaaggaatgaggtagataaaaggaaatgatgaaaatctctatacactgatatagtggcctccaacatatattaagggaaaacaagtgaagtggaggttggtgtttattgtatatgctttttctttttttttttttttgagacagggtctcactctgtcgcccaggctggcacgatcccagttcactgcaacctccacctccctggttcaagtgattctcccaccccagcctctcgagtagctgggattacaaacgtgccccaccacacccaggtaatttttatatttttagtagagacggggtttctctgtgttggccaggctggtcttgaactcctga

SEQ ID NO: 21996 - DNA, 2300 bp, Homo sapien
cctcattcctttttagagttgcatagtattttttatgtggatgtattatagtttctttcagccaatcttcttatttaagaacatttgggatgcgtgtagccttttgctatgatgaacagtatcactgtttccccttccctctcgatgtactcgttaagaagtggtaccctgccccactgctacctaggaatctgatgactaccctgtttccccaaactggctctaggagtatcttttattccttcaacgaacattagctgggcgtctccggcgtgattggcgctgtgctgagaacacagtggcgacagagacaaacctagtccctaccttcatggaacacacggtcatagacatcataaaacagcacacagataagagtcggataacaaattagaccacacgtgacatgaaggaacacggaccgacaaaagcatttaacaggcggatttctggatggagggcagggaaggagggcttcgcagaggaagtgacgttggtgccgagacccgaaggatgaaatgggagttagccaagccgaatgggtaaaaggatgttgcaggcagaagggacagcctgtgcaaaatccccgaagcgggaaagcgcatggcaagtttaaggaaccgaaaggccagggcggctgttagaggtgggggaaaaagcaaagaggccgagtcgaagcaagcgaggtctgcggggcggtggcgcccggggggccacgttggaactttgcctcgagggcactagggagccaaggaagggtcctgagcaagggaagaaacatgggtcgcgaaagccactgttcccctctccccacggcgatgccctccccgcccgagcccctgcttctttaggagcctcctcctttcgtctccgggcccaaacgccgcctcccgctcaccgcagctctggcctccgttcccctcgcgccccctcagcagtgcctcttcctacactccgccgccgccgccgccgccatcttccgttcgtcgccgggaacggtgcgcacgcgccacacacccagggccgccgggaaatggagtccagagcacagcccgaccccgcccatgcctcgtcccgtgcgagcggcattctgcccgcctccatactacggcgagcagacccttcatttccggctctgggtccggctaggccttctgggaaatgtagtcccttcggaggcaccgggcggaaagggagctagagcattctgggaaatggagttctcagtggtgctgagtccctggacggctggctggtcttggagagtgcggagttcgggcagcgaagctcctgggtcttggaggggaggtggtctgttgccctagtggggtctgcggagaggccccgatcccctccatctttgttcttgaccctttcaacagtctgaagcatttctttttcttttcttttctttctttctttttttttggaaacggagtcccgctctctctcccaggctggactgcagtggcgcgatctcggctcactgcaacctccgcttcctaggttcaaacgattctcctgcctcagcctcccgaatagctgggataacaggcacgcaccatcacgcctagctagttgttgtatttttaatagagatggggtttcaccctgttggccaggctggtctcaaactcctgacctcaagtgattcgtccgcccgcctcggcctcctgcagtgctggaattacaggcgtgagccaccgcgcccggccaagttaagcatttctagccgtcggaagcctcagtcttcctgtctgtccaatggggatgtgatttcggggaccttttacgggtccttgtagtcgcatagtggccctagcgttctgattcccctttcttccgccacggtcatgcagggctctggctcttcgtcctctcctgccgagatgatgaagccccctgaggtagaaaggctccagagttctgacctcggggcccttggtatctgcagcgtcgctgcgggcagctccctcactcctgaatcacccccagctgtcgcgtcctggggctgcggcccccggcgcctgaggtctgtctcctggcgatcccgcagggggcgccccagtccgagcgcgccgccctcggggaggcgggaggggagcccggggcgggcgagggcgggggtgtcccggctataaagcgtggccgcctcccgcggcgctcgggacagccgtaccccgggcggtcggacgggcgggcgccggtgggagctcgggccgtgcccgctgagagatccagagcgctccgttcccccggggccggagcgggggcgggtgggggcgtaagcccgggggatg

SEQ ID NO: 21997 - DNA, 2300 bp, Homo sapien
gacttggggagtccctgcggagggtcatgggtagggatgggggggtggagatcggcccctctcctgccaatgctgatggctacatcttctgctcccagatgcccaactctaagccacctgttatttcagactccaaaaacgaagcttcatctctgagcacccccatctctgacccctgagcaccaatccctatgtctgaccctaccttagattaccagctgatccttagccccgaaccccggttctttaacactgtgtgctggccctgagctcccacctcagtcttccccttaatggtgactcctcctccatcttttagtctttctttccctccaactttgaacctcacatcctgaaaccccctagtctgtcccctaccctggaactctgattcctatctttggtttgtacatataaatcccttgctttttggggctccaacacccggctcccaagtttaaggtgtgacccgacccttggctaaattttcctgacttccatttttaagccctggccgcggcgaggctgcccaaacagcgctcccatccatgcctcgtccccggtccccgacttccacacctggtctccgtgttcccagttcctcagctgcccaagtagacgcctttgcctccatttgaacccacaaccagtccctgctccatgtgagcccacaccccgatacctgcccccaacttcccgctccgccatccccgaggacacacctcgcccgcctccgggtagtagctccactcggccaggtcatgggcctccatcttcactgagcccagcatcccccgggcttacgcccccacccgcccccgctccggccccgggggaacggagcgctctggatctctcagcgggcacggcccgagctcccaccggcgcccgcccgtccgaccgcccggggtacggctgtcccgagcgccgcgggaggcggccacgctttatagccgggacacccccgccctcgcccgccccgggctcccctcccgcctccccgagggcggcgcgctcggactggggcgccccctgcgggatcgccaggagacagacctcaggcgccgggggccgcagccccaggacgcgacagctgggggtgattcaggagtgagggagctgcccgcagcgacgctgcagataccaagggccccgaggtcagaactctggagcctttctacctcagggggcttcatcatctcggcaggagaggacgaagagccagagccctgcatgaccgtggcggaagaaaggggaatcagaacgctagggccactatgcgactacaaggacccgtaaaaggtccccgaaatcacatccccattggacagacaggaagactgaggcttccgacggctagaaatgcttaacttggccgggcgcggtggctcacgcctgtaattccagcactgcaggaggccgaggcgggcggacgaatcacttgaggtcaggagtttgagaccagcctggccaacagggtgaaaccccatctctattaaaaatacaacaactagctaggcgtgatggtgcgtgcctgttatcccagctattcgggaggctgaggcaggagaatcgtttgaacctaggaagcggaggttgcagtgagccgagatcgcgccactgcagtccagcctgggagagagagcgggactccgtttccaaaaaaaaagaaagaaagaaaagaaaagaaaaagaaatgcttcagactgttgaaagggtcaagaacaaagatggaggggatcggggcctctccgcagaccccactagggcaacagaccacctcccctccaagacccaggagcttcgctgcccgaactccgcactctccaagaccagccagccgtccagggactcagcaccactgagaactccatttcccagaatgctctagctccctttccgcccggtgcctccgaagggactacatttcccagaaggcctagccggacccagagccggaaatgaagggtctgctcgccgtagtatggaggcgggcagaatgccgctcgcacgggacgaggcatgggcggggtcgggctgtgctctggactccatttcccggcggccctgggtgtgtggcgcgtgcgcaccgttcccggcgacgaacggaagatggcggcggcggcggcggcggagtgtaggaagaggcactgctgagggggcgcgaggggaacggaggccagagctgcggtgagcgggaggcggcgtttgggcccggagacgaaaggaggaggctcctaaagaagcaggggctcgggcggggagggcatcgccgtggggagaggggaacagtggctttc

SEQ ID NO: 21998 - DNA, 2300 bp, Homo sapien
ccaaagtgctggaattacaggcatgagccactatggccaggaaagcttttcctgacacacattccccaccgcagtcatcacaaattttagttcatcatttgagtaaatttactatctgcctccatcaccaggctggggcttctcaggggcaaggcttaaagcctgtctcagtcactgctatgtccccagcattgcccagcatggaagaggggttgaatatttgaataactgtccagcttaaaaacaacttccatttgtggcacttattttctgtgccaggcaccaagctaagcatttatatgcatgtttgcattcaatctgaaggtacccaaataaaaggagactggagggggtctccattttttccaagaagtttagaaactggcccaaggccacagctggtcagaggccaatccagtccacctgaaggctgaatctggccagaagccttaactcccattagtgtttcgtaaataatagcccaaaggcaactttaagtgacatattaatgtcctcttgaatgagtcgatagttttcactaattttttttaaggtaaccacagtacatgaaacccatgattgtgaacgtattacctaggatgaggcaaaaatagataaatctttttatttttatttatttttttgagacaggatcttgctctgttgcccaggctggagtgcagtgacgcaatcatggttcactgtagcctgttatctccaggctcaagcaatcctcccacttcagcctgataaatcttttttttaagggagaaaagtgttcaaatacaggtagtagacaaaattgtgaaaccattttaaaattgtgaggtctgggtaacagaatcagagctgctgcggttccagtgggacgggaggagaagggacaagcagcccctcactagacaaaaccagggccaactggtacgtcattcaaatatttttgagcacctaacacggacccaggcctagagaaaggggctgttgtgggttggaacctggagacccgcctccgcccttccccaaagacagcctcgtccagttcccaatgcctgggaaagaagaagggtcctcacagcctgattgggccttccaggtagtgagcgctcaaggttggggaaaggttggtctggtgtttgcccttccccagcaactccctcctcttgcccgtcacttcttaaccccttactcttccctcaaactggggagcaacagaagataagggtcccccaaacgccacgctccgaatgcacgtaaagagcccccagaaaagtgggggggcggggggtagccgggaaagtagcgtgaatctggaaggcctccccaaacctcccagagggcggaagtgcgtcactatgtccgacccgcagtgcattttgggaattgtagtgaagcgggtgggggacgccgagcccccgatggtgtaaccctttagagaccagagcgcgcgggcagagctgggacagggttagagggcggccagtcgccccactcttttagcagagaaacaactgagacaaggctctggctcggaagcccttagtcctctcccttctctggctgtggcgggccccagaagcatatatctaggattccggggggaggacgaagtgccaggtggccacccccacccccacctagttgccagcttcccgtccctgctctgaagccaatcagggcttctccgccccgccccagaagctgctactttcctaatccgtcattggcccacctttgctgggcggggaaactgaggttcagagagggcaagacattttgcctaaagctgcacagcaaatccgagcagaagttggaagcccggaagcctgtccacccacccccacaatttctgaatccggagtagctctgatcatttgtattgcatcctcgcctaccacctttgtgtcccagcatcttgcggcgcgctgaactccggccccacggagaaggttgtaaggtttgcgccggcagaggcgacaacccccccagcccgcgtctgcccgccgttccctttaagagccggccccggcgggactacgtttcccagaaggctttgcaggcgtgttatgtaactttccctgcgaagcggcctctggggcagaagaaggaggtggaggcggcggcggccgttgcagcggcggcggcgagagcggcgggagcccgaggcggcggcgctcgcggcccatcgtggggcccgagctgtgcgcctcggctcggagcccggaccgggcgggggcgccgacgtgcctcagcctgccttcgcgagggaggcgggagtgagcagaaaggcttagggcccaggg

SEQ ID NO: 21999 - DNA, 2300 bp, Homo sapien
ctcctgacctcgtgatccacctgcctcggcctcccaaagtgctgggattacaggaatgagccactgcgcccggccttttttttaatttttttgagacagagtctcactctgtcgcccaggctggagtgcagtggtgagatctcggttccctgcaatctgtgcctcctaggctcaagagattctcctgcctcagcctcccgagtagctaggattacaggcacatggcacaacacccagctattttttttttttttgaatttttaatagagacagggttccaccatgttggccaggctggtctcgaactcctgacctcagatgatccacctgtctcagcctcccaaagtgttgggattacaggcgtgagccactgcacccagccttacattcaccacatcttacctgaccccacacccccaagtgagaacctgggccagagacttgggtttcacctagacatcttcctttccctcgctagcgcgacactcaccatgctttccatatattctctcaaatgtctctccgtgtcccccttgacactgtccctgtcttagtttagtctcccctcgctttcctaatccttttcttacccctgctcatgactttttttgactctacccagtagtcttgctccctcccacccaccctccacacagcaggcagaggggccttttttttctctctctcttcttttgagacagggtcttactctgttgcccaagctggagagcagtggcctgatcatagctcactgcagcctgcaactcctgggctcaagcgatcctcccgcctcagcctcccaagtagctgggactacaggcatgtattttttttttttttttttttgagacggagtctcactctgtcgtccaggtggagtgcagtggtgcaatctcagctcactgcaacctctgcctcccggggttaagcgattctcgtgcctcagcctcccgagtagctgggattacaggcatgcaccaccatgcccagctagtttttgtattttcagtagagatggggtttcactgtgttggccaggcttgtctcgaacccctgacctcaggtaatccgcccgccttggcttcccaaagtgctgggattacaggcgtgagctccaccgcgcccggcccaggctacggattttagcttttatgttcattgtaccaggaactgtgtaagtgctcatgtatatttattgagtcgatgaatgaagcaccaattgtcgaatgaccttgaggactcctgcaggatgctaacgaacacacttctcagccggactgagctccatcatcctgccatgcggctcaccccacctgcgttctggcttcattcctgtctccatgcacttgcttaaagtcgtgccggcgtcaggatctcccttcctaccagccaggaagctcttccctcttattttccccgctcctcgaggtaaaggtgcgcacagaggggcccccaaggcgtgactggaaggcttgtgggtcgctatggttactgcatccgcccggggcgggacatccccaggacgcccagcctctaggggtgcgaggtgggaagctctggagcggcccagcgcaggggcgggcaagccaggaggcaaagcggtttcctcacgcctccaccccacccacacagttgtcaaggagacaaagcgcttcccttcagcgctgtctccctcccctttggttagagggcagggtgggctggaagactgtccgaaaggttgggtactggcgcgctcccagcatctctcccatccaagctcgcaacgcctgcgccgagacccggtaccgggtacaacccgaggcacgcgcatgcgcgcgatggagtttttgcgcgtgcgccgttgtggccccaggaagctggggtacccgcgcggcgctaacgttgcggctgcgcagttgcggcctgctggtggggctcggcggagcgcagttctgcgcctgcgctgtgctggggtaggtgggaatgaaaccctggcggtaagggcattggggccgactggccctgggcgcgcctgcgccttggcatgcggggcggccggaggcggggccgaaagaggggagggagggaggcggggggtgggaacaggccgcagaagcccgagccctgacccaccggcggctgcggcggagccggtgagtgacccgtggcccgactcggtccccaccctccgcgaccttcgctctccctgccgtcccccgtagcctccgttgtctccttgtgatacgggacccccgttatttccagagctccccttaatttctggcaatccccagagcccccacaatcctcgcagaccc

SEQ ID NO: 22000 - DNA, 2300 bp, Homo sapien
cttggctctggggacaatgggggggaggggacagatgggtagccaccccatccaccccaggccatctgctaccctcccccatcctggggacctgagagcatggcaagggaggagcaggggggggttggagccgatccccctgccgcagatcacgcagtggccacaattacctgcatccagaccccttctgagcctaatcttgcctctgaccaacccaggaaggaaagattccttggaggttaagaacccagggagaaggaaattcttgcatcaaggaacacagaataatagcaatgatccattccaaagaaaggcaccctagttccaatgactttgggctctgaaattggacttgtcctgcgttctcatcccagtttctctctctcaagctgtgtgcccttgaagaagccaccctcaatgttcccaggcctccactttgtcatctgaaaacaaatttttcttaatgacatgagtagtaatactgtacaagggccaaggctgttttgttctctattgtatcgcagcatcagggacagtgcctggcacttagtaggtaggccctgagtgctgttgtttgaatggagagccagttgtgccccagggcaggtgctgcaggctgcaactccagctcagtgaattcaatcctctgagccctttcagcatcacggtgttgattcttcaaaggatggatgaaagatttgaaggggaatttcccagctgaaaggattgaaaaagagtgaagtgaaatttctttctctttctttctttcttttttttttttttttttgagacaaggttttgctctgtctcccaggctcgaatctagttgcttgatcatggctgactgcagcctcaaactcctgtgctcaagagatcctcccacctcagactccagagtacctggggctacaagcatgtgctaccacgcctggctaattaaaaaaaaaattttttttttgtagagatggggtctcacaatattgttgcccagctcgtctcaaactcctgggctcaagtgattcttccgcctcggcctcccaaagtgctgggatgacaggcatgaaccaccgcgcctagtcgaaatttcttgtcttgaccaagtgaagtcaaagtaagctcctaaggctgtttcctcatctgtaaaatagggataataagcgtaactcacagagctggtcgctctggggagtaaatgcgataacgtctgtgacgtgcttgcttggaaccggacctggcacacagtaagtgctcaataaacgttcattcaaggtgaggagtggggacggcttggaggagcccggggtcctcccagcagcctgggggagtcgggtccagctctctgccgccgggaggggcgtggccaacccagagggacgtggtccaggcttcaaggctggaccaatgggggcgccgaagggcgtggccctacccggcatgggcgtgacctcgttgggtgggaggggccaggcgctgtgggagcctccgggaagaagatgctcgggccagcagccaccgccagccccgtcgccgccgccgcccgcgcccgccgccccccgggcccccactagcggccgcctccgcctcccactccggccacgctcctccggccccccaccccgagcagggtctggggggctcggccctcttgccccagggagccaagaagaagcggggagtcccgtccccccagtggcgcgtccagtccccagcctctgtggtcccaggagagaccccacctctcagttctttcccggccctatcggagacccccctcggccctgccatcctgctcacggccgctctccaggctctgtcagccccccgagaaccggctcccccctacccccgccttccctctccggggctccccctcccccatccctccaccgccccctccccctcccacctcccctcccctccccctcccccgccccccgccccccgcccccccccaccatgaggatgatggccgccggcgcggtgcacggcctcttcacggcctccgcggccccgcagccgccgccgcccccgccgccgccgccgccgcaaccccagcctccccagcagccgtcgccgccgccacagcagccgccgccgccgccgccgcagccgccgcagcagcagcagccgccgccccaggccccccccatggagcccgaggccccggattcccgcaagaggcccctcgaaacgccccccgaggtggtctgcaccaagcgcagcaacacgggaggtgagaaagggctgcggctcggggcgggggagcgggcagggggcctcgcctttctccatcctttccc

SEQ ID NO: 22001 - DNA, 2300 bp, Homo sapien
aatgggcaatggatatgaacaggtaattgacaaaagagcaagcccaaatatagacagcaaatacagaaaaatacccagtctcctgagtgggtataaaaatgccaaaggagctgtcactttatacttataaatttaagaagtgataacactggccaggcaaggtggctcatgcctgtaatcccagcactttgggaggctgaggtgggtggatcacctgagctcaggagttcgagatcagcttggccaacatggcgaaaccccatctctactacaaatacaaaaattagccaggtgtggtggcacatgcctgtaatcccagctacctgggaggctgaggcaggagaatggcttgaacccaggaggtggaggtttacagtgagacaagatcgtgccactgcattccagcctgagtgacagagcgagactctgactcaaaaaaaaaaaaaaaaaagtgataacacccacttctggggtcggggtgaggaggctccaaaacattactggtgaaaaatatgaattattaatggctttttggggaaaatgatctggtaatattaattaaatatgtatactcattgacctaataactctgtgtttataatttacttataaatgcaccagtgcatagggatatatgtctgaaaatattttgcgtagtgtggagaaaatactggaaaaccttcaaaaactaaaagatccacaatgctgaactgatactatagcatattgtgcaactattataaagaataaattagaattagatgtactgccctggtgagatgcccatgaaatattaggtgacaaaaggtaaattgatgcacatggttttgatttttttttttaatgtccttatataagtttgtagggaggagaatacggtttataactctgcaggcagaaagcctgtagccaaaccctggcttcatcacctcctgtatgtgatcatccccccgggcctcagttccgtcaactgtaagaggggttaataataacatggatctggcaagcttgtcgttgagtatatgataatttctgaaaagtgctacagatgcctggtgcacaattcagtaacagcatgagtacaatgtatatgagaaggcagaacacagaagatgaaaacacaccacacaggtcaggcacggtggctcatgcctatagtaatcccagcactctggaacactggcaggtggctcacctgaggtcaggagttcgacaccagccaggccaacatggcaaaaccccgtctctaccaaaaatataaaaattagctgggcgtggtggtgtgcacttgtaatcccagctactcaggaggctgaggcaggagaatcacttgaagccaggaggcggaggttgcagtggcccaagatcgcaccattgcactccagcctgggtgacaagagcaaaactccatctcaaaaaaaaaaaaaaaaaaaaaggaaaatattatttataaaatagaaaattaaaaaaaaaattttaaatacacatttttaaaaaccacttgcaggctctcacacactgcatatccaggattcacatgcaggcagcctggctctagacgcggggctccagtgcctccggtgtctcagcccgtgacttccctgctctcaacctcagtttactccactgtgaaatggacttccagatactcacctcttgagtttgctgcaagcgtaaatggcatcaggcttggacctgggggaaggaagtgtttttaaaatgggtagctttgttacctcagtccttgcggggagaagatgtgccaatgccccgggcctctgcgatgtaagttcctgttgagttgttcaatgttccactgagaggagagacaagcaggaccgggatcccggccccgggtcttccagaaacggcggggcgaagcgcccaggggcctgtgcgtccctccctgctgagcgagggggcctgtcattgccgtgggcgtgacccagaccccaaccacagtgcatcccgccctggcccagccagagaaggaagctgagtctggggtctgctgggccagcaggaagtcccagcagggtgtgaagcaagactttccgggccactcctggaatcccccagcagataaaggcggcccctccaccgggcgctcctagcggtctcccggaccctgccgccctgccactatgtcccgccgctctatgctgcttgcctgggctctccccagcctccttcgactcggagcggctcaggagacagaagacccggcctgctgcagccccatagtgccccggaacgagtggaaggccctggcatcagagtgcgcccagcacctgagcctg

SEQ ID NO: 22002 - DNA, 2300 bp, Homo sapien
gtgttgactttgtattctacaaccatctaaatttacttattagttcccggagctttgggggtaggtttacggtaatggctctgccctactgccccggcgacctcaaacatctccacgtgggccacgttggtgaaattaactgtagctgatgtatgtcatggcagaacactctctggtcttcccagaacgtgaggtcatgggaggcttgtgggaagctgctacagcatcacttgtcactcacttccctatggataagggaggccgccatgacacagcttctcactgcctctggcttctagggagggatgaggctttctacctccctataccatggagccacaggctggattctctactcagcaacaggcatcctattattcttgttcagtcatctggcccttttgtttcagtgtcaccctgtataagggacatggtgctggcacctgtggctctttctttccctgtctgtgtaagtaataaagtgtctgaatctaaaaagagcttgtttttgtcactaacagaatctgtcagactcacctcttgcttgacagtgggttccgtgggattttctacatagatagttcaattatacagagatcaattctagtaatcagctttgggatttccctccttagtcacttgtactcttcattgcagctttccctttcaagtggtcataaatttcttggttgctggctcggagttataatgcggtattcacactacttaacttgataaacaggaatgtagttcttataggtctgtttccgcagcagctgttctgtgtaggtgagagaatgtgtctttacaggtgggatttctgtttggatgtgtgggaaaggagaaggcatattgataagcagacaaacagacatatctatgcaaatacgcaactgcagaaataggcgaggagagctagtttattgcatgaaatcaataccgaagacttggacatccagtcaagaaaggagaggccaggctggagtgcaaataagcacaacaacaacaaaatcaatgcactttgggaggctggggcaggtggattgcttgagctcaggattccaagaccagaacattgtaggaccctaactctatgaaaaatacaaaaaaattagccaggccaggaggtgcctgcctgtagtcccagctactcaagaggctgaggtgggaggatggcttcaacttggggggcaaaggttacagtgagcaaagatagcaccactgccctccagcctgggagacagagagatacggtgtctcaaaaaaaaaaaaaaaaaaagagagagaggagggaggaggaagagactctagagagtctatactaacaatgcacttttacaaagctctaatacctgtgccttatccttctttcaccctcccacccttctcactgtgacacagggaagaaaccagtggaaaatggaggggcatgctctaaaaatacgccacatgtaatcccatcacacagtgagacacacaggagcattttcttggacaaggcactccacaaaccaaaaaaaaaaaaaaggtgctgctttcctatctggaatcccagagatccatcctaccaccgcctatttttgttgttgttgttctccctggcacagttttgcagcccctgctgttcttctagattatgctgcaacttcacaaattctcctacgtgactctgaaaaattatagacagtgcaggtctgcaggtgaactgagacggggagtagagggactccttgaaacttcagggtggaggaatatggggagcctagagacagccggtgtttggtgagtaatttgatcttagataagcaagagttaaggaatatcttccaagtggttttcccttgggcggtgttcaaagaaagacactcagcagagtcaaagcttagataggttcctgggtagcctttaccctgaggatctgaagggtctgaggaggcagcaaccacttggaacaggtccagaagcatctcattaagcttttgatgaattatttatgttccctgcagctctttttgcctaactcttcccaagaaaccactccttctgcacacctccctaaatggcggtaagttcatatcctatataagcccctatgtaaagtcactgacccatttccactgctgctccctcgtccgctgctctgaagcctaacccatggtgcccagaatttctggtaaggagaccccagccctaggctaagctaatccctaatgatatcacatccctaattatttctgaacttcaaagttaattctctcttccctatttaattattggtgtcccacctcataatcactgct

SEQ ID NO: 22003 - DNA, 2300 bp, Homo sapien
acctagcttctgttcttttggtgctggaagcacaaagagggtgtgagattcctaacgttattgtgattatccatgggcttttcaaatatgtaaagcggattacctcaaaggccccctttggcttctttagagacacaaatgctgaggatctctcacctgagcatccctcgatgagggctgttgcgtcttgatttcatctgggtagttacaggcatcatccaccacgaagtttccaacccagagtcaggatgcagctgagcttgacgggcgtggtgcagacgtcggtgcagcgaaagctgaggagccgtgggcgttcacccgggtgccggtgtttctaaatcgcgggctgcgacctgcatactcaggtgccagctgggagcagaggcggatttgcgaggccaaaacctgggtgtgacttggaatctcagtcgcgctatgggggtgcacgctggctcaaatccccgtggaagatgcacctgtgacctgcccaggctgcaaaaccaggtgcgctgccatgggcacgactcactgggctccattttcaccacagggaacttggaccgcctgacattgaaaaagactgaggtagctcgggggcagccaaaagaaaccagaggcggggatcctagtatcattcaggaagtggacccagccgcaaactcaggagcgttccaagtgtccagagcgtctggtagtcgcaatagccagtgatcagtgacacccccaagaaagtgatagcgacagaaacatggcgactacttacactgccgcccccgtgcgcccctgcgcgagctctgctggaggcgcccgcgggagcgcctgcgggagcgctccactgcggaatccgccgctctcttctctgagcagtctcctactgccatctagggaggaatacggggataccggctggagtaccctctctatcttcttgcctgcaggggtcgcaggatagatgtttcgagagcctataaaagtcatacagtgctatggtgggtgcacgctaaacgtgcctttgacactgtgattaaatcacataacccatataaaaagtaattggaaaagacaacccccagaatggagagaatgtttaaaaatcgtatttctgataagagattaatatccagaatatataaataactcctgaactcaacaacgggaacaaataactcatttaagagacaagagaaggatttgaatagacatttctctaaataaaatacataaatggccaataattacatgaaaagatgcgcaacatcattgatcattagggaaatgcaaatcaaaataacatggagatagtacttcactccaactagcatggctattaacaaaaaaacagaaattaacaggtgtgggtaaagatgcggagaaattaacaggtgttgtgcattgctggtggtaatgtaaaatggttcagctgctgtggaaaacaatgggagtttctcaaaaaggtaaatatagaattaattaatatacgacccagcaatcccaatagtaggtatgtactccacacaattgaaatagggacgcaaaaagatatttgacatcaatgttcatatcagcattatttatagtagccgaaagatggaaataacccaagggtccatcgacagatgaatggataaacaaaatgaggtattttgatacaatggagctggctactaaccacctgctcctgtattacctaaaggccttcactccctaacccattggtcttttttgtccattattttttgtaggggttataacagcattcaagtgtggagtcaaggctcactttaaaatgcatcaaacatagctatgtatcaattcaccacagtccgtcaaaaggcctgtgacgcactctctctgggggtatttgagccgatatcccagtagtcaacactagatggcagtaggagactgctcagaaaatggagagcggcgcccaccttgcagtgcgcaggcgtcgtcagtagacatcgcgcaggcgtcgtcagtagacatcgcgcaggcgtcgtcagtagacatcgcgcaggcgtcgtcagtagacatcgcgcaggcgtcgtcagtagacatcgcgcaggcgtcgtcagtagacatcgcgcaggcgtcgtcagtagacatcgcgcaggcgtcgtcagtagacatcgcgcaggcgtcgtcagtagacatcgcgcaggcgtcgtcagtagacatcgcgcaggcgtcgtcagtagacatcgcgcaggcgtcgtcagtagacatcgcgcaggcgtcgtcagtagacatcgcgcaggcgtcgtcagtagacatcgcgcaggcgatgggtgaggcgg

SEQ ID NO: 22004 - DNA, 2300 bp, Homo sapien
ggcaatgactactgacaccaaggcagttactgcgacgaaaacatggcggccaaagccgcctcacccatcgcctgcgcgatgtctactgacgacgcctgcgcgatgtctactgacgacgcctgcgcgatgtctactgacgacgcctgcgcgatgtctactgacgacgcctgcgcgatgtctactgacgacgcctgcgcgatgtctactgacgacgcctgcgcgatgtctactgacgacgcctgcgcgatgtctactgacgacgcctgcgcgatgtctactgacgacgcctgcgcgatgtctactgacgacgcctgcgcgatgtctactgacgacgcctgcgcgatgtctactgacgacgcctgcgcgatgtctactgacgacgcctgcgcgatgtctactgacgacgcctgcgcactgcaaggtgggcgccgctctccattttctgagcagtctcctactgccatctagtgttgactactgggatatcggctcaaatacccccagagagagtgcgtcacaggccttttgacggactgtggtgaattgatacatagctatgtttgatgcattttaaagtgagccttgactccacacttgaatgctgttataacccctacaaaaaataatggacaaaaaagaccaatgggttagggagtgaaggcctttaggtaatacaggagcaggtggttagtagccagctccattgtatcaaaatacctcattttgtttatccattcatctgtcgatggacccttgggttatttccatctttcggctactataaataatgctgatatgaacattgatgtcaaatatctttttgcgtccctatttcaattgtgtggagtacatacctactattgggattgctgggtcgtatattaattaattctatatttacctttttgagaaactcccattgttttccacagcagctgaaccattttacattaccaccagcaatgcacaacacctgttaatttctccgcatctttacccacacctgttaatttctgtttttttgttaatagccatgctagttggagtgaagtactatctccatgttattttgatttgcatttccctaatgatcaatgatgttgcgcatcttttcatgtaattattggccatttatgtattttatttagagaaatgtctattcaaatccttctcttgtctcttaaatgagttatttgttcccgttgttgagttcaggagttatttatatattctggatattaatctcttatcagaaatacgatttttaaacattctctccattctgggggttgtcttttccaattactttttatatgggttatgtgatttaatcacagtgtcaaaggcacgtttagcgtgcacccaccatagcactgtatgacttttataggctctcgaaacatctatcctgcgacccctgcaggcaagaagatagagagggtactccagccggtatccccgtattcctccctagatggcagtaggagactgctcagagaagagagcggcggattccgcagtggagcgctcccgcaggcgctcccgcgggcgcctccagcagagctcgcgcaggggcgcacgggggcggcagtgtaagtagtcgccatgtttctgtcgctatcactttcttgggggtgtcactgatcactggctattgcgactaccagacgctctggacacttggaacgctcctgagtttgcggctgggtccacttcctgaatgatactaggatccccgcctctggtttcttttggctgcccccgagctacctcagtctttttcaatgtcaggcggtccaagttccctgtggtgaaaatggagcccagtgagtcgtgcccatggcagcgcacctggttttgcagcctgggcaggtcacaggtgcatcttccacggggatttgagccagcgtgcacccccatagcgcgactgagattccaagtcacacccaggttttggcctcgcaaatccgcctctgctcccagctggcacctgagtatgcaggtcgcagcccgcgatttagaaacaccggcacccgggtgaacgcccacggctcctcagctttcgctgcaccgacgtctgcaccacgcccgtcaagctcagctgcatcctgactctgggttggaaacttcgtggtggatgatgcctgtaactacccagatgaaatcaagacgcaacagccctcatcgagggatgctcaggtgagagatcctcagcatttgtgtctctaaagaagccaaagggggcctttgaggtaatccgctttacatatttgaaaagcccatggataatcacaataacg

SEQ ID NO: 22005 - DNA, 2300 bp, Homo sapien
acaaccctcatccaccatgaaaagtttctgactcaaatccaggctgcaatcgagctggcagaagtggtgcagactatgatgtagctaaagcagatgagtacctgccattcaggtacaggcgacgtacaggcgtttccaaagcgcctgaggcctggaaactcgggtggctggctgggggatcatggccaggggcaaagaacttctgagcccgtgtgacttgggtctcattcgggctataggggtgcaaacaggctccaatccgcgaggaggatgcactaaagtgacccgcttaggctgcaaaaccaggtgcaccatggtacgcacgactcgctgagctccattttctaggcggggaactcttgaggcctgacgcccacgaggggagcggcagcgacttgacgcacctcctgggcagccaaaacaaaccattgcagaggattcttgtcccacccaacgagcagccccagccatgaactctgcagcatcccaattgtccagaacgcccgaaactggcaatgactactgacaccaaggcagttactgcgacgaaaacatggcggccaaagccgcctcacccatcgcctgcgcgatgtctactgacgacgcctgcgcgatgtctactgacgacgcctgcgcgatgtctactgacgacgcctgcgcgatgtctactgacgacgcctgcgcgatgtctactgacgacgcctgcgcgatgtctactgacgacgcctgcgcgatgtctactgacgacgcctgcgcgatgtctactgacgacgcctgcgcgatgtctactgacgacgcctgcgcgatgtctactgacgacgcctgcgcgatgtctactgacgacgcctgcgcgatgtctactgacgacgcctgcgcgatgtctactgacgacgcctgcgcgatgtctactgacgacgcctgcgcactgcaaggtgggcgccgctctccattttctgagcagtctcctactgccatctagtgttgactactgggatatcggctcaaatacccccagagagagtgcgtcacaggccttttgacggactgtggtgaattgatacatagctatgtttgatgcattttaaagtgagccttgactccacacttgaatgctgttataacccctacaaaaaataatggacaaaaaagaccaatgggttagggagtgaaggcctttaggtaatacaggagcaggtggttagtagccagctccattgtatcaaaatacctcattttgtttatccattcatctgtcgatggacccttgggttatttccatctttcggctactataaataatgctgatatgaacattgatgtcaaatatctttttgcgtccctatttcaattgtgtggagtacatacctactattgggattgctgggtcgtatattaattaattctatatttacctttttgagaaactcccattgttttccacagcagctgaaccattttacattaccaccagcaatgcacaacacctgttaatttctccgcatctttacccacacctgttaatttctgtttttttgttaatagccatgctagttggagtgaagtactatctccatgttattttgatttgcatttccctaatgatcaatgatgttgcgcatcttttcatgtaattattggccatttatgtattttatttagagaaatgtctattcaaatccttctcttgtctcttaaatgagttatttgttcccgttgttgagttcaggagttatttatatattctggatattaatctcttatcagaaatacgatttttaaacattctctccattctgggggttgtcttttccaattactttttatatgggttatgtgatttaatcacagtgtcaaaggcacgtttagcgtgcacccaccatagcactgtatgacttttataggctctcgaaacatctatcctgcgacccctgcaggcaagaagatagagagggtactccagccggtatccccgtattcctccctagatggcagtaggagactgctcagagaagagagcggcggattccgcagtggagcgctcccgcaggcgctcccgcgggcgcctccagcagagctcgcgcaggggcgcacgggggcggcagtgtaagtagtcgccatgtttctgtcgctatcactttcttgggggtgtcactgatcactggctattgcgactaccagacgctctggacacttggaacgctcctgagtttgcggctgggtccacttcctgaatgatactaggatccccgcctctggtttcttttggctgcccccgagctacctcagtctttttcaatgtc

SEQ ID NO: 22006 - DNA, 2300 bp, Homo sapien
gattgcttatgtttcatgtgttgagtgtaactgtcattttaaatatcagaaaacaccatgatttggcttgtgtgttgtgtgtgcagaatgacacattaatagaagacgatgacgtaaatttactgttaatgaagcacatgctcattgttttaggaatgaacccaagtacatattttcttgcagatcaacaaccaagtgctttatggggcacaagaagataaagagatgaagagtatcacattttgtttctgagacaggcacagaaggattgcctagcacaaggaaaacaacataatgaaaggcagaaggagttgtcaaaatctctaggaatagatgaaagaaaattcaaagaaagaaggggctagtgtcaccagttcaatgataacttgcagtatgggtgtcagcagcttagaataaaaccaaactttgcatgaccaatgctgttggtagaactgagaatgatgttgtgtaagaaagcacaggaaccaatctggggttgaaagatgattcacaggaggcagtctccaaatgtggagacattttaagaaatctttaacagatttatttcccatatatttttatttttctattcgccttccaaaagtctacgtctcaacatgttgcaagaagctctgttaataaacattctaagtgatgagattgcatcttagagttgcaaaacaacagtgtatctttcaataacatcttagtgttaatgagatacaacataaggatttctctaaatgattatcattataaaatgcattaaaaattatcccttcaagctgccccttgccacttctgtaagatgaaaaattaagtacacattaacttcccaatgcccaatagtaaagctgaagtttcatttggaataagaatgataattgtatattaaagatattattatttgtcctttgtattttacctaatcaaactcaaacgtttctttttaacatttggtagtaaacaagctgacagcctgggctcactaggaatcttcacattgttggccttcttaggttccggggtaggggagagcagccttgtgcatccaaaccacaccccacacctccgcacatgtacaggaagctaagaatgaagctcagaaaaggagaaccatttcaaaggctatggtacaggctggatgaacttaagtcagcaactcttccctatgctgtgccagcaagtggaggatggaaagtctggccaatccttagacattttctgattgaatcatcacacatccatgaagactgaggtcctttccacagcttcgggattatttgaatttgtccaagcccttccctagctggcacttgcctggcaggcctcagtttgccctgcccttccctctgtctgcacacctaagtactacacactcctaagtactacatcacttatcattggccactaatataatatgattatgaaaagcaggtgtttagtactttccctgaccatgtaactaagatgctggaggtctctgaatcctcacaccaagcacaccaggagatttgggccattgctattctccacccctaccccctttattggagtttccagagccgtggctcaactgctagagcaggtggcaactctaatgactccagagcaaaaaataaagtggcttcataaacggtccccttgacatttccagagacatcgtgcttggggaatatagaagaagcaagtattaggaaggggaggatgtgaaaccagatggggaagtggctgaagcattctctctgattggagcttagttgggcactgtctcctcaatgtcggagcttgaaaactcttagaagcctaacttggagtaggaccaacctacactcattcaccctgaggtctgcaatagtatatggagaatgcaatgagtcagtctgcaacattcggctctgtggtcccttacgccacccagtctcctccttaaagaaactaatgaatgtgcttgggagactttggttatcttcaaggaatgtgcttgggagactgcaggtggcatgatcagcagccatccaatcagtaaacttaccaggttaacagacaaccccatttaggctgtctccataagttccagccttttaccactcttcttcaattctcctagagcatctttggaagcatgaggccacgatgctgcatcttgggcaagtaggaccccaaatccaaacatcatctcatctcattcccagtgcagctcccaaacctcaacccgatttattcctctttatctctaacattattccagcctcctgtgccctactagtcacctcaaagggtgactgagcgtgctgctc

SEQ ID NO: 22007 - DNA, 2300 bp, Homo sapien
tctagtagatgggagatagtatctcactggttttaatttgtagttccagtatggctaatggtgttgaacaacttttcatgtgcttatttgctatctgtatgtcctcttttgtaaagcatctgttcagatattttgccgatgcttaatgattttgtttgttgtttcactttgagttttgagagtttttcatatactctggattcaagtcctatgttagagatgtgattcacagacactttctgcagttggtagcctgtctgttgcttcacttaacaatttgttcatcaagtttaactttaaaattttgataagtccaatctgtttttaaaaaatggataatgcttttgatgtcttttcccagatataaatgttttctctgatgccttctccttgaaatacgtagttttacttttcatatctagaccatttggagttaacttttgtatagagtgtgagctttggtagaagtcttctttttttttttcatatgcatgcccattgtctcacaccatttgttgaaatgactatcttttcccccattgaattgcctttacatctttgccaaaagacaatttactatatttgtttgggtttatttctggaacctattctgttcctttgatctatgtgtctatccatgtctatccatttgccaatactacactgttgtcattactgtagcttgagtaattgtgaaattggatagtgtgagtcctctaccatctttcctcatccaaaattgtgttggccattctagtttccattgcttttctatataaattctagagttattttgtttctctctcagacaaatcctgcttgggtttgattggaattgtgttaaatctgtagataatttggaaagaattggcatcttacctaaattacagattccaaaccacgacatgatataccactctgtatttaaggtttccttgaatactttaatcgtacacatcctttatatgttctcctagatttacagtataccagttcagtttttggggaggggggtattgtaaatggcattttttttctttaaattattgtatccactagttcttgccagtataaaggaatacaattgacttctgtgtgtttcatacgctacaacctttctaaattcacttatcaggtccagaactcttctactaacaatgcacttttataaagccctaacacctctcctgatctctgtctcaccctcccacctatctcactgtgggatgggaaggaagtcaatggaaaacacaggagcgcattctaataatagcccacatggtatccagtgacacaaataatagtgatggtgacaataaaataacagtaagaaacacagaaggagcgtttccttggacaaagcactccagaaacaacaacaaaaaggggctgcctttccatctattctatgaatcccagatgtctattttatcactgtctgttccttttctgttctccctggcagggtttttacagcccctgctctttttctagattatgctgcatcttcacagtttcccctaaatgactctgaagaattatagacagtgctgtctacaattataataatggatatggtggtccatttccaagacaaagtacctcagataggctgaggcccacaaactatggaaggacagaatatactaggcccatagctggtgcatgcttgtcggggtccccttagttaccctctcccaaaccagagtttagtctagaatgaaagtttactagccagcaaaatagctcactttatctattcttatcagcttgcctgactgcctaggtcataagtcaaatacttgaaaagccctcgagctggctttgattgcaatgtattataggctgcaacaaaatgcagtgagacaatcctaaagaaaacacctaaaagcctcaacccagcaaccaataggcgacgtctgggaagatcgtgaccccatcgtacttagcctacgaggaaccaggggagagacttgtgcactaggggataaatagcttgttgtaaccgtactgggtgtgcctgcctaccagacattcaatcttgcaagaccatcattaaaagtcttgcttccactgttttctgtgtctctgagtccattctttgggtttggacgggtgcgtttgtttctcatagtgcaggtctggagccggactgagatggggagtagagggaccccttgaaacttcagggtggatgaatatgaagtttcatcaccagctgtgatgtttggtgagtagtatgctctcagataagtgagagccaaggaatctctttcaagtctctttgccgtgggcagagt

SEQ ID NO: 22008 - DNA, 2300 bp, Homo sapien
gtagaagtcttctttttttttttcatatgcatgcccattgtctcacaccatttgttgaaatgactatcttttcccccattgaattgcctttacatctttgccaaaagacaatttactatatttgtttgggtttatttctggaacctattctgttcctttgatctatgtgtctatccatgtctatccatttgccaatactacactgttgtcattactgtagcttgagtaattgtgaaattggatagtgtgagtcctctaccatctttcctcatccaaaattgtgttggccattctagtttccattgcttttctatataaattctagagttattttgtttctctctcagacaaatcctgcttgggtttgattggaattgtgttaaatctgtagataatttggaaagaattggcatcttacctaaattacagattccaaaccacgacatgatataccactctgtatttaaggtttccttgaatactttaatcgtacacatcctttatatgttctcctagatttacagtataccagttcagtttttggggaggggggtattgtaaatggcattttttttctttaaattattgtatccactagttcttgccagtataaaggaatacaattgacttctgtgtgtttcatacgctacaacctttctaaattcacttatcaggtccagaactcttctactaacaatgcacttttataaagccctaacacctctcctgatctctgtctcaccctcccacctatctcactgtgggatgggaaggaagtcaatggaaaacacaggagcgcattctaataatagcccacatggtatccagtgacacaaataatagtgatggtgacaataaaataacagtaagaaacacagaaggagcgtttccttggacaaagcactccagaaacaacaacaaaaaggggctgcctttccatctattctatgaatcccagatgtctattttatcactgtctgttccttttctgttctccctggcagggtttttacagcccctgctctttttctagattatgctgcatcttcacagtttcccctaaatgactctgaagaattatagacagtgctgtctacaattataataatggatatggtggtccatttccaagacaaagtacctcagataggctgaggcccacaaactatggaaggacagaatatactaggcccatagctggtgcatgcttgtcggggtccccttagttaccctctcccaaaccagagtttagtctagaatgaaagtttactagccagcaaaatagctcactttatctattcttatcagcttgcctgactgcctaggtcataagtcaaatacttgaaaagccctcgagctggctttgattgcaatgtattataggctgcaacaaaatgcagtgagacaatcctaaagaaaacacctaaaagcctcaacccagcaaccaataggcgacgtctgggaagatcgtgaccccatcgtacttagcctacgaggaaccaggggagagacttgtgcactaggggataaatagcttgttgtaaccgtactgggtgtgcctgcctaccagacattcaatcttgcaagaccatcattaaaagtcttgcttccactgttttctgtgtctctgagtccattctttgggtttggacgggtgcgtttgtttctcatagtgcaggtctggagccggactgagatggggagtagagggaccccttgaaacttcagggtggatgaatatgaagtttcatcaccagctgtgatgtttggtgagtagtatgctctcagataagtgagagccaaggaatctctttcaagtctctttgccgtgggcagagttcaaagaatgacactcactcacggctttgaaaggttctagggaagcctttactctgagatttcgagaggtctgagaaggtagcagtcacttggaacaggtccaggaacatcttactaagctgttgatgcagttttttcttatgctttctgtggcttctcatgccccaccctttccaagaggccagtgcttctgggcacctccctaaatgtggataagttcatagcctacataagtccctgtataaagtcactgacccatttgcactgctgctgtcccatcagctgctctgaagctccatggtgcccagaatcttcggtaaggtaacccttgccccaggttgagctaatgcctactgttatccctaatgtacctctgaacctcaaacttaattctctcttccctatttaattcttggtttcccacctcataatcacccgtgtcctctctgactgcattgcaa

SEQ ID NO: 22009 - DNA, 2300 bp, Homo sapien
caggagatataggttttgcagacactaaaagaataatagtggaaaactaggaataactctacacaatttgacaacttagatgaaatggaccacccatttaaaagcacaaatgatcacaacacacccaatatgaaatacatcattttagtagccttataactattaaggaaatagaattcagaatttaaaatatctcctaaaaaggaaatctccaagcccagatggttgcacctgagaatctaacaaatgtttaaaaagaaattgacaccaattctgcacaatctcatccagagaatagaataggagggaattcaattcatttcataaaatcagagttattttgctactaaaatcataaaaagacaaacaagaacaatgacaacaacaaagcaatgaaactatagaccaatatccttcatgcaaaaatccttgacaaaatatttgtaaattaaattcagcaatataaaaaaatacttacacatcatgcctatgtagggcttattccagaatgtaagcctggcagaatatttcaaaaatcactctcagtgtaatccatcatattaacatgctaaagaagaaaaatgacatgatcacatcaattgatgctgaaaaagcatctgataaaatttaacacccattcgtgattttaaaaactcccagaaaaacaggaatagggggaatttcctcaactcgataaagtccatctacaaaaaccctacaactaatataataagtaatggtgaaaaagtgaatgctttccacctaagactgagcaaaggagaggaagtctgctttcaccattcttattcagtgtattgctggacattctaaccagggcaataagtcaaggaaaaaaagaattacaatttatacagattggaaaggaagcaataaaactgttcctatatttgtaggccacacaactgtctatgtaaacagtcccaaggaatctaaaaatgtactcctataactaataagtgagtttagcaaggtttcagaatgcaagatcaacatagaaaaaatcaatcgtgtttctttataccaataatgaacatgtggacattgaaattaataacaaaatagcacctgcaattgttcaaaaatgaaaaagttaggtgtaaatctaacaaaacatgtacaggacttatatgctgaaaattacaaaatgctcctgaaagaaataaatggagagacatgccattttcatggattgtaaaactcaactagtaaagatgttagttccccccaaattgattgcaatttatattttattttattttgagacagagtgtcactctgtcacctagacaggagtgcagtggcgcgatcttggctcactgcaaacctccgcctcccgggttcaagtgattctcctgcctcaggccccctagtagctgggattacaggtgcgcactaccatgcctggctaatttttttgtatttttagtagagatggggtttcaccctgttagccaggacggtcttgatctcctgacctcgtgatccacccaccttggcctcccaaagtgctaggattacaggtgtgagccaccacgcccggcctgattgcaatttctatcaaaatcccagcaagattttatttttgggggggcgggtgggtatagacaagattctatatttatatggaaaggcagaggaactagaatagctaaaacagttttgacacttgtaccttttcttgttaatttcatgtacaacttttcttgaataaccaagctggcaggtgaggctcatcaagaatatccagattcttgatcttcttaggctttgtaaaggaggccaatacccttcaacgtgcatgggaggctaagaatggagcttgggagagaagagccctccctaaggttactgatgcggtcaggatgattaggagtaagggctcccccacaagttgtggcagcaggtgggggatggagtgtcagatcagttgtcatcactgagggctggcttccttactgcccgggtcctgccagatctgctgccttcctcataggcattggtttaccttgtgattttgtttatctgggctgcactctcaggtgctgtatcacatatcatctgccacttactattattactattattacaatctgcactctagaaccacatgccctttggatcctcacaacaactccatgaaaaaatcgcagctgtcactcttctctggttctcttttggagtttatggtgcctgtgcacttctgctagatcacgtgaaaactgtggatatgactccaaatagttctccagggagtaaacaaagtggtttggggcatcatc

SEQ ID NO: 22010 - DNA, 2300 bp, Homo sapien
ttcactatctgcctaaaataatttcttcttaactcctatattaccgggtcctattcaggttataaaatttatttcatgctgggcacggtggctcacgcctgtaatcccagcactttgggaggccaaggcaggtggatcacctgaggtcaggagtttgagaacagcatggccaacatggcaaaatcccgtctatactaaaactacaaaaaaaaaaaaaaatacctgagtgtggtggcaggtacctgtaatcccagctacttgggaggctgaggcaggagaagcgcttgaatccgggaggcagaggttgcagtgagccgagatcgtgccactgcactccagcctgcgcgacagagtgagactgtctcaaaaacaaacaaaaaacaaaacaacaacttatttcatatacacgagcacctgtgtgtcatttctcctgaagtccattacaattccctgagggatttttcccagcaagcagcaggagctgctaaaaccccatatcaaaattcccgaagcagccgcctgtgcattccacatcccaaagctgcccactctgtgttgtcactgtttagggacagtggacctagagctgtttgaggacagggagcagggctgcatcactcactgccatgtccctagttattgggaaccctgtctctttccagggtcacaggattctcatggcttcctgggaaataacagtaaactccaacatctgttggtcatattttctcaccctattccctctatgtaaagagcaccctggcatgaggggcccctgcaggtcacagacaccatctagactggacccaggtacccctgtctcagcccagcaaccccccccagtcccaggcccagctcgtccagaaaggcaagcaggccctgatcccaggcacccgggggctggcctcagggaagactttcccacaaccccagctgctggtgggagacctgagcttctggaacgtggcacacaggagagcactggctgtcctcctttcatgggcttcccctctggaacaagcacggaaagggctgaatcatcattctggtggcatccgggtatgatttccacctggcctcagggagcctctcccaggtgacagacaggaatctggtgaaatttcagatgttcaaaaataatgttagggctgggatcggagactcatgcctgtaatcctagcactttgggaggccgagacgggtggatcacctgaggtcaggagtttgagaccagcctgaccaacaaagtgaaaccctgtctctactaaaaatacaaaaattagctgggtgtggtggcatgcacctgtaatcccagctactcgggaggctgagatagcagaattgcttgaacctggaaggcagaggttacagtgagtcgagattgcaccactgcactccagcctgggcaacagagtgagactctctcaaacaaaaacaaaaacaaaaacaaaaaaacccagaatgctaggaatgcagatgtcactgagggagaggactgggcctcaccagtgcctgagggcccatcctctgatatctgcctgggtggctggagtgctctgtgttccatctgcacacttcaagcttgcaagctggtccctgctacctgcaacaagaacttgggtgccagtccctggatggctgaactggatcccttcctgcttaaatgctctacagcagcagcaaaaactgtaagaaaccactgaaattcaaatcaggagaacaaagcagctctagtgcagctggccaactgtaccggggtgttggccaactctctggtgtcaggcctctgagcccaagctaagccatcataacccctgtgacctgcacgtatacatctagagggcctggagcaactgaagaaccacaaaagatgacattccatcattgtgatttgctcctgccccaccccaactaatccatcaaccttgtgacattcctcccctagacaatgagtctcatgatctccccaccctgcaccttgtgatccccatccctgcccacaagagataaccacctttaactgtaattttccactacctacccaaatcctataaaactgctgtacccctatctccctttgctgactctcttttcagattcagcccagttgcacccaagtaaaataaacagtcttgttgctcacacaaagcctgttggtggactctcttcatatggactcatgtgacatttggtgccgaagacctgagacaggaggactcctttgggagaccggtcccctgtcctcgccctctctccatgagatccacccatgacctcgggtcctcagcccagccgaagga

SEQ ID NO: 22011 - DNA, 2300 bp, Homo sapien
tgtacgacaagaacattcaatttttggatattgtcagcttcccagcccttcctcagtcacatccagtgcacatctgggcataccatgtgctttctgtcttggcagcagaaggacattcaaactggtctcccggggctcaggagcactgcccagggcagatagagtctcccatgcctgccccacttgcaccacagctgaggactcagcagtgagctctgggttttagatgtggtggacacgccctgggctagtgtggcaggacaccccctctaggagggatgggaatgaggccagggctgtcctgggcagtttctctttagctcaaggtgttgcattctctcggaggaatagaaaccaagcttgggcactttcaggcagttcctccttactcaggatggtgcattcttatataatttggctctgtcttgccacacaaatctcatctcacattgtaatccccatgtgtcaggggaaggatctggtaggtgattggatcatgggggcagttttttccatgctgttctcctgatagtgggggagttctcaggagatctgatggtttaaaagtgtgtagaagttcccggctcgctctctttctctcctgccaccatggaaggcgtgccttgcttttccttcaccctccagcatgattgtacatttcctgaggccaccttggcgtgcagaactatgagtcaattaaacctctttcctttataaattacccagtctcaggtagttttttttagcagtgtgaaaatggactaatacacatttctactgtattctacagtgattctgggaactgtgggcaagaagagaggcgggaaagccagagccatccaatgcttgtcttctggtgccctcctccaggaagccattcctggtgccctgggcgctgctcccagccttgctcaccctgggtcatcaccgtttttggaggggtctgtgtcctccccagactataagacccagaaaagcagggcctggagctaagtcacagtcgtgtccccagcatccactgacacagagtaagtgcatagtgtgtgctaaatgaatgaaagaaaagtgaaagcatgatgaaagccctgtgttcagggtgtgtctcactcaacctgtctgtcctgtcatggtgacttggtgagaattgttgcctgaaggtctttaaagctctctcccttccagggcttccgcatggagctgcttctcagctgtgccctatggggtcagatgcactggggaagaactaaggctcttctccacagcccaccttttgtccccttagccctcccaacataggacacaccatgtccagggctgcaggagcccaggctgtcaacagcatcagcatcctgctagaagagggtagggatggctggtactcagaagagccttctagattcctaagtttattaatcctttcactgcaactactaagaaaaataggtgtgacattattactgggttacacacagtcacacacacacacaaaaagcgaaagcaaaaattgtcaagaatatgtcagcttccctcaggggagtggcttcttcaactttgatcccaaatgacttatttcagaggaaacctctcccctctcctcagaacaaacacattcacacaggaagggattaaattcctgcaaagaagaagaaggaaaaccttccactggtcctttggtcttaactatcctgggccataatgtatttgagagtccagtaatgactgtggatttttttgctcaaaatatcacagatgattgccaaacattgtgaaatgccattgaattgcacacttgaaaacacacacatacacatgaaaacttaagtaaacgcatatacttaattgtgggggctgcagggggggagcggaaagaaacatccagacatctggtggtaaatattctgctctggttcagctaaaaataaagccctttatcagtttggtcactggaaggacttgttcccttcttgttgatgatcagaaaccttagcaggaactaattctcaagtgtctgccttaacagaaaagccacaaagaaacatggtaagagcgtggcagataacatccacggtgctatcgggaggtgacaggtgactgacctcagccttggtgttcaagaagattccagaaggtgggtgacatttaagggaaaaatgaaaaatgaagagggatgggagaattggaggcagaagccagagagacattgtggttcttccaaggaactgtgctaagtcgagggcagtgagagccagggaaggtgtattaatcagggttctctagagggacacaattaatagggttct

SEQ ID NO: 22012 - DNA, 2300 bp, Homo sapien
ggcccaggatgggtgccaggggtctggaggacatgagtggatgaaggccctgggcttcagcttcctcttggtggaatgtgggtgatgaggtccgaccatgcagcgctgctgtgaggaccggatgagaggatccctgggaggtggccggtgacttggtaccgtcacctcagtgactgttcttcatcctcatggatgttcagagaagactggttcattccctctggtggccgtctgtccaccagacaggaccgatacatcctctgaaaatttcatcactttaggcaatagcactttcattcttttccagttcatctgatgccatttaaatcgacctggtgattctgggaagcccgggattcctgtccctttgaggagacgccaggtgccatctgtgtgcatgcgtggcatttgggcgggaacccagagccccgactctgggcttgttgaactcaggtccaaggagggattcactacgttggtgtaaggtgcggtctgtgtttcagattcttgtgccagatgaggtgatgctttgatgtcaatacctcgcgttgggggaaggtggaggatctggaccagtggtgtaggaggccaggatggggcgggacccagacacatgaggattccgggtttcagaaggacggagctgagcaaggccactcggcgcacgcgcggtgccttgagcgcctacatccagatgtgcatcttccgtggggccgtcccggggcggggtctgagctgggagacctgcctctctcctgctctcctagagtcacttaaaactttttagttttccgtttaaatgaccaaatgagatcatttcatggggtggtggggggagtggaggcagggagagtcacaaacagaaagcggccaagacagctgtgggagagggaaggggaagatggggtgagtggacagccacagatacgactggcactgacatttagaagaagattgggtggaaccagggctcggtatggctttgggcagttcagaaactgaaacagggctgtggatggggctgacccgggcgctgtggatggggaattgctgtgagcaattcacgcctggagatttggctgggcatgggaacaagaatgagggaacagggagtttggggtggggagcgagccctggtggtggctgagatgggagatgggttcggttgggaatggggtcctcccctccttacccagaacacggcttcggggagccattgctctggggcggctgcagcggagtgagctggtgatcagccgatctcagccactccttgtatcccatattcctagaggagctggtgatgtcacggcatgtctggccctcctgcagagacaggctgggtcgctgggcagtaaaggagccaggcagggtatgtgtcatagtagatttgatctcagacactttgagaacccagggagaagtggtgcaccctccgcttctgtgtcctacatgccccctctttggcaaacaggaaggtgcagcatgctcctatagttaccgccctcccccactcacacagccacacagtgattccacaggatcccattgagctatgactttctccactttccttggtacattgctaacccctgacatcctctaatcaggtcctaacttcacaacccaagcccatggcccaggatgcagtaactgctcactcacctgcagctcatggcattcgggtgggagagactgtgcgactcaggcacctgactttcacaggtttggaaggtgggagtggagctggcgggacccctgggactcacactcctctgggggctcttcaactccttctctgtttcattaatggtcatttatccaggagaggtccacttggaagcccacatgtcccaggctttgtgtcagacactggtgatgcagtgctgagtagaaaatgcaaagtcagtgtcttcgtgacgttcatgacagtgagaggagagagagagagagagagagagaaggtaggagaataaaactcctgattttggttattgtcgttcttgtgtttggtgtcattgtcactgtgaagttctggtggtggagaaattccacagccctcctgagattttcaaggacatttttccttaacgtgctttttcagagggtcgggtgtgtgatttccccacagaagagccatcttggggtcaggacgaaaaaacagaggggaagaagctgtcttgggtcagttctgtgggcccctcccagcttctgcaggatttcctcagtttgtgagttcacaggccacacctggtatggacaagccattctccccagggttattcccagcaggggatgta

SEQ ID NO: 22013 - DNA, 2300 bp, Homo sapien
tcccagaaaatgcctggaaccaaggacctgagaactctacccctttatggaagacatcaaaggggagacatgtcagtggctcttagagaagaaggagatgatcctggaggcttctgtgctcccaagtgtcctcaccatttggctgtgactccctccagaaactagatatctagttctagatatgtgctatgctatcatataataatatcatacgatagaacaatataataatattctatcattacttggaatatacacagtcccaataagagggtcctaaacaggctgggcgcagtggctcacacctgtaatcacagcactttgggaggctgaggtgagcagatcacttgcggtcagaagttcaagaccagcctggcaaatacggtaaaaccccatctctatggagaatacacaaattagccgggtgtgttggcgggcatctgtaatcccagctactcagagactgaggcaggagaatcacttgaacctggcaggcagaggttgcagtgagccaagatcgtgcaactgcactccagcctgggcaactgaacaaggcttcatctcaaaaaaataaataattttttttaaagtgtcataaacagttgagcacagcattctgttgaatgcacactgtcccattttctaacccatttcttcacttaaaaataacattgtttatgcccaagtaaattgattttccatgctactagcacatcctaatctgtgtcctagaaaacactgctgtaccccacagcagcaaggaacagaggccaagggagcagacagggagatggtgctggaagcagggtctgctctgtcgagggagaaggtgggtgctgagcactctggtatttattgaagtcatttctctgcagcctcttcctgtgtctcctgcctccagagagaagcccctatccgtgctccccaggaacacagatgcaggatcttccacacacacaaatctaaccacatccatgccctgctaggagccagccatggtgcctagagggtgacaggtcaccttgcctggcccggaggagaacggcttgtccatgccatgtgtggcctgtgagcttgagcggaggaattcctgcagaagctgggcaggggtaggggggcacagaactgacccaaaacagctccttcccctctgtcctcacatcctgaccccaagatggctcttctcagggaaaatcacaacccaaccctctgaaaaagcacattaaggaaaaacacctttgagaatctcagggggggatgtggaatttctccaccagaacttcacagtgataatgacaccaaacacaagaacgacaataaccaaaatcaggagttttattctcctaccttctctctctctctctctcctctcactgtcatgaacgtcacgaagacactgactttgcgttttctactcagcactgcatcactggtgtctgacacgaagcctgggacatgtaggctcccaagtggacctgtcctgggtaaatgaccattaatgagacagagaaggagatgaagagcccccagaggagtgttgagtcccaggggtcccgccagctccactcccaccttccaaacctgtgaaagtcaggtgcctgagtcacacagtctctcccacctgaatgccatgagctgcaggtgactgagaagttactggattcttgaccatgtgtttcggttgtgaggttgggacctaatgggaccctttgaaatgatgtcatgggttagcaatgtcccaaggaaactgaggaaagtcatagctcagtaggatcctgtggaatcgctgtgtggacatgtgagtgtcggagagtgttaatgccaggagcatcctgaaccttcctattttccagaggactcagtgtgggggacgattggggcacatagcacagagaaggtggagggtgtaccgcttctctcctgattacaaaggtgagatcaaagctacaatgacacgtaccctgcctggcacctctcctgcccaaggacccagcctgtctctgcaggacttgcaggagggcaggaaatgccatgacatcaccagctccactagaaatatgggataaaaggagtggctgagatctgctgatcccctcctcactccactgcaaccacccagagccatggctccccgaggctgcatcgtaggtaaggaggacaggaccccattcccacctgagcccatctccaatctcagccaccaccagggctctctccctaccccaaactacacctcatccctgttcccatgcccagccaaatctccaggcgtgaattgctcacagcaattccccatccat

SEQ ID NO: 22014 - DNA, 2300 bp, Homo sapien
ctctaagaacaatgcttcctctgcagccccttctactatttatttatttatttatttatttagagacagagtcttactctgtcactcaggctggagtgcaatggcatgatcttggctcactgcaacctctgcctcctgggttcaagcgattctcctgcctcagcctcccgagtagctgggattacaagggtgtgccaccacacccggctaatttttgtatttttagtagagatggggtttcaccatgttggccaggctggtcttgaactcctgacctcaggtgatctgcccgcctcagcctcccaaagtgctgggattacagtcgtgagccaccatggccggcccccctttataattcagactgctccttttctaacatcccacctgcctctacactgagggttgaaagctgatttctctatcaagattcttttgggtgcaagtatctaaaatccattcaaacgaatctaagcacaaagcaaataaggcaatagtgaatgaagcaatatttgacaaaagcaacagcaaaaaaaaaaaaaaaaaaaaaaaaaagcccattgtgggtttcatttgaaaaatccaagaattaaactggagttcaggtatggctggatccaggcactcaagtgctggtgtcaaaactgcctttcacaatcgttcatttctgcacaatctcttttgcactgaacctcatctcataaagcctctcctctctttgtggcagtgtgagccccatctgctccatctgcccagcaattccagcagacatagaaaatcctctttcctaatggtttcagcaaatgtctcagggttgattctcattgggctaaattaggtaacatgccttccctgaaccaatcactgtggccagggaagcagactcaactgattagccaggtttggatcctatgtccatccctggagctggtgaaggcagagcagtggccaagccctattcaaattaaatagatgaagaggacagagaagtggtttcccaaaagaaaacagagtggggaactggcgtgagccggggagccgtgtggattcctggaggaagagtgtgctaagctgtgggaacagcaagtgcaaaggccctaaggtgagcaacttgcctggcaagttcaaggttcaacaaggccacttctgctgtagtatcctcttccctgccaaccaaatccagaatagtggtccaacacacacacacacacacacacacacacacactctgttccttatccaactgtaatgctttcacccttgcttggtacctttgtacttctcccttcatagtcgactagttaaaaaaaaatacatttctcggctcttttttgaagtaggtgtgattgagttaaaacatatttacttgacataagcttaattattcatcaatgggaacctgaaaagggagtcagagaggccaagaggttagggtggagtagagggggtagggaaggtaagctggggtgcagagggtgcagactggaggaatgggggcgaagtggggtatgggactggggtggcagggaggggctggggagagagagagaagggtaggtgccagagggccaaggattgtggaactggggtggggttgggagttggggggtggggaggagatgtggggtactctgtgaataccttagaagggatagagaaggcagggctaggggtttggaaggggtgggattggaggtcagaggggctcaactggggttaggaaatggaaaggtgagaagaggtgggggttagaggctggggactggggtccagagagcagagtgaactgagtgggttcagaagagtactggcgttggcacttcagaggctggactagagaaggcgcgttcagccgacggtgcgggatacactgccgaggaagtccgcggcgaggggcgtggttggggggtgtgtattacacggtatcccccccttgcctttccaagtctttccctctggttccgcctccttttcaggagtgacataccgttgcccaatcagagcctcaggcctggcgtggcacagccaaccgcgcggcgtggggaggagctggggagggggctcgcaaggccggggagggggctaggggcctccgagggctccggagcggcgactggcgagccatggcgctggggctgcagcgcgcaaggtactgaagttcgggggcaggagttctgggaattggggggctctcctcctggagacccctgagctggattgttggggggggtggggttcgcgggtgcgagccaagaacgccccggggcgcgcagttggaggcacatccccaccgcactctccac

SEQ ID NO: 22015 - DNA, 2300 bp, Homo sapien
gagttaaaacatatttacttgacataagcttaattattcatcaatgggaacctgaaaagggagtcagagaggccaagaggttagggtggagtagagggggtagggaaggtaagctggggtgcagagggtgcagactggaggaatgggggcgaagtggggtatgggactggggtggcagggaggggctggggagagagagagaagggtaggtgccagagggccaaggattgtggaactggggtggggttgggagttggggggtggggaggagatgtggggtactctgtgaataccttagaagggatagagaaggcagggctaggggtttggaaggggtgggattggaggtcagaggggctcaactggggttaggaaatggaaaggtgagaagaggtgggggttagaggctggggactggggtccagagagcagagtgaactgagtgggttcagaagagtactggcgttggcacttcagaggctggactagagaaggcgcgttcagccgacggtgcgggatacactgccgaggaagtccgcggcgaggggcgtggttggggggtgtgtattacacggtatcccccccttgcctttccaagtctttccctctggttccgcctccttttcaggagtgacataccgttgcccaatcagagcctcaggcctggcgtggcacagccaaccgcgcggcgtggggaggagctggggagggggctcgcaaggccggggagggggctaggggcctccgagggctccggagcggcgactggcgagccatggcgctggggctgcagcgcgcaaggtactgaagttcgggggcaggagttctgggaattggggggctctcctcctggagacccctgagctggattgttggggggggtggggttcgcgggtgcgagccaagaacgccccggggcgcgcagttggaggcacatccccaccgcactctccacccttagggactgcaggggtgggggattccctacgtctctggctgccccgcccctctggccaagagcggcttcggggttcccgatttctcgctacccaaggctcatttaccctcctggttgggggtggaacttgggattcctgataaattaggggtgattgcatttgagcagtccccaggcttctgcgggagatattcgccctccacatattgatccctctggcctctgaaccccccaaaattgagggtattctttgccaccaggtgcctgggatcctaggtgatatgggatacccctaaatggagccttcccacatatagggagtcccttggaatggcattcagctcctgagttcaagagaggagagatctcctctaatagtatgcttcctgacacagtctcctaaacattgggtttccctagaaatgggcagaggggagcccctttcagaagccgtctgggacccttcccaagagactttttgtatcctttcaaaagccagagtcacccccttaaataacagggaaacaagctggacccacttcccaaagtccagcccctcatctcacccctgcacccccatcctgagagacaggggagcctcatccaagctttattttggggagactccatggcagggtgctgtgagcctgcaggctgtgatgggaacgccccctgccgcagtactcagatggggtcatcccgggcagagggtgggtttctgggttcacttgcccagcaggtgcagctctgctggaacacaggggaacctgtgccctggggccgctgccggggggttttatctggccatgttcccatgggaccctggaaaatgttctaggtcctcagctttccctgtccaatgtgaggcacccagtaagcctcacccccttccctcctccctggcttctcaggcctgattggatccatgcacaccccatgtttctaaccgcccccatcctctcccctgtcccctactctattccaggccctggctctgggcctaacaaggaactctatcccaccccttttgggccagctgtcgttccgcccctctcagcgccccctcctggctgggtgggggcccctcttggctgagctcgggtgccccccctccccacccaaggccggccctttcctgtggagtcatctcaccgccgtgcgcacccactcgtaactcgcacccgggtcctggctgcaccgcatcccctcctgcaccccctggatggcccttcagccaacgggggcctgggcgatggtgagtgggcccccaacacctcctttcccccttcccttcctctagctggggctggctgccatcccactgtggccaaggatgctcttg

SEQ ID NO: 22016 - DNA, 2300 bp, Homo sapien
gcccccctccgccgggcatggtggctcacgcctgtaatcccagcactttgggaggctgaggtgggcagatcacttgaggtcaagagttcgagagcagcctggccaacatagcgaaaccccgtctctactaaaaatacaaaaattagccgggcgtggtggcagatgtctgtaatcccagctactcgggaggctgaggcaggagaattgaacccggcaggcggaggctgcagtgagccaagatcgtgccattatactccagcctggctgacacagtgaaactccgtctcaaaaaaaaaaaaaaattaaaaattaaaaattaaaaaataaataaaaaatgaaatggctccctcctaggggtcccctgaggattggatgaatacatgtagaatatatagtacagtggcaagcacataaatgcttagcaaatgacagctgcctattactaatagtaatatttatcaatataaatgtagatgagactatatataccatatactacactagattatatatacaatatagtagatgtaacacatcatataataattttttattttgcctatttttgttaatttgttttttgtcttttttttgttttttatttgtttgttttgagacggagtctcactctgtcgcccaggctggagtatagtggcgcgatcttggctcactgcaacctccacctcccaggttcaagcgattctcctgcctcagcctttcaagtagctaggactacaaggtgcccaccaccacgcccagctaattttttgtatttttagtagagacagggtttcaccatgttagccaggatggcctcgatctcctgacctcgtgatccgcccgcctcggcctcccaaagtgctgggattacaggcgtgagccactgcgcccggcctgttttttgtctttttttagagacggagccttgctgtgtcacccaggctggagtgcaggggcacaatcatggctcactgtaacctcaaacctgggttcaagtgatcctctgtctcaccctcccaaattatagccgcttccggctataattttgtatgaaagaggccaggcgtggtggcttacacctgtaatcccagaatttggggaggccaaggtgggaggatcacttgagttcaggagttcaagaccagcctgggcaacaaaatgacacactgtctctacaaaaaatacaaaaattagctgggcgtgctgatacgcacctgtggtcccagctacataagaggctgaggctggaggatggctttagcctaggatactgagtctgcagtgagccatattcatgccattgcactccagcctgggcaacagagcgacagcctgtctcaaaagaaaagaaagaaaagaaaagagaaactttgggttcagaaagacctggagtttgaatttgaagacagtggcagaaacagggagaagagctaaaattctggacataaatccaggcccatagagatagagaaaatttgagaatttaggtagaccattgtttaaaggcaggcttccctatttgtgggcaggcactgcacctctctgagcctcggtgtcctcatctgttcaatgggacgttatcaacttccttctgggtggcctgagcattaggcgggttaatataagtttcgcacttggcactgggagtgacaaaatagtaaaagctggataagtggcagatatttctgataaaacgacacttattcttccaaccccacatgcaaaatgtaggtatctgaagtggattacagggcagggtgagtggtaaacagaacaggttgctttgctgtgtcaccctggcgggtccctgcccctcttagggcccctgttggtggttcatcgttagactttgagatctatgttccaagattcacaggacggctcagttgagggaaaagggcagaggaggtgattctgggaaactgcagggcagggggcctgggaggctgtaggcctctccttcgtgggccctccctcctctggcccctggccagctcagccagccccctcccagcaggggccctccctgtcccccaggcgtccctagcctgggaaataaactgcagataagtcagggaggggacagagcggccctaggcgcgccacagagaggagcgaggcgccagaggcaccatggactggcaagaccacaggtaaaatcagggctaggaagggctccacagtgtagcccttccaggcccagggagcgccgcgaactcgacagggccacacatcgaggcctgcgcagccgcggcccagcactccacgagccccggccccacgtggcagctccccacgtg

SEQ ID NO: 22017 - DNA, 2300 bp, Homo sapien
ataagtggcagatatttctgataaaacgacacttattcttccaaccccacatgcaaaatgtaggtatctgaagtggattacagggcagggtgagtggtaaacagaacaggttgctttgctgtgtcaccctggcgggtccctgcccctcttagggcccctgttggtggttcatcgttagactttgagatctatgttccaagattcacaggacggctcagttgagggaaaagggcagaggaggtgattctgggaaactgcagggcagggggcctgggaggctgtaggcctctccttcgtgggccctccctcctctggcccctggccagctcagccagccccctcccagcaggggccctccctgtcccccaggcgtccctagcctgggaaataaactgcagataagtcagggaggggacagagcggccctaggcgcgccacagagaggagcgaggcgccagaggcaccatggactggcaagaccacaggtaaaatcagggctaggaagggctccacagtgtagcccttccaggcccagggagcgccgcgaactcgacagggccacacatcgaggcctgcgcagccgcggcccagcactccacgagccccggccccacgtggcagctccccacgtgctcgtcccgtcctccttttctctttcccgagtcaccaccagtgaatgctgcccatgccctcaggtcgaccacggagctgcgcaaggaaaagtcccgggatgcggcccgcagccggcgcagccaggagaccgaggtgctgtaccagctggctcacacgctgcccttcgcccgcggcgtcagcgcccacctggacaaggcctctatcatgcgcctcaccatcagctacctgcgcatgcaccgcctctgcgccgcaggtgagccccgcccgcgggaattcccgtcttggtcaggccccgcccacggaaaaaaactacatcccagggaggcccctcctccgggaagccttattctgacaaagccccgccccctggtgtcgtttttttcggcggagccccacccccctggaatcgacttccccggggaggccccgccccctttgagttcctggcctgctgggagtcccgcccccctcgaagtctatcacttgtgaggccccgcccctggaacgcgccctttggaagccccgcctccttaggactcagaaaatccgctaacccttcaactcttacgatttggtcctctaggagactctcccagatggataggccctggtctctcataatatatccactgggaggctgcgccgcccaacttttcgttactgtatctgagagtcccttgtcccttccccacccctctagttctacatcacttgttctcttagtaggcatctccttgaatttctacccagttagaattgcatcctgcagcgggctttgccacgcacgtgcacgcgcgcgtgcacacacacacatacactcacacataaaccccgtggaatcccaggaccctgaaagcgggggaagtagcgttattctctgggaggctctgtccatttgacttccctgccccatagaattttacttttcttggaggctttacccccttagaagtctgttccctgggagtcccttcttctctagagttctgtccctctggaaggtcctgccctccatgagtttgaaccccttcgaggcttccccctcatctctatattacaattccccttaggccctggccccttcatattttgaccctggggagttccatccacttagaattctgtcctcctaggaggcccacccacatccttagaattctgttcccttgggagactcctacttccttagaattctgccaccctgggaggccctgcttctaattccagtgcttcttggtcctgctttcttccttgggaatccaggccactaggatgtacccccacttccttgggggtgcatgtaagtttctctgaatgaggaaaggcagagggaggctagcccagggtcagtccataattcagaccataactgactagagatgcccccatccccctgccccgggcaccaggggagtggaaccaggtgggagcagggggagaaccactggatgcctgctacctgaaggccctggagggcttcgtcatggtgctcaccgccgagggagacatggcttacctgtcggagaatgtcagcaaacacctgggcctcagtcaggtgagaggagctccttgctctgtgcctggccctgtactggtgatgctggggatacagtggtgaccaggacagccatagccctacctttatgggactcacaatacaaagggga

SEQ ID NO: 22018 - DNA, 2300 bp, Homo sapien
gctgtcgtgcagtggcgcgatctcggctcactgcagcctccgcctcctaggttcaagcaattctcctgcctcaacctccctaataactgggactataggtgcgcaccatcatgcccagctaaatttttgtatttctggtagtgacggggttttgccatgttggccaggctggtcttgaacttctgacctcaagtgatctgcctgctttggcctcccaaagtgcttcgattacaggcatgagctaccatacccagcccactttgagtatttgtgatggagtgaatataaaagtactactctgtgtcaggctccctgacaaatgctgtactcatgttgtcgaactctcctctaatcctgtatgatggggataattattatccccactttacagaggttgaaactgaggcttagaagagggtgatcacttgcccaaggtcacagtgtcaggaaggattccgctggactcgaaaccagaattcaaatccactatggcagctccttttcccccaaccccaaaacaaacaatacgaacaaacaaaagaaaaatttactaacccaccaagatgggctctggcacctacagaggcagtagagtggcaatgaaggacataggaattagatgggattcctgatcctggctctgtcaccttcttatgttgttgtgaccttcgtcaaacacctctgcaagtctgtgtctttatctgtaaaatggagatgatactaatatctgccctttagggtgattgttggttgtgctgggggccagtaggagagatggggttggactaacaagaggtttgggagtgggatagataggtttaggagtgtgcttccaggaggggatccagagccttacaggacttagtgctacatgagggcttagaaaggacagactggaagcgtgtacggcgggtggggattggcaaaggggtggaatctggatattagactattcagcctgaggttaagactattcagggtctcctaatcaggagtttgggttttctcctaagggtgctggggccatggaagcctgggagcgagagtgtgccatggttttatcatgtcttagaaagatccctcggccgggcacggtggctcacgcctgtaatcccagcactttgggaggccgaggcgggcggatagcttgaggtcggcagttcgaggccagcctggccaacgtggtgaaacccgtttctactaaaatacaaaaattagccgggcatggtggcgggcgcctgtaatcccagctacttgggaggctgaggcagaagaatcgcttaaaccgggaggcggaggttgcagtgagcctagatggcgccactgcactccagcctgggcgacagagggagactccctctcaaaaaaaaaaaaaaaaaaaaaaaaatgtgaagggtaaactggagggaggcagagtgcatgcaatcaatgctgtgatctcagacaagagaatctgtaaaaacacaaacaggagagtttatttgaagattcaggatttgggaagctgaacacaggaagaaaggagatggtgcaacacacttctaagccttgctcaggacttgaaatccagagtgccttcagttaaaaactcaaacactgaccctcaaggttggaccctttttggcttgagaaaccactaatttttcagagatgggtaactgagaccctagagaggaagggaagatttgttcaaggtcacacaggtagtcgacaatagggctcgacgcccgggtccggctccgcgtagggcatggcgctgccttgcaaaacagccacacccgccagcgacattcacaacccaccccccaaccctagaggacagcggggaaatcccactttcagaaccgagaaactttttacagccttggaacacggtaactttgggaggagaggccacaccaggtctgtttccccgcgcgccccttctctcattccctattggctctctctaccaggggtaccgtctggggaacctctggtcaccttgtcctccgcgcgctctgtggcgaaagggacctgcgcaggcgcgtgaagggcgccttcagggcccgcgctttacgacacttgtgcggcagcggcggcggccacccggcgctccttcgcgacggttcggccgggtgccgctggcggccgttgccagggtaggggtcgctttgcggcatggcgatggcggagggcgagaggactgagtgtgctgagcccccccgggacgaacccccggctgatggagctctgaagcgggcagaggagctcaagactcaggccaatgactacttcaaaggtgcgcccgcctggcaggg

SEQ ID NO: 22019 - DNA, 2300 bp, Homo sapien
ctttgctggatgtagagttctaggttgacattgtttctttcaaggctttaaatgtgtttttttcccattgccttttgacctccattgtttctgtgagaactcagcaatcattcatatctttgttctatatagtctgcttttttcttcactggttttaagatgttgcctttgggttttagtagtttgactatgatgggctttgatgtgctttttttgagtctgtgggttaatatctttcattagttttggaaagttcttagccattatttcttatatttcttcccatttctgctctcctctccgtctggaaagctaataacatgctctttgatactatttgatactattccttagatcttaatgacctgaatttttttaattcttttcacgatttttcctctatgtatttcagttcagataatttcagttgtccttatgttcactgattctttgtaactgctgtcaagcccaacaaatgaattatttatttcttacattgtattttttattggtagcattttcatttagttgtgttttttttaatagacttttcatctctgtgtctcatgtgttcatgcatgttgtccaccttttccaccaagtcctttcacacatttaccatggttatcttaacgtctctgtctgatagttccatcatctggttcatctctgagtctgctctgttaccagttcttcatgtgttttacaattttattgtatgccagctattttgtataaaagaacattagagactgaggtaaataaagtttttcctcagaaaatggcacacttaggctgggcaccatggctcaggcctgtaatcctagcactttgggaggccaaggtgggcagatcgcttgagcccagtagttcaagaccagcctgggcaacttgtagaaaccccacctctacaaaaaaaatacaaaaattagccaggcatggtggttggcacctgtagtcctagctacttgggaggctgagtggggaggatcacctgaacctgggaggttgaggctgcagtgaactgtgttcgagccactgcactccagcctgggtgacagagtgagaccctgtcttaaaacaaataaacaaataagaaaatggcacacatttctcctgttgagccacaagagggaggggctgtgtgaacctcatctgtagtttaggggcagcttttattggagtttctttaccaccggctttaaatgtgttcagagtagaattaggactttcccttcagcagagcttgggatcttagccctggcagaattccagggatgtctttatgttttaaagtcgccagcttttggaactgtgggaggcctctggtattcagccctgccgccagactgtggggccactggggtgctctccgctctccagtctcgcccccacttctgtacctcaggaggtttctctgcacctcactccctcgcgcccaaccttccatgaagcccgtgtgagggagttggcagggggcagaggcgggctgtgctggggctccctggagtcctcatctgtcacgccagtccccacacggtcatgaacttccactcatttcccctcacgcagggcatcccgccctgctgcctcgcaccagggtgaaagctgtgggctccttccccaaggaagggctcgtcctgtctgcattttgattaatttaggtccctttgcattgccagctctcagatggctttacctttgattttgttgcttgtttggcttgttttcatctttagggcgagacagtcttttgtaacttttctaccttctgactagaagtggatgccgcctgcattttcttaacacctttttccccagcttattttggaaatcgtcagacctacagagagctgaaagaacagtacagttaacatctgtccacccttcacacagattcaccacttgtgaacattttaatgcattaactttatgtgtctgtctacttatttatgcatttgtatgtgtatacttttttcttttttttcccctaacccatttgaaagtaagttgcagccatcataacctggatctcccaaaaacaaagacgtcctcttgtgtgaccacagttgaattgtcctaccttagaaattcatcattgatgtgataatactgactaaggtagacagtccacaggccatccggaaaatctggaaacattgacaaatatgcatgtcattgtcaaggtcatatccaatctgtgaaaaataaatcatctgcatttctagacatctattagtattttaattctccccagctctccccaaaacatcctttttagctgcttttaaaaaattcag

SEQ ID NO: 22020 - DNA, 2300 bp, Homo sapien
attacaggcacgtgccaccatgcccggctaatttttttgtatttttagtggagacggggtttcaccatgttggccaggctggtgttacactcctgacctcgtgatctgcccgccgcggcctcccaaaatgctgagattacaggcgtgagccaccacacccggtggagaaatcttaaaaagaccgctaacaaaaatgctttgaggccgggcgcagtggctcacacctgtaatcccagcactttgggcagccgaggcgggcagatcacttgaggtcaggagttcgagaccagcctgactaacatggggaaaccccgtctctactaaaaatacaaaaattagctgggcgtggtggcacacgcctgtaatcccagctacttacgaggcttgaacccaggagggggaggggaggcttcagtgagcgagattgcgccactgcactccaacctgggcgacagagcaagactccatctcaggaaaaaaaaaaaaaaaaaaaaaaaaaaagctttgagaatgcacagctctgggggaagtcatgagttttctcttcaggggtaaggttagggaacacccatgtactaaaaagggaaaaatcagattaaccagcaggataaattcttgccatcataaaatttttgtttgctaaaaggggtcaaaagcttttccccaaatattattttagcatttggcatcaaaggttttattatctcccaccgaatatgctctatcctccttcctagttgtgtgtcctcaggtatattgctgcttctgtgcctcagtttcctcatctgtaaaatggggctgttgcgaggacccaaagtgcctgtaaactgcctgacacataaagtgctcaatgctactgcaaactggctcagggcacagactctgcagccagtcagctggtgctcaagtcccgttctgccatttgctggctgtgtgactctgagcatgtaacttaacctctctgtacttcttatcttgcttatctgtaaaatgggcatctgaaaagtgtctgactcactgagttagaatgaaatgttaatgcgtgtaaactcttagaacagagccaaggggccgggcatggaaaatcaccctgctgctcttcgactcatctgagatgggtgcccaccctgcccctcctggtcccctcaggttttaactgcttccacccattttccagtgtccaaattcctcaacctgtttccccccatccgctggaccacggagatgagagccatgggagggtgtgggcagagggaaccatgggcccagtttctccatctgtggtgctggccgggaggggaggggtggtggcctctgtccctctggctgccaagcaactgacaccccccacaggtgggaggcaggggccccacccggtgctatggaggttaggtcatctttctgccttccctggtggccagagcttgggtctgtgatctaatcatggccattgacagatgggggtggggaaagacagcgtgaaagggtccaagagaacgacagggagacagaactcgggtccttcctgccttggagtctctgttccatccagctgggcagatgcctgggtccatcctggtcgatggggtggggagcacctaagacccccgctccccccggttctctggtcttcccttcacagcttcctttgtcagtggcgaggcttcttaggacccctaattcatgtccatgactcctgggagtccacatctgctcctgccagaccctgagactccccagcagcctctgacaccattgcttagtgtccacacctgcccccagcccccagcatctcccccacctccgtgtgcctggcacgtccccagcgtgatgaccctgatccaaactgtaactagagtggtgtcccctattttagcagactcctgtgctcaagcgatccacatgactcggcctccccaagtgctgggatcacaggcgtgagcccccgtgcccggccagccctggatgttcatcacctgcgtctatgggcatctctccgtcacactcccttttggaagttactgtttctttttggtcaattcattgcctctaacttcagagccctactcacgtgtatttatcccccttgattccccaaaacttatcggcttacccagaccttcccccattaaatgctttccctccctcccatggcccttccgttttcccgagcccagctctgtggcgttgatctgctcaaagttttggtacttgtggtgggtgtgcctgagtctctttgttctgactttactgagacattgatcgccgtaaaggtcccatctcttgcagcatcttctgaa

SEQ ID NO: 22021 - DNA, 2300 bp, Homo sapien
gagccacggcgcccagcctgagatggagaattttcaaaagagtagagacagatcggacctaagtttttaaaagatgcccccagcttctggatggggcctggattgcaagcagtgatggggaggcgggaagcccagtgagggggctttgtacacatccaggcaagagtggctgcaagtattgtggctgctaagtggttaaatggtgcaacacatttaggagaaggggattagctgtgtctttagcgtcagctagtgttttaaatgctagtgcccaagatctggttctaatattatattagatccaccactcagagctgtgcaacttcagaccagcctcagtttcaccgtctgtaaaaagatgattgatggcactggccttaccatgtacctctgagggttcctaacaacgaggcctattcaacatgtctctggatgcctggttccaaagatgtggaccaatgctagtcgcatgtcctgtagcaggaggagccacggacaaaacccctcagacactgggttaaggaaggatttggctttttcggccgggagcttcggcagactcgcctctcaactggcgggagcttcggtagactcgcgtctcaagaaccgagctcccggccgaatgcgactagcattggttcacatcttgattcttttttttctttctttctttctttttttttttttgagacggagtcttgctctgtcgtccaggctggagtgcagtggtgcgatcgcggctcactgcaacctccgcctcccgggttcaagagattcttctgcctcagcctcccgagtagctgggactacaggcacgtaccaccacgcgcggctaatttttttgcatttttagtagagacagggtttcaccgcgttagccaggatggtcttgtcttgatctcctgacctcgtgatctgcccgcctcagcctcccaaagggctgggattacaggcgtgagccaccgcgcctggccatcttgactctttggtcgacacaaaaggcagactattctggattcaaatccaaactcaaccactccccatggctgtgaccttgagagtgtggttttatgtccttgggcctcagtttcctcagctgtctaatgggaattgtactcatgctaccagtctcctgttatagcaaggatttcctgagttcattcatagaaagcactgggaatggtgcctactacataggaagcgcctcataaaccgtgcctatccttagccatctcattcttttttcgaagttgcaaaatatttcactgtaagatactaccataaaatagaggcagtctctactcgtgaacttttagggttttttgttgttgtttatttgtaggggtttttttgcacttttgtttttttgagacagtctccctctgttgcgcaggccggagtgcagtggcgcgatctctgcaacctccacctcccaggttcacgccattctcctgcctcagcctctcgcgtagcttgggactacgcacgcgcaccaccacacccggggtagagacgagggtttcaccatgttgggcaggctggtctcgaactcctggcctcaagtgttccacccacctgggcctcccaaagtgctggcattacaggcatgagccaccgcgcctggccatgaacatttgggtttattcatcccctcaaaaatatgtattgagccctgacctgccaagcgccacagtgggactgttgcagtcaggtacccatttctctacccacgcatataggtgtacgggtaccgatagtcgcgtgaatttaaaatgctaatctgtggtgccagtggctctcaaaaagtagaatccactagcacacccacctcccggacttggctggaaacttgcacatttcggatggcaggtttgggaaccgctgcctttcaggaaaggtgctgacgtgggccactgccgcttcgctgggaagcaatgggcccagctaggcccggggcgcggccacacccctgtgggggaggggaaggaggccgccccgaagggagtggacagcccccctgtcagtcttccagagtctgggagtgtaagatgagacgggggaaggtgggcctcattctggcggagggcgaggaggaacttcctgcccgcgcgctccacggtgcagagctctaagcgcgcgggctggcaggctgcggcgcgtcaaggtcagcctggagctgggtggcggcctgcctgggggcgggggaccctactggaggcccgggctggggcctcccagcgcctcggccatattgaatagcttcgactggaccgtctttgtctgcgaagtcctgtcccaag

SEQ ID NO: 22022 - DNA, 2300 bp, Homo sapien
agcaggatgttgataagatggttccatgatgaggcggttctggcccttgttctggtggaatgtggtgttctctgcactttctcccagcagaatatgatagggatgtttcttcagttgggcctttgcacgatagggtatgataatgtttctttagctgggcctttgtccgccttgtggtcaggtgattaggcaggatgtttctcattggcccgaacccccgtggaatatttcactttgaccaagatctgcaaaatagtcagggcttacaaaatggttgcagtttggactaacacttctctgtaggggcagtcactgagctgtaacattgtcccctgcctggaggatgccaagaacctgccctgaatcacgttgaggaaacaagaaaaggcgaggcattatcctcatgctagaaggggtcggggaggagactaagaaatttctagaagtttctggaaattcctggaagaacccagcagcttgtaagagagaaggctacaagcccaacaggaactgcacctgctgttggaggaacccaagaagattaaagcctcgttttcctcctttcttgatttctagtgtctcccaagagttgcgttgggtgaatccaacaggtggggcagaggataatacagtcagtgggtgcagccataggtgttggcgcttctcatcgacctaacccccgttcgcgaggcccacttgggttgaaagagggcctccgtggaggcgccaccggagtgtatccagacccgcttgctctgcgacctgaacaggccactcttgcacccggctccctaggtccaattgcagcgccggcgcgccggccgggctcagccctagcaacccacgcccggttgccatggagacgtcggcacctgcgcagcccaagacccccgagcggcggtgcgggagccagtgcgcaggcgcgcgctgcgacgccaacctcggcttctcgccgctaacggcatcgagtctggacgccccgtgacccgcctgggccggagcgggggcggacggcgccttcttggccctttctgcctctagcagcggcgccggggtagccggagccagcgactgggaaacggctgcattccactgcgtctccttggcctggctgggcggtcggaggctgatctgccaagtaagtcccggctgggcaggcggagcgtcaggcccgggggagggtcctagggccttttgctgcagattcagggacacgtgtgagcaccggggcctgggttggggaggagggtgttgggaaagcgccaggcctcctgcaggccagccgcggagggggcagctaggatctgtgagcttggtcatcttcctgggaacgtgacctcgctcccttgtcaccttgcaggattactgtttggagaccgctgcagcccacgtccacctgatagactatttactacacatagtaggttcagagccgctaaatgtccaagaccatggcgatgaaccttctggaggattggtgcaggggaatggaagtggacatccacaggtccttgttggtcacaggcatcccagaggactgtgggcaggcagaaattgaggagaccttgaatggggtcctctccccactgggcccgtaccgcgtgctcaacaagatttttgtgagggaagagaatgttaaagctgccctcattgaggttggtgaaggtgtgaatctgagcaccatcccccgtgaattcccaggaaggggtggtgtctggagagtggtctgtagagaccctacccaggatgccgagtttttaaaaaatctgaatgaattcctggatgccgaggggcgcacctgggaggatgtggtccgcctgctccagctcaaccaccccaccctgtcccagaaccagcatcagcccccagagaactgggcagaagctctgggggtgcttctgggagcagtggtgcagatcatcttctgcatggatgccgagatccgcagccgggaggaagccagggcccaggaggccgctgaattcgaggagatggcagcctgggctttagcagcagggaggaaggtgaagaaagaaccggggcttgcagcagaggtgggttctgccttaaaggcagagacccccaacaactggaatgccacggaagaccagcatgagcctaccaaacctttggttcgcagggctggagctaagtctcgctccaggagaaagaagcagaagaagaactccaggcaggaagcagtgccctggaaaaaacccaaaggcatcaattccaacagcacagctaacttggaggatcctgaggtgggtgatgctgaaagcatggcgatctcagagccg

SEQ ID NO: 22023 - DNA, 2300 bp, Homo sapien
ggtctcgaactccccagctcaagtgatccgccctcctcagcctcccaaagtgttgggattacatgcgtgagccacagcactgggcattaataaactattaacaaagttcttgctcatgggcagcaaggttgaggtaggaggcccaggggactccactgaggatcacattgaagactggccaaaacctggaaaaggcaccgaaagcctctctccataagacatgcctgccagcaccatgacagtttaccattgccatggcaacacccataagttactgccaatttgctaattctgaaaacccaccccttaattagcacgtcattaaaagtgggtataaatgtgactgcagccttgccccgaggtgctattctcagcacactgcctagagggtagccctccttgttaggttttggagggaaggtgagggttaaagacacacagacagaaggcggctcaacagcaactcaggtatactgcagacacctgtggaagtgggtaaccagcctaatgccagagcccactgctgcttataggctgggggtacttatagttatgggtgggaggggtctgagcagtatggtttgctgcccagcaggatgttgataagatggttccatgatgaggcggttctggcccttgttctggtggaatgtggtgttctctgcactttctcccagcagaatatgatagggatgtttcttcagttgggcctttgcacgatagggtatgataatgtttctttagctgggcctttgtccgccttgtggtcaggtgattaggcaggatgtttctcattggcccgaacccccgtggaatatttcactttgaccaagatctgcaaaatagtcagggcttacaaaatggttgcagtttggactaacacttctctgtaggggcagtcactgagctgtaacattgtcccctgcctggaggatgccaagaacctgccctgaatcacgttgaggaaacaagaaaaggcgaggcattatcctcatgctagaaggggtcggggaggagactaagaaatttctagaagtttctggaaattcctggaagaacccagcagcttgtaagagagaaggctacaagcccaacaggaactgcacctgctgttggaggaacccaagaagattaaagcctcgttttcctcctttcttgatttctagtgtctcccaagagttgcgttgggtgaatccaacaggtggggcagaggataatacagtcagtgggtgcagccataggtgttggcgcttctcatcgacctaacccccgttcgcgaggcccacttgggttgaaagagggcctccgtggaggcgccaccggagtgtatccagacccgcttgctctgcgacctgaacaggccactcttgcacccggctccctaggtccaattgcagcgccggcgcgccggccgggctcagccctagcaacccacgcccggttgccatggagacgtcggcacctgcgcagcccaagacccccgagcggcggtgcgggagccagtgcgcaggcgcgcgctgcgacgccaacctcggcttctcgccgctaacggcatcgagtctggacgccccgtgacccgcctgggccggagcgggggcggacggcgccttcttggccctttctgcctctagcagcggcgccggggtagccggagccagcgactgggaaacggctgcattccactgcgtctccttggcctggctgggcggtcggaggctgatctgccaagtaagtcccggctgggcaggcggagcgtcaggcccgggggagggtcctagggccttttgctgcagattcagggacacgtgtgagcaccggggcctgggttggggaggagggtgttgggaaagcgccaggcctcctgcaggccagccgcggagggggcagctaggatctgtgagcttggtcatcttcctgggaacgtgacctcgctcccttgtcaccttgcaggattactgtttggagaccgctgcagcccacgtccacctgatagactatttactacacatagtaggttcagagccgctaaatgtccaagaccatggcgatgaaccttctggaggattggtgcaggggaatggaagtggacatccacaggtccttgttggtcacaggcatcccagaggactgtgggcaggcagaaattgaggagaccttgaatggggtcctctccccactgggcccgtaccgcgtgctcaacaagatttttgtgagggaagagaatgttaaagctgccctcattgaggttggtgaaggtgtgaatctgagcaccatcccccgtgaattcccaggaaggggtg

SEQ ID NO: 22024 - DNA, 2300 bp, Homo sapien
acacaactttttagcacaaaatatgatggaaacttgggcaatcacacaagtattgatgatgcccaaatttaggaatgccagagatgacagtgaaatgaacatttggctatttggccttgcaaatgtcagtttcaaaaatgaacccaaagaacagattttggttgaataccaaggcccaaattgtacttccatgcatctttcagatgagatccccccgaatcttcaaaacttccaaatcaggaagattttttattagaattcctattacagagaaaagaaataagctcagcggggtcaaattatttctctaagatcacacagccaggaagggacattggtaggtggatcagtgagggactggcaaaaaaaaaaaaaaaaaaacagatggccagtccaaccgagtctcataggagtgcttaattaattagtttattttttttgagacagggtctcctgggttcaagcaatcctcccacctcagcctcccgaatagctgagaccacaggtgacccctatcacacctggctaattttttgcgtttttggtagggacggggttttgccatgttgcccaggatggtctcgaactccccagctcaagtgatccgccctcctcagcctcccaaagtgttgggattacatgcgtgagccacagcactgggcattaataaactattaacaaagttcttgctcatgggcagcaaggttgaggtaggaggcccaggggactccactgaggatcacattgaagactggccaaaacctggaaaaggcaccgaaagcctctctccataagacatgcctgccagcaccatgacagtttaccattgccatggcaacacccataagttactgccaatttgctaattctgaaaacccaccccttaattagcacgtcattaaaagtgggtataaatgtgactgcagccttgccccgaggtgctattctcagcacactgcctagagggtagccctccttgttaggttttggagggaaggtgagggttaaagacacacagacagaaggcggctcaacagcaactcaggtatactgcagacacctgtggaagtgggtaaccagcctaatgccagagcccactgctgcttataggctgggggtacttatagttatgggtgggaggggtctgagcagtatggtttgctgcccagcaggatgttgataagatggttccatgatgaggcggttctggcccttgttctggtggaatgtggtgttctctgcactttctcccagcagaatatgatagggatgtttcttcagttgggcctttgcacgatagggtatgataatgtttctttagctgggcctttgtccgccttgtggtcaggtgattaggcaggatgtttctcattggcccgaacccccgtggaatatttcactttgaccaagatctgcaaaatagtcagggcttacaaaatggttgcagtttggactaacacttctctgtaggggcagtcactgagctgtaacattgtcccctgcctggaggatgccaagaacctgccctgaatcacgttgaggaaacaagaaaaggcgaggcattatcctcatgctagaaggggtcggggaggagactaagaaatttctagaagtttctggaaattcctggaagaacccagcagcttgtaagagagaaggctacaagcccaacaggaactgcacctgctgttggaggaacccaagaagattaaagcctcgttttcctcctttcttgatttctagtgtctcccaagagttgcgttgggtgaatccaacaggtggggcagaggataatacagtcagtgggtgcagccataggtgttggcgcttctcatcgacctaacccccgttcgcgaggcccacttgggttgaaagagggcctccgtggaggcgccaccggagtgtatccagacccgcttgctctgcgacctgaacaggccactcttgcacccggctccctaggtccaattgcagcgccggcgcgccggccgggctcagccctagcaacccacgcccggttgccatggagacgtcggcacctgcgcagcccaagacccccgagcggcggtgcgggagccagtgcgcaggcgcgcgctgcgacgccaacctcggcttctcgccgctaacggcatcgagtctggacgccccgtgacccgcctgggccggagcgggggcggacggcgccttcttggccctttctgcctctagcagcggcgccggggtagccggagccagcgactgggaaacggctgcattccactgcgtctccttggcctggctgggcggtcggaggctgatct

SEQ ID NO: 22025 - DNA, 2300 bp, Homo sapien
agcctcacagcaccggcccgcctactctggaacctccagggcagggctggggtttcctccccaggtcatttcatcccctgtaaggagggacacgcggccggcttctgcactgcccaggtgagcctctgtccctcacagtgcccttcggggcccctctggcctttaattcactcagggggtgaacccagggactttcaagtcttttagtaagggctgcaaggccagcgctgagcggtgggtcagctccactggagagggggcacccaggggagccacagcctatgggaggggccagggcccactcagcccagaagaaccaaaactggattttaagtgaattaccccaaattgaacacctctgcaaataattagaatgttgggaaacactgcagtctgagtgacaaattcaacttgtggtcaggggcaggtggccttggcctggggctggttcctttgttatcaggggcgccccagtaggcagggctggcatgtgtcttccctctgctcccccctccccctcctcctcctctttcccttctcccaccgttcctctcccctttcctcctcctccccttcccaaccgccttctatctctcagactttcctttctggaatcatctcttcccctggctgggagctggggcctcccctggctgagagttgcgccctgacacgcgctgcgcggctggtgactgagcctccaccacagacccagggcccagtcagactggggtaggggcgacagcggcctacagcacctgccaggcgcaggccccgagagcgccacgaagagccctgctcgcctctgcaggtgcccggcgtccacacacacaccccctccgggggcaacccgggcccccaatcctggtccacttggcgcgtccccatctcggccctgcgctgctgcctcgggcgcccacttctctttcctcctcccatccgggcttcctccgtcgggatcgctggcgcccccggcctgcgagggcccgagaggggaacgtgacgctggcaaaacgcggcccgggcgcgctgtgaagcgaggagattgcgtctgcggaggacaggaagaggggaggggagggcgggggccacaggcgggcgggtgccctgcggggcctgctcgcagcctgggcggcttcttggggggccactagcggcatttagggggcagcctccggccccgacgggccttcttcccgcgcgcggccttggatccagtgggcgcctggcccttggcctcgcctgccctggcatgggccccggcgcccgcgctccccttcttcttcctgcttcctgcggcgtcgtcctgggccgagccccggctcccggctttcttctcgggagtgacgccccggcctcggcctcggccgcccgcgcgggttttgcgggccccggaagcggtgggaggcgcgccggccggagtcaggcccctgggggccgtgcgcgccctcttggcccggggcttcctggatgccctgtcctccggctccgacgcctcgctctcggtgtcctccgactcctcctcggactgttcgtccgaagcctcctccgacccctcgttggaccccatgttctcccgggcggccaggagcgccaatacctcccccagtttgcctttggggtatttgtacttcccgccttcccaggcgttttctttttcctccttcatcacctccgccatgtcctgggcagccaggagcgccaccagctccagaagacccccttcgtcctcacggtgctcgctccagcccccgaagaggccacgcccagccttcttcgcctggggagggagatccggctgcgccaaggtggaaatgcactcccggaggtccccgtcatccccggccttgcgcaggaccacggcgtccacctcgcggcccgcctcttccaccttcacgcgggtcccgttagtgtccttggacatgacggacaagacctgtcggagggggtctcgcttgtctttctcgtcgctccagcccagcgactcgataacagaagcgattttcaacatctcctcccgggcccaggggtccgacgggtcggtataggccacaatggccacgaactcaggattatccaactcctctgtttcttggtccccactttcctgcgagtcgctctccgaagtgtcgctgtccaccggctcctcgtccggggtgtctctcacagccagcagggccactaagtcggggacaccatttttgtcttctttggtgttcaagcggatggattcggccccagctggctccttctctgcctcttctttcttcgatttgtcggtgacggtgaccagagccaag

SEQ ID NO: 22026 - DNA, 2300 bp, Homo sapien
caggaagatcagaggaggaaaaagtgggggaaaataggagtgagtaagcggtttgcccagttgctgtggtaaccttgcagttaaactctccttaaacataaaaaaatccaaacacaaaagtaaggggttgggcctggtggcaaaaacaaaaaactcgaggtgttttggtttcctatttatttgtttattaacagatgctttgggctgagcacggtggctcgtgcctgtaatcccagcactttgggaggccgacgccggcagatcacccgaggtcaggagttccagaccagcctggccaacatggtgaaaatccatctactaaaaatacaaaactaggccgggcacggtggctcacacctgtaatcccagcactttgggaggccgaggcgggcggatcacgaggttgggagtttgagacaaggttgcccaacatagtgaaaccccgtctctactaaaaatacaaaaaattagctgggcgtggtggcgggcacctgtaatctcagctacttgggaggctgaggctggagaatggtttgaagccgggaggcggaggttgcagtgaaccaagatcacgccactgccctccagcctgagtgacagtgcgagactctctctcaaacaaacaaacaaacaaaaaactagtcaggcatggtggtgcatgcctgtagtcccagttactcgggaggctgaggcaggagaatggctttaacccgggtggtggaggttgcagtgagccgagattgctccattgcactccagcctgggcgacagagcaagactccatctcaaaaacaaaccaacaaaacagatgcttttataatggtaagttctcaacaaatacttctcttagccatctttcatggagcaccagctgtgggccagctgctcttctaaatgctttcctggattattccctttaatcctcatgagaaccctttgaggccaggcatggtggctcaccatgtaatcctgtaatcccagcactttcagaggctgaggcgggcagatcacttgaggttaggagtttgagaccagcctgggtaacatggtaaaaacccatctctacaaaaaatacaaaaacttgccagacgtgatggtgtatgcctataatcccagctacttgggaggcctgtcatccttgctactcaggaggctgaggcaggagaaccgcttgaacatgggaggcggaagttgcagtgaaccaagattgtgccattgcactccagcctgagtgacagagcaagactccatctccaaaacaaacaacaacaaaaaaacaaaaccctttgaggtagggatgatggttgagatataaacctaccagctggtctacagagccagattcatatagagtaggggacagcctcatggccaacaagggacagagaagcaaatgcatgtttacagtagctatgactgacgttcacacgccccagtctgctgtcccagtcaagggaaatgctttcttgcaaaattcatgcctggtctcacaatcatacatatgctcaaagcgtgtgcaaaaccacaggatttattgtgcatgcatagttcagaatacaggaacgtgtatgggagtgagggccggtcccatcgagtggggcctgtaccctgcaagtgaggcccatataccctgaatggtgtcttgctcacaggtggtgcctgggcccccctatttgatactgagacccatatactgtgaatgaggccagtatcccgagtaagtcctggtcctacgctgcaaggccagtgccctttgatttaggcctatataatcctgaattccacctggcccctggaagggggaattgtaacccccagtgatgccggtaccctctggaaggaggcctctatcccctgaatgaggtcgggtatccttgagtgatttctggccctctgtggtttcggccttgttttttgctggttaatgaaagtggtgcttccaggccccaagtccttgtcatcgggacctttaagaaaagcgtctcaggccacagcgacgcagaccccagctcaaggctgcaccgttgccatggagacggttgggcgggggacaggggagggtgtgcggctccctctgcgcaggcgcacgcgcgagcagccgcgtcgcagcggaactgctgagattcaggcccagggtgcgcgctcagacgcggcgcgagcgccaggcaagctgcggctgctacctcccacgcctctccaggtgcactcggcgccgcccccctgcacctggctgcggtgccgagtcactcaggcctgtgtcagggagagagggagggagctgtcctggaaagcagacacgt

SEQ ID NO: 22027 - DNA, 2300 bp, Homo sapien
ccttctccgtctggcttgttttggcttttactggctccatttgcttacagattcttcgtaattgacctgttggtttctttttttctgctaggttgctgcctcctttttagcactcagtggcaccttaaaaccaggtttgccttggctctattaaagatcagagcgtctcccatcccgaatgggggaggtcccaaaggggatatcccagtagcataggaaagctggctaggggttcattcccaggggagctatggaagaaacctcccacagcatggtgctaacgaacagccactctgatttggcatctcctttggccaagttatagagtagagagagtttccagggctggggatggtagtcccacctccccactttgtctgtggctattctcagaggatatttctcccttgaggcactcctgatggttgtattcttgtgattacagcactttgggaggccaaggcaggcggatcacttgagctcaagagtttgagaccagcctggccaacatggtgaaaccctgtctttactaaaaatacaaaaattagccaagtgtagtggtgggtgcctgtagtcccaactacttgggaggctgaggcaggagaatcgcttaaacctgggaggcggaggttgtagtgagccaagatcatgccactgcactctagcctatgtgacagagcaagactccgtctcaaaaaaaatacagatcttgtgtgaactaacagaataagaactcacttgttaccgtgaggacagcaccaagtcattcatgagggatccacccctatgacccaaacacctcccaccaggccccacctccaacattggtgatcacattttaacatgagatttgagactgagtaacaagtgttaggattaaaggcatgagccaccgcgcccggccatcttctttacctctccactgtgtcagttttatttttctcttcttctctagacactttgttcctcaagatagggggcagagtgggaaaatgaccatagtcagaatctatgggaaggacccacccaaaaggaaaaggcttcttgtgcccaggctgcagatccaaaccccagggaaggactctcattggttcagtctccattctgttccaggtggagcataatgattggtccagcctgactcgtttgcccatctcttaaccatcaacatggtggggaggggacacgcaggagactgtcagctcctatcctaaacgggggagggggcaggggtgatcattttctgagctcctataaacaaagtttcagttctttttcctcctatggctggaacactggaataaggaaagaggtcgtctgtctggagaggctggttggggagtatggtctccccagcccagccaagctcaggtccctgcatacagcaggcgcctaattgatgcttatagcacgaatgactgaatgaataccccgttcccacaggctgtcctgggatggtcctaatttcacagaccctgagcggatcaagaatgaagcgggcccaggggtcccgcccaccggctgagtgcgtcttaggacgcagagacaagaccacggagggcggaacctctgagcgttaggtggcaccttggagaccccgccacctccaaaggcccagttaggggcggagcttctaaaccctagcattttggattgaaccatcgtccgtcggttaaaggggagagccgagaaagcccttctgcatttgtcgccagcctttttaccacctcctggccacagaaacgacgtatttgcttctctaacggcgacgccgtttcccccttcgcctcgttactcctcaaagccccacgcggccacagagttcagacttacccaccaccaccttgcagtggctcgccccagtttgacgcattgcagggaaggtcggaccaatgggcgccaagctctcatttccgccatgggccaggcccaatagtgacgcggctcacagagggacgcgtcacgcaccgccgagctgtgcccctccgccgaagaaagtgaagtgggcccgggaggcggggcgcgcggcgagggaaagtagtccggcgacgggagcgagcgcgcgcgcgcccggcggcaaacccaattcctgtgcagggtggggacgagagattcgcgggcccgtaggtgtggagcggggcgcggagggatccgtgggagccgcagtgcggcggcgcgcgggccgggtggggcggggccgagcgaggcggggcgcgcgcggcggccgttgagggaccgttggggcgggaggcggcggcggcggcggcgcgcgctgcgggcagtgagtgtggaggcgcgga

SEQ ID NO: 22028 - DNA, 2300 bp, Homo sapien
ttctggaggtagggggcctgctagtgcttcagggccccttttagccaggttctgctgggggaaaatggggtagcggcaagaggagccatcaggtctgtgtcagcaagtatgagatctgatacacagcagcggctgcctgttctccccagccttgccagggaggatggctgcacacggttcccaggctcagcctggtggggctgtgggtgttgtgggtggcagggagtaggaaagaactagtctgctggttttctctcaaagccctgtgaattaacagacacgctcagcgagggccctgaatggaacaagtggccctcaggccgatcaaggggtctccccagaggcactctctgatcaagctctgcagcccccaccccgagggcacgggaataggcatctgattgtcactgacgccacactgtactgcactgtcatttggcacaagtgacgaggtgcagcatggtgcgtggggctggggatcatgagaaaaccggcgctcctgctgggaaaaggcagtgctcttggcctgaaaagggcagcgacagagtgaggcttctaggcttgaaaaagctggctcattcgaggcaccccaaactttgatctcccatccccatttcatgaggcttcagtgcgcaataggggcccgaacagctccgcccacctgctcccactgccccggtgtcttccacccagccgcgttcttcctgaggaaggaggacggtagaaaagcttcctccgggccctgcagcccactccccatccacactgagccgtctttgtcctggcctgtccctggagactggcagggtgctacccacatccacccccaaacctaggcccccctgactgccattcattttctccttccacctcacctcccaaccacccaagcccaagtcctcccccacccctcaccttggaaatccatcttctcttggacccaaacacaacactcccaccccgttaaaaaaattctgtctttctagagcaacagtcttaacccactagtaacctcggaaccttttctagctacttccaaattaaccccaagggtccctgtcccccgactactggcgagccccactctcaccatcccttttcaccacctccacgaccctgatccttctccgtcccggaagccttcaagagtatcttctaatctccgctgccacccaccccaggctcttcctcccataagcttgcacctcaccctcctcctcctctgcagtgctgggctctggagaccaccctcccccaccctcccccaccctcgggagtctcatctgtagaagtgaccgcccatccttgaccctctcctctgctccacaggagcccaggggtcgcccctccccgcccgggcccagctaccctccaccaccccatccaggagcagcccagcctcccttcgtcccccgttccccgcatcctctcaggaccaaacgccttcatcagggcccgaatagctcccctccccagcccatctttcttatttcgtcccctggggtccaaacacctccatcctgaaacccaacgccccatcctgggtccaaaatccttttgaggggtcccactgagggtcccgatcctccatccggggttcaaatgtcccctttaggggctcagatacccatttgtggacttaaacatcccatttggtgctaaagtcgcttctggaaacctctggtgatccagacgtcccgctctgggttcaacagcccccgacaacgcgggtagaaaagggtcccgaggctctcgccgggcccggacgccccccactctgggctctgtcgccccctcaggggtcctgccccgttaagcccgcctcagagcccgcagcctcggcgaccccccagcctcactcaccatggcgaggcccggggtgtccggagcacggggatcaaggttcctccggcggcggcagcagctgcagcagttccagctccgccgcgcgtccgcgcctccacactcactgcccgcagcgcgcgccgccgccgccgccgcctcccgccccaacggtccctcaacggccgccgcgcgcgccccgcctcgctcggccccgccccacccggcccgcgcgccgccgcactgcggctcccacggatccctccgcgccccgctccacacctacgggcccgcgaatctctcgtccccaccctgcacaggaattgggtttgccgccgggcgcgcgcgcgctcgctcccgtcgccggactactttccctcgccgcgcgccccgcctcccgggcccacttcactttcttcggcggaggggcacagctcggcggtgcgtgacgcgtccct

SEQ ID NO: 22029 - DNA, 2300 bp, Homo sapien
gtctgctatccccctcatcttagctcaggaaagcctccacatccccagccaaatcttagccactgaggagtgacatctgatgggtgaacctgtgtatcccttgtgtcacctaacactatgccttgtgcctagaatgctgataaatgtgtgtaagagcacaccagtgccccaatgacacgaagccccatggccctgagacaggcctttaccagacaccaaaggctgtgttcctctcctgggcctgggtcatctaggggcttgatatcagtggctgcaggacgagcccaactctctctcccagcttcagccaggttggcttagaaggtgagctccctgcctccctgtggggcctgcagagctcctgtcccactttaggagccgcccaggagctggctcgtcactcccacctctgcgcttgcctgcgctttgcacttcctttcgcatgtgcctgcgcctgcctgttctgctggcggaagtgcctccccagtgctttgcatgggcagctccttcccgtcccttagctcagatgtcccctcggggaggccttccctgacccccatctcaagtacacagccttcctttactctccttcacatcactttattttcttcataacctttctcgctgtctgaaattattttcttatgtcttcacctgttgtatctcctgttactagatgtgagttccattgagtttgggacttggttttgttggtccctgctatagccttaatgcctgcctagaacgtagtaggtcctccgcaaacttttgctggctaaacaaacatctctctctcagcaagctagaagaaatccctggatcccatctaattcatttttctaacccctccaaaaccccagaagggtcagctacaggaactattgtgtaattacagatccgtgcctgcctacccgcccatactgagctgcccgaggacagagagcaactcttggtttatctccatagccaggggccagcacacagtagaccagagtagcgatccagagaatgggcctctgctccccaccagctacccagcccccagctctgctgtcaggttcaaccggctgtgtaacaagtactaaaggcccagcttctgcggtgggaggcaggaacggacttgccttctctcctttctcccctcaacccgcatcacagagtcacctttgcagcttcaaaattttggccctgggtggctatggagacccctgaggaaagccagaagatggcctggtttagtgatcatgagctcggggtgccccatgacccactcactacctgccctccccaagaacaacaaggcctcagcacagggaggtgccagcctccccaaagagactcttgccatgtccccagggcccagaggctcagggccacagcttcccagctgtgcatgtccctcccaatgcacctgccacccatctcccaactctggccttgtgcaacataaacggtctgcttttcaccctgtccccattagcaaactgtccaccgcctcaccccagcccacaccctctgggaataggctgccggacatctgtttttggagggcttgggggtagaggagcaccaggtgccaaaatgggcccagtgggagggcaagagccatgtgcttttctccctgcccctgatgcggccccagctgtggccttcccactcagcactgctagctcctcatcctcctggcttggcagccgtcccctcgctttccatccccccatcaaccccacgcactgtccgtcagccatgttctgctgccgaccacccccacgctcaccacacgcagtggctcagctcctttggaagctggtagcacccacggcaaggaacagggctgccagtcagaagggagtggatgcctgcatttcctcttcaggccggccagaggcattctgcagcctcccctcctcgtcccagccagccaaccctggctaacacactcagacaaagaatcctttcggctctcattcactccatgactttggttcatttcatcatttcaagggagaagtcaaagccagggaccaaacagaaatgtagaatcatctaaggacagctgtcagaccattttccccactgtcttcactggctggccagaaaaatagcttcacctagcacagtgttgatgttcaataactgttgaatgaaggttggaagggctttgccctgagcactgaggagagagagctggttgcgtgggacttgaagtctgtctcagtttctttaggtgggactgatgcccttggccttcctccagggaaggcatccagcatccagaggtaaggattctcctgtggacc

SEQ ID NO: 22030 - DNA, 2300 bp, Homo sapien
ggttcacgcctgtaatcccagcactatgggaggccgaggcgggcggatcacctgaggtcaggcgttcaagaccagcctggccaacatggtgaaaccccacctctactaaaaatataaaaattgggcgcagtggcacatgcctgtaatcccagctactcgggaggctgaggcacgagagtcgcttgaacccgggaggcggaggttgcagtgagctgagatcatgccagtgtactccagcctgggtgacagagcaagattccatctcaaaacaaaaacaaacaagcaaaaagaaaaacaacaacaaaaaagaaactgaggcctggaagggacaagggtttgactgtggtcccactgggcatgggagcagaggggacttcctgaatgttaaccgtccttgtaacaggaagcgagagagggagtctccgggaaccagaggcccccccgatgccgaaacaagatgcacgcctgccaggcatcatccttcattaatatgatataacttcctgagttccctctggtctgtctggggacctcacggcatgaggcgggacaacgtggcaggacctggagcccacatgtacaggcacccccagagcagggctggggggtcccttagggagccacggtggggctggaacttgggcgtccatcctgctggaagctgcgggtgccagctgggcaagggtgatagggagatgggggggaggggcaaaggggttgtggtcacacaccggggtacagagggcaagacggcagctgcccacagtccagtccttgggttggacacatccctcctggccttggacaagagacacccgcacagcctctctccttgttacaaagaccaatctgggatgtgctgcaggccgaggctggccaccaggtccctgaggcccgtgttaccccacgcacagagaaggaggctgaagtctaccagctccctctcctcacctgggaccatctcgcagcaagaaaaaaggtggtcagatggaaacaggaagccaagtcgaatggatctgagaccgtccccctgagaaacagcggggctcagagagggtctctgaggttttatctggcccttttgggctgggaggctgcctgggaagccaccgactccgtgggaagggagacccgtgaacgctgtgcgggtagcgggaacatgtgggtctgtcacactggcccgaggctgcagcggtggtggcttggctgtgtttggggagggtgggggacacatggcagcaatgttggagctgtggacagcttcctgtgatcaaaatatgattcctgaaggtcaaggtcaccagagcttggcctggggcctaggggtgctgtgcgagaagtcggacggtggcccagtgctacctttccatcatgggccatggaagtctcccaagcctgtccctgacaactggacaccaaatacaccccttcatgctttcttctcgggtctctgcagggtgagctgggtgcccagggacaggctcgagggactggcatgtctctctctggccaagcctccttcctcagctttctggaaggagtgaattgtgtccagggaccagaactctcagtggtgtctggaaaacactacatcagagaggaatttcctggtcatttctcaatccctgggcaatgtcctcagccccggggcctggagcccagaatagatcccagaggccaccctgagacagcccaggccaagaccaccccactgaagcctggtcaactgtgctcttcaggtccctcctagaggccccctactaccccgggaggctccaagcctaagtgatggtgactcaggaattccccacccaggccagagagggagacactgggggagggaggagacctgtgtgtggggaggtggcaggtggctcagtgatgggaaccaagagaggatgtggggaggagagtggaggcagcgatgggagatggatgtcctggattgggcgggtggacggggagtggggagtgtgccagggggccctctggagaacagtgagggagggcggggcagagagaggaaatgaaaaagctggggtgagcaggcaagctgaggagggtgggaaggagggagggacggagggaggagggaaggagaagctgacacacagaccgacacaggcagcgagagacacgaggagcaaagcaagtgaaggcacagacgcacgggacaggagagcctgggcaagactggagaggtgcggtgaggggctggggatgcagcaacacagagcaggagcaggtagagggtgtggggttagagggagaaaggtacggggaggacaaggacaagggag

SEQ ID NO: 22031 - DNA, 2300 bp, Homo sapien
gcaaatgtgtgtgacatttggagacattatgtgtgacactgtggtacatttggtgctctgagataatttatctgactgtgtagcgcttggagctgccattggtggcggctgtgtgtggcatttggggcaaccgtgtgaggttgtgttgagcaaggtcattcgtgaggttgtgtggtgctaccgtgtgacagggcaagatagtttttgtctgtgtgagggacagtgagcatgaggctggaggggggtggtgacaccgaggtggcgagtgtggctgagtgagcggctctgtgggacacactggagaggtttgttgtgactgtggattaaatgtagcgaggcccggggcccacctagagagactgtgttttctagtgagtgtgagagaggcacagagagagtcacacaataggacagcagcggcagagacacagggagagggacaaagataggactgacagacaagagagagggcccagagagggagccccaaggtggcggggcggcggggacggtggctccgggaggaggcgggtccgtaggggctgcgccccaggggagggggcggggcgggccggagggacccagacgctgcctcccagcctctgtcaccgccgcgagcccggcccagagcagcaacaggtaggaagctccggtcccggccccacagctggtccctttgcctgctccgtggccaccgtctctccgcctgggaatgaatgagtgaatgagtgaatgagtgagtgaatgaattcttctgcgtctccatcagcctgtctctcgccttgttcctctctcccactttctgtttccatctctccccaacccctccatctccctctttgtccttcccttctttcctctgtccctctatctccccgtctctgttcctttatctccttggtgtctctgctccttcctccctccccccttcctccatttccccttctctctccttcgtccctccctccatcaccccatcctctcccaccccatccgtccatctcctccatcctctcccaccccacaccccctccctccatctcctccatcctctcccaccccacaccccctccctccatctccccatcctctcccaccccacaccccctccctccatctccccatcctctcccaccccacaccccctccctccatctccccatcctctcccaccccatccgtccatctcctccatcctctcccaccccacaccccctccctccatctccccatcctctcccaccccacaccccctccctccatctcccctgctctgtcccctctgtccctttgtcccctcggtgcctgtcgccttgtatcaccctgttccttgctccccccttcatttgtccctctattttctcctccatcacttcattcctcccccagtctctccctctctctattcctccccgtctcttcatttctcccgtgcctcagtctctccctccattactctgtctctgcctctgcgcgtcccgttgtccctctgtccatccgataggcctctcctcaggtgcccgagttgggctcccccagccctctgccctggctgctaatgagcagaggaggctttgaggtgaccagggctagggtgggggggctccctgagggtggcggagagggcagctgctgccaaggccctaatgaggccccctctgtgcccctcccgccgcgatcttaattcccagttctccctggagccactgctaattggcctgggggaggggcccccctcctggctctcgctctgcccccgggggtgaggacacctggattctgatccagcacctgtggccctgtccttctgtctcagcctcccatctgtgcgcccctccttccctccctcgcccctccctgctctctccccacctgccttagctacctccatccgtgcacccctccatcgctcctcttgttcctgtccccttcatctgtccctccctccaccagcccctggccaccccattcacgcgcccttccaccctcgcacctgttaccggggcccgccctctcgcccccacctcgggacccagacgtatcctaacctacccccacagcccccactcccgcgcgtcttttaaccccttccccgccgcaaccatgtccaacaacatggccaagattgccgaggcccgcaagacggtggaacagctgaagctggaggtgaacatcgaccgcatgaaggtgctgggtcggggtggggaatagggcgggggttctgggcctgcggtctgtccggggctgtgtcggcccggctcggagccatagtgcaaggatgcccctgggaacagggctgg

SEQ ID NO: 22032 - DNA, 2300 bp, Homo sapien
tagctgggattacaggcgtgcaccaccatgctcagctaatttttgtatttttagtacagatggggtttcaccatgttgcccaggctgctcttgaactcctgacctcaagtgatctgcccgcctcagcctcccaaagtgctgggattacaggcatgagcctccacgcccggcctgccaggttgtttcctaaagcgacttcaccattttacatccccaccagcttatgagggttcaggttgctccacatactcacttgctattatatggggacagtttgaaacagtgtccttttggctgctctgtgggaaacaggctgagggggacagggagaagataggaggtcaatgcagaggtcactgtaatagtccaagcaggagggaacggtgtctggacccaagtggggacagcagaggaagtgagagggattggattctggaattgctttgaagataaagccaacaggatgtcttacttggtgacttgtggagtgtgagagaaggcggggagtcaaggatgaccccagcccaggtgtggtggctcacagttcaggaccagcctaagcaacatagccagaccctgcctctaaaaaaaaataaaaagttaggctggttacagtggctcacgcctgtaatcccagcactttgggaggctgaggcaggtggatcacttgaggccaaagtttgagaccagcctggccatcatggtgaaatcccatctctactaaaaatacaaaaaaagtagccggatttggtggcacatgcctgtgatcccagctactcaggaggctgaggcatgagaattgcttgagcttgggaggcggaggttgcagcgcgccgagattgtgccactgtacaccagcatgagtgacagagtgagattctgttaaaaaacaaaacaaaacctgttcatggttgtgcatgcctgtagtcccagttaccggggaggctgaggcaggaggatcacttgagcccaggagttcaggctgcagtgagctatgattgcaccactgcactccagcctgggcgacaggcaagaccctgtttcaaaacaacaacaaaaactcagagatttaccatcacttgagatgggtaaacctgaaataagagcgaattttggtcgatggaatcagctcagtattggatgcgttgagctcgagagacccactaaacacccaggcggctgggtatttgatcctggaattcactcttgccgtttgttgatgatttcttgaataattaacgtcagaacggaatccgaatccagggcctcagtttcctcttccaaaaaatggggactgtaatgccttcaagcgctaggctgtcatgaggctggggcacaggacaggaactgaggtcatctgctgcggtctgcagctcaggagaggaacggaggctgcgctcacggcaggcagtgtctgtctgtccgtctcccccatcccccagcttctggccgcggtggaggagcgggagggaagactggatcgtcaccctgtcttccccctctctgagctggtttcctcctcgggggctgcccaggccagactgctgatagaaaccagctgcgagaggcgcggaggctcggcacacgcccaggcccctcctcggcgccggcggaccccgatggcggggcgaggagcgccttggctcccctcccctcttccgcagccgggcctggggccctggcacgtccggcgcgcctgatgctttccagatgtgggcttggtttccctcctttatctggccccgttgagcccgcaaggggaggggggaggggagctagggtccgagacccaaatctccaccagggactcgggtcggggtcccctccccgcccgtctcccttccctgtccaggcggtgaaaaccgagttagggtgggccgactgcagtaaagatgctcctccccacctccacctcttcctagggctcccgccttctccaggtccagaaagaaccccaagccccgtccatcgggacacgcccccaggtacaccgaggggcacgcccccttagaaaccccgccccggacccctccccttcggtcgcgcctctgcaggccccgcctccgtcgtcgggtccccactggaaggcgccctctgtgcatctctttgtctctctggccgcctctgcctccatctctgtgtgtctgcgtcttcgtccctgtctctgagtttcggcttgggtgtctctctcctaccccggtctctctgtgtcctgtctgtctctgcctctcctgtccctctctccgcagcgccctccccgtctctgtctctctgagtccctagctcgctccttctctaaa

SEQ ID NO: 22033 - DNA, 2300 bp, Homo sapien
tggtaatgattctatatagaaatttgactcattccgttttaacagctgtatagtattccattgtatacattcattctttcatctaatatttctttttaaaaaatagacagctgggtgcaatggctcatgcctgcaatcccagcactttaagagaccgaggcgggaggactgctcaagcccaggagttcgagacaagcctatgcaacacagggagaccctgtctctacaaaaaaatacaaagattagcgggggtgtggtggcatgtgcctgtagtcccagctacttgggaggctgaggtggtaggatcacctgagcccaggaggtgaaggctgcagtgagccgtgatcgtgccactgcagtccagcctggtgagacagtgagaccttgtctcaaaaataaaataaaaaagaccaggcacagtggctcacgcatgcaatcccagcactttgggaggctgaggtgggcggatgacttgtagtcaggagttcgagaccaacctggccaacatgatgaaaccctgtctctactaaaaacacaaaaattagccaagtgtggtgggacatgcttgtcatcccacctgcttgggaggctgaggcaaaaaaaaaaaatcacttgaacctgggaggtggaggctgcaccactgcactccagcctgagcggtagagctagattccatctcaaaaataaataaataaataaataaataaataaataaatttcatatatatacatatatgtgtatatacatgtgtgtatatatagtgtatatatgtgtatatatatgtgtgtatatatatatgtgtgtttgtgtatatatatatatatatatatagagagagagagagagagagagagactgggtctcactatgtcgcctaggctggtcttgaactctcggcctccagcgatcctcccgccttggcacttccagagtgctgggatgataggcataagccaccacacccagcccattaaatatttcctgagcacccactttgtgccaggcactgttctaggcactgggtgggggtgcacctgtgagctaaacagacaaatctccgcgttcctagggctgacattctagtgagagattcaacaaacaaatgataccttgatgtatacttttattttattttagttgtttttggagatgaaatcttactgtcgcccaggctggagtgcagtggcgtgatctcggctcactgcaacctccgcctccctggttcaagcaattctcctgcttcagcctcttgggtagctgggattacaggcacacaccaccacacctggctattttttgtatttctagtagagacggggtttcaccatgttggccaggctgatcttgaactcctgacctcaagtgatcctccctgccttggcctcccaaggtgctgggattacaggcgtgagccaccgagcctggcctgatgtataattttaaatcaagaggtcattactgatatgtagaaaaaacccgaaaagcagggcaacggggtacacaatgacaggggagctattttggaaaggtgtcagagaagagatcaccaaagatctgaatgaagcaaggaaggtatgtgggggaaacattctcccgaggtaggcgcatacatggtatgttcgagggacggtggcaaggccaggcgtggctagaggggagtgagcatgccagtgatttgtgacggacgtgacatggggtacatggtaggtccgagagatttttttttagttacttcctgatgctgcacaattcagctgcttttttgagttccgctcaaagatgacttcactgtgagcatctcaatatacccagggcaggagcccagagtggaaggatttgttgaccttcctcaaataaacaggcccggatgggggcttctgttctagggggatgggagaggctgggccctggagagactgggatggggcgggggggttgtggctgccggggagccggccagtctttctgccctaaataggcagggttgggtgcctgccctcccaaaccctcctccccacttccctccctcctgcggtccagacaagccgcttttgtctgagggtcaaccgtcagcccgaggctgcctgctgctacccggcctcactcagacccatgtgagactttttctggctctgaccctctcttttctaaaatgagattaagtcctaatgtcttggagaccccatccgtgagaagtgctcttttcctgcagcaagaaggatccagggtagactcatggaaatttctttttcttttttcctttttttttttttttgtcagtcttgctgtgttgcttagg

SEQ ID NO: 22034 - DNA, 2300 bp, Homo sapien
ccgagggcagagggggagaggacacagctacccacagctaccccaacctcatgcctcgcattctccttgtcaggatggaaggcgccttccaagccgagccagcttggggtggggggagctagcgaaggcccccacaatccgtctctaactttgggagggggtggggcctcccacagctgtttctgtttccagaaaagaatgtgcaggggggtcccactcctgagagggggaggggccgggcgtgcagccccgggagcctggcttcagtcttcctccccactccccatctggggagggggcggtcgaggtcagcggcggggagagccccctccactgccacctcggctcaggtttcccgaaacgggaagctctggccacacacaggcttggggatggggatctgccgtggagccagggtgtgcgggctggggggaggggaagacagactgagcctgggacgtcgggcaagaagaagagagcgaggtgcagacaggcaggaagggaaggccaaggagacagatgcagagggacacagagatcacagagacagagagacaggatgaagaaagagaagcagacacagaaagtcacagggatgtggcaggacggagagagtgacagaacccaggacgagatcgggagactcaaggaatgacatagaaaggggagaggcatggggcgtcctcaagtcattccggagacctctgcccatcttccaccatgagaacacccagagtccagaagtctcccccaggcgctgcctcgacctgcctccccttgggtcaaggagagctggggccaggtaggaagcaggggaagtgtcaccaaagggtcaagatcccagtggggggtcctcagggactgtgagcttcctctcagcagtggtccctccctctggaggccctgagattcccctcctcccaccccgccccctccagagatctccaagcacaccaggacttagggaagatggagccctggtggcggggcccagagaagggcatgtttggagcctggctgtgtcaccttgggtgagtcgcttgctctctctgagcctcaatttgtttctctgttaaatggggactatcaccccgtttcccaagccgcaagaagacaacgcctgcaaagtacccggtctcgggtttgacacatacttggcgcccacaaggattttctttggggaaggggtgtaagagacagggcctgtgtttctcacgaggccccagtgggggcgatgcagttccccctcccccgatttgggggcggggaggccaggtccggcccgccgccggaactccggggtcgccagccccaccccctgtcctttctcactccctgcctacccgggtccccaacccccgcccggtgtctgagcatccaaccgagacagacagacacagacgggggtggagggacggacggacaggcagccccttaccagctgctcctccagggccgctgcggcccggcgcgccgccgccgcatcttcatcctcatcggcgtcctcctcgtcctcggcctcggcgccccccattccgggctgggccagccgcagcgcctgctgcacgcggtactcctgcctctcccggagccaatgtaactcgcagagcccggccaggctaccctccagccagccccgcagccggccccgctcagggctcaccgggaacgagaaggcccggatcatggctgcggccccccgccccagcccggccgggccccgcggccacccctctcccggtcccacctccccgccccagcagcctgcccgcccgcccgctggccgggctgtcaccgtctcatctgcataggcgcccgcccattgggccgcccacccgcgccttatctgcatggccacgcccccggcgaccgagcaacagccgcctattggcgaataagcttcctgacgaagactctcgggcgtgcaaccgcaccgcccaacacgacgcatgctcgcaactgcctactcactccgctcgccacgccccctccgtgcaactgcctcggggccctggccacgcccccccacgcgtcacaatgaaacaagcccgcccttgcttcaatgccattggtctgtgcctggccggtcctgcagcaggttccaccctcttgcgggcgagcgctggctaccattggactgtccggcgcgaggggaagggtgatctataaatagggaatgggtacacgtgacagtttggcagctgctcctacccctccaccccgcccaaccttcagcttctgaggctgcgcagggggagaaaagggttagggggtcgagccctgacttcgcctcctcttcc

SEQ ID NO: 22035 - DNA, 2300 bp, Homo sapien
acaggtacatgccaccatatccagtttgtgtgccatgtttggaagcaactgttgcttgttgattctccagacatctatctttctttctctctctctttctttttctttctttctttctctctctctctctctcaatttctttctttctttctttttttgagacggagtctccctctgttacccaggctggagtgcagtgccacagtctcggtgtgtgccatcatgcccagctaatttttgtatttttagtacagatggggtttcgccatgttggccaggctgatctgaactcctgaactcaggtgatctgcccgcctcagcctcccaaagtactgggattacagacgtgagccactgcgcctggctgattctccagaaatcttttggcatcatcattaataaaagcatcaagaagtcaaaaaggaaatcaagtgatcctcccgcctcagcctcccaagtagctggggctacaggtgtgcaccaccacacccgactaattttctaagtctattttgaacaagaggaagactgaataaaggttgtctctaataaatttcaagacatttccccccggaaacttactagattagtttttaaacttatttgtcaaacccttctgtggctcttaatccatggaagacactgctccaagtacctaatacatttcattgaatcctcagaacaactgtatgaggcagccagtattatgatcccgtgatcagatgaagaaacggtggcacagagaggttaagtaagttttccaaggtcacacagctggaaagtgacagatctgtgactcaccccgaggaagtctggctcctggagactttgctgtctatcgccactatcaatttctctccatctcaccaccagaaggtcacttcgtgcacggggaatcataaaagagggaatttcttgtatgatcttctgggccttggcttttagggagccaaggtctgtctgagagatgagtatgaatattagagctaggtcttggaagttggtagaggcaggctcggcgtagtgatacagattggccgcctgagggtgccccagccctgcttgcggagcctggagagacagcaggaagccttggaaacgaatgtcaggctcagactcctaggaccagagaacgttgagaatagagcatcatagaaggctgagaacaaagccccttagaacgtagaacaaaggcccctggaatggaagaatgatgagcacacatcctcctagcacctgggagacaaaagctgcttagactctcttctggtcaaagcatagaatcttccacccagggtcttataattccagaatttggaatgcaatcgatcttagactcttagcagcaagaccggctacatatttggcctagtgcaaagtgaaaataaggggccccttgctcaaaaactaaaaatttcaagacagaaattgcagaacattcaaccaagcgcgaagacccttctaagtggattccaagccggtgaagccggccctaagtagaaacaatttcatcggaggacgtccgtctggttttacagctgagtgtctgggaaggcttcttggaagaggaggcgaagtcagggctcgaccccctaacccttttctccccctgcgcagcctcagaagctgaaggttgggcggggtggaggggtaggagcagctgccaaactgtcacgtgtacccattccctatttatagatcacccttcccctcgcgccggacagtccaatggtagccagcgctcgcccgcaagagggtggaacctgctgcaggaccggccaggcacagaccaatggcattgaagcaagggcgggcttgtttcattgtgacgcgtgggggggcgtggccagggccccgaggcagttgcacggagggggcgtggcgagcggagtgagtaggcagttgcgagcatgcgtcgtgttgggcggtgcggttgcacgcccgagagtcttcgtcaggaagcttattcgccaataggcggctgttgctcggtcgccgggggcgtggccatgcagataaggcgcgggtgggcggcccaatgggcgggcgcctatgcagatgagacggtgacagcccggccagcgggcgggcgggcaggctgctggggcggggaggtgggaccgggagaggggtggccgcggggcccggccgggctggggcggggggccgcagccatgatccgggccttctcgttcccggtgagccctgagcggggccggctgcggggctggctggagggtagcctggccgggctctgcgagttacattggctccgggagaggcaggagtaccgcgtgcag

SEQ ID NO: 22036 - DNA, 2300 bp, Homo sapien
gtgccgccgggcaccaacccacactgctttgagatcgtcactgccaatgccacctacttcgtgggcgagatgcctggcgggactccgggtgggccaagtgggcagggggctgaggccgcccggggctgggagacagccatccgccaggccctgatgcccgtcatccttcaggacgcacccagcgccccaggccacgcgccccacagtaagtcctcccacctcgggtccttgagagaatagatctagatgggtggggcacggttctggggaatggaagggccaaagaggaaagtgggcaatggtggggttgagaacgcagcttctggactcagcaggcctgggttcaaactctgttaatcactcctgttaatcccagcgctttgggaagccaaggagggaggatcacttgaggccaggagttcaagaccagcctgggcaacataatgagattccatctctacaaaaaataaaaacaattagccaggtgtggtggtgcacacctgtagttccaggtacttggaaggctgaggcaggagaattgcttgagcctgggagtagtgagtcatgattgcatcactgcactccagtctgggtgacagagcaagactctgtctccaaaacagaaaaaacaacaacaacaaaaatccacaacaaatctctgttaagctcctggcctgatatgtggccctgggcatatcacttcccctccatgagccttgtcccaggtgctgataagtcctcatgcacttactgagtgcctcctctgtgcgggacagtgctggggacccagtggtggccaggacagcccaagacctgccctcatggggctcagagtccagtagggcagaatacccatcttcagagagtgacagtccagggtgggcagggttgggacaaggaagctagggagctagaggagcccagaggggtacctgacccaatctgggtatataggggggcttcctggaggaggtgacatctgaactgagatctggaggccgaggcagggtgagatgtgggaaagaaaatgggaggtcattttaggcagaggcaaaaaatgttgagagagtaccaggttcccaccctctggagcttataatccagtgtgggtgacagacattgatcattaacccatacaagcaacgagtgtgatgcagagcatttgcgagagtaatccaacttggtcctaggagtgacatttgagcttacacttgaggatgaggaggatttagctaagtctaggatgaaggaaagagtattcctggcaggggaaacagcatatgcagagaccagaaggcagaagagagtttgctgtatttgaggccgagcaaggaggccagtgtgtcaggaatagcatgttgggggtagaagtcagaggtagatgagggtctaggccatggcttttaggccatttaaggggctcaggcttcttcctgagggcactggggagccatggcagagttgtgagcagaggagggacagggtcagtcttgtgcctcagtaagatccctctggtttctctgtgggaggtgagtaggaaggggcaggattggggcaaggagaccagggaaggggctgtggggtgaggacccagagttggggggcgagcaggggcctagactggtggaagagagagacattcaaatggcagaaggatcggactttagaaatgtctggctctggttgggtttgtagggggaaaagttcaagggaagatgcaggagtcagtctgggctttccctccaagactcagtttccttctctgtacaatggggtcagtctgcctcccctggtgctgagatcctggggtaaaatgctcagcaaaatcatctgtaacatcactcctttagccactcagcacatctcatttactcctcctggtggctctatgagggaggtccttttattattcccattttctagatgaggaaactgaggttcgtagtggacaagtcaccagcctgaagttgcacattgtatcgaacattggattcaaatctgggtggcctgactcccaagtctgcttttgcaggtatgggtggagataatcctgagcctggagtcccctcacctctgtctctcccctctccctaggacaagcttctctgagcatctctgtgtccaacagtcagatccaagagaatgtggtgagactcctgcccccacctgatgccctcccctcccacaaaccctcctcagctctctcgtctccttgactcccccttccccatttccatttgcacccctgacctgccctgtcttcaccctgtaggacattgccactgtctaccagatcttcc

SEQ ID NO: 22037 - DNA, 2300 bp, Homo sapien
attagctgggcatggtggcgggtgcctataaccccagctacttgggaggctgaggcaggagaattgcttgaacctgggaggtggaggttgcagtgagctgagatcgcgtcactgcactcctgcctgggcaacagagcaagactccatctcaaaaaaataaaataaaataaaatataatgctgtcctcaccatgcccccccgacgtgtccatgtcatcacctggttttatgggctgcctaagtcattcattctttcctctctcctacctccctccttcctcttttgacacgtttcccaccccatagtccctgtgccttctgtcccgcctgggtcccctcagcctccttcctggttctctgtctccatctcattctattccatctgccctccgcacacaagcggatgatgctcaaaagccttcagtggcttcctagggcccttggacaaagcccaggctcttccttgtggcccgcaaagccctgtgtggcctcatttcctccatttattatcaaacgtttatttttgagacggagtctcgctctgtcacccaggctggagtgcagtggcgcgatcttggctcactgcaacctccgcctccggggttcaagtgattcttctgcctcagcctcccaagtagctaggattataggtgtgccaccacgcctggctaatttttgtatttttagtagagatgggctttcaccatgttggtcaggcgggtctcgaactcctgactttgtgatccgcctgccttggcctcccaaagtgttgggattacaggcatgagccaccatgcccagcccatttatttattttgagacaggctcttgccctgtctcccaggtgcagtggcatgatcatggctcactgtaacctctgcctccctggctcaaatgattctcccacctccacagtagctgggattacaggtgcgcaccaccacacctggctagtttttttattttttgtagagatgggggtctcattgtgttgctctggctggtctcaaactcctgggctccagcgatctgcctgccttggcctcccaaagtgctgggattacaggcttgtggcaccatgcctaatttttaaattttttgtagagctggggtctcactgtgttgcccaggctggtcttgaactcctgggccatctgcccacctcggcctcccaaagtgctgggagtacaggcacgagccaccacatccggccatcaaatgtttatcaagcttttactatgtccaggcaccgcccatgtgatggggatacagcttggcttttgagcatagcctttccttagggcctttgcacatgctgttcccctactccttgccaactggctgcttcttacctttctggtctctgcttcaatatcacttctgccagtaattagtattattattattatttttgagacggaatctcactctgtcgcccaggctggagtgcagtggtgcgatcttggctcattacaaccaccgcctcccaggtgcaagcgattttcctgcctcagcctcccgattagctgggattacaggcgcacaccaccacgcctggctaatttttgtattttcagtagagacgggattttgccatgttggccaggctggtctcgaactcctgacctcaagtgagctgcccacctcggccttccaaagtgttgggattacaggcatgagccaccgcacctggcctctgccagtaattataaaagaacagtgagaacaggcttagaattactgggaacttgtctgaccactgtgcaaaccaggcccatccctatcaacatggatcccgtgtatccttctgggtaagcactagaattccaaggtctgcctggcatcctcacctgtgctggttccacgtcctgcaggaaattccgctgtcagaaatcctcacggtggagtccgcccagaacttcagccttgtgccgccgggcaccaacccacactgctttgagatcgtcactgccaatgccacctacttcgtgggcgagatgcctggcgggactccgggtgggccaagtgggcagggggctgaggccgcccggggctgggagacagccatccgccaggccctgatgcccgtcatccttcaggacgcacccagcgccccaggccacgcgccccacagtaagtcctcccacctcgggtccttgagagaatagatctagatgggtggggcacggttctggggaatggaagggccaaagaggaaagtgggcaatggtggggttgagaacgcagcttctggactcagcaggcctgggttcaaactctgttaatcactcctgttaatcc

SEQ ID NO: 22038 - DNA, 2300 bp, Homo sapien
aaatgactacattccgacaggagtttaactctatcctgagactcattctgagagttatagataagattctgaaattctggaaggcacatgagtgattcaaggccaacactgggaaatggttcctgtgtgcaaagaccatttgccctgctgaagctcttcttgcagggccaacaccgttctccaagcttgcctccgtgattacagcatgcagccaagacagtgcctacaatgaggaggtgtggaactggaaagcctggagcaggcgggtaccagaagggctcccaaaggctggaggaacattcttcactccagaatagaaagcgatcctggaatcgtttggaatcactggagatgtattagagcacacatacagaacgtccagtgggaaacagggagttgagctgatttctccatggatgaggattttaaaagataaaataggcagggcacagtggctcatgcctgtaatcccaacactttgggaggctgaggtgggaggatcacttgagcccaggagttcaagaccagcctgggcaatgtagcgagaccccatctctacaaaaaaataaaaataaaaaaattatctgggcatggtagtgtatgtctgtggttctggctactcaggaggctgaggcaggaggattacttgagcccaggagttgaaggctgcagtgagctatgattgtgccattgtgcttcagccgggggtacagggagatcctgtctctacaaaataaaataagacaataagaagtcatacttctgcctagtatggtacaatggacctgagtacaactgagaactctttttttttttttgaaactgagtctcgctgtattgcccaggctggagtgcagtggcgtgatctcagctcactacaacctctgcctcctgggttcaagtgattctcctgcctcagcctccggagtagctgggattacaggcgtgtgccactacacccggctaagttttgtatttttagtagagatggggttttgccatgttggccagtgtggtctcaaactcctgacctcaagtgatccgccggccttggcctcccaaagtgctgggattacaggcgtgagccaccatgcgtggcccacactactaagatttaatcacactacttagggattgcctggattccaggtctacagaaaagagaaagtggggtacagggggtgagcagacctggagggatagtgaccttaggggtgggggtgaggagaggcattttcttttggaaagttggggttggggaaagagggggaaccaaaggggcctcagaaaaaggaaggtcagggttagaagggggaacaggtgtctctagggagatggacaggagttttggggaggactagaaggaggtgcttaccatagaggactggggctgggtcagagctttggcggggacttttgaggcatccattgttgcagtgggaaaaggtggggtgtgaggcgcgttcagggcctggggggcagatggggtgatgtcggggctacaagctggaactaggggtggagctttggagggaacctttgaggtatcccttgttggagtgggaaaattttgggtgtgaggcgtgttcagggtctgggggacagatggggtgatggcagggctacaagctgaaactggggacagagctttggggggagcctttgaggtgtcccttgttggagtgagaaaaggggtgtgggtgtgttcagggtctgggggacagatggggtgatggtggggctacaagctggaacttggggcagaactctaaggaggggtgggcctgaaggggctgatacacttacggatagtagtgccttttggaggagatcgtgctggcggggggtgatgggacaggaccaggtgagagattgggtggaaagggcacaacttctcaagaagagacctaggaggggcagacgccatgtctcttactctctggcgccccctgcaggctgcgggctgaactaccacaagcgctgtgccttcagcatccccaacaactgtagtggggcccgcaaacggcgcctgtcatccacgtctctggccagtggccactcggtgcgcctcggcacctccgagtccctgccctgcacggctgaagagctggtgaggagatgggggatgggacgggttggtggctaggggggtgacttggcccaggcatggggccaacgcactgatgtgtcccctccattcttgccaacgacagagccgtagcaccaccgaactcctgcctcgccgtcccccgtcatcctcttcctcctcttctgcctcatcgtatacgggccgccccatt

SEQ ID NO: 22039 - DNA, 2300 bp, Homo sapien
catgtgaagcagctggcctgttccatcgtggaccagaaggtgagggcgcaggctccctggatccagctcggggagaggttgaaggagggggcgctggcagaggggtctggggcctggtgtgcggaagagggaggaaggagacctgagctttgggtgatggagggatagggggcattgcccccctccattgcccctctccccaccatccctttgagagaggactgggcaggggtggggtgccccagaggcctccccaaatttcatgtccctgcatgtcgttgttttctgcagcaaacagggaggaagggaggggccagccaggtgtagagaggggaggaaggggcagcagatgtcggcggacctccacgtccaggcccatcccgggcctcccatttggtggaaacaggagaaattgaacccgggctggccatggtgatccggtgacatgtgtgggtgcaggtgcttgagttagctgccaggggcaagtgaggtctcggagcccaattctgccctcccctaagcctgagatatgtgtggaggggcaggcactcctacagaccctggggactctattccctttcctagtcacagtgctgttagcctactcttaattttggacaccagggtccccagggtgggcagctgggtgttatggcaagaggaaaccaggtggaactccacgtctaaaccgtgaaatgttaaaagaatagtgggcttctgtgttggagtactggactgtagaaatgttagaatattagaatcataacttgttggaatatgcatcctaggcaattaaattgcccccatgttcgtgttcaaatattagaattctaggtttgtgaaatagtaaaacattaaaatgctggaatattagattcctagattgttgaatcctagaaagttaaaatgttagaattttagaatgctggatggatgaggtccttgaatgctaaagaattcaaagagcacagtcctagcttgtcagactcctagaatattaaaatattagattaccgcttatttaggttattgaaatcctaaaatgtatagtgataccaggtaggaatctagaatgtataattctataatgtgagcatgttggagtcccaaaatatccaaattccagaatcttttcagactcctggaaatgaatcctttgggcatcagagaaacgtggggaactgggccagctcccccattctacagacaaggaaactgaagcttagagaaaaacttcccaaggggtcagggccaaggcagtcctggtcttctgtggactctctcttagcagtgagaactgatagggttttgcccaccaaatgcctcaatcccgcaggcccagctcaccaccccaactcagcccacttcatgggaagctggtggcagtgggggtacgggggcagattgtcccttgggtgaacttctttgtccagtgctcaagtccccagcctgccccgctcaggcttcaccccagttttatttttctgccaggtccaggtgtgttagggccgcttaccttccttcccgaggccccaccggggcagtttcactttctgttctactaggtttcatttcctgcccccaggcccccaaagctgaggacccagacacctgggtcctttgagcattgggtggcaggcgccctccttatctccagcgccctcgagtccaagtcccccggcccccccccccactttcccaggagccccgaaaagtcctccttccagctcgccccaccccagtgctgggcctggagccaggtaactgggacaacaatagacagatccaggaaggaagctggggggcgggtgtgtgagcctggggaggaggcacaggggagggagtgttcattcagcatcccctcccacctccgccaggttccggaaaattcgaggtgtccacgctcccggagccactctccctcccaccccagctcccccttccagccaccaaacccacgccggcgccccctccccgtacaattggggcgctggcatcctgcccggctcgcgctggggttgggagggggcaggcaggaagcgagggcctgcggggtctctgcgtttccgggggaaacagccggccctgccctgggagggtcacagtccgcccgctgctgaaggcggctctgagcttttccgtcgccacatccctctcccgcccctcagttccctgagtgtggcttctacggcctttacgacaagatcctgcttttcaaacatgaccccacgtcggccaacctcctgcagctggtgcgctcgtccggagacatccaggagggcgacctggtggaggtggtg

SEQ ID NO: 22040 - DNA, 2300 bp, Homo sapien
ctccacgtggtgtgctccctgcccatccctctgggctcaatgcagttccccaggtggtggtttgggttttcactccagcctcagacttccttcctcagccccagcccccggatgtggtgacagaatcgatactgtaccgacctcagctacccccaacggccgtacaccaggaagaggggctcttctggcagcccccatcctcagccagccctgccatttccagtcctgccagcatcccagccagacaggtggcccttctcttagagctcaaacctaggccttgacttgtcaatcaaaggggtgggtggggcagcttccctcaagcaacttcactctgggatcttgggcaagacgttttgcttctctgaggcttcagcttattctgtgtaaactaaatggtagccactatttgattattagctggggaggagagatcaagcctgacccctgtagcggctggagttttacagcagggcccacccagcacccagtaggtcctcacagatacttgctgggtgactgaatgggtgtgcccacccatcaaagcctgagtgctggaggtggccacccctttccgcgtattatcagagacaaccacctcttactgaactgctgcgtttccaggcaccagtataccatggcatcggctcccaccatcccatgtggggtcagtcctattacagtcccaacagatggagggactgaggctcacagagaagccactcacccaaagtcacatggagagaaagacacgcacacgtactccacatccccaggagacacactctgcatctatgaagtggtatgggtgtgctgtcctccctcggggcagccccacactatcctaaggcggggttggggtgggcggggggatggaccctccccacccatccagttagcgccatgcaccttgcccaccatcgctggagacagacctaaggcgagccccttcctacccatctggaggcctcggtctttccatgtgttaaatgggctggggccgggggacgctctgcagcacccccttccctgggctgggacgcggcggggagggcaggggtgacgctcggagaacagagaggccgaacccagagagcgggccgggacctgataccgatttcccacccgtcccctgccatgggcgccggacgcctgccggagagggctcccctccttaaagggccagtggcctccaagcccgacgcctgcgaccggcggtgggtgatagtgtttcccctccctgtccagccgagggaaaagttaactttccaggcttggctgtgttcagggaaggaactggtctcgcctgcctgccctccatccctcacaccatcccttgtcccggaccctggaggcggaggtccagcccccaactcggaggccccgggcccaccctccccttccgcccccggcccctcggcaggctccgcccctctctgacgtcgccgaggcccgcgccgattggtcgactgcactgtcgctccggacacttcctcctgggccgccgccgccgccgccgacttaaactttggagggggaaaaagagctactggcgcctggcgaccctccctgccccccacccaaccccgctccggcaacgcccccttcctcacggctcccgaccgaacttttctccaacttctgcgactcgtgagattcccttctacccactccggccctcgggacccctctgcccatcccctggccggtcgggtccctgcgaacccctttatctctggaatccactcggtccccgactcagagactcctgccctccacccccaaggtgaattcccccgggccgccttctgagtgggatcctcttcttggagcactggatcctgggattccctctgcccccttctcaatccctcctctagggaaggggcctttgaatcgcgggctctcctgatccctgtgaccccgacctactagatttcctctcaggcttcttggaatctcaatcgctgggacctccaacccactacttttctcctttctgatcttctgggagccctggattccgggcctctgacccactatagtgcctttctctccttcccaggaccccgccatcctcaggtcccctccgcctgccagatcttttctcggatccccgctctcccaccacctgctcacgagatcccgcggatctagaacccagggtcccccggggccccccggccgggtcccgggtgggctccaggcggccggtccccggcctccccccatggccaccgccccctcttatcccgccgggctccctggctctcccgggccggggtctcctccgccccccg

SEQ ID NO: 22041 - DNA, 2300 bp, Homo sapien
gctggtgcccagaggacgtaaacccccttcctgttcccatcccaggcccacaaggagcagggagggaaaaggctgcacctgccagtggaggatgatggctttggggcgcaggctcctccatgctgggaggaggtgccgcaggtgcccgagccctcgtggctcatgtcctgatgcgtccctcctttcccttctcagtggtccacgtctactgtactgagtgctttacatggcatttcactgggtccacagccttaaaaagagggagcaggtgtccacatgctccagatgagacggaggggaccgctgctcctgtctcgaggaggcttccaccacctaccagccaggcgtcctcggtaatcctagcacctctgccacagggcactaatgcccagttcctgggttgtaaagggctgtgccccagtcccccagcaggccccagtgaacatacgagaaaggatggaggccgctgtctggacactcaggacatggcagcgttttgctgggacagtcatctgcccttcaggaaaaagggtgcaggtgggcaggaggcccttagatgacgccaaggggagccttcgtgggctccacgtggtgtgctccctgcccatccctctgggctcaatgcagttccccaggtggtggtttgggttttcactccagcctcagacttccttcctcagccccagcccccggatgtggtgacagaatcgatactgtaccgacctcagctacccccaacggccgtacaccaggaagaggggctcttctggcagcccccatcctcagccagccctgccatttccagtcctgccagcatcccagccagacaggtggcccttctcttagagctcaaacctaggccttgacttgtcaatcaaaggggtgggtggggcagcttccctcaagcaacttcactctgggatcttgggcaagacgttttgcttctctgaggcttcagcttattctgtgtaaactaaatggtagccactatttgattattagctggggaggagagatcaagcctgacccctgtagcggctggagttttacagcagggcccacccagcacccagtaggtcctcacagatacttgctgggtgactgaatgggtgtgcccacccatcaaagcctgagtgctggaggtggccacccctttccgcgtattatcagagacaaccacctcttactgaactgctgcgtttccaggcaccagtataccatggcatcggctcccaccatcccatgtggggtcagtcctattacagtcccaacagatggagggactgaggctcacagagaagccactcacccaaagtcacatggagagaaagacacgcacacgtactccacatccccaggagacacactctgcatctatgaagtggtatgggtgtgctgtcctccctcggggcagccccacactatcctaaggcggggttggggtgggcggggggatggaccctccccacccatccagttagcgccatgcaccttgcccaccatcgctggagacagacctaaggcgagccccttcctacccatctggaggcctcggtctttccatgtgttaaatgggctggggccgggggacgctctgcagcacccccttccctgggctgggacgcggcggggagggcaggggtgacgctcggagaacagagaggccgaacccagagagcgggccgggacctgataccgatttcccacccgtcccctgccatgggcgccggacgcctgccggagagggctcccctccttaaagggccagtggcctccaagcccgacgcctgcgaccggcggtgggtgatagtgtttcccctccctgtccagccgagggaaaagttaactttccaggcttggctgtgttcagggaaggaactggtctcgcctgcctgccctccatccctcacaccatcccttgtcccggaccctggaggcggaggtccagcccccaactcggaggccccgggcccaccctccccttccgcccccggcccctcggcaggctccgcccctctctgacgtcgccgaggcccgcgccgattggtcgactgcactgtcgctccggacacttcctcctgggccgccgccgccgccgccgacttaaactttggagggggaaaaagagctactggcgcctggcgaccctccctgccccccacccaaccccgctccggcaacgcccccttcctcacggctcccgaccgaacttttctccaacttctgcgactcgtgagattcccttctacccactccggccctcgggacccctctgcccatcccctggccggtcgggtccc

SEQ ID NO: 22042 - DNA, 2300 bp, Homo sapien
gccactggccctttaaggaggggagccctctccggcaggcgtccggcgcccatggcaggggacgggtgggaaatcggtatcaggtcccggcccgctctctgggttcggcctctctgttctccgagcgtcacccctgccctccccgccgcgtcccagcccagggaagggggtgctgcagagcgtcccccggccccagcccatttaacacatggaaagaccgaggcctccagatgggtaggaaggggctcgccttaggtctgtctccagcgatggtgggcaaggtgcatggcgctaactggatgggtggggagggtccatccccccgcccaccccaaccccgccttaggatagtgtggggctgccccgagggaggacagcacacccataccacttcatagatgcagagtgtgtctcctggggatgtggagtacgtgtgcgtgtctttctctccatgtgactttgggtgagtggcttctctgtgagcctcagtccctccatctgttgggactgtaataggactgaccccacatgggatggtgggagccgatgccatggtatactggtgcctggaaacgcagcagttcagtaagaggtggttgtctctgataatacgcggaaaggggtggccacctccagcactcaggctttgatgggtgggcacacccattcagtcacccagcaagtatctgtgaggacctactgggtgctgggtgggccctgctgtaaaactccagccgctacaggggtcaggcttgatctctcctccccagctaataatcaaatagtggctaccatttagtttacacagaataagctgaagcctcagagaagcaaaacgtcttgcccaagatcccagagtgaagttgcttgagggaagctgccccacccacccctttgattgacaagtcaaggcctaggtttgagctctaagagaagggccacctgtctggctgggatgctggcaggactggaaatggcagggctggctgaggatgggggctgccagaagagcccctcttcctggtgtacggccgttgggggtagctgaggtcggtacagtatcgattctgtcaccacatccgggggctggggctgaggaaggaagtctgaggctggagtgaaaacccaaaccaccacctggggaactgcattgagcccagagggatgggcagggagcacaccacgtggagcccacgaaggctccccttggcgtcatctaagggcctcctgcccacctgcaccctttttcctgaagggcagatgactgtcccagcaaaacgctgccatgtcctgagtgtccagacagcggcctccatcctttctcgtatgttcactggggcctgctgggggactggggcacagccctttacaacccaggaactgggcattagtgccctgtggcagaggtgctaggattaccgaggacgcctggctggtaggtggtggaagcctcctcgagacaggagcagcggtcccctccgtctcatctggagcatgtggacacctgctccctctttttaaggctgtggacccagtgaaatgccatgtaaagcactcagtacagtagacgtggaccactgagaagggaaaggagggacgcatcaggacatgagccacgagggctcgggcacctgcggcacctcctcccagcatggaggagcctgcgccccaaagccatcatcctccactggcaggtgcagccttttccctccctgctccttgtgggcctgggatgggaacaggaagggggtttacgtcctctgggcaccagccctttggcctcgccaccaccctcacacatcccaggcggggctgaggcttcagctggactgtcatcatagtatctgctccccagggctctacccctggggagggagcacttagggacagaaagggcacaaggagattcggtccagtgcctccacttctctccacccacaccccacccaagctctgggcccgtctccggcccctgctgccctaccacaaaaccccaacccatcatatcccctctctccaaactccacccaacccaggcagagccggtcactcctcccccaaagtccccagtgccctcaacagatggcaccgtcacccatcttactccaaagggtttattgagacaagttttcacatacaagatggggacagaggggttggggcttataaacaggaacctggaaggggaccgagggtgcagggtagaaccaaacaagagagtgaaataaatagagggaaagagtggagacagggaggagactgactgagaccatcacacagtgataatgcgggtggggcgg

SEQ ID NO: 22043 - DNA, 2300 bp, Homo sapien
gcgggcgtccagctctggctggcctcaaggagggaacaggatgaggacccagtcggggagaggcaggtgggagggccgcatcttcctccctgtcctgtgactcctagctaggagggctctcaggatacgtgggatgggtggctggggcctgaggcctaggcaaggcagtgacctgcccactgccccacggaggggcccaatcaacctcctctcctctgcccattccccccctcccccagggccagagcttcacagccccacagagtggcagggggccctcagtgtggggaaggcgtcacctatgccagactgggttggaactgctgggtgactccggccctatgcctcgaccctgcagaaagccgtcgggtcaaactccaaggcattctggctgacctgcgggatgtggatgggctgcccccaaaagtgactggcccgcctcctggcacaccccagccccggccacatgaaggtaagaggcaccccccacctggtcccagtcctgcgggcccatggcagagggaggctgcagagctgagcccagggcttctgtgtcttcagggtcgaggcccagcctccagtctgcagcctccctgccccaaaagttcgtctgtctgtctgtctccctctctttttgtctgtcctgccctgtctgtctctctgtctctttccagctgtgattcttcatcttgtcctctccccgtctctctctcttgctctttatctctttctctgcctctctctgtcattctctctctccctggccctctctgcccctccctcccctccccctaccaggttcctttggcttctcctcagacgtcttcatcatggacactatcgggggcggggaggtgagcctgggggacttggcagatctcaccgtcaccaacgacaacgacctcagctgcgatgtaagttctccgggtgccccccacactgtccccattggcattgcgcccagggccagcccctgcaagctctgactgggtgccgcccgtgccctgctcatcctgtttcacagaggggtgcagatgtagacagtggagggacttgactgcggtcgccaaggcgcagggcctggaagactctggagcctgtgttttaatcacagttccacggctcctccactctgcccctcccaccctggtgatttggaatgcaggaagatgacctgtagccaccccctgctctgccaagtcaggccaatctagtgtgaatgggcagctgggctgaaatgaaatgttccgggcctcagtggacgggcctctggccatctgggagcctttggccagctgggagcctttggccagctgggagcttttggtgtgggtgtatgtgcacattttactgtgacagaatgggatttccagtgttggtgaccctagtaaggctgggtggggactgctgtgagattcaggaaggggggtcagagcagaggcctgagaagtggagtgtgccatggggtccctctgcacgccccaagatgtcatttcatcttggggaagtgcagtgttctgagccccgctaggggagggggtgagtgaaccacacagtagcagatcctctgaccctaaagaactgtggcagaagggacagctaaggcagggacgtcagctgggagcccatcttggggcatggtgctgaggcttgcctggtactctgctcgtcatctctccggaacctggccctctccgggtcccctgctgggtgagcggcaccagggcgcatgcagcgtggtggacagaggcccccacagctctcccacttgtgcactgcctccccttcatggtcacgtgtctggtctccatgccctcatctcccctgggacttcctggcctctcaacctctttctctgaggctaccttttttttttttttttgctccttgaggggatctccctatgttacccaggctggtctcgaactcctggggtcaaatgatcgttctgccttggcctcccaaagttctgggattacaggcgtgagccactgtgccccgtctgtggctacttttacctgcccctaatctgagcctctcaggggtggcaggaacaagccatgtcgttcccctgctctaaacacttccccggctccttgtttctctgaggctttttcttaggatgaaatgcgcattcctccggggctcaccacccagcacctgtctcatcccctgccactctccttgcctcctgcagcctgtaccactgacctctcaggcctgggctcgcccttgctgcctcagggcctctgcacgggccctttccctctccagggccctctccttatcttgtgaagtcc

SEQ ID NO: 22044 - DNA, 2300 bp, Homo sapien
gcatgctgtctaaaccctccccttccccattctttgcacaagtgttgaataaaccttggccctaggtcttctccatgccccttccctctggtcccccccatgcaggtcagaggctggcccctcactggtgcccgagaggtgtcgccaaactcagcctggggggctgacatgtggaaggggtcagccacgccctggaggagttcacagtgggcagagcttggccttggtgacctagggcaagtgggttcctgctgctcagcctgtctcctggcctgtaatgtgggaatgataatgacagtgttcacggtagctgttcgcagggttgggggttaagtgaagtcgtgtctgcgaggggtagtcagtggtcattcagtgagtggaatttgctcttgtgccagcacggctgctggtgctgtgtttatcgctgcaatgctgtggtccattcatcctcacttgtttgcacctccgtatattcacacacggacaccagtgcatatctgccctccctgcaggcagattgttgcattatctgacttttcttcatccgaggcaccttgctgggggactggagcaggctgagccctggctaggggaaggactgcgtgagggtggggtcaggccgaccggccctagtggtagcagctgtccaaggcccagcagggggcgctccagggcagctggctggcggctgaggcagccccatgaacagaaacgggcccagagccccggcttacctgttcctaggcacggaggtggcttagtctctggacaagaggccccctgacttgtctggctttctccatgtgccagctcccatccaaggctctggtgcccgaaatggaagacgaggatgaggaagacgactctgaggatgctatcaatgagtttgatttcctgggctcaggagaggatggggaaggggctccagaccctcggcggtgcactgtggatgggagcccccatgagctgggtgagctgacgttttctggccagcccccgcttgccttccccaccgagggggtgggagcaggctcagctgcccgcagctgcttcctgtacagggtctctctaccggacggatatgtttcctgagaggagggtagccaaggagagcaggaggcccaggtcatggccgccggcccctcaccccttccctggaaaatccccatggagacgcaggcagtcctggctcttcctgaagtggggccgccagccctccagggcgggcgtccagctctggctggcctcaaggagggaacaggatgaggacccagtcggggagaggcaggtgggagggccgcatcttcctccctgtcctgtgactcctagctaggagggctctcaggatacgtgggatgggtggctggggcctgaggcctaggcaaggcagtgacctgcccactgccccacggaggggcccaatcaacctcctctcctctgcccattccccccctcccccagggccagagcttcacagccccacagagtggcagggggccctcagtgtggggaaggcgtcacctatgccagactgggttggaactgctgggtgactccggccctatgcctcgaccctgcagaaagccgtcgggtcaaactccaaggcattctggctgacctgcgggatgtggatgggctgcccccaaaagtgactggcccgcctcctggcacaccccagccccggccacatgaaggtaagaggcaccccccacctggtcccagtcctgcgggcccatggcagagggaggctgcagagctgagcccagggcttctgtgtcttcagggtcgaggcccagcctccagtctgcagcctccctgccccaaaagttcgtctgtctgtctgtctccctctctttttgtctgtcctgccctgtctgtctctctgtctctttccagctgtgattcttcatcttgtcctctccccgtctctctctcttgctctttatctctttctctgcctctctctgtcattctctctctccctggccctctctgcccctccctcccctccccctaccaggttcctttggcttctcctcagacgtcttcatcatggacactatcgggggcggggaggtgagcctgggggacttggcagatctcaccgtcaccaacgacaacgacctcagctgcgatgtaagttctccgggtgccccccacactgtccccattggcattgcgcccagggccagcccctgcaagctctgactgggtgccgcccgtgccctgctcatcctgtttcacagaggggtgcagatgtagacagtggagggacttgactgcggtcgccaaggcgcagg

SEQ ID NO: 22045 - DNA, 2300 bp, Homo sapien
tcctgcagaactgcgaggacgaagacagcgacgaggacgatgagctggacagcgtgcagcacaagaagcagcgtgtgaaggtgagcccttcctccatgccctgcacagcctggcctgggtgtgacctgatcgaagcccttccgagtcagcctgggccttcaggggctgcggtgtgtgctggcagcagggatatggagacacacaggccctggcctggaggagcttgtggccagcagcggccttgtaaatagtcatgtgcagaaggacgcgttgtggtggaggcaggggcatgtgcctatgaaggaggcacctgtggcagatggcctcggagctttccctgagccccgggcttcccattagcgggtccctttgcctaggtcccctttctttcctcctttagactcagctcagacaccccctcctccaggaagccttctctgactcaccctgggctcccttccctggccctggccactctggggtcctccctgtctggtctgtattcctcctgacctctccctgggagggactgggcctgtgtgggcctccactgcatctccagtatccccagtgtggctcagcacagagtcgcaccccaagtagagtggtgtgcacggagccgcagcactgcaggaggcctagaggaagagcaggagggctgagtccagggtctcaaatgctggcccctggtccagacgcttggtccttcccacccctctgagaatttctagtccttttccacccctccacccattccatcaggaatcatccgtggtgtttgcaccccttcgggcccacacccttgggctggctggttgggtagggctctctgtctctacgcagcagccctccatcgaggcccagctgggaacccaggggactgcccatggctcccagggggccctggcccagctgcgtgagttctggcccacacttctttgtcttggcttcagtctcctcaccctttagatggggctgagtccctccgtctgagttgttgaggatttaattagaatgagctggtgcccaggaagccctcagctgcatggtggctgtcccccaagtgctcagtaggtgttagtggcgctggtggcacttggtagtggtggagccctcatggttccaggcactgttggcagagcacaattgccactcgtgtgcccctcagagcacctgtggtggttctctcctctggagtcctgagcccggccgctgcctttctgggcatgctgtctaaaccctccccttccccattctttgcacaagtgttgaataaaccttggccctaggtcttctccatgccccttccctctggtcccccccatgcaggtcagaggctggcccctcactggtgcccgagaggtgtcgccaaactcagcctggggggctgacatgtggaaggggtcagccacgccctggaggagttcacagtgggcagagcttggccttggtgacctagggcaagtgggttcctgctgctcagcctgtctcctggcctgtaatgtgggaatgataatgacagtgttcacggtagctgttcgcagggttgggggttaagtgaagtcgtgtctgcgaggggtagtcagtggtcattcagtgagtggaatttgctcttgtgccagcacggctgctggtgctgtgtttatcgctgcaatgctgtggtccattcatcctcacttgtttgcacctccgtatattcacacacggacaccagtgcatatctgccctccctgcaggcagattgttgcattatctgacttttcttcatccgaggcaccttgctgggggactggagcaggctgagccctggctaggggaaggactgcgtgagggtggggtcaggccgaccggccctagtggtagcagctgtccaaggcccagcagggggcgctccagggcagctggctggcggctgaggcagccccatgaacagaaacgggcccagagccccggcttacctgttcctaggcacggaggtggcttagtctctggacaagaggccccctgacttgtctggctttctccatgtgccagctcccatccaaggctctggtgcccgaaatggaagacgaggatgaggaagacgactctgaggatgctatcaatgagtttgatttcctgggctcaggagaggatggggaaggggctccagaccctcggcggtgcactgtggatgggagcccccatgagctgggtgagctgacgttttctggccagcccccgcttgccttccccaccgagggggtgggagcaggctcagctgcccgcagctgcttcctgtacagggtctctctaccgga

SEQ ID NO: 22046 - DNA, 2300 bp, Homo sapien
ccacagaccagcccttctgctcatctgctgggatcctagataaatcaccctctcaaaacctccatttcctctcctgattttttttaaaggtagggggaatatcctttatcctcccagaatgctgcaagaattaaatgacagctcgtatctacagtacttgatacagcgccccagacatggtatgtgctcactaaattgcagctggtaccgttattgctgagtgaggtaatgacactgcctctgcctacatcacagggcattgtgaagatctgatgagatgtatgctgggaaagagcttcggaagtagagagtgggacagaagtgagagcagttacataaggattctgctcccatcccagccccaagcctcagccaccacaagtgagggcagggggagagttactggagggtctttactcatcctatgaacaaaatgcttttttttgagacaggatctcactcttttgcccaggctggagtgcagtggtgcaatcatggctcaccgcagcctcaacctccggggtttaagcaatcctcccacctcagcctcctgagtagctgggactacaggcgcatgtcaccacacccggctaatttttgtacttttttgtagagatgaggtcttgctatgttggccaggctggcctcgaactcctgggctcaagggattctcccacctcaacctccccaagtgttgggattacaggcgtgagccaccgcaccccatccctaccgacacaattctcatcagctatttatttgggtaccagcttcctactagatagcaaacggcaaatcggaaggggaaaggtgggctgctacaagcaggtaatgacaatttctgctaataataacccagtccaagaatcttcagacttccagcgggccattcctgatcccttcaaatccggacatctccatggtcctccagtcactgccaatggacctgacgctccacgaggtcacaaaccctagcccaactcctcagactcttccattcaacatccctgtcccaagctaccccaaaaaccacggggtcttttcccaagacttccacaaacatatccccttccccccaaccccagtctacccccgttccgagatgcctcctcatgttgccttcgggctctacaaaattctcccccctaaagcatcaccccagggtaacccctaactcgtcctcattggcaccatcccaggaccctcacctccatactggacatgcccaacaccccacactccagttcagggctctctacctacatcctacaacacacgtgccatctcagtgccatcgcgcccactcctgcacacccccaaagtggaacttccactcttaagctctcccatccaggctcctagggtacattccctgctctgtccacacttccactccaaagaacccttccctgcactgtgcagccacacatgcccgggatccccaaagtttctcctcagaggggaaggcacacaccttcatcctggaccccttgaaaccctcctcccacccctcgggtccttacacagccctccttccgtgcccaccgtccagtcgccccgaaacacaccgatcccaggttcccgacttcctctccctaaatcctcccggttccccatctggacccgctctttcccagcgggtcccaagttccccccttggacgctcccacctccaacctgcacctggctagggccatggtcggggtcggggtcgggagtccctcggcgcccggcaagcttctgcttactcccacaggagaccactcaggtctcccagacccctccagctcctctccacaccctttcccgagttctcttagcctcccctccagggctcgagtcgcctctctcaggagccccgcggccagcgtgctcagtcccagtcccagtcccactcccagctggttgtggtccctccgcccctttctctcggccggtcccggtgatccctcccacccccggtccctccactcccacctcgggccgtcccggtcccgtcccaccccggagtgccctcaggacacccctcggacggcccctcactcgccctccgggaccgtcgcggtcccctcccgcccccccgccggccgtcccggcggccattgctccaagatggcggcggcggcggcagcgggtgaggccgggccgggccgggccgggttgggggtcgggggtcccgggacagcgctcacctgtaactcggcgcgctcggcctcccagcgggctttctcggcttcgaagcgcgcccactcgtgctggataaagtgcaggatccccggcaggctcaggggctccgggcc

SEQ ID NO: 22047 - DNA, 2300 bp, Homo sapien
ttggcctgagcctcagtccctgcacctgtggaatgggaatgtgacggttagaaaaaaatgagagggctgggcgcggtggctcacgcctgtaattctagcattctgggaggccgaggcgggcggatcacgaggtcagaagttcgagaccagcctgccaacaaggtgaaaccccatctctattaaaaatacaaaaaattagccgggcgtggtggcaggtgcctgtaatcccagctactcgggaggctgaggcaggagaatcgcttgaaccagggaggtggaggttgcagtgagccatgaccgcgccactgcatttcagcccgggcaacagagcgacactccgtctcaaaaaagaaagaaagaaaaagaaaaaaatgagagacatgggaaagccttaaggaatgaggaagggcagtttccatgagagtgtaggtgacactgagggacttcttacctcctaggttgtaggctgggggagttccaggagggcagttccagcccagctgagctgcgctcctgagaggaggagaaccagaaaatcccaaatcagccatttccgtacaatagagcacaatttcatcttatccacaaaagtggcaagagaaaggtcagggaatcctttctcttgaagtcctataatctcgggcaccacctggggtgtctcaggagtggggtggggtgaatgggagggatgtcagttattatagcaacctataaccatccctctagcatgaatgtgtccagaaaaggtagggctagaagccaacagaagctgttaccatgacaaccccttccatagacacactctacctctgagagacattcttaaaacatcccctggccgggcgtgatggctcacacctgtaatcccagcactttgggaggccgaggcgggcctgaggcagatcacctgaggtcgggagttcaagaccagcgtgaccaacatggagaaaccccgtctttactaaaaataaaaaaaaaattagccgggcgtggtggcgcatgcctgtaatcccagctacttgggagggtgaggcaggagaacggcttgaaccggggaggcggaggttgtggtgagccgagattgggccattgcatcccagcctgggcaacaagagttacactctgtctcaaaaaaaaaaaaaaaaaaaaaaatcccctcctttgttgggcttggttcctagggtcactcgaagggggctgctctattatcatagtaaccaggccttgaacttgcctgtttctcaccttccggaggaaggtccaggccctgtaaccatagcaactgcccctcagcagagcatctcctctaaataaaaacacctggttagtttggtgcatgggcctcccacgatgggaaggggaagacggttaccatggtaatgccaactaggtggctatgggggaggggctggggaagaggtgcttctcttagagatcagtgtccttggggctggggtcctttctacctgaatgctaggtgggggggaggttgccatagtaatcaatgaggataggagcagaaggaccaccacggacacttaggttaccttagcaaccttctcctggtgcagagtcctaagaggtttggggctccataaccacaaaggtggaagcgaggggaaggctgctccccaccacctcgcccccaccgctggggaagggttaccatgacaaccaacctggccggcaatcagagaggatggggccactgctggtcgccctttctctcagagtaaaagtaattgtccaggagagtggtgtttgggtgtggaaggggtaaggctctttctctggggcgaagtgggaggaggggggcagaaagcggccccttcctcagtctcactccagcgagggggaccgtcgcgcggggcctgggtctccctcgccctcctcggggcgcgatctcccacccgccggcccccgcgcgggcacgctacccttcggtgtagacccgggtgggcgaggctcgcgctcgccgccggccccccttcctactgtcccccgccgggcgcgcgcgcggtggttgcggcgggggaggggggggggtgttggcgcggccgcgcaggcgcgcgaggcacagcgggcgcgcaggccggccccggggcctccatgatggaggagcgagcggccgccgcggtcgccgccgccgcctcctcctgccgtccgctcggctcaggcgcgggccctggccccactggggcggccccggtctccgcccctgcccccgggccgggcccggcaggtaagggaggcggcggcggaggcagccccgggcccacggcgggcccggagcccctgag

SEQ ID NO: 22048 - DNA, 2300 bp, Homo sapien
cgcaaccaccgcgcgcgcgcccggcgggggacagtaggaaggggggccggcggcgagcgcgagcctcgcccacccgggtctacaccgaagggtagcgtgcccgcgcgggggccggcgggtgggagatcgcgccccgaggagggcgagggagacccaggccccgcgcgacggtccccctcgctggagtgagactgaggaaggggccgctttctgcccccctcctcccacttcgccccagagaaagagccttaccccttccacacccaaacaccactctcctggacaattacttttactctgagagaaagggcgaccagcagtggccccatcctctctgattgccggccaggttggttgtcatggtaacccttccccagcggtgggggcgaggtggtggggagcagccttcccctcgcttccacctttgtggttatggagccccaaacctcttaggactctgcaccaggagaaggttgctaaggtaacctaagtgtccgtggtggtccttctgctcctatcctcattgattactatggcaacctcccccccacctagcattcaggtagaaaggaccccagccccaaggacactgatctctaagagaagcacctcttccccagcccctcccccatagccacctagttggcattaccatggtaaccgtcttccccttcccatcgtgggaggcccatgcaccaaactaaccaggtgtttttatttagaggagatgctctgctgaggggcagttgctatggttacagggcctggaccttcctccggaaggtgagaaacaggcaagttcaaggcctggttactatgataatagagcagcccccttcgagtgaccctaggaaccaagcccaacaaaggaggggatttttttttttttttttttttttgagacagagtgtaactcttgttgcccaggctgggatgcaatggcccaatctcggctcaccacaacctccgcctccccggttcaagccgttctcctgcctcaccctcccaagtagctgggattacaggcatgcgccaccacgcccggctaattttttttttatttttagtaaagacggggtttctccatgttggtcacgctggtcttgaactcccgacctcaggtgatctgcctcaggcccgcctcggcctcccaaagtgctgggattacaggtgtgagccatcacgcccggccaggggatgttttaagaatgtctctcagaggtagagtgtgtctatggaaggggttgtcatggtaacagcttctgttggcttctagccctaccttttctggacacattcatgctagagggatggttataggttgctataataactgacatccctcccattcaccccaccccactcctgagacaccccaggtggtgcccgagattataggacttcaagagaaaggattccctgacctttctcttgccacttttgtggataagatgaaattgtgctctattgtacggaaatggctgatttgggattttctggttctcctcctctcaggagcgcagctcagctgggctggaactgccctcctggaactcccccagcctacaacctaggaggtaagaagtccctcagtgtcacctacactctcatggaaactgcccttcctcattccttaaggctttcccatgtctctcatttttttctttttctttctttcttttttgagacggagtgtcgctctgttgcccgggctgaaatgcagtggcgcggtcatggctcactgcaacctccacctccctggttcaagcgattctcctgcctcagcctcccgagtagctgggattacaggcacctgccaccacgcccggctaattttttgtatttttaatagagatggggtttcaccttgttggcaggctggtctcgaacttctgacctcgtgatccgcccgcctcggcctcccagaatgctagaattacaggcgtgagccaccgcgcccagccctctcatttttttctaaccgtcacattcccattccacaggtgcagggactgaggctcaggccaaatcgcaactcagacccagtgaacccaaggcctgaagagaatttggattcatttaccttgttttgtggggactggagagacaagtaaactctcagagtaactgtcccctctgactaccatttctaaggcaagccccctgtttctactcttgcgccccctgctggtttcctgccctgtctgtaagttgcatggcttttgtccgtcttttttttgtttgtttgtttgttttgagacagggtctcacccaggctagagtgaagtggagcaatctcg

SEQ ID NO: 22049 - DNA, 2300 bp, Homo sapien
ttgggtaaggagcccctggaggatctgagatctgagtaactcccaccaggccctcttcccagccctggggcacccccacaccacgtgtcactcggacataaccaggctctgtttttggcctccgcttcccgcccatttcagctggggtctggccgcttcccctttatcttttagatcagccctgccacccctgcctttccctcccgtttcctcctctgtctgggccaccccctagcaggcagcccagaagaggaccagttagaaaggggagcagattcttttccttctcctggcctctgccccgcgcccccaagaatggcctcccccactttgaggagggcggggggcagaggcccccttgcgcttgcctttagggcttgctcattcagtgtctccacgttggggacttcctggaagttgggggaaggaaatgatgagtcacggaacagggttctccagcctctggggcgtcagtgcaggctgagatgcgagactggggcaggcttggtgtcccgagttgaagcctgggagcaccttctggctgggggagattagctgggtcctggcccagcctgggcctgggtggtacaggcggaccttcaggcaggcacacccactccgaggctgtttatgagcacaggcctcccctgcgtgccaaaacagctgtagctcacacttggcctgccacacaggcttataaccaaatgacatacagctggacacattcacgcagacactcagctgaggctgtagcatctcgacaaacacatggccagataccagcggtcatacacacgctcactgtgtactaagacccctgtagcacagccattcagtgatgccaccagccacgccaacatctaaacacaggctcaagagcacacaatacacactcacatacacacctatgtggtcacacaccaataaactcatgctttttttttttttttttgagacagtctctgttgctcaggctggagtgcagtggtgcgatcttggctcattgcaacctctacctcctggatttaagtgattctcgtgcctcagccttccgtgtgccaccacgcctggataatttttgtgtttttagtagagacggggttttgccatgttggccaggctggtctcgaacccctgacctcaagttatctgcccacctcagcctcccaaaaggctggaattactggcgtgagccaccgcacccggccaaactcattcctctaccatgacgttattttactgtaccgtgatgcatgggtggccatccatggacactgtcccatactactgaaccttaacctgcacccaaactattaacatttgacagattgtatatgggcacatggcgttggctgtacaccagtcattggtgagagggagcatgtggagtgcttggggctatggagccagctggctgggttcaaatcccagctctgctatttcccagctgggcaattttctttacccttctgggcctcagcttccttttctgtaaaatggggtaatagtgattatccccaaggctgtcgtgaggatgaaatgggttaatttgtgtcaagcacaggccaaaatgcctgcctgccacacggtaggtgctgtagatggcttagctgctatatatattttttgagagagtctcactcggtcccaggctggaatgcagtggcttgatcttggttcactgcagcctcaacctcctcgggcttgagtgatcctcccacctcagcctccagagtagctggaactacaggcacatgccaccatgcctggctaatttttgtattttttgtagagacacggtttcgtcatgttgcccaggttggtcttcaactcctggctcaagcgatctgtctgccttggcctcccaaagtgctgggattccaggcaagagccatggcgccttggccttagctactattttcatcttaaggcagacactgtcacacaagagtaagggtagccttgtaaacacagatgcatattcatgagatatgaagccgtcccttttctccctccccgccaccgcctcccaacacacccagatcctcccccatactctcagagccgctggcaggccctccaggaggaagtggctgatgcaagctgtccagggtattaagtttgctgcatggggtggagctgaggcccggggcgacctgccctggcctgccgtgggaggccagcattcctcaccccgaacccacaatgcctcagggctagcacgccagcctcttggggctgaaggaggctgactccccaagtcctgcaaaggggtgcaagcctagttccaaccctgccgg

SEQ ID NO: 22050 - DNA, 2300 bp, Homo sapien
gttaggggcttgggaggtgggcatgcacgtgtcatcctctctaggtgtggcctcaaggtgaatgacttcctctgcctctggggttcaagcgattctcctgcctcaggcttccagtagctgggattacaggcacgtgccaccacaccaggtaatttttgtatttttagtagagacgggtttcaccatgttggccaggctggtctcgacctcctgacctcaagtgatccgcccgcttcacctcccaaagtggtgggattacaggcttgagccacggctccctaaataaatacatcaattttatttaaatcttacagcaatcatatgagacaaaagcttttaacacctgcactttatattcgaggaattaaagttctcagaggcgactaaagaccaaactcagggctgaggagttccaaagctgagttgagttgcaaatgaatcaccgaggaccaccggagctttctagcgaccctcgcaccagggaacgaacccctgtggtttaagggctccaacccacaacccagttcctttggcgggaaacagcaccctcccaaggccccgccccttcctggccccgccccgtcgtctctgggcccggctcctggagatgggtattattaatctgccttctatgggggacctggcccatctcgggtatcagccccgcccctactcgtccagtctccgaacgctctgcagccaatcggcgcccgagggtcggtccccgccttctcaagccccgccccctacccttatccctggcagcttccgctaaacgggctcagagccacgcggcacgcccgggaggctttctctggctggtaaccgctactcccggacaccagaccaccgccttccgtacacaggggcccgcatcccaccctcccggacctaagagcctgggtcccctgtttccggaggtccgcttcccggcccccagattctggcatcccagccctcagtgtccaagacccaggcagcccgggtccccgcctcccggatccaggcgtccgggatctgcgccaccagaacctagcctcctgcagacctccgccatctgggggcactcaacctcctggagccaagggccccacgtcccacccagagaaactctcgtattcccagctcctagggccaaggaacccgggcgctccgaactcccagctttcggacatctggcacacggggcagagcagagaagcctcagcgcccagcctggggaatttaaacactccagcttccaagagccaaggaacttcagtgctgtgaactcacaactctaaggagccctccaaagttccagtctccaggtgctgttactcaactcagtcctaggaacgtcgggtcctgggaaggagcccaagcgctcccagccagcttccaggcgctaagaaaccccggtgcttcccatcatggtggccgatcctcctcgagactccaaggggctcgcagcggcggagcccaccgccaacgggggcctggcgctggcctccatcgaggaccaaggcgcggcagcaggcggctactgcggttcccgggaccaggtgcgccgctgccttcgagccaacctgcttgtgctgctgacagtggtggccgtggtggccggcgtggcgctgggactgggggtgtcgggggccgggggtgcgctggcgttgggcccggagcgcttgagcgccttcgtcttcccgggcgagctgctgctgcgtctgctgcggatgatcatcttgccgctggtggtgtgcagcttgatcggcggcgccgccagcctggaccccggcgcgctcggccgtctgggcgcctgggcgctgctctttttcctggtcaccacgctgctggcgtcggcgctcggagtgggcttggcgctggctctgcagccgggcgccgcctccgccgccatcaacgcctccgtgggagccgcgggcagtgccgaaaatgcccccagcaaggaggtgctcgattcgttcctggatcttgcgaggtcagctcccgctcccccgggaggtggggaagagtgttacggatggcgggagtggtcacgtggacaggacggggctttggggcccctggagcagagacttccctctagagtcttaggaaaactcgacaggatattgaggggaggctccagccctcgggagtgtgagtctagtctcctggggaaggggtttctaaatctgggggcctgggtacataagtggggtcttatagagggagaagaaagtgatttggggagacataggagggtctgcctaggggagaaagacactgaggggaggggaccccaggaggaacttttgcgg

SEQ ID NO: 22051 - DNA, 2300 bp, Homo sapien
tggtctcgatctcctgaccttgtgatccacccgcctcggcctcccaaagtgctgggattacaggcgtgagccaccatgcccggccgaaaaattttttaaaatatttatttatttattttgagacggagtctcactctgtcactaggctggagtgcagaggtgtgatcttggctcactgcaacctccacctcccgggttcaagcgattctcctgcctcagcctcctgagtagctgggactacaagtgcatgccaccatgcccaactaatttttgtatttttagtagagacagagtttcaccatattggccaggatggtctcgatctcctgacctcatgatctgcccactctggcctcccaaagtgctgagattacagacatgagccaccatgcctggcctattttcatgtttttaaagataaggtctcactatgttgccccggatggagtctagtggctaaatgtgggcacgatcatagctcactgcagccttgaactcctggcctcaagggatcctcctgctttagcctcccaaatacctgggactacaggtgcatgccactgaatccagcttgttcttcagtaataataacaataacagcaatcgcagcagtagtatttgactttcttctgaagggcatttttgttagaaacaaaagaagagagaaagaacaaaaaattttaaagcacaaataaataacttttttttttttgaggtggagtctcactctgtcacccaggctggagtgcagtggtgagatctcggctcttcgcaacctctgcctcctggattcaagcaattcttctgcctcagcctcctgagtagctgggattacaggcatgtgccaccacacccagctaatttttgcattttcagcagagacagggttttgccatgttggccaggctcgtctggaactcctgacctcaagtgatctgcccgcatcaactcccaaagtggtgggataacaggcgtgagccactgcgcccggccgtattatctcatttgaacccttgcaacactcaaggcggtatgacttattattattcccatttacacatatgaagactgagcctcatagaggttgtaaattacctgaggcctcacagctgctgtaggaggaagcttctgacattaccactacaatctttgagcaagcatgaaagcctgaaatgtcacagaacaggctagagatgggaaaggaatgaggatttcaacactgtcaggtggagtaaggaatcataattcattgttaacctcccaaacggccactaacagagaatttggggaggcagcagagtgggtgcggttaggggcttgggaggtgggcatgcacgtgtcatcctctctaggtgtggcctcaaggtgaatgacttcctctgcctctggggttcaagcgattctcctgcctcaggcttccagtagctgggattacaggcacgtgccaccacaccaggtaatttttgtatttttagtagagacgggtttcaccatgttggccaggctggtctcgacctcctgacctcaagtgatccgcccgcttcacctcccaaagtggtgggattacaggcttgagccacggctccctaaataaatacatcaattttatttaaatcttacagcaatcatatgagacaaaagcttttaacacctgcactttatattcgaggaattaaagttctcagaggcgactaaagaccaaactcagggctgaggagttccaaagctgagttgagttgcaaatgaatcaccgaggaccaccggagctttctagcgaccctcgcaccagggaacgaacccctgtggtttaagggctccaacccacaacccagttcctttggcgggaaacagcaccctcccaaggccccgccccttcctggccccgccccgtcgtctctgggcccggctcctggagatgggtattattaatctgccttctatgggggacctggcccatctcgggtatcagccccgcccctactcgtccagtctccgaacgctctgcagccaatcggcgcccgagggtcggtccccgccttctcaagccccgccccctacccttatccctggcagcttccgctaaacgggctcagagccacgcggcacgcccgggaggctttctctggctggtaaccgctactcccggacaccagaccaccgccttccgtacacaggggcccgcatcccaccctcccggacctaagagcctgggtcccctgtttccggaggtccgcttcccggcccccagattctggcatcccagccctcagtgtccaagacccaggcagcccgggtccccg

SEQ ID NO: 22052 - DNA, 2300 bp, Homo sapien
atgatctctggcctctttttgcccctataatattcaacaactatgtgttggttattctgccagtactataccttaaatttacataattctacaatacattttgttttatttatttaatttattattattatttctttgaaatggagtctctctctctctctgtcccccaggctggagtgcagtggcacgatctcggctcactgcaacctccatctccagggttcaagtgcttctcctgcctcagcctcccaagtagctggtattacaggcaagtgctaccaagcccggccaatttttgtatttttattagaggtgctgtttcgccacgttgggcaggctggtctcgaactcctgacctcaggtgatctgcctgccttggcattccaaagtgctgagattactggagtgagccaccatgcctggcatgctttgttcttattagggccaatctcccctcagtactaatagtaataactttattgactgcttaccatctgtcatgttctaggtaatgaagatacagttatcagacagggtccctgccctcaacaactcactacctaatgagagatctagacaaacatacacacatactcatagggcaaataaaataatttttaaaatgtaataaaggccatttaaaaaatcacgcctgtaatctcaatactttgggaggtggaggagggaggatcgcttgagctcaggagttcaagagcagcctaggcaacatagcaagaccctgtctctacaaaaagtacaaaaaattagccaggtgtgacggcatgtgtatgtagtctcagctactcgggaggctgaagtgggaggatcacttgagcccagcaggttgaggcttcagtgagctgagatcatgccactgcgctacagcctgggtgaccaagggagaccctctttcagaaaaaagcaaaaacaaagacacaccaaaaaaacactaaactaactgctgacctggagggttttttttttttttgacagagtttcgctcttgtcattccagctagggtgcaatggtgtgatctcggctcactgcaacctctgcctcccaggttcaagcaattctcctgcctcagcttcccgagttgctgggattacaggcacctgccatcacacccagctaatttttatatttttagtagaaatggtttcaccgtgttggccatgctggtctcgaagtcctgaccttaggtgatccacccacctcagcttctcaaagtgctgggattacaagcatgggccatcatgcccccgccaaactagagatttttttttttttttggagtctctctctattgcccaggctggagtgcagtggcgagatctgggctcactgcaacctctgcctccgggcttcaagtgattctcctgcctcagcctcccgagtagctgggactacaggtgcgcaccaccatgcctggctaattttttgtatttttagtagagatggggtttcgccatgctggctaggctggtctcgaactcctaaccaagtgatctgcctgcctcggactcccaaagtgctgggattacaggagtaagccaccgcgccgggccggttcaaatttatgcttttaaactgttgtctcccgagagacacacgcaacgtattttaagcaaaacactggcttggtgttgtggtggctcatgcctgtaatcctggtgatttggaaggctgagggtcgcttgaagctgagttcgagatcaacctaggcaatatatctagacccctgtctctatttttaaaaaaattaaagaaatcactggatgaggaatggaaagacattttctatctccccaggacagttttttaaaatttaaaactactattcccagcatgcccttctcccctgggtggggggaggggacctaagagaactacatttccctgaatgcaacgccttcaccgctggttcttcagcatctcgggaattgtagtcctctgtaaagatgtttgtccacaaatcccagcatgcacttgggatctgactcgtttggtaggaaaaggactggctctgactcttcacccatcttcacccaggctggcccctttggtgaaactacaactcccaggggtctgtgcgcgagaaggcaggcgggtttttctaccggaagtccgctctagctctgggccctacaactgcaccctgagccggagctgcccagtcgccgcgggaccggggccgctggggtctggacgggggtcgccatggtaacgggggagcgctacgccggggactggcggagggggggcccacgcgtaaatagccgaggctggatcgggcgct

SEQ ID NO: 22053 - DNA, 2300 bp, Homo sapien
tgccttgatgctgatggcttctgactcatggtggtggttactgaaggttgggctggctgcagcagtttgttaaaataaggcagcagtgaagtttgctacattcattgattcttcctttcgtgaaagatttctgtatagcatgcaatgctgtttgatagcattttatccaccgtagaacttctttcaaaattagagtcaatcctctgaaaccctgctgctactttatcagctaagctatgtaatactctgaatcctttgttgtcatttctgcagtgttcacagcatcctcaccaggagtagattccatcttaaaaaattgctgggcgggccaggcacggtggcttaacgccagtaatcccagctcttcggaaggccgaggtgacctcatctgaggtcaggagttggagaccagcctggccaacatggagaaaccgtgtctctactaaaaatacaaaaatggccaggtgcagtggctcacacctataatcccagcacttagggaggccaaggcaggcagatcacgagttcaggagatagagaccatcccggctaacatggtgaaaccccgtctctactaaaaatacaaaaattagctgagcgtggtgacacatgcctgtaatcccaggtactcaggaggctgaggtagaagaatcgattgaacccgggaggaagaggttgcagtgagccaagatcgcgccactgcactccagccaggacaacagagtgagactccatctcaaaataaataaataaataaataaataaataaaaataaaaatacaaaaattagccacgcatggtggtgagcaactgtagtcccagctactcaggagggtgaggcaggagaatcgcttgaacccgggaggctgaggttacagtgagctgagattgcagcattgcactccagcctgggtggcagaactagactcttgtctcaaaaaaaaaaaaaaaaaatcgctgggtgcagtggccaacccctgtgaccccagcactttgagaggccaaggtggacggatcacttgaggccagaagttagggaccagcctggccaacatggtaaaaccccatatctactaagaatacacaaattagccaggcatggtggtatatgcctgtaatcccagaaacttgggaggttgaggcatgagaattgcttgaaacctggaggcggaggttgcagtgagctgagactgtgccactgcactccagcctgggtgatgaggcaagacaatgtctcaaaaaataaataaataaataaataaataaataaatcactttctttgctcaccaataagcaattcctggctgggcgtgtggctcacgcctgtaatcccaacacttcgggaggctgaggcgggtgagtcacctgaggtcaggagttcgacaccagcctggccaacatggagaaaccccctctctactaaaaatacaaaatttgccgagcatggtggtgcatgcctgtaatcccagctactcgggaggctgaggcaggagaatcgcttgaacccaggaggcggaagttgcagtgagctgagatggaaccattgtactccagcctgggcaacgagtgaaactccgtctcaaaaaaaaagaagcaattcctcatctgttcaggttttattatgagattgcaacaattctgtcacatcttcaaactccatttctaattgtagttcactttccaccacatctgtggtgactttattcaatgaagtcttgaacttctcaaagcagtctgtgagggttagaatcaacttcttccaaattcctgttaatgttgatattgtgagctctctcatgaatcatgaatcttctttttattttattttatttttattttttttaagagatgaggtcttgctctgtcacccaggctggaatgcagtagtgtgatcatagctactgcaactttgaactcctgggctcaagggatcctcctgcctcagcctaccgagtacctgagactacaggcacatgctgccatgctggactaatttttgtttttttttaagagatggagtcttactacattgcctgggttggtgttgaactcctggcctgaagggatcctcctgcctcagcctctcaaatgaatgttctttttttttttttttttttgagatggagtctctgtcactcaggctggagtgcaatggcgcgatctcagctcaccacaatctccgcctcctgggttcaagcaattctccggcctcagcctcccgagtagctgggattacaggcgcatgccaccacacccagctaatttttgtttttcgagtagagatggggtttcaccatgt

SEQ ID NO: 22054 - DNA, 2300 bp, Homo sapien
actaaacaggggacaggcctcacagagcttgcattcttgtcagggaaaccatctcgtatttacacacttaatttttttttatttggaaatgattgaaaacttgtaaaaatagcacaaaggaatatcctatatgctttacccagattcatctatttttttttttcagattcatgtgttgttaacaatttaccaccccatttgtgttcttactctttctgtatacataatttttccagtgggatcagttacgtacattatggcccttcccctcaaaatactaaggtgtcagtttcctaaaagtggagacattttcacatgatagattttatagatttacattgataaaatattttatttgggaggatttatccttcctgcatttcttttttttttcaatcttttttttactgtgttaaaatacacaaaacataaaacttgccattttaatcatttttaactatacagttcagcgatattaaatactttcatgttatgcaactatttctgtaacactttccatcttgtaaaactgaaactctgtacccattaagcagtaacttttcattcccactttccccagcccctgacaaccactgttctactttctgtctctatgagtttgactactcttaagtactgcatataagtggaatcatatagtatttgtctttttgtgactggcttatttcacttagcacaatcaagattcagccatgttgtcagaatttccttccctttaaaggctgaataggccaggcgtgatcgcttacgcctgtaatcccagaactttaagaggccaaggcaggcagatcgcctgagcctaggagtttgaaaccagcccgggcaacatggtgaaacctcgtctctactaaaaatacaaaagttagctgggcacggtggcgcatgcctgtaatcccagctactcgggaggctgaggaaggagaatcacttgaacccaggagacggaagttgcagtgagccaagatcgcaccactgcactccagcctgggctacagagcaggactctgtctcaaaaaataaaataaaaataaaggttgaataatattatattgtatgtatatatcacattttgcttatccattcatgagtaggtggatactttgggttgcttccatgttttgttgttgttgctgttttgagatagtcttactctgttgcccaggctggagtgcagtgatgagatctcagctcaccacaaccactgcctcccaggttcaaatgattctcctgcctcagcctcccaagtagctgggattacaggcacatgtcaccacacccagctaatttttgtatttttagtacagacggggtttcaccatgttggccagactggtcttgaactcctgacctcaggtgatccgcccaccatggcctcccaaagttctgggattacaggcgtaagctaccacgcccggcccaggttcctgtttttgcagtgggtttataattcattaccatacttaattattgtggcgctcaaattgtcccagagttggccagtgggagccccttcaggctggcttctgtgtccttgtgagatgctccatcgttttttttcttgcataaaaagatgttccaggctcattttgtccctatcctgccctaaccctggaatcagccctttttccagggagccctcacacccttgttttagcacttagcacactgtttacttatgttttcctccactggactagattgtacctctctggggacacatagatgtgagtcttacttgctcttgtatcttcacccagcacaaggcctgacacatgagatgtttactaaatatttgttgaataaaaaattaatttttactgtagttaattgattaaaatttggttctaaaattatgatgctgatgggttttctttttttttcccccatctaggaagaaatgttggctatttggcgatgagaggtggtgaacagtgaccatactggtatacaacactatgggacctggcatttttgctgcatgtccagcccacccccactaataatgtaggaagctgtctggtccattggaaacactaatctgatctcagaagtggctgatcgtggcaggatgtgtcgacgatgatgatggcaagaaagcaagatgtccgaattcccacctacaacatcagtgtggtgggattatctgggaccgagaaggaaaagggccagtgtgggattggaaagtcttgtttgtgcaaccgcttcgtgcgcccgagtgctgacgagtttcacttggaccatacctccgtcctcagcaccagtgactttggagggcgagt

SEQ ID NO: 22055 - DNA, 2300 bp, Homo sapien
gggacaggctttatggagtacatggttcttccctgagaccccagaatccattcacattatagcattctccatattgagtcaggtagcaggctgaatgaagattggattctcattgcctttggtttgtcatttgaagtaatctcacccagcagcccagaaatggaatgatcttgctctttccttgtgtacattatattctgatctgttctttttttttcttgctatttgtttgcacaggaagttctcaacgaatctcagactaaacaggaagtgatttttttcttatacaaaggggtactggtaggaacgaagatgggcaggagaaggagagggaataggtggcctgcggcctggcggttcgttgtttccttcagtggattttatgtaaaatccctaaatactttaggtttatgggctgtgcacatttctgagtaaatctgcttttctaaattggtttcatcaactggaaaatgtaactggattgctggagatacacctgggtctaatttaccttgatcctatttggttacttttcttttttagtagatattttaacaaaaggccaaaatttcaagtgtatttctttggctttaggaaatttatcatttgtttagagtaattttttctccatttaaggttcaaaataaaaagattgaatacttttgaggcagagtatctcagtattaatcatgttaatgagcataggctttggagacaaaccttcctggatttgaatccaagcagtcacttagtagttgtgtcatttaggcatgtgagagattttttccttggtaagattgagtgtcatcaggtttaaaagaaataatatttggcaggctgggcaacatagtgagaccctcatctctacagaaaatttaaaaattagcctgggtacatgcctgtggtcccagctttgggatgctgaggtaggaagatcacttgagcccaggaggtccaggctgcagtgagctgtggttgtgccactgtactccagcctgagcaacacagggagaccctgtctgaaaattataataataataataatatttggaacttagtctgtgcatagtaagttctcaagtggttgctgttgctgctgctactgctgctgctagtacttcttgaagaaggtgactagggaaaaatagacaaaaaaaatactttatttgtcttgtttgattagtcgactttaccttttcctaatgtggatgcaactgagaattaaccccaagctaatgtatcaaaggacattctcatttgggtctatcagccctagcagaatgcctgctctcttttctagaaagaggaaataatctgttttccatttcattttttttaaagattttagctatctttgagtatgtaacatctattatccttgtagggtgtttggaaaacttcctgtttactccagtgcatccctggtagaggatgtagataatcatcgtattgttattttattacataaacatggactgcttcttataaacatctttgttctaataatgtggtctcatactcaaggtgtgactttctggcatcctgtgtggtattcagaggccagaagatagaaaattaaaagtagtgagatgagccaagcgaatctttttaatccttcttgaaatcttttttttttttttttttgagtcttactctgtcatccaggctggaatacagtggcgcaatctcggctcacctcaatctccacctcctgggttcaagcaattctcctgcctcagcctcccaagtagctgggattacaggcgcccaccactacgcctggctaatttttgtgtttttagtagagacacggtttcaccatgttggccaagctggtctcaaactcctgacctgaggtgatccacccgcctcggcctcccaaagtgctgggaatacaggcatgagtcaccgtatccagccacttcttgacattctttctagcagtttttataccactgcttcccttctggaagccttactgatgtttaagttacatgttgatactcactttgtttttgtgcttccctttctctttcctggacagaaaccaaagcccaaaccccggccatccatcacaaaggcaacctgggagagtaactattttggggtgcccttaacaactgtcgtgactccagagaagccgatccccatttttattgaaagatgtattgagtacattgaagccacaggtaagagtattacctcatagcagtttataactttcactgtctacaggatgcttactggagggtcaagccatctggagattctggaatcagttgttgttgattgtgagatgc

SEQ ID NO: 22056 - DNA, 2300 bp, Homo sapien
agaccagcctgggcaacatagcaagaccctctctctacaaaactttttttttttttttgagacggagtctcgctctgtctgccaggctggagtatagtggcgtgatctcagctcactgcaacctccgcctcccaggttcaagcgattctccagcctcagcctcctgagtagctgggactacaggtgcacgccactgtgtccagctaatttttgtatttttagtagagatggggtttcaccatgttggccaggctggtcttgaactcctgacgtcaggtgatccacccgcctcagcctcccaaagtgctgggattacaggcatgagccactgcgcccggccaacaaaacatttttaaaaaatagctgggtggggtggtgcatacctgtagtcccagccacttaggaggctaggtgggagaatctcttgagcctgggagttcaaggctgcagtgagtagtgatcatgcagcctgggtgacagagcgagaagactgtgtctcaaaaataattaattaattaattaatggcacaagtgtacctctcatggctggcatagcacctgcccaggctgcacagccaggaagtgctgtcaggagacaggagcccatgatctgagcttgattccttgccctgaaactctagcaagtctctctggggataaataaggatctgttgtctgagaggccactatcaccaggctatatcacttccccatgtctcggtttccctagttgtaaaatgcatctagtaacagagcccatctcagaatcttgctataaaataaagtattagcaaaaaacaagcactcccttaagtgttaactatgaggatcatgaatgagtttgtgtgttgtgagcaaatgcacacgggtgtttgtgtgtgcctcagtttccccatctgcccaaccaaaggccagcgcgtgctccctgcaagcccctgactgtatgcctcttctaagactccctgctccattttctttttcttttcttttctttcgaaatggactctccttctctgacccgggctggagcgcagtggcgggatctcggctcactgcaacctccgcctcccaggttcaagggattttcctgcctcagcctcccgagtagctgggattacaggcgcccaccaccacacccggctaatttttgtatttttagtagagacagggtttcactatgttggccaggctggccttgaactcctgacctcgggtgatccaaccgccctggcctcccaaggtgctgggattataggtgtaagccaccgcgcccggccccagctccattttctttccccatgttaaggtcatgtagaggcttttaagtgcctggagacccccatgccagggaggaccctgagaacgggaagtgggggctgcatggagagaaggagctaggggaactgtaggacctcctatcagactggggaaggcctggcttggacgcctgggttcccgtcctctgtgcgaggtactacaacccctgagttcccatttatgatctaatggggagcttggatgtaagggttcccgtccctgcggcgggggatggagataagacgccaggatcctggtctctggagctccttagagagctggatcctggtccctgacgagggaggtgtatgtcccccttttaaggcgggttgggtttggatgcgaagtcccagccctgtggggggagagtgtgctgacactcaggagttctctcccggaaagggagggtctcgaattctggatttgtgtccctggaggaagcactgacgtgagtcttcactcgtacatggggctcggctgcagggtacctgtcttgtcccgaggggctgctggggcactaactgcctcctgaaggggtgtagacagtgcccggactccgctgttccccttttggagtggggtagctccgatccgaggtgctacattctgacccccgacgttaccgtggggcaagggaactcggaccccagggtagcttggccccctaccagggaaaggcgagcagggcgggtccgggggcggagacgcggcgggcggggctccggcagaccccgcccccgcccgcagcgctggtcgcgcgtctccaagtctgcgaggccgaggtgggcgccgagagctgggcgccacagcccgcgcgtcccgctgcgccccgcgcgccccggggtctatggagctgcccctccgcgccgcccggccggccccacgccgcgcccggagcctgctctgcggccaagtaatcggactggcggtcctgcgggtaggggaagcttgcgggctggcaggagggggacttctgggtccca

SEQ ID NO: 22057 - DNA, 2300 bp, Homo sapien
tctcggctcactgcaacctccgcctcccaggttcaagggattttcctgcctcagcctcccgagtagctgggattacaggcgcccaccaccacacccggctaatttttgtatttttagtagagacagggtttcactatgttggccaggctggccttgaactcctgacctcgggtgatccaaccgccctggcctcccaaggtgctgggattataggtgtaagccaccgcgcccggccccagctccattttctttccccatgttaaggtcatgtagaggcttttaagtgcctggagacccccatgccagggaggaccctgagaacgggaagtgggggctgcatggagagaaggagctaggggaactgtaggacctcctatcagactggggaaggcctggcttggacgcctgggttcccgtcctctgtgcgaggtactacaacccctgagttcccatttatgatctaatggggagcttggatgtaagggttcccgtccctgcggcgggggatggagataagacgccaggatcctggtctctggagctccttagagagctggatcctggtccctgacgagggaggtgtatgtcccccttttaaggcgggttgggtttggatgcgaagtcccagccctgtggggggagagtgtgctgacactcaggagttctctcccggaaagggagggtctcgaattctggatttgtgtccctggaggaagcactgacgtgagtcttcactcgtacatggggctcggctgcagggtacctgtcttgtcccgaggggctgctggggcactaactgcctcctgaaggggtgtagacagtgcccggactccgctgttccccttttggagtggggtagctccgatccgaggtgctacattctgacccccgacgttaccgtggggcaagggaactcggaccccagggtagcttggccccctaccagggaaaggcgagcagggcgggtccgggggcggagacgcggcgggcggggctccggcagaccccgcccccgcccgcagcgctggtcgcgcgtctccaagtctgcgaggccgaggtgggcgccgagagctgggcgccacagcccgcgcgtcccgctgcgccccgcgcgccccggggtctatggagctgcccctccgcgccgcccggccggccccacgccgcgcccggagcctgctctgcggccaagtaatcggactggcggtcctgcgggtaggggaagcttgcgggctggcaggagggggacttctgggtcccagaggaatggggggctggaactccagtgtcctgggggatagggggtgggacgagggtatcccgagcctgggggaaggggcgcacggatgtttgagtcctggagaaatctggggttgggagacctggacacgggggtctggggcatctggacacctggctgggaggtttgggggcggcctggttcctggggttagggggtgttctgaacgcctggtcctggaggaatgaagacctaactgaaaacgttaggggatcaggagaccaggacacctgggccccgagtgtcgggtcaatcctgggggcgtcctggggcagaggctgcggcggctgcgtccggggctggggctcgcgcgccggggtcttcagggaggaagttgtggtcgtggggatgtggcggtccgaacacgtggcgccatcccgagaggctggggggatccctgggcaggacacaggatgggggtccctgccctctgccccctgcctccttagcccagccgggaaaacagggtgcagatccggggagtcagacaccggggatgggcttggggggcgggtcctcggggcagagggctccgggggctggggcgtgcgtgcctggcccgggaggcgcccgccccccgcccggcttgggcatgcttggcacgcagcgcgcgggccggttcgatccgtatgcgcgccgcgtgcgcccattggtatgcgggagccggcccggcgcgggcgtgaggcgggcgcgctggcgggcggcgcgggggaggcggcggcggggcacgtcctcacccggagcgccagccccgggccggctagggtgggagctgaggcctccaggtaggggaaactgaggcatcatccaggcccccccccccccagctccttgctgggaccctgagccctgcacggatctcagtttccctagaaggtctcccgagggcactaagcgttgcccctggccccctcccgctgcaggagactcggggctcggagcccgcctgagcgagccccccggagatggcggccccctatcccggcagtggcggcggaagcga

SEQ ID NO: 22058 - DNA, 2300 bp, Homo sapien
attggagggactggcaaagcttaaggtgctgtgagatgccagggctccaaggatggggctttcagtaggtcttcctgccctttttttttttttttttttgagacggagttttgctcttgttgcccaggctggagtgcaatgccacgatctcggctcactgtaccctccacttcctgggttcaagtgattatcttgcctcagcctcccgagtagctgggattacaggtgtctgccaccacgcctggctaattttgtattttttgttttttagtagagagacggggtttctccatgttggtcaggctggtcttgaattcccaacctcaggtgatttgcctgcctcggcctcccaaagtgctgggattacaggcgtgagccaccgcgcccggcccttttttttttttttttttttttttttttttttttttttttttttttaaggcatagcctcactttgttgtccatgttggagtgcagtggcttcatcatggctcactgccaccttgaccctatgggctcaagcgatcctcccatctcaacctcctgagtagctgggacaacagtgtgccaccatgcctggctaatttttaagtttttttgtagagatggtgggggtgggggtggtggggtgtctcactatgttgcccaggctggttttgaattcctggcctcaggtgatcctcctggctcagcctcccaaagtgttgggattacaggcatgagccagcgtgggtggcctctaaacctttaaaattgttaagaagaaacaagtgttggcaaatatggtgcatctggcccgccagtcattggcaaactgatctttcagtgaacctgctttcctcagatctacttgttactttaatagccccctcaggctgggcgcggtggctcacgctgtaatcccagcactttgggaggctgaggcaggcggattgcctgagattgagagttcaagacaagcctgaccaacatgaagaaaccctgtctctatttaaaaaatacaaagttagctaggcgtggtggtgcatgtctgtaatcccagctactcgggaggctgaggcaggagaatcgcttgaacccaggaggcagaggttgcagtgagctgagatcgtaccattgcactccagcctgggcaacaagagggaaactccaactcaaaaaaaaaaaaatagccctcatcagccaggacagtggctcacactgtaatcctagcactttgggaggccgaggcaggtggatcacgaggtcaggagatctcaaccatcctggctaacatggtgaaaccccatctttactaaaaatacaaaaagttagccgggtgtggtgggcgcctgtagtcccagctactcaggaggctgaggcaggagaattgtttgaacccgggaggtggaggttgcactgagcgaagatcgcaccactgcactccagcctgggtgatagagcgagactccgtctcaaaaacaaacaaacaaacaaacaaaaaacaatagccctcctctgccttcaaggatgaaccatgctgggtgccatgtggggtgccaaggaacacactttggggaccacagagatccagtccatttttcttgctgctatggtgagaccaggagagaggaaggatatgcataggcctggcaagggagatggtggctgagccaatccaggtccactgggggtcccttacctgtgagagacccagatagatggagactgtctctgagatgtagaggaattttccttcctggttcaaggcgaacacaaagccatccagggactagagccgggagagacagggagggggaaggagaggacccggtgtccctctgtccagccgccaagtggtaagaggttctgaaacctgggtctccacctgaggtggactgttttggtggggagggggcttcagtggtcctcggaaggggcagggagtggagggatcttgagcattcgccttcccagtccaggtaccccccacaatagatggatgctgaagaggctgctgttctccagaggcggccgctaggtggtagcaaggagcggcaggcagggaaggggcctcactcacctgcaagatgtgacctcccaggtgctgctcgaagacttcggagaccagcgctgcggggccgcggcggcctggggctggggcagatggaaggatgaagcctgttagtctggctgaccctgcccagggcaggtcccccgggagccagtctacaaacctccctctcttcccctaaggcttgtagacatcttggggtatctgggcacccatgggggagagacctggggcgtgggacacacag

SEQ ID NO: 22059 - DNA, 2300 bp, Homo sapien
tgatatctcctcatgctatccccaaactgccactcttaactcctgaagtaaacaaataatctttgctggcaggactatgctgaatctccttaggcactctctaatcagatgtcctaggtcctcccaattcttagaccttttatacctgtttttctccttctcttattccatttagtttttcaattcatacaaaactgtacccaggccatcaccaatacttctacacaacaaatgtttcttctaacaaccccacaatatcaccccttaccacaaaatcttccttcagcttaatctctcccactttaggttcgcacgccgcccctaatcctgcttgaagcagccccgagaaacatcgcccattctctctccataccaccccccaagacttcaacactattttgttttatttttcttattaataaaagaaggcagaaatgtcaggcctctgagcccaagccaagccatcgcatcacctgtgacttgcacgtatacatccagatggcctgaagtaactgaagatccacaaaagaagtaaaaatagccttaactgatgacattccaccattgtgatttgttcctgccccacctaactgatcaatgtactttgtaatctcccccacccttaagaaggttctttgtaattctccccacccttgagaatgtactgtgtgagatccacccctgcccgcaaaacattgctcttaacttcaccgcctatcccaaaacctctaagaactaatgataatccaccaccctttgctgactctcttttcggactcagcctgcctgcagccaggtgaaataaacagccatcttgctcacacaaagcctgtttggtggtctcttcacatggacgcgcatgaaacgattctcctgcctcagcctcacaagtagctgggattacaggtgcctgccaccatgcctaatttttgtatttttagtagagatggggtttcaccatgttggtcaggctggtctcgaactcctgatctcgtgatctgcccgcctcagactcccaaagtggtgggattacagatgtgagccaccgtgcctggcccgggcttggattttatgaagaggaaaagtaggggagctagcaagggggttacacttgaggagggagttcaaatggactgcactgcatagcctgcaggcttgcaatgaatgtgaagctttaaatgggattaagtgcaaattgaaaatattccagacacatttttcacattcctggctagtgaaaaggtttatgctgatgagagaaggcaaagctgaatcccggaatgggttagggcaaagaaaacaaatctgtcttaaagagacagacctggccgggcacggtggctcacgcctgtaatcccagcacttttggaggccgaggcggttggatcacttgaggtcaggagttcgagaccagcctggccaacatggtgaaaccctgtctctactaaagatacaaaaattagctgggcgtggtggcgcatgcctataatcccagctactcaggaggctgacgcaggagaatcgcttgaacccgggaggtggaggttgcagtgagccgagatcgcaccactgcactccagcctgggcgacagagcaagactcggtctcggggcggggaaaaaaaaggaaggagggaaggaaggaaggaggggagggaagggagggagggagggaaaaagaaagagagaaagaaagaaagaaggaaagaaagaaagagaaagaaagaaaaagaaagaaagaaagaaagagaaagaaagaaagagaaacaaccaagaaacaactacaataggtgctcggcatgtactccgttaaaaaagatagaattaaaactacaattcccagcagacatctcgcctgcgacttctgaatatcggctttccccgagcgcaatgatcgctgggattcgtagtccggtacaaaatcaaggagggacgggcactaccggcctagatgacagaggagggaatcactgccattccgaccaatggacagttcacgccggacctgagtggcgagcgcatagccaatgggtaagccattcatcctgagtgacatgggttgcaacctaccggaggccggtggggcggtacggcgcgcggcggccgtagtgcgaatcatgggaggcggctggtggtgggctcgggccgctcgccttgcccgtcttcgcttccggaggtcgctactgccgcctcagcggccccggagcgggggcgcccgggggtccttcgcccccggccacggtccccgcgccggggcttcgccgcccccagtgtccgagctggatcgtgcggacgcctggc

SEQ ID NO: 22060 - DNA, 2300 bp, Homo sapien
acaagaccctcctctaacactccacccaccccctttattctttaactctgtttctctcccttggggcattatcggttaagttccatgaagacagaaactgttcccatgctccatcacagggactggcactgtagaaagagctaacaagtatttaaggaagatccctggattcgaggttacagtgaggtatgatcgtgtcacagcactgcagtctgggcgacagagcaagactctgtctcttaaaaaaaaaatcttgctgtgctttttagaactaatcctatgaccgtgaaccgattacttaaaacaccgaacttcagtctgcaaatgggaatagcagcagcttatgttaggacggttatgagggtcaaaagattttgtttgtacagtctacgacaccggccagtgtttctagctctgctatttgagagccttccatgggtcctacaccccaggtccttaaactcccctgagggactaccaagccccgcccctctcgcatccaatgatgacatcatcgactgggttgtcgagtgacgtcacctccgggctggctgggcttcatcgcttctccggaaacctccgactctcggcacctggcctccagctttcggttattttttttttccctctccgtagcctgaattccttccctcccattctcccacctaaaactattggctcttcccgccttccttcaaactagcaattttcggtttttccctcttgctctccggcgaattcctgaaagtcgtttattctccccttcagccccgcccgttcagctcattctcttaatcgcattaccctggctgcttttctttcggctgtttccacctcctgccacccacccggacaccgctttcggctctttccggaccgtctcagtttctcctccttccccggtcccgatcggcttaggctatttatggctcccctaggtttctcatgctctctctagccccacccatatcaccaccttcagctctttctggctctcccccgtcgcctcctcgctcctgctcagctcctttcggctatttccgcctcccctcggcctcgccctttgccttcggctctttccgccggccttcgggcaagcggtctctacccctctcctgcacgtgacacggcctccgcctccgcctctcagttccccctcccatctcacccttcctcccgcctcagcctctaggctggttcgggccgagccgccattttgtgtcaattcctgattgcggcgggggccgggcagccggggcacccagggcgggcagagaagggagacagtcggcccgtctccgcggcccgttccctctctccctcaaatcctttttttctttttaaccccccacccccctcgctcgctctcctcttctccccttacccttcgcttgctccatcgcgcgcggcccgcgctaattacacccaaccacccaccagtgtccgtgtctcccgggtgtcccgccccccgggggtgcgtggggggggggctctcgcccctatgagggccccgcgccagtgagcgagtgaccgcaagggtgggctgcggagaaagcaggcggcgagcggccctccgaggcctaggccgtgcggcctacgcggaggtcagcgcagaggtgattccgaaaccgaaaaaatatataccccattcccatcaggagccctccgagcttaagtgtgcccctcccgccacgcccaagcagtcctttttcgtgcattaacatcccctcccccccaaaggaactatggaggccgcgcccgggacccccccgccgccgccatcagagtcgccgccgccgccatcgccgccgccgccatcaacgccttcgcctcctccgtgttcccccgacgcccgcccggccaccccgcacctcctccaccaccgcctcccgctccctgacgacaggtcaggcccccggttgggccggggctgcgtccccggggggaggaagaggaggaggaggaaggggggcggccgccatgttgggccgggccgcggaggaggaggaggaggaggaggaggaggaagggcggggtcggtgggtgtctctcgatcgcttgctcgctcgctctttctcgcttgctttctctcccggcctcatgcgtttcccccccctcgcggcgctcgcccgctctccctcgctctcgctctgtcttttttgggcgccatgctgaggggaaggtgaggaggcgcccctcggaccccccgcgcccgtccgcctgtcctggggagggggcgccgtggggggtgctgcggagacccacgggggtcctggctgcccctgcgcccggagctggca

SEQ ID NO: 22061 - DNA, 2300 bp, Homo sapien
tagagacggggtttcactgggttagccaggatggtctcgatctcctgtcctcgtgatctgcccgcctcggcctcccaaagtgctgggattacaggcgtgagccactgcgcccggccatgttttgactttttgaagaaactggggtctcacgatgttgcccaggctggtcttgaacctctgggctcaagcaatcctcctgtgctagaattataggcatgagccactgtgccggctgcaacatttaatttaattaaagtctttctgtcactcaggctggagtgcatgatcttagctcactgcaacctctgcctcccggattcaagcgattctcccctcagcttcccgagtaactggtgattacaggtgccggccaccacgcttggctaatttttttttttttttttttttttttttgagacggagtcttgctctgtcatccaggctggagtgcagtggtgccatcttggctcactgcaacctccaccccctaggttcaagcgattcttctgcctcagtctcccaagtagctgggattacaggcgcgccacaccatgcctggctaattttttgtctttttagtagagacggggtttcgtcacgttggccaggctgatctcaaactcctgacctcaagtgatccgccagcctcggcctcccaaagtgttgggattatgggtgtgtgccaccacgccccgctgccagctggaacatttaaaaaacagtaggatccgctgggcgcggtggctgacgcccgtaatcccagcactttgagaggccgaggcgggcggatcacgaggtcaggagatcaagaccatcctggctaacgcggtgaaacgccgtctctactaaaaatacaaaaaatcagctgggcgtggtggcgggcgcctgtagtcccagctacttgggaggctgaggcaggagaatggcgtgaacccgggaggcggagcttgcagtgagccgagatccgcgccactgcactccagcctgggcgacagagcgagactctgcctcaaaaaaaaaaaaaaaaaagtaggatcaatataccaggaagtcacatggtgcctctgtctccagatttatcactgttgacacggtttttctctcttcctggaatctaagtggtctttgctttgtcagggcctgaaataaggtatttcttttcttttttttttgagacaagagtctcactctgttgcccaggctggagtgcagtggcataatctcggctcactgcagcctcgcgacctcccgggatcgggcgattctccctcttcaacatcccgagcagctgggactacaggtgtgagccatcatgtcctgctaatttttgtatttttagtagagaaggggttttaccatgttcgtcaggctggtctccaacccgagctcaagcgatccgcccgccccggcatcccaaagtgctaggattacaggcgtgagcaacatcgccccgcctgaaataaggtatttcttctgcctggaaccatctcttctttttcatgtaccagcctaaaagaacaattacaagaccctcctctaacactccacccaccccctttattctttaactctgtttctctcccttggggcattatcggttaagttccatgaagacagaaactgttcccatgctccatcacagggactggcactgtagaaagagctaacaagtatttaaggaagatccctggattcgaggttacagtgaggtatgatcgtgtcacagcactgcagtctgggcgacagagcaagactctgtctcttaaaaaaaaaatcttgctgtgctttttagaactaatcctatgaccgtgaaccgattacttaaaacaccgaacttcagtctgcaaatgggaatagcagcagcttatgttaggacggttatgagggtcaaaagattttgtttgtacagtctacgacaccggccagtgtttctagctctgctatttgagagccttccatgggtcctacaccccaggtccttaaactcccctgagggactaccaagccccgcccctctcgcatccaatgatgacatcatcgactgggttgtcgagtgacgtcacctccgggctggctgggcttcatcgcttctccggaaacctccgactctcggcacctggcctccagctttcggttattttttttttccctctccgtagcctgaattccttccctcccattctcccacctaaaactattggctcttcccgccttccttcaaactagcaattttcggtttttccctcttgctctccggcgaattcctgaaagtcgtttattctccccttcagccccgcccg

SEQ ID NO: 22062 - DNA, 2300 bp, Homo sapien
ttcctatctcagtctcctaaagcgcatggattacaggcatgagccaccatgccgggcgctaagcaattcttattatttatttatttatttatttatttatttttttctgagacggagtcttgctctgttgcccaggctggagtgcagtggcgcgaactcggctcactgcaagctccatctcccaggttcatgctattctcttgcctcagcctcctcagtagctgggactacatgcgcctgccaccacgcccggctaattttttgtagttttagtagagacaaggtttcaccatgttagccaggctgatctcgaactcctgacctcgtgatccgcccacctctgcctcccaaaatgctgggattacaggcgtgagccaccacctccggcctaagcaattcttaaataaaaatctatgattccgccaggcatggtggctcacacctgtaatccgtgcactttgggaggccgaggcgggtggatcacaagttcaggagttcgagaccagcctggccaacatggtgcaatccctgtctctactaaaaatacaaaagttaggtgggcatggtggcttttttttttttttttttagacgggagtctctgtcatccatgctggagtgcagtggcaggatcttggctcactgcaacctctgcctcccaggttcaagcgattctccggcctcagcctcccaattggctgagactacaggcgtgtgccaccacgcccggctaattttttagtattagtagagatgggggtttcaccatcttggccgggctggtctcgaactcctgacttcgtgatctgccctccctggcgtcccaaagtgctgggattacaggcatgagccactgtgccctgccaaaaagcctatgattctaacatcagaaatccttccacctcagcctcccacgtagctgggactatagactcagtaccaccacaccaagctaatttttgtatttttaatagagatagcgtttccctatattgaccacctggggccatccctggttttttttttttttcccttccttccttcctttccctctctctttccctccctccttccttcctttctttctttctttcttttttttttttttttacagagtcttgctctgttacccaggttggagtgcagaggcatgatcttggcttactacaacctccgcctcccggattcaagcaattatcctacctcagccttccaagtagctgggactacaagtgtgagccaccatgccctgctaatttttttatttttactaaagacgggatttcaccacattagccaggctggtctccaactcctgatttaaagtaatctgcctgccttggccttccgaagtgctgagattacaggtgcgagtcaccgtgcctggcctattcctgttttcttaacgctcctctctcccactgggccgtgactgcctctaaggcagagatgtgttcatttttattattattgtatgtccagggctgggcacaaagtgcaacacatagtagggacatgaaaggctgggcacagtggctcatggttgtaatcccagcactttgggaggcagaggcgggaggatggcttgaggccaggagttggagaccagcctaggcaacagagggaccccatctctatgaaaaaaaaaaaaaaaaattgacagttcaatgtcacctctgataagccttccctgaccacccctgttactctgtagccccatgtcctgctttatttttctccaaagcatttatcatcgctgggtttatatttatttctcttcgggcttttctcactggatcgtaaactccatgaggacagggctttgtcgatttcactcaataccgttattttacaacatccctattgctgggatctcagtatgcactccttaaatatttgcagaatttaagtgccacataagtgaccacgtgggcaacgccctcggggccttaagccgcgccatttttggggctaggattggttggaccctccgtcacgtgacatgcagtcgccggatcgcctttgagtctcgtgaggtacttttggtcccaggctccgcggacgaggtactgcgcaggcgtgggagggtctgcgcatgcgcagaagcactccgggcgtgctgccggcggcggtaggtggcgcgcgggtccggcgggcggttggcttgagcgggaccggagctgaggcaggaagagccggcgccatggtggagaaggaggaggctggcggcggcattagcgaggaggaggcggcacagtatgaccggcagatccgcctgtggggactggaggcccagaaacg

SEQ ID NO: 22063 - DNA, 2300 bp, Homo sapien
gagaccagcctggccaatatggtgaaaccgcatctctaccaataatacaaaaattagctgggcatagtggcgcacacctgtagtcccagctactagggaggctgaggcagaagacttgcttgaacccaggaggcggaggtggcaatgagccgagatcatgccactgaactccagcctgggcgacagcgcgagactctgtctcaaaaaaaaaaaaaaaagtaagatccatgtaagtgatgtcatatgtcataatccatggtttactcatgacccacagtttggaaaacaccaggaagaaggaagggacaatgaataatcggggaaagcgaaagaggagggaaagtgaaagagggaggaaagctgaggagttcccaatgttgcaaatggggagatttcacgtgagatatagattacctgcatctcttgggggagctaagagtgtgtacttggaggcagtcaagtttgagaagtctgacatccttactcagccagccccacactaggcactggaaggtgagtcactctggtgaggcgattgcgattgggtgagacccagtaaggatggaaagtgtagaggagacaggaatccacggctttggaaaaaggaaggacaaaactcaccaaaccagagcagggcaggaagtaacaatgagaaactgaaaaagaaacggaatggaaagctatgagacaggatgaaatttggcatggggtctgcccaggcatgtccatgccaggtgcccagggctgcttccacgacgtgggtcccctgccagatttgtggtgagtgtggccaggtgtgcatgctccgacgtgtgtgcagtgggccagttagcaagaagctgtcacaggtgtgactttgtgacatgtgtgggtggtcagtttcttctatgtctgatttggtttgtgtctctgaatgtcagtttctttcctttatttttatttttaagacggagtttgctcttgttgcccaggctagagtgcaatggcactatctcggctcactgcaacctccgcctcccgggttcaagcagttctcctgcctcagcctcccaagtagctgggattacaggcatgcgccacaacgcccggctaattttgtatttttagtagagatggggtttcatcatgttggtcaggctggtctcgaattcctgacctcaggcagtccacgcaccttggcctcccaaagtgctgggattacaggcatgagccaccgtgtcgggcgaatgtcactttctgatagttttaatgtgttagctgtgaaattgtgtgagtgcatttgtgtatgtccctgtgggagtgtgatttggatttggccgtgtatccaggtatccctgtaacaggtgtctgtgtgtatgtgtgtgtcccctgtgcctatcagcaagtttgtgtttcctgataagcactccgcctatgtctgtgtggttgcaccaccgtgtgtgtggtgtgggtgcctgttcggtagggttgtttgtgaacacagtttgtgggcccaggtgtgatcatcagtgtgggtgtttctgcaactgtgtgtggccctgtcattgtgtccgtctgcttgtccaggggaccctgttagtgagtctgtgcatttccgtctgggtgtgtgtaagtgtgagccccatcagtatgtgagtgtgtgtgctcatgcccctgtccatggtgtggatttgcgagactgtggccttgtgtctgtgagtacatcctctgggctctgcctgcacgtgactttgtggaccctggaacgcccgtcggtcggtctgtgtacgcatcgctgggggtgtggatctgtgggtcccagtcagtgtgtgtgtccgactgtcccggtgtctgggcgatctccccacaccccgccgcacagcgcctgggtcctccttgccttgggctaggccctgccccgtcccccgctgcagggaaacccccggcgcggaggtaggggggggcgcggcgcgcgcctgcaagtcctgacttgtccgcggcgggcgggcggggccgtagcgtcacgcgggggcggggcgtgggacccgccgggcgggggcggggcggggcggggcggggcggctttggagcgggcccgggatccgccgggcggcctgagacgcggcgcgagccacatgcgagcgggcgcctggcggcggcggcggcggcaccagcgatcccagcagcggccacgacgcggacgcgcctgcggcccggggagcagcagcagccacagccacagcagccgccactgcagttagagcggcagcagcagcgacagccacagcagcagccgccgcggagagcggcgctcggcgggc

SEQ ID NO: 22064 - DNA, 2300 bp, Homo sapien
ctcattgcaacctctgcctcctgagttcaagtgattctcccgtctcagcctcccgagtagctgggactacaggtgtgcgccaccaatttttggctaacttttatatttttggtaaagacggggcttcaccctgttggccaggctggtgtcgaactccggaccttaagtgatccactcgcctcggcctctcaaagtgttaggattacaggcatgagccaccgtgcccagcctgtagtgtatttttgttgttggcgttttgagacggagttttgcccttgtcgcccaggctggaatggaatggcgcgatctcggctcaccgaaacctccttcccttgggttcaagcaattcttctgcctcaagctcccgagtagctgggattacaggcacccaccaccatgcccagctaatttctgtatttttagtagagatggggttttaccatgatggccaggctagtctcaaactcctgacctcaggtgatccacgtcccccggcctcccaaagtgctaggattacaggtgtgagccaccatgcccggcctgtggtgtatttttttttaactctggtcaaagcagtcatgcacacctataatcccagctactagggaggctgaggtgggaggatcgcttgagcgcaggagtttgaaaccagcctgggtaacacagccagaatctgtctcaattaaaacaacaacaaaacctcttgtctaggtcagtaaaattgcaggtagaagttgtggtaatacaaaattgtgtacttttatcaccacttacacaccatacacctaaaaagagtgaatattcttgtgtctaaatacatctcagtaaagcgcaagttggttgggatgtgaatgcatcttactgagtaaaatgcattaagtcagccgggcatggtggttcacacctgtaatcccagcactgagggaggcggaggcaggaggtttgcttgagcccataaggtcaagaccagactgggcaacatagcgagaccgcccatctctacaaaaaaataaaaattagctgggcgtggtggtttacacctgtagtcccagttacttgggaggctgaggcaggaggatctctggagcccaggagtttgaagctgcaaggctattgtaccacaaggctatccattgtgccactacactccaatctgggcgacagagtgaatcttttatctaaaaaaaaaaaaggctgggccaggtgcagtggctcacgccataatcccagcactttgggaggccgaggagggcagatcacgaggtcaggagatcgagaccatcctggctaacatggtgaaacactgtctctactaaaaaatacaaaaaattagccgggtgtggtggcagacgcctgtactccctgctactggggaggctgaggcagaaaggcctgaacctgggaggcggagcttgcagtttgctgagatcgtgccactgcactccagtctgggcaacagagtgacattccgtctcaaaaaaaaaaaaaaaaaaaagctgagtgcagtggctcacacctgtaatcccagcactttgggaggccaagacaggcggatcccgaggtcaggagtttgagaccagcctggccaatatggtgaaaccgcatctctaccaataatacaaaaattagctgggcatagtggcgcacacctgtagtcccagctactagggaggctgaggcagaagacttgcttgaacccaggaggcggaggtggcaatgagccgagatcatgccactgaactccagcctgggcgacagcgcgagactctgtctcaaaaaaaaaaaaaaaagtaagatccatgtaagtgatgtcatatgtcataatccatggtttactcatgacccacagtttggaaaacaccaggaagaaggaagggacaatgaataatcggggaaagcgaaagaggagggaaagtgaaagagggaggaaagctgaggagttcccaatgttgcaaatggggagatttcacgtgagatatagattacctgcatctcttgggggagctaagagtgtgtacttggaggcagtcaagtttgagaagtctgacatccttactcagccagccccacactaggcactggaaggtgagtcactctggtgaggcgattgcgattgggtgagacccagtaaggatggaaagtgtagaggagacaggaatccacggctttggaaaaaggaaggacaaaactcaccaaaccagagcagggcaggaagtaacaatgagaaactgaaaaagaaacggaatggaaagctatgagacaggatgaaatttggcatggggtctgcccaggcatgtcca

SEQ ID NO: 22065 - DNA, 2300 bp, Homo sapien
atatatatatatatatatatatatatatatatatactttttttttttttttttttttgagacggagtctcgctctgtcgcccaggctggagtgcagtggcgtgatctcggctcactgcaagctccgcctcccgggttcacgccattctcctgcctcagcctcccaagtagctgggactacaggcgcccgccactacgcccggctaattttttgtatttttagtagagacggggtttcaccgttttagccgggatggtctcgatctcctgacctcgtgatccgcccgcctcggcctcccaaagtgctgggattacaggcgtgagccaccgcgcccggccttattttatattttatgatttcatttacttatttattttcgatacggagtctcactttgtcgcccaggctggagtgcagtggcacgatcttgcctcactgcaacctctgcctcccgggttcaagcaattctctatctcagcctcccaagtagctgggattacaggcatctgccaccatgcttggctaaattttgtatttttagtaaagacggggtttcaccatgttagccaggctggtctcgaactcctgaccttgtgatccacctgcctcggcctcccaaagtgctgggattacaggcatgagccactgcgcctggccagttatttatttttttgagacgtagtcttgctctgtcgcccaggctggagtgcaatggcacgatctcagctcactgcaacctctgcctcccgggtttaagcgattctcctgcttcagcctgtagctgggattacaggtgttacaggtgcccgccaccatgcctggctaatttttgtattttttagtagagacagggtttcaccacgttggtcaggctggtctcaaactcctgacctcgggtgatccacccgcctcggactcccaaagtgctgggattacaggcgtgagccacggcgcccggcctattttattttgagacggagtctctcgttctgtcgcccaggctgcagtgcagtggtgcaatctcggcttactgcaacctctgcctcccgggttcaagcgatgctcctgcctcagcctcccaagtagctgggattacaggcgcccgccaccatgcctggctaatttttgtatatgtatattttttgagacggagtctccctgtgtcgcccaggctagagtgcagtggagcgatctcggctcactgcaagctccgcccccggggttcacgccattctcctggctcagtctccggagtagctcggactacaggcgcccgccaccacgccgggctgattttttttgtatttttagtagagacggggtttcaccatgttggcaaggatggtctcgaattcctggcctcaagtgatccgccctcctcggcctcccaaagtgctgggattacaagcgtgagccactgcgcccagcattttattttattttcgagaaggggtctgctctgtcgtctaggctgcagtgcggtggcatgatctcggctcactgcaacctctgcctccccggttcaagcgattctcctgcttcagcctcccgagttgctgggattacaggcgcgcgccaccacaaccggctaattttttttgtagagacgggatttcacaatgttggccagactgatctcgaacttctgacctcaggtgatccgcccgcctcggcctcccaaggtgctgggattacaagtgtgagccaccgcccacggccggtagaacatctgaagcttctaaagcgaactctaaggtttcattggcacgagggggctcgaaccacgccaggcttccaggcgtcagtgcccagtgcttggcatctactgatagaaaccaggaatgaggggctggaggcggaaacagcttgaagaaagaggtagaggccagggagtgaggacggtgtctccttttcctggaagttggtaattcaggcagaaggaagttggatgagcttgcggaacacccggggggccagtcggccccgctcccgcatccatcgcggaggcgcggcccctttaaggctcccggaaacggtcccacaggaccggaagtgaccctctttatttcccttcctcacgtggtgcaggcaggaagtgacgcgcctggcccgggagctgcggtcgcagaggccgacggagccggagtcgcggacgccgcggggtctccgggacaggtgacctgggggagggggccgggagcgcgcccagagaaggcggggcctgaagccccacgtggcggggagtgcgaacaggcccgggcggggtcggagttctctgcggggggcggggacaggacgcc

SEQ ID NO: 22066 - DNA, 2300 bp, Homo sapien
tagacatgcgtacccgatcagcattttgggaccgacgaagtgcgagcaagaggccaagcccctctccacctacactccgtaggagtaagatttcgaatctcagatggcctccccttcccccagagtgggattaggattttgggggcagagccaaggaaggactggttagaatagcaggcgttggcgaaggaaaggggagggcgggtcctctaggactggcttggtggaggttgatgaaggccgtgagatggggcgggggtgggagaggacagtttgcagccttgggtggcgcgggggcccagaccctctgtcttgggccacttgttggtcgggagccagatctcgccacacccgcgtttcctcgattgtaaacggttatgttgggagtgtttgctgctgcgtgggtccgctgagaggattagtctgggccccgtaaaccgcttagcgccgagcctgctgtggcaagggctcgaactggatgagagacgtggctagacgggggaggggtgctgggccgggggggaggtgggaagactgctcccctccgctgactcagccccttctctcctcagaggcaggccccgaaggccaggagacggcggagatcaccgacttccagagggtgcgtttctgcaaggtggtggcggcccctccgctgccgggggccgctcgctgaccgcgcccgccggaccgcggcctccgcgctctgcactaacctcccaccgcctcgctcctctgtcctctgcttctgccacactccagccaggagagggttaaatctaaggggggaggagccagggtctgcgagccgggcggggccagggcagtagtcgggtgcaggccccaccaacgggggacgtcacggcactgggacggctgggacgcttccgcgttagtctcccatggaggccctgggcggctcgagccagtcttcaggccgaatctcccgcctccaggattgcatccgaggcctggcagccggtgacacttccgaagggcttgaattactcgggcgccagccctgtcgtattaaacgcagtgcttccgctcacccttgaactgtgtttctggagggggcaggctgggtcgctgtgcttggcgggcttttctgtggcggaagaggcggaaggaaggggtcttcctccacccttctgatccgtcttccctcccccctcccgcaggcctccccgaattcctgaagacgctgctgggaggggactgaagcttccccgccttgatggggagggggcgtgaggaggggtttatctggatttccaggctgtgttctttctaccccagagcctagtctggaccccttggctctagggagagggaaaagctgaccgttggggaggagctgggagaaggggcgcgattgcggtgaggggcggagctggaacctcggggcctgaggtgctgaggatacctgaaagcgggctgagagtgtgctggaggaggcgggtcccgcgggggcggagctaggctgcctgggcggggccggaatcctgacaggcggagttagagcggggggcggggtcagcgcgcgcgggtggggctctggccatgggcatggggcggggccgtcagcgggggcgtggtcggggtgtcgcgcgggaacccgcgcgggaggagagcggggattccggaactagagtgtgggagccagaggccgtagcgggcagggctcgagcactggagtagagcagtccgacaggtagagaagtgagactggctgcggcacagggcgggttagggctccaggcagggcttgagcgggacgagggggcgggctccgaggcgggctagatgcctgggctggatgaagtccgagtctgggaagagaaccgtgttgtggcgggaggaggcggtgattggggtggtggggctaagcgcgggggcggggctggagcgaggggggcggggtagcacctccgcctgtcggtggtggggcggaggctggagggggtgggcctaggatgcggaggcggcagctcgcgtgggggcgtgaccatgctggcgggggcggggccggaggcgggcggtttagagagcggggcggtctgcggggtgggggcggggcctggtgggggcggggcctgtgcggtctgcggcgcggagccgagtgggctgcggggatgcgggggaccagctgcgtgggcggcggcgccgagagccccggaggcgcggggctgagcgagggcccgcgggggcgctggctgcgcttggctccggtatgcgcctacttcctctgcgtctcgctagctgccgtgctgctcgccgtgtactacggtctcatctgg

SEQ ID NO: 22067 - DNA, 2300 bp, Homo sapien
gccccaggctctaggaagtatcttagcccccagccctgggctgcagacctgtaccagtccatggcctgctaggaaccatgcagcatcgcaggaggtgagtggcaggtgagtaagtgaagcttcatctgtatttatagccacgccccttcgctcatattaccgcctgatctgtcagatcaggggcggaattacattctcataagagcgtgaacccaggccgggcgcagtggctcaagcctgtaatcccagcattttgggaggctgaggcgggtggatcacgaggtcaggagttcgagatcagcctggccaagatggtgaaaccacgtctctactaaaaatacaaaaattagccgggtgcagtggtaggcacctgtagtcccagctactcgggaggctgaggcaggagaatcgcttgaacctgggaggcggaggttgcagtgtgccgagatcgtgccactgcactctagcctgggtgagagagtgagactccatctcaaaaaaaaaaaaaaaaaaaaaaagagcatgaaccctgttgtgaacagcgcatgtgagggatctgggttgcaagctccttatgagaatctaatgcctgatgatctgtcactgtatcccatcacccccagataggaccatctcgttacaggaaaacaagctcagggattccactgattctacattatgttgaattgtataattatttcattatatattacaatgtaacaataatagatggagatggttgtggcttgtgtagttgggggacagggtagctccattttctattgccaactttataaccctagaaggatgatttttttcttttcttttctttttcttttcttttttttttttttgagattgagtcttggtgttgtcagcctgggctggagtgcaatggtgcaatctctgctcactgcaacctccgcctcctgggttccagcaattctcctgcctcagccttctgagtagctgagattacaggcacccaccaccacgcctggctaatttttgtatttttagtagagatggggtttcaccatattggccaggctggtgacgatggttttttttttttgagacagagtcttgctttgttgcccaggctggagtgcagtggcgcaatcttggctcactgcaacctctgcctcccaggtttaagcaattctcctgcctcagcttcccaagtagctgggattacaggcacctgccaccacacctgggtaatttttgtatttttagtagagacagggtttcaccatgttggccagactcgtcttgaactcctgacctcaagtgattcatttgcctcagcctcccaaagtgctgggattataggtgtgagccattgcacctggccctagaaggaagatttaacagtaaaatatacttaaatgctgggctacctccgcagactagctcagcctctttgggtctcaaatcagcctggccgggaggctgagtggaggttacagtctctgctttcttgaatcccaagggaggggtttaagccaactgcattcctgagcttttgcccagaaggctggcgtcttaggaggaaagagatagatggctccaggccgggcgcagtggctcacacttgtaattctagcactttgggaggttgaggtgggtgattgcctgagctcaggagtttgagtccagcctggccaacatggcgaaaccccgtctttactaaaaatacaaaaaattagccgggggtggtgacacacacgtgtaatcccagctactcgggaggctgaggcaggagaagtgcttgaacccaggaggcagaggttacagagagccgagattgcaccactccactgcagcctgggcgacacagcaagactctatcaaaaaaaaaaaaaaaaaaatgagagagaagagatggccccaaatagggaaaccaaggccaggagaggggccgagcctgcacaggagcttcctcggttttccgagcgccggccccccttctctgcctgggaggaggtggttagagtcccctgggtgtgtgccccgcagagggagctctggcctcagtgcccagtgtgcagaccaatgagagccccagagagaaagacggtcatttcctccctgcatcttcccttggggctttaaaaaccacagcccttgggcaggagggaccttcgatcctcggggagcccaggagaccagaacatggtgagtctcgaaggggaatgggagcaggaaactttgtcctgggtccctcccatctttgctccagtgggtccttctctctccccaactctcgccgtcaactctgtctgtctctccctttc

SEQ ID NO: 22068 - DNA, 2300 bp, Homo sapien
agctgagattacaggcactcgcccccacgcccagctaatttttttttttttttaaatctttagcagagatgagattttatcatgttggccaggctggtctcaaactcctgacctcaagtgatccgtctgcctaggactcccaaagcgttgggattacaggtgtgagcttctgcacctggccctgtttctcattattctccttaccattgttattgaatggcctttagttaataagcaccacttgggcagacagtggactgtttttgatgctttgaggacgaatggggttgatatctgtacagatagacaggaaaacagatatcgggcacgttaagtggaaaagatgaagaaatggaacaacgtatgttgaaagctcccatttctggttaagacgttacaaaggaaatgccatctacgataccattgctttgggcttacagctgggcaaattatatgcacagaaagtttcctggattgggctgggcatgttgactcacgcctgtaatcccagcactttgggaggccgaggtgggcggatcatgaggtcaggagattgagaccatcctggctaacacggtgaaaccctgtctctactaaaaatacaaaaaattagccggaagtggtagcgggcgcctgtagtcccagctactcgggagactgaggcaggagaatcatgcgaacccgggaggtggagcttgcagtgagccgagatcgcaccactgcactccagcctgggcgacagagtgatactccgtctcaaaaaaaaaaaaaaaaaaaaaaaaaaaaaaagaaagttttcgttttctggattgtaatcaacaagggccaggaagggtggagtctttgcggggtgagaggatgcgtgtggacagtgataacagcagctagcctacgtatgacacccactgaaaaccagcgctatacactcagctctacccttctaacttgttgaattcttacaacaccccctaaggcaggaatattattattcccattttactgaggcacagatagtttaggtgacttgcccaaggccacacagctggtaggaatttgagggtttttgttgttgttgtttgtttgtttgttttttatgatgcagtctcgctgttgtcgcccaggctggagtgcagtggcatgatcttggctcactgcaacctctgcctcccgggttccagcgattctcttgcctcagtctcccgagtagctggaattacaggagcccacaaccatgcctggctgatttttgtatttttagtagagaccaggtttcaccatgttgctcaggctggtcttgaactcctggcctcaagtgatccgcccacctcggcctcccaaagtgctgggattacaggtgtgagccactgtgcccggctagggggggttcagtttttaaatgctgtactctttctttctttctttccttccttccttccttccttccttccttccttccttccttccttccttccttcctttctttctttctttctttctttttctttctttcttgggacagggtctcactctgttgctcaggctggagtgcagtggcgcgatcatggctaactgcagcctcaaactcctgggctcatgtgatcttccaccccagtcttagaaaaggttgggattgcaggcacgaaccactatgcctggctaatttttaaattttttgtagagacagagggtctcactgtgttgcctaggctggtcttgaactcttggcctcaagcgatccttcctcctcaactcagcctcccaatgtactgggattacaggtgtgagccactgcacctggctaaattctgcacaccttttactctagggataaaaataatacgaaagtggaatgccagactccgaatacacacaccaagtggcctggactcttcactgctacctggcatgggggaggggagtgccccaacttcctctctgtccttcctgttgcctcaacaccagctggagtgctgagcagtgccagccaacccataatagtcagcagagagcctcagggccaggtcactctgacattgtgggggtgggggggtggggactcctgcctgggtcctgtgctacccacagctttgtctaccggagcctgtgtgccacgtgctggacaaatcttaactcctcaaggactcccaaaaccagaggtaggttcacctcaatgactcttgtttccccgatgaggaaataggcacagccagctgcaactgacacccacagtcatggaggccggggctgctcaggaccacttgctgtgctgcctgccagctctccagagcccaagatttgga

SEQ ID NO: 22069 - DNA, 2300 bp, Homo sapien
aataatttctctaagaactagtctcaagcttgctatacaatcctatggttgatagactgtggctttcttgttgatttccatttgttgttcatttcctccaattttccttttttaaaaattataattattgtttggattatttatttatttatttatttgtttgtttgtttatttgagacagagtttctccttgtcgcccaggctagagtgcaatgatgcgatgttggctcactgcaacctccacctcctgggttcaagcgattctcttgcctcagcctcccgagaagctgggattacaggtgtccgtcatcatgcctggctaattttttatatttttagtagagacgggatttcatcatgttggcttagctggtctcgaactcctgacctcaggtaatccacctgcctcggcctcccaaagtgctgggattacaggcgtgagccaccgcacctggccttgtttggaaattttaagcagaatgcttagtccatttattcttcttcttttgataataatgtatgaattggcttctctatctctaagttgttttccagaggcttgataattatatccaacgttccacttgacatccccagttgatgtccaatgcataactcaaacaatatgctgaaaacagatcttcggattttctctctagcctctctcccacgtcttcctgatggtagtagatggtgactccatatttccaaatgctcaggccaaaaactttagagtccttcttttttttagacatagaacttttttctggccaggcacggtggctcatgcctgtaatcccagcactttgggaggccgaggtgggcggatcacgaggtcaggagatcgagaccatcctggctaacacagtgaaaccccgtctctactaaaaatacaaaaaattagccgggcgtggtggcgggcgcctgtagtcccagctatgcgggaggctcaggcaggagaatggcgggaacctgggaggcggagcctgcagtgggccgagatcgcgccaccgcactccaacctgggcgacagcgagactccgtctcagaaaaaaaaaacaacaacacttttttctttttttgagacagtctggctctgtcacccaggctggagtgcggtggtaccatcatggctcactgcagcctcagtctctcagcctcctaggttcaatcgatcctcccacctcagcctcttgagtagctgggactacaggcacacactaccatatccgactaacttttgtatttttttgtagaaacaggggttggccatattgcccaggctggtgtggaacgcctgacctcaggtgatccacctaccccggcctctcaaactgttgggattacaggcgtgagccgccgtgcccagctgtttcttctttcagttaataaaagagagggtgcattgctggctaatgagattgtttctatacttgggggtcttcctgaatgtgtgtgattgagtttattgcagagaaaggtaacagaaaatggggttgtagaaagaaaagaggtagaggctgagtgagatgccccacatctgtaatctcagtgctttgggaggccaaggcgggcggatcacttgagatcaggagctggagaccagcctggcccaaatcgtgaaacctcgtctctactaaaaatacaaaaatcagccaggtgtagtggtgtgcgcctgtaatcccagctactcgagaggctgaggcaggagaatggtttgaacttgggaggcggagattgcaatgaggtgagataacgccactgcactctagcctgggagacagtgagactatgtctcaaaagaaaaaaaaaagttcctgggccccagaccagctctctctttgggttaaaaccccggcgtcccggagctgaggcgcacgtggctatgcttggggaggagagggcggggccggggaggaggcgcttgcaagtctgtaccgcaatgcctctactggcctctagagggcgcaatcactcgaggctccgccccaagcgaggcggggcggaagcgtgctgtgcacaggcgcaagatgggtcttgggcagcccagagcttccgattggctcttctgtggtggcggggcggggtcagaacgagatggctgtgtgcgcaggcgcaagactagcgctcttgggaccggaagttaaggcgttcgcggcgtgtggtaagtgaggggggcgggacgggtgtaccgggttgtggcggcgatggctgtcggagttgggccgcttgggggtagtttggggtgcgagtccaggggcgagggaagtctcgagatgaggagaaatgtaggaggcagc

SEQ ID NO: 22070 - DNA, 2300 bp, Homo sapien
gaacattttctagactcctctggccagtctctcatcctctcttgtcagcagaaccgggtcatatgtgttcaccctatgccccgcaattgtctagggttgtggcattgcctgagttgatcagagcagtgtctcagccccagctgcatactagaaacacctggagaatttaaaaaaaccccaggccctgccccctgcctctttaaattgagcttctaatgtaaaggttaatttatttatttatttatttatttatttttgggacagagtctcactctgtcgcccaggctggagtgcagtggtgttatctcggctcactgcaacctccacctcccaggctcaagtggttctcctgccttggcctcccgagtagctgggaccacagatgggtgccaccaggcccagctaatttttgtaattttagtagagagggagtttcaccatgttgatcaggctggtcttgaacttctgacctcaggtgatctgcctgccttagcctcccaaagtgttgggattacaggcatgagccaccgcgcccggcctataaaggtttttaaatgagtattgggtgaactcatagacggcatcaaggcttggtcagcagggaggaaggagcagcagctgcttgcaggtggacgccagaacttctagtgccctcggatcaaagccaggcaaacagacttctctgagcttccttctcgctctctggctgtcacatgagctgccttgccagcctctccttcttccagtcaccagagaggtgctgtttgcttacgtatgccacgccagaccccggggtggacatatgctgtcacttaattctcccaccatctactgcctgcctggactgctgcattaattgggattcttttggttgtaagtgagagaaatacaactgaaactattgtaggcagaaagggggatcttaccattttgtgcattcatgaggcggcatgtctaacttaggaacaatccaagaatttctccatctgctgtaggtgggcccatttccaaaaaatggacaaagtcaaaggtcacagcagttctgggttaataagatagccttccatcctggccacaaccagagaggatgctgggaatgctcttcctggctccagtctcatggaaggattctgattggtccagctcaggtcacgtgcctctcctccatggtctggggcaagatgtgctaggcagacagatacagagacagcagccctccttgcctgcctctgcacagtggatcttgacattgggaattttattttattttattttattttatttttgagatagaatctcactctgtggcccaggctggagtgcagtggtgcaatctcggctcactgcaacctccgccttccaggttcaagcaattctcctgcctcagcctcccaagtagttgagattacaggcactcgccaccacacctggctaatttttgtatttttagtagagatggggtttcaccatgttggccagtctggtctcaaactcctgacctcaagtgatccacctgctgtggcctcccaaagtgctaggattacaggcatgagccactgtgcctggctgacactgggaatttgagatggagtctcggtgtattgccaggctggagtgcagtgcagaggcgcgatctcggcttactgcgatctccacctcctgggttcaagcgattctcctgcctcagcctcccgagtagctgggattacagtcatgcaccaccactaatttttgtatttttagtagagacggggtttcaccatgttggccaggatggtcttgaactcctgacctcaagtgatccgcttgccttggcctttcaaagtgctgggattacaggcatgagccacaacgcccggccaacactaggaattttaaaacgtcatgaatttgtgatctctgagccccgctgtgctgcacagtggctcttgtgttccccaatcttgggggttttgcttctcattctagatgaagagcatgagtgtgggggacccccgaaccttccccttcatcgagcccccaccaccagccagcctggaaaccgccatcctctacctccgggaccagggggccctggacagctcagaggccctcacacccattgggtccctgctagcccagctgcctgtggacgttgtgattggtgagtacccacccccctcgtgatcactcagggccccaggagcgggtatgggcacagctcactctctgagtggcctgggggcaagtctgtttcttccctgggtccagttcatttattcactcttcactgggccaggcactgttctaggtgctgggca

SEQ ID NO: 22071 - DNA, 2300 bp, Homo sapien
atgcacgcacaatctcctgtgtcctccatcggtcagggctcagcaggaaacagaaggtccaaccaaattgggtcacttgaggaatgttgacaagatgtgggcacggggagggcaggggtctcagattttatgggtcacaggcagctggagggtctgttgggtccagatggccaaccccgccgagccccctcctctctccacttggtcgttctgggatgaggcccaggacttggcattcccagcatgtgcctagatgccccagggctacactcagaagcactagtgcaggacgcccaccagggctgtgtgggaaagcagggccccccagacccaaggggcaggtggggcagtcagcagagcctggagccagctgtgggaaaaggcactggacgcccgcacctgcctcctcttgcccctggccccggtgttccctccactgaccagcgaggacagctctctctctggagcagcgatccatgcccagcaccatgcgaggggctgttttcagccccctttgggcactagcagccctgccactgggagggtccccatttccatgagtccagagcccactgagtctgccctgaggccctcacccctacccacctgcccctaggagctgttggaggaccacgggctgctggctggggcccaggccgcgcaggtaggggacagctacagtcggttgcagcagcgccgggagcgccgggccctgcaccagctgaaacgccagcacgaggagggcgcggggcgcaggcgcaaggtgctgcggctgcaggaggagcaggacggcggctccagtgacgaggacagggctggcccagcccccccaggggccagtgatggcgtggacatccaggtgggcgccatgggctgtggggtgtgggggtttaccaaggtgggccttggcctctcctggggggtcccaggggacatggccctgtcctcatttcaggagccgggtttccatggacggtgcttggtcccaggtatctgcagagcctgggggtctgcggatcatggtaggagcccctcaggtcccctaagactctgcctccccgtgctccccccaggatgtgaagttcaagcttcggcatgacctggcgcagctgcaggccgctgccagctcagcccaggacctgagccgcgagcagctggctctgctgaagctagtgctgggccggggcctgtacccacagctggccgtccccgacgccttcaacagcagccgaaaggactcagaccaggtggggcctgttctgccccatcctatgttttgtcctccaacacacgaaccctgagtgcctgtcctgtgccgggaatgcagtggtgactgaaacaaccctggttctgtccccatggggctcacaacccagtgggaggacagacccatccccagacaacccagagtgggcagggcttggggagtccagagcactataggagcccacagggggcatctgccccagatttggaggagtcagggagggcttcctggaggaggggacctgggccagagggtggaggagaggcatcctgggcagaggagagagcagataggagggcttgtgctttctctctgtcctccgcagattttccacacgcaggccaagcagggcgccgtgctgcaccccacctgcgtcttcgctggcagccccgaggtgctgcacgcacaggagctggaggccagcaactgcgacggaagccgaggtacagtgagcccaggcggaaggaacccccatccgggatgtgaggggcagggataccgtgaactcccaggcccctctggctggggctcccacaccggcccaggctggtattgacgggggcccacaggaggggaagttccagggccaggcctccctgggtagccttgggtgactcacccctgctgggcctcaccttccgcatggtggtgatagtcaacctaagccagtgtggctgtgcccagagagtgagcaccggtcagggggcctgtcctatggactctgtgagctcccaggtgggtcctgcagagggaggcccccctggcacccgtgtgcatggaagggtgtctcgctgcaggcatggctgcgtgctgggagtcacattcagatttggctgaccttcttgtctgagccaggccaccaaagccatgccgtaagcatactctttctatcgatgtgtactttgaccgggtgggacaggcgggcttctgatgggcctgggtgggccagggtgggcctgagcggtcctcctcaacctttcagacgacaaggacaagatgagcagcaaacaccagctcctcagcttcgtgtccc

SEQ ID NO: 22072 - DNA, 2300 bp, Homo sapien
gctcagagtggggaagtgacctgcccaagatcacacagctaggaaggaggcagggactggcttcccatccaggagtcctagctccagagtccatgcccaaagccttggcactaactttttttttttttttgacacggagtcttgctctgtcacccaggctggagtgcagtggcgcaatctcggctcactgcaacctctgcctcccgggttcaagcgattctcctgcctcagcctcctgagtagctaggactacaggtgcatgccaccacacccggctaattttttgtatttttagtagagacggggtttcaccatgttagccatgatggtcttgatctcttgaccttgtgatctgcctgccttggcctcccaaagtgctgggattacaggcgtgagccactgcgcccggccgccttggcactaacttctaactcttgttttctagaataatatgtggattcgagaccatgaggatagtgggtctgtacatttggggaccccaggtccatccagtgggggcctggcctcccagagtggggacaactccagtgaccaaggtgagaatcttgggaggtggaagggaaacatgggagtcaaccagaggattgaagttagatcgcaagtaagacttgtagaggggcagagatggctggggtgtggagtgttgtcttgggggagagttctggggccctctggtcctccactcttcactacccacacacacagcatgcctgccttccctcaggagacgggctggacaccagcgtggcctctcccagttctggtggagaagatgaggacttggaccaggagcgacggcgaaacaagaagagggggatcttccccaaggtggccaccaacatcatgcgagcctggttgttccagcacctctcggtgagagccctgctgcccaggtgcagggtgggaatggagagagggagaagggtggaccacagagaccgaaaccccagagaaacccagaagtgggagaaagacggcaggaaatttttcgagactctcatggaggtggagaattgtgacaggagccagcagcactgagtgtcacctgagtgcaggtgccgctcaggacacttaactcactaagtcctccccgaaaactgtccattaacccgcgcatcaatcatccacctgcccaccatccacccagtgtaccctcggagggaggggctactattatctccatttaacaggtgaggaggagactgaggaacagagaggttaggagacttgcctaaggtcacacagccagaagtggattcaaatgcaggcagtctggccttaaccaccgcaccatactgcttcaaggacagaggagaaaaatagagccaggaagaggctaaaacagagagacacagagattcggggaggaccaagtcagagcaagatggagacagggagaggccgagtcacagagggacagagacagacagaaactcggaggcagggacggactgaatcccagagagagagagagatacagacagaaacacacacacacagagatagtgagtcagagagagaatgtgagagccacaaagagagaaatggagggccagacacagtggctcatgcctgtaatcccagcactttcggaggccatggcaggaggatcacttgagcccaggagttcgagaccagcctgggcaacatagcaagaccccatctctaaaaaaaaaaattagccaggcatggtggcacacacctgtgatcccagctactcaggaggctgaggccggaggattgcttgagccagggagattgaggctgcagtgagccatgaaggcgccactgcactccagcctgagtgacagagtgagaccctgtttaaaaaaaagagagaaagagaaagaaagaaatggatagggagggctgggtgcggtggcttatgcctgtaatcccaacactttgggaggccgaggcgggcggatcacgaggtcaggagatcgagaccatcctggccaacatggtaaaaccctatctctactaaaatacaaaaaattagtcgggcatggtggcgcgcacctgtagtcccagctactggggaggctgaggcggggaatcccttgaaccccggaggcggagtttgcggtgagcagagatcgcgccactgcattccagcctggcgacagagcaagactccatctcaaataaataaataaataaatggatagggagagggccacacagagactctgacagattcagagagggagggcctgggctttgcttccctccccgacgccagtgaagcccctcccccacgccacaggagccccctc

SEQ ID NO: 22073 - DNA, 2300 bp, Homo sapien
acaacaacaaattagctgggtgttatgtcgtgcgcctgtagtcccatctacttgggaggctgaggcaggagaatcacttgaacccgggaggcggaagctgcagtgagccgagatctcgccactgcactctagcctgggcgacagagtgatactctgtctcaaaaaaaagaagggtgggaggaggcgtggtcaccagaactggagagaggagcagattgcttgacagcggctaagatttttggtagaagaatacagttaatctaaaaccacttggcagatttaacccaacgttaaactgaaaaacaaagaactgttactgcagtccatatgggtgagctgacctcctggggcacagatctgggtagagggtaaatcctacccgattgttgagttcctcaaagtgtgttggagtttgcataaagaaactgtgaggctggctgcagtggcttcatggctgtaatcccagcactttgggaagtcgaggcaggaggattgcttgagcccaggagttcgagagcagtctggacaaactgtgaaatcccatctcgacaaaaaataagaaaaattagccaggcgcaactgtagttccagctacttgggaggctgaggcgggaggattgcttaagcccaggagtttgaagctgcagagagctaagattgcaccactgcactccagcctaggtgacagagcaagactctgtctcttcaaagaaaaaaaaaagataaggccgggcacggtggctcacacctgtaatcccagcgatttgtgagtctgaggggggtggatcacaaggtcaggagtttgagaccaacctggccaacatggtgaaaccccatctctactagagatacaaaaaattagccgggcatggtggcacacacctgtaatcccagctactcgggaggctgaggcaggagaatcgcctgaacccaggaggtataggtttcagtgagctgagatcatgccattgcactccagcctgggggacagggcgagactccgtctcaaaaaaaaaaaaaaaagaaaagaaaaagataatacagccccagacccccttagctacaattctgagaccccagaatctctgaaacttcaaagttttggattttgtcccataaatttagtgcaaactcatttggcagcaaaagctgacctgaactaatgaggggctatttatagcctttatttattccacttagttaaatactcatccatgttgctatggaaatgttcatgagtttgatgacgaggttgtgccccagaccctgcctaggatggttgcgaactgcatggtgtatgcgctgatttattgcctagaaatgtgaaatgggcctggcgcagtggctcacgcctgttatccaagactttgggaggcagaagtgggtggatcacttgagcccaggagttcgagaccagcctggccaatgtggtgaaacgccgtctctactaaaaatacaaaaattagccaggtgtggtggcaggcacctgtaatcccagctactcgggagactgaggcatgagaatcacgtgaacctgggaggcagaggctgcattgagcctagatcatgcaactacactccagcctgggcgacagagtgagacactgactaaaaataaagataaaaatgtgaaatgttcggaatcctgagacacttcttgccccaaggattttagataagatgccatagacctgtgtaaggtcatcttgtttgagcccctgtgtagacaaactcatcattgaatactggccacacactgtcaggactattattgtccttcattttccttttcttttttttgagacggagtctcactctgtcacccaggctggagtgcattggtgtgatctcggctcactgcaagttctgcctcccaggttcatgccattctcctgcctcagcctcccgagtagctgggactacaggcgcccaccaccacgcccagctaattttttgtatttttagtagagacggggtttcaccatgttagccaggatggtctcgatctcctgaccttgtgatctacccgcctgggcctcccacagtgatgggattacaggcatgagccatcgcgcccggcccttcttttcctttttcttttttttttttttttgagacgtagtctcactttgtcaccccggccaggctggagtgcagtggcacaatcttggctcactgcaacctccccctcccgggttcaagcgattctcccgcctcagcctcccgagtagctgggattacaggaacccaccatcatgcccagctaatttttgtatttttggtagagacaaagtttcacc

SEQ ID NO: 22074 - DNA, 2300 bp, Homo sapien
ctgggcacagtggtgcacgcctgtagtcccagctactcaggaggctgaggcaggagaatcgcttgaacctgggaggcagaggttgcagtgagccaagatcacaccactgcattccagcctgggcaacagagcaagactccatatcaaaaaaaaaaaaaaaaaagagagagagagagaagaaaggagggaggaatacccagcttctcccatcctttgctccccaagctcttgccagggcttcctattggccaaaccctttggcaagtgttctgggaaatgtagcttgcaggtgggtggggcctggagctgggggccaacaggcagaggatgggaatgccagtcagcatggctcaccttagctctccccgcttgtgatgggtcctttttcgtctcttgcttctctcaatctaacatctgctctttccttaattctgggctgcatctctgttctctctttcccccttgcacctggtgtctttgtctctctttgctgcatctccctgtccctgtcattttgtctcactctttctgtttctctgtgtctcctcttcctccttctcttcctcttccttcttcctccctgctccctcccccaattccctctgtctccccccacctcccgcccacgttttcagatgatccaggccatccaggtgctgcggttccacctgctggagctggagaaggtgagcgcgtctcacctccccacaccctcacttgcccctgtcatcccaccccctctcgtcgcctctgccccccaccttccagctctctccccaccggagttgaagcagaatgccgcccccgtccctgagcacccccgccctgcccccgtgggtggccccccccagtaccccggtgcccccccaggtccacgacctgtgcgacaacttctgtcaccgctacatcacctgcctcaagggaaagatgcccatcgacctggtcatcgaggatcgggacggcggctgcagggaggacttcgaggactacccagcctcctgccccagcctcccagaccaggtgggcccgggacgggcaccaggcatcgtcctgcagccacagctgtgcctggacaccgcatgagggcgcatgtgcactacacagcctcagacgaagccacagtcagcctgatcacagggcacgcatatgcacacagccacacacccactacacaacagctacgcagactcggatgcggctgggcaacagtgcacagacacacgcacaccagcggctgcagatgccacccacagattcagctacacccacacaggtccacatacagccacaccaactcagcaacagccatttctgctcacagccagacagtagcgtccaccgggtactcacacacgccccccagcccagccatacgacagcagcatagaacacacagccgggttccgcacgccgttctcaattgagtatgtgtccactgcatacacacacccgctccagccacacagatggacatagagccaaacagccccaggtactgcccggcaaactcagatataaccacacttgggcccggactgaccacggtgccctcttgcacacacgtgaccctggccacatcacagtcgggctgcagccgagatcacacgcacacaccactcacagccacatggccccagactcatctacgcagacttggaaatagactcacaggctcagatgcggccacaaagaatcaaacccaggccgggtgcggtggctctcacctgtaatcccagcactttgggaggctgaggtgggtggatcatgaggtcaggagatcaagaccattctggctaacacggtgaaaccccgtctctactaaaaatacaaaaaaaaaaaaaattagctgggtgtggtggcgggtgcctgtagtcccagctactcaggaggctgaggcaggagaatggcatgaacccgggaggtggagcttgcagtcagccaggatcgcaccactgcactccagcctgggcgacagagcaagactccatctcaaaaaaaaaaaaaaagaatcaaacccagcaaagcaactcagtaaggtggcaccatctcagacgcagcctcactacagttttatccacttaggacaccagacggaaaacacacacagcacagccgtgtggatcccgacttgccacagctccatacagagtacaggggcaaagccttgagaagtcgcatgagagccacactcaggcaatcctactgtgaacacacctggcaatgacatcttcacagcacacgcacacccactccacaccacctcagatacactcctatgacgaccacgccacagccagacc

SEQ ID NO: 22075 - DNA, 2300 bp, Homo sapien
agcccacccccgccgcccccagcgcactgcccatcctgcagagggggaatcgagcctcagagaggggagagcctacggtgggaccagactccagattcccacgtgacccctggagatggccagggagggggtccgtggtgtgtccagggggctcggagaacagagagccagaggagagaaaggacgggagaagcggagacagagagagacaaggagagagagactgggaaagagggagactgagaaacccggagcaggaaccccagccctgggtaggagaggaggggcctgggggcaccagggccgcggtctcttcctctcctccccccacagcctgcccctccccgactcccaccggaagtgctgctgctgccctaaccccaatccctcgtgctgtagctctgcaggctcactctggctcatcccctatcccgctccttggtggttctgtttaatttccacaagacaagggagagaccgggaacggggagcgcggctgccagcacccctgagccgccgccggaccctccgtcgccccgggccgccccccgccccctgcggtccccggtgtgtccgtctcgggacggttcgattccctccagagccggggaagggacggggggggcccagaggagggggcctcgggcgccccgcctgcgcctgctgcccccgccccggcggcgatgcgctcctggccgtgacccccgctgggggcgggggccggggtccatgcgcggagtccccacccggcccggcgcctgccgctgacggcggcgggggtgggggggcgcgcgcctggcctcctgcccaccccctggcgtcaacaccgcgggccgtcaggggctgcggccccgggctgcgccctcccccgcggccaggctctggagggacccaggagctgccgccggcctcagcccatggcccggagggtaggtctcggggcggggaccccgcgtcccggccgcttccgcaccccctgtccctgcatcccccactctccggcgctggcccccattagcccatccgtcctctacaccacctcgctctctctctgcccctccctccgcccctgggtctcccagtccctgtgtgccccctctctgcccccaagtgtctcttcctggccctcggcctcgcctcctccccatcgtttagcttctccttctccctgcccctctgtccccctctgtctgccccactctcctcctcctttctgcctctctgtccccctctctctgtccctggtctcccccctctttctgcctctctatccccctctctctgccctcccccacccgcagtctctctcctctgttcctgggcttcctcctccatctcagccgcccgcacctcaccgtccccccttttttctgctctcctccgtccttcccttcgctctacttttgttccaagccgcccctgcctctccagggctaggagtgggacaggggtgggagaggtggtctcaccaggctgctggccccacggagcctgtctccctggggatgggaacggggatagaagacaggggaggaggcgcgcgcccgttttgggggttccgggtaggctgtgaggaccgcttttggtgagagtgccttgagcagcggggagcagttggattcaacttcagggcacaggagaagttaggagaagagggagagggaaagagtgggacacacagaaccagggtgcccagccaggcgagggtccgaggcaggaacgttctagcctcttcccgtgcgagtcctgctgcctctttgagcctccgtgtcttcatcactgaggaagggatttgacctgatgagaggaaggtgcccctggcttcccaggtgcatggttctgtgacgacaggacgcggtcgtcctaccccataatggtgtttctcttgggtgcgcaatcgtgtctgtatggtggtgcggagtgaccctctccggcaacaagtgctcacagcatgagccaggccctgtgctaaatgcctcattcattcattcatccatgtgccaaatgtctcaatcatgcattcattcttgtgcctggtgttgggctgtgtgcatgtgtgtgtgcatgtgtgtgtggggggggggatttgggtgtgactgacacatgagtgtgcacgtgggttggtgtgtatggctgtgtctacatgtgtggtagattcacgtggcgagtggagtgtgacatgttgttgagacttactctgatgcgcttatctgccaactgtgaaatgaaatagaagacagggaggcttcgtatgtgtactttgtgtacaacaatgcgcggttcctacaggaggtgtccat

SEQ ID NO: 22076 - DNA, 2300 bp, Homo sapien
gctcgtctctttctttaattagaaagatttatgcttcagagtccaagccccctgctcttgttttgggggtggcagggacgactccagggtctctattggagctcctgtcccccactccctccccctcctgtctgtctcactctgtctgcacctctctctctctctcctcccacccgcgtctgtctctgtctctctctctctctgaatcacaccgtcactggagttacctccctccccactccagttaggccccatccccatcccaggtgccccctccctcccttcctgctctgtccacgccccccaccactggccgtcagatgaggccgcacttgctcctctaggtttcagaatcagcctgggctaaggggaccttagcatgcaccaccccccaaaaaagcaaatagagccagagactcctaacccttgcatccctcaccccaagtcttggctgagggtgaggtgggggtggagcagaccaaagggccttgtgtctttaattaaaaagtgatttaaattaattttctgctccaaaacccctatctggggtgcgccggccttgaggaaaggcaaggcctccagacccttcccctcggactgccttaaacggccagcctcaccgcaggacagccacgggggcagagcccgccggcatggggacccccagactcagccaagaccctgagtcctggcaccctctagcttaactgtttctccgttatccacagcccacccccgccgcccccagcgcactgcccatcctgcagagggggaatcgagcctcagagaggggagagcctacggtgggaccagactccagattcccacgtgacccctggagatggccagggagggggtccgtggtgtgtccagggggctcggagaacagagagccagaggagagaaaggacgggagaagcggagacagagagagacaaggagagagagactgggaaagagggagactgagaaacccggagcaggaaccccagccctgggtaggagaggaggggcctgggggcaccagggccgcggtctcttcctctcctccccccacagcctgcccctccccgactcccaccggaagtgctgctgctgccctaaccccaatccctcgtgctgtagctctgcaggctcactctggctcatcccctatcccgctccttggtggttctgtttaatttccacaagacaagggagagaccgggaacggggagcgcggctgccagcacccctgagccgccgccggaccctccgtcgccccgggccgccccccgccccctgcggtccccggtgtgtccgtctcgggacggttcgattccctccagagccggggaagggacggggggggcccagaggagggggcctcgggcgccccgcctgcgcctgctgcccccgccccggcggcgatgcgctcctggccgtgacccccgctgggggcgggggccggggtccatgcgcggagtccccacccggcccggcgcctgccgctgacggcggcgggggtgggggggcgcgcgcctggcctcctgcccaccccctggcgtcaacaccgcgggccgtcaggggctgcggccccgggctgcgccctcccccgcggccaggctctggagggacccaggagctgccgccggcctcagcccatggcccggagggtaggtctcggggcggggaccccgcgtcccggccgcttccgcaccccctgtccctgcatcccccactctccggcgctggcccccattagcccatccgtcctctacaccacctcgctctctctctgcccctccctccgcccctgggtctcccagtccctgtgtgccccctctctgcccccaagtgtctcttcctggccctcggcctcgcctcctccccatcgtttagcttctccttctccctgcccctctgtccccctctgtctgccccactctcctcctcctttctgcctctctgtccccctctctctgtccctggtctcccccctctttctgcctctctatccccctctctctgccctcccccacccgcagtctctctcctctgttcctgggcttcctcctccatctcagccgcccgcacctcaccgtccccccttttttctgctctcctccgtccttcccttcgctctacttttgttccaagccgcccctgcctctccagggctaggagtgggacaggggtgggagaggtggtctcaccaggctgctggccccacggagcctgtctccctggggatgggaacggggatagaagacaggggaggaggcgcgcgcccgttttgggggttccgggtaggctgtgag

SEQ ID NO: 22077 - DNA, 2300 bp, Homo sapien
cagagacacagattctcagagagagcctggaatgaggaggaggaagcaaacctgggcccccagaaggagagagacagacacagagcggttgataaagaggggaaaccgaggcaggaggctagcaggcccgagagagaggacaggaggaacccaaggtggatcctcgttcattcggtctgctcctgtaggctttcagaggggatcctggggaccactgcggatccccgggggacgtggctgcctggtgggcatagccccagtggtcggtgctcaggttggggcactgaagggccagtccgctgagagatcgcccagcccgtgctggggagacccatgaggtcccccagatctactcatagagggctccacgcttcccgtctgtaaaacaggtgcaggacagggctagagggcggagacccctgcagactgggagctggggtcactctgatgccacccagggagccactcagccgggcagggaagacgcttccagacactgtcacagggaggcccaagcacaccctcgaagagccgacaggcagccgcgacgcagtgacacaggcacccccgctccagcaccaggcctggccgccacctgctccctccccctgggaacagaagggtcccaggactatttaagggagacagccaggaagagagagagagagagagagagagagagagagagtgtgtgtgtgtgtgtgtgtgtgtgtgtgtgagagagagagagagagagcgagagacagagacggacagacagacggatggacagacagagggaaagactggaggaagagcctcagaaagccggagcctcccccctgctccctccgtcccccgccggcatcctccatcctcccccaatcaatttctctcccacacacttatttctcccttcccaacagctcgtctctttctttaattagaaagatttatgcttcagagtccaagccccctgctcttgttttgggggtggcagggacgactccagggtctctattggagctcctgtcccccactccctccccctcctgtctgtctcactctgtctgcacctctctctctctctcctcccacccgcgtctgtctctgtctctctctctctctgaatcacaccgtcactggagttacctccctccccactccagttaggccccatccccatcccaggtgccccctccctcccttcctgctctgtccacgccccccaccactggccgtcagatgaggccgcacttgctcctctaggtttcagaatcagcctgggctaaggggaccttagcatgcaccaccccccaaaaaagcaaatagagccagagactcctaacccttgcatccctcaccccaagtcttggctgagggtgaggtgggggtggagcagaccaaagggccttgtgtctttaattaaaaagtgatttaaattaattttctgctccaaaacccctatctggggtgcgccggccttgaggaaaggcaaggcctccagacccttcccctcggactgccttaaacggccagcctcaccgcaggacagccacgggggcagagcccgccggcatggggacccccagactcagccaagaccctgagtcctggcaccctctagcttaactgtttctccgttatccacagcccacccccgccgcccccagcgcactgcccatcctgcagagggggaatcgagcctcagagaggggagagcctacggtgggaccagactccagattcccacgtgacccctggagatggccagggagggggtccgtggtgtgtccagggggctcggagaacagagagccagaggagagaaaggacgggagaagcggagacagagagagacaaggagagagagactgggaaagagggagactgagaaacccggagcaggaaccccagccctgggtaggagaggaggggcctgggggcaccagggccgcggtctcttcctctcctccccccacagcctgcccctccccgactcccaccggaagtgctgctgctgccctaaccccaatccctcgtgctgtagctctgcaggctcactctggctcatcccctatcccgctccttggtggttctgtttaatttccacaagacaagggagagaccgggaacggggagcgcggctgccagcacccctgagccgccgccggaccctccgtcgccccgggccgccccccgccccctgcggtccccggtgtgtccgtctcgggacggttcgattccctccagagccggggaagggacggggggggcccagaggagggggcctcgggcgccccgcctgcgcctgctgcccc

SEQ ID NO: 22078 - DNA, 2300 bp, Homo sapien
tgggggcaggggttgggcaggacatctgcttcctgggggttcaggggagaggcagacaccgtagtcattttggccatctgtctacctcccgctatggaggtccactcagaagtctgaccaccagcactgacagggaagacccagccaccagttctctaccgagcgtttatgggagttaggagctcagcaactcctggccacccctgtcttcaccctctttcccagaagccaggcccaggcgtgggaagttggaggaagccggatcctctccctcccctggccagcaggcctgacggtgtccagccaggactggcagtgggcaggaccggtggcacgagcaaggccccctccctcccactgtccgcctctagagaaggagcactccacaccgactaacacgccatcaccccctgttgtgggggggagcaggattgggggtgggtgtagtgctggtgtgccttgcagaggtgtgtgcttgcgtgggggtatgtgtgtgggcccatcgcagggtgcatgagtttgtgtcttcaggagcccaggccacctgcctggccctttgcagttcatttctttcttttttttttttttttttggagatggagtctcactctgtcacccaggctagagtgcggtggcatgatctcagctcactgcagcctccacctcccaggttcaagcgatttctcctgcctcagcctcccaagtagctgggattacaggcgtgtgccacctggcctggctaatttttgtatttttagaagagacagggtttcgccatgttggccaggctggtctccaactcctgacgtcaagtgatctgctcgcctcagcctcctaaagtgctgggattacaggcgtgagccaccgcacccagcctgcaagtctcttcttgacctgacccgtcctcagcctggggaattgtgcggtgcagcagttaagggtgtagaatctggagccatatttaccacctcatgccttggtttccctgtctgtaagtgaagctcataatagcatttacctaaatttataaaaaacattagaacatgccaggtgcggtggctctcacctgtgcggtggctctcacctgtaatctcagcgctttgggaggccgaggcagaaggattgcttaagcccgggagttggagactagcctaggtaaaatagtgagaccccgtctcttaaaaaaaatgaagagaaaaaaagcctggcgtggtggtggtgggcacctgtagtcccagctactcgggaggccaaggcagaaggatcgcttgagcccaggagttggagaccagcctgggtaacatggtgagatcccatctcctaaaaaaaaaaaatggagggaaaaagcctggcgtggtggtggcgggcacctgtagtcccagctactcaggaggctgaggcaggaggattgcttgagcccaggaggttgaggctgcagtaagccaagatcgtgccactgcactccagcctgggtgacagagtgagaccctgtctcaaataataataatgtgctgccgatgccaggcacgtggtcagggctgcctgtatgtatggcagctgttgttattcttattaatgggtgtctttgtggttgtttctggcctcctttgtgaggctgtgcaggcacagtatgtgaatttggatctgactccagctaaacattcttgccctccccctagttctgtaagtctgtaactatttgtagctgttggcccttgtatggctgggagactgcgtgcgtgtgtgtgtgtgcgtgtgtgtgtgtgtgtgttggggggcgggggctgcttctgaaacacacaggagcgccctccggtgctgtcccctgcctctggtgctgaacccggaggctggggaggaggctcgggctccctgctcccccaggcccctccccgggcctccccccgcctcccgcaccgccttccctctgcccgcctccgcctcctccccctctctccggctcctccccctccctcgctccctcgccgcctccccctcccccgtgtccctcccctctcctcttctcctccctctatcccctctccctcccctcctccccggctctccctctcagtctcaggcttttctctctctcaatctctctctctctttcgggcggagtcgcccaccactgccagcccagcgctggggggacctgctccaggctgtagccgcaggtaagagaccccattggtggggaggtgggggcgtgggaaaaggacggggttaccccaggtgcggagtgggggcggttcgggaagcctggagctggcttccctgggctggtttatggaggtggg

SEQ ID NO: 22079 - DNA, 2300 bp, Homo sapien
ggccaccttaaaagcatgatgctccggccaggcgtggtggctcacgcctgtaatcccagcactttgggaggccaaggcgggcggatcacctgaggtcaggagttcgagactagcctggccaacatggcaaaaacctatctatactaaaaatacaaaaattagccgggcatggtggtgtgagcctgtaatcctagctactcaggaggctgaggcagtagaatcacttgaaccagggaggtagaggttgcagagatcgagccactgcactccagcctggcaacagagcgagcatctatctcaaaaaaaaaaaaaaagaaagaaaaaaaaagtgcaatgctttaaaaaacaaatgtagaatctgattgtctatggacaagttcgtggtctccagttagctacagctttccaacctcagctgcatatgtgtgtgtgcacatgtgctccctgttatattacatttgtgctttccattctcacatgacctctctggtccccaaaggcattttagtttaatttcattttattttatttatttatttttgagacagagtttcgctcttgtcacccaggttggagtgctgtggtgcaatcttggctcactgcaacctccgcctcccgggttcaagtgattctcctgcctcagcctcctgagtaggctgggattacaggcacacaccaccatgcccagctaatttttgtatttttagtagagacggggtttcgccatgttggccaggctggtctcaaactcctgacctcaggtgatccgtctgcctcagcctctcaaagtgctgggattacaggtgtgagccaccgtgcccggctggcattttagttttcaatccctaatctagtacaacctctttattttccagaaggggaaacagactacaggggtctgtaagtaaagaaggggttcgagaagccagggtttctacatttacagtggagtgggcgtcgatgcgcaggggacactcactccgcatggcacagctggaacggagtgaactggagctccaggttcaggcagctctctgtaggcagggcacaggcaggttagcatgggggacctgctggggactctctccctcctcccgtccacgcctcactcacgggcaatagagtcaaggttgtactcagagccgggctcgtagtcgcagtaaatgttcaggaaggggctgcccttgtcccctgaatcctggcggaggacacggggttcaggggagggcaggggtggcaggagggatccggggcggctcagtggaactcaccatgtgtgtaaggaggagggcgaagggaggtggagggggctctaggtaccttgatgaacgtgatccccacaaccagaccccgcttggggggtgacttgttgaaagtgtcgatggagacaatctccgcatccactgggaggggagagttctaagttcagtgtcaggcagactcatgcttccaatctccccaacatggtgagctctggctaccgcaatgatcatgccctctggtctgagtcctgaccaccatcacctgatctctgttccctgggtactagggatcctgacctgtaagtctgaagaatcctgaaaccctaggctcatccgggccccaactatgcctgcccgctgatcccagtgacccccttaaaaccacctgatcccattcttccagcacggtgacccggctcagacagagcctcagaagccttctcaacaccacgttccaggcccccgccccccagcaccatagcgccacccaccgggaatgtagttgaactgcagctccttggccactggccggattttctgtcggaggtcttggtagcggaagccgagcaccttgcctttaagggtggcggccagcagctccccgcgcccgccggcgccgcctgccagcccgtacacattgctctgcgacgagaagcgcgtgaagctgtcctcgcgcaacggacaaggccccgcggccacggccgcctcccccatcatgcccctcagttaagcaccctctccgcagcccccgccccaacccgcactacccaacctacgactctctaagcgacctgaaccgccgggtgcccggccgttgcgcgggctgatgacgtacggaagctgccggcgttgccctctcccaagatggcggccaggtcgcctgctcgggcctcccaggcgactttgccccactgcgcccgcgctctcttctcctttccatttctggaccaaggggctgccataaggagtctgtgactagagatgggaggtggtggccacggcctctcgctgtatgctgtgtggaaggtcgaatcatca

SEQ ID NO: 22080 - DNA, 2300 bp, Homo sapien
gtggtgcgatcttggttcactgcaacctctgcctcccgggttcaagcgattctcctgcctcagtctcccgagtagctgggattacaagcgtgcgccaccacgcccagctaatttttgtatttttagcagagacagcgtttcaccatgttggccaggctggtctcaaactcctgacctcagttgatccgcctgcctcagcttccaaagttctggaattacaggcatgagccaccaggcccggcctgttttggtttgttttgttaaaacttcataggcagttcaagtgtgcagctaggattggaaacctcttaacaggatgattccttcctaacctgtaacttcattttttcattcatccgctcaacatgtggcttataggttactagggcgggaagacgcctgaaggaaacgcactgctgaagtggcactagacccacgtgccactccctcagcgaatattcactaagcacctgctgcatgccaggccctgggaatacagcagcactgacggcattcccagactgccctccaggaacttctactctccacatccagaaatctggaatcatcacaaattccttgccacctccgttatccagtctgcctttgagaactttccatcatgtaagagctgtctcttacatgctcagcacatagtttgtgatttttgacacatattttctgaatgcctgctttgtgtcaggccttgtgttccaggtacaggcgataaggccgtgatcaagggagatcagcctgctgccttcatggagcttgcagtctgtgtgtgctcgaggtgtccaggacagctggccaacccatgtcttctggaaatgatacacagatgtgcacatagtacccaaacctccatggccttctagggacaaagcagcacagacaggaacccctgaaggccccagagtcggaaacacctggtttacatcctgtccccaccacttgctagcatatcagtcagtggacttactctttctgagcctccatttgattctctctaaactgggataataaacctctttgtagaggtttctttcttgcaaagattagtgagacagatttgcaaaggacgtccgggcacatagtaaaagctcaatgaatcctgaataagtgaaccggcagggagggtaacagtaggcccttgcagaacagttgtaaggaatcagattatcagagccagcatgactgtcaccaagtaggtgttcgataaaggaggtggttattatagctggatcatttttccttgggggcaagaagaatgtattaattattttaaaggtgatactgttaagattatgaactataggccgggcaagggggctcacgcctataatcctagcactttgggaggccgaggtgggcggatcacctgaggtcaggaggtccagaccagcctgggcaacatggcgaaaccccatctctactaaaaatagaaaaactagccaggtgtggtggcgcctgtaatcccagctgctgggaggctgaggcaggagaatcgcttgaacccaggaggcagaggttgcagtgagccgagatcgcaccactgcactccagggtgacagagcaagactccgtctcaaaaaaaaaaaaaaaaaaaatagtgaactgtggagttaccttgtttggtttccagtactgaccgctcgttactagctgtgtgatcttaggcaagttactttacccctctgtgcctcaattccttcatctctaaaatggatttaagtacctacctccacccccttgcgaatttttaataaagtattagatggaatgcacttacagtagttcctggcacataagggcaatattaagttttatgatgatgatgattcgaccttccacacagcatacagcgagaggccgtggccaccacctcccatctctagtcacagactccttatggcagccccttggtccagaaatggaaaggagaagagagcgcgggcgcagtggggcaaagtcgcctgggaggcccgagcaggcgacctggccgccatcttgggagagggcaacgccggcagcttccgtacgtcatcagcccgcgcaacggccgggcacccggcggttcaggtcgcttagagagtcgtaggttgggtagtgcgggttggggcgggggctgcggagagggtgcttaactgaggggcatgatgggggaggcggccgtggccgcggggccttgtccgttgcgcgaggacagcttcacgcgcttctcgtcgcagagcaatgtgtacgggctggcaggcggcgccggcgggcgcggggagctgctggccgccacccttaaaggc

SEQ ID NO: 22081 - DNA, 2300 bp, Homo sapien
gaaacggcttgctctcagggcaaccttaccaacatagaacatcacacagaatgtgtgtgtgtgtgggtatggggggtgtgtgtgttgggtgtggtgtgtggtggaggtgtgtgtgtgtgtggtgtgtgtgttggggtgtggtgtgtaggggcacgtgtggtgtttggtgtgtgttgagttgcgtgtgtggtgtgttcggtgtgtgtgtggggtgtgtgtggtgtgtgtagtgtgtgtgcaatgtgtgtgtgtggggtgtgtcatgtgtggtgtgtgtgcagtgtgttttgtgtgtgggggggtgtgtcgtgtggtgtgtgtactgtgcaatgtgttttgtgtgaggggtgtgtcgtgtgtgtgtagtgtgtgtgcgatatgtgtggtgtgtgatgtgtttgctgtgtgtggtgtgtgtgtagtgtgtgtggggtgtgtggggtggtgtgtgtgtagcgtgtggtgtgatgtgtgtggtgtggtgtgatgtgtgtggtgtggtgtgtgtagtgtatgtttggtgtgtgtggtgtggtgtgatgtgtgtggtgtggtgtgtgtagtgtatgtttggtgtgtgtggtgtggtgtggtgtgtgtagtgtgtgtgtgtgtgtccacctagccatcctgagctccagcactccccgagttgtactttcttcatctggaaaatggagactcaaatggccaaacaaaacaaaacaaaacaaaacaaaacaaagacaccctctgagaactactggacaagtcttggcgattgtcccacctggagccccagccacccccgtctgaggttcgggaagggggaggccggagcacccagcacttactttcatcaacttgcattcccgggaatcagagaaagctgggaacagctcctcatacttttggacagccagctgggcagcagggaagggagaagatgagttagtaacaagagggtcctcagagctactggcctagcagctgaggggacttggggatgtcgggtgatattgagtcagctcttgcacccctcccccagcctcaggtgtcacctggctctgtgtctgtcagtaccttcccgtagctgagctcagcaccagcctggctgcagagatggctgcagggagaggtgggtggagggggaaggttccccagataggcacccactgcctcctcccacctggctcagctggggcaggggacaaatgagcacatcctccatgccaggcctggggctggtgcttcttgaggaccctgagagggtcaaatgacggtgagcccccttttcaaagtgaggaaacagatccagagaggggcagtgacctgcccagggcacggtgagacatggggtgggaatgggaacctggtctgacaaagcccaagcttttgcccaccaccggtgcccacagcagggcagggctctgtggggtgtgtgtgtgtggggtgtgtggggccaccaccccaggccgtgagccagggacaccaggaaatcctggactccgtgcttctgccaggcaatggtaaaaaaactccggccaagcaaaatctagcgccaaccctccagctccttcccgctggccacgccccctcccactgccctctttggcccctcttttgccaagtgtcctgaaaataggtgggcatgtgtgagctacagctaaagccacgacagcaggagtcacaaagatctggaacactggggctgcaggtccctagtcatgtggcctcaaacaagggactctcgtcccagcctcaccatcttcacccataagacgcggtgacaatggtgctgactttaatggggtgcagtgaggattcaaaaagtgcacccatgaaggaaagagcactaagtgaggcaggagctggacccgcaaaagcctccagggctgggtgggcaggtgatgccagcacagaaacacagctgtgagaaccacacttctcatccaaaggctggctggcaggggccagacgtgagggaggagcacgtccctcttcgggggcaacgggacctggcctggagataagcacatggtggcctggtgcggtggtcctgcgggcgtggggtgtgctaccttggcgttgagcatgtcgatgcagaagtggcagagggccgccttgaagaagtagtctttggcgctgtacttgaggagggggctgtccatggcattggtccccacctgtagccatggagaagtggcactggtgagctcagggcaagcagccagagggccagagccactgccaggcactggggggccagctgggagctggttcatgtcccgaggtgaggccctgttaacccaggaccccaa

SEQ ID NO: 22082 - DNA, 2300 bp, Homo sapien
cagtgggatatggtggggtccctcccctgcgtttgatctgagcttttctagctctccagcgagactctgcagggtgtgggcctggagtctggatgtggcccctccctggccttaggaagctcagaaggtggctgaggactccgaccggtaggaaagtataaagatgatgttacatccagggcacagaggccaacttgcacagagctgaggctgggggcgtgaatttggctatgggagatctttcaaggaagaaagggggcagttctgaaaggagagcctcacctgggtagagctgagagcaggtgccgtgtccagagccctggggacgtggtgttgagcagggaagggtgttagtgcagcttccagagctacagcctaaagatacgcacgccagccatgactcccagtggggcaaggggcacattggcatcaagggcagtggctgctttgtgtctgaggctagtcaggcctcacacaaggccaggtgcagtggctcatgcctgtaatttcagtgctttgggaggctgaggcaggaggatcgctcaagcccaggagttcaagaccagtctggacaacatagtgagatcctgtccccaaaaaaaagcctcacagagaatgtcatgtagcaactgtgtgtggctcagcagcgcaggtggtgggtggtctgggaggaccctgcctcccctgtgatcctgggcaagtcagtcttttgggcctctgtttcctcgtctgttaaagcagagactgctgtgagatgatgcagtcatgcccagcgcggcacctggtgtgtgataaacttccagtcaggacacccttggctttcatcagtccaggggcccctgcctgccctgggctccccacagcctctgcccttggccgggtgccttgtgagacagcgctggaggcccgatttggaaccttgcctggcttccccaagcaggtggccggtaccctggggccgtcctcatcactggtctcctcagcagcctagaaggcctctgtcttgggtcagcacttctagggcttcctccaggactccctccagaaggacctgcccccaagtggcagctggagtgtgcctgaggcccgactgggctcccgaattcctctccctctcgcagagggtggcctgctgccaccttggtggctctgggtggggaagggtgatgctcatatgtgttattggttcctcagttacccaaccatggctgctgctcagggcagactcgggccagcgaggcctcttcccaggcctgcctgatagttgggggtgggggcagtgtgtgtacctggggcagagaagcgacctggcccctgcttgtcccccacttcctccccagctgccatttactgggtttctactgtgtaccagatgcttggcatcttttaacccatttgatttctttgtgcattctgtgatttgcccccattttactaaggaggagatgaccaagtgtaaccaggaagggcttcagagacgcagaagtcaggttgggcgtcgctggtaggagtgactgcggggatgggcggtggcctgggccatagctccccaacttgggctgtattgctctgagcccctttccagccctctgtgggtgggtacaggaggggccaggccacagaactgggtgttgctctgcctgtccgagtgcacaaggcctggtgacctgagataagagtagcagtcatgagtgtgtcagaagctcgtccaggagccagctgtcccaggtgtctgctggtggcccgccgctttccagacatggaggggacttaaccccgtgagtccatgttgctgcctggggggtaagctgtctccctgctgctactgcaaggactgtgccatgctgacggcgggtgctccagagccagtgccagcaggcccaggtggcagctgcagatctcactgctcactgcggagcagcagcctttgccgcctcagcccacagggtgccaggttggtgtcctgggtgttccggccaggagagtgaaccagtgagcagcccggggcctccatgtggagactgcagccaggtggggcggggcaaggcgggcctctcacctcactccagctgctgctctcctctgcagcgtggcccggcttagccgttgcttctgggtccgccgattacaggatgtatgtgtcttcaaactgccggatttaggttgtgttctctccccttcctcctcatctgccccctttttgccaccgtttccactgtctgctgccacagtctcggtctgtcagccctagaacctggactgagtgctgtaccttctctcagtcccttttagatccccag

SEQ ID NO: 22083 - DNA, 2300 bp, Homo sapien
ggattacaggtatgagccaccgcacccggccaatttccttggttttttaactcaatgcccttctgttccaggatcccaccgaaggtaagacattacatttagcagtcacgtctccttggctgtgatggtttctcaggctttccttgttttgatgacttgacagtgttatttgtttgagacggagtctccctcttgtcccccaggctggagtgcagtgaggcaatctccgctcactgcaacctccacctccagggtacaagtgatcctcctgcctcagcctcccaagtagctgtgattacaggcatgcaccacctcaccgggctaagttttttgtattttcagtagcgacggggtttccccatgttggacaggctggtctcaaactcctggcctcaagtgatcctcctgccttggcctcccaaagtaccaggactacagatgtgacacactgcacccaccaacagtgttgaggagtactgggcaagtattttggaggatgtggctcaactggaatttgtctagtgtttttttcatgattagattgaaagatcccagaagtaaagagccattttaatcacatgacttatcaatgttgaggttaacctcaatcacctagatgtcaatgtcaggtttctccactgtaaatttaggctttttctcccctttcttgtaccctcttctttgaaaggaagtcactatgcacagtccatacttacagaatggggaggtatccttcaccttcttgagagcagagtatctacgcagattatttggaattcttctgcacaaactatttgtctattctcccccctttatttatttgttctatattcatctatatgaccataggctcatggatactttatgtttgggattataatccaatactactttattttgatgctcaaattgttccagctttggccattgggagttctttcagttggctcctttggcataccccctaattttgtgtgtgagcacacgtgtggaatacttccttcctttctggcactacaaagttatactgaggtgagctatgattgtgctgctgcactccagcctgggcgacagaccgagaccctgtctccaaaaccaacaacccaaagagtgagaccctgtctcagaaaccagcaactcaattttctgggacagcaggaggtgtgtttgagcctaaacttttttttttagagacagagtcttgctatgttgcccaaggcgggacttgaactagactcaaactcctgggcccaagcgatcctctcgcctcccgagtagctgggattataggcacgagacaccgcgcccatcttcgaatctgaatttttttttaacacgctctcttcagctattttttttttttttctgagactaagtctcactctgtcgcccaggctggagtgcagtggcacgatctcggcccgttgcaacctccacctccccggttcaagcgattctcctctctcagcctcctcagtagctgggattacaggagtgtgccaccacacccggttaatatttgtattttagtagagcggggtttcgccatgttggccgggctggtctcaaactcatgacctcaagtgatccgcccgcctcggcctcccaaagtgctgggattacaggcgtaagccaccgtgcccggccctcttcagctattttttatgaaaccagagttagagaacctcttaagtttttgtttgcagtctctcttcaccggtctccccaaagcagttctagtactggccgacagagggagcaagaaaaagcagaacggtttccttttcccacaaacgcctttccaagtgaagaaaccggcgagaccagccgcgggggcgggactaagttctgcgcagaactgtcaaacccgggcgtgggccccgagctgtcacgtgagtgtctgcggtcagctgactgtgccagagttccgcggggagggcgagtgggggaccccccgccccagcgcgagccgagggctcctgctgattggtggaggaggatccagcagcaacaccgtggggcggggcctcggcggggggtactgccattgccttccacagggtcacgtgggaggtgaggtacagagcgctggggagagagtggagcgccgttcgccggtatgtgcgcatgcgttgaggtctcttgacgccgattggggggtcacgagtcacgggcggcgtgcggcggctggtgggggcgtgtccggcggagcgggcgcggcgttacgaggccgctggttggccagcgctagtcacgtggttcctggccgcaagcgacgcgcgccggtgcgacgtcaacgc

SEQ ID NO: 22084 - DNA, 2300 bp, Homo sapien
tgttaatgcagaggtaggtgtgatgcaatacatatttacatgcatttctgtttgcagaaactataggcacatttggctgtttggctctataatgtttctatggattgggcctctgtaaattggcttctttgctgtggggggttccaggtagcatcttcttaggggtctcctacggtaaggcacagattcctttgttaaaggaaggatcgtccccaagttagcatctcctccagtctattctgcagaattctggttctcaggaatgctaataggggctttttgaaaacaaaaccaaaaacagttctctgggcaaataagtttgagagacactgaaagttaaacaggtctctctctgtgtggcttttacatttgctactgtgtgccggctacagtggctcacgcctgtaatctcagcactttgggaggccaaggcaggcagatcacttgagggtcaggagttcgagaccagcttggccaacaaggcaaaaccccgtctctactaaaaatacaaaaattagctgggcgtggtggcacgcacctgtagtcccagctacttggaggctgaggcacaagaatcgcttgaacctggggggcagagttgcagtgagccgagatcgtgccattgcactccagcctgggtgacagagcaagactccgtctcaaaaacaaaaaattaattaattaaatttgctactgtgcatcgtgaacctccaaggagtgaatggtgttttttcaaaacttatttattagctgtgccaaagtccttgaggagcaactctggaggtctttgtgttccttgggaacccactctggggaaatctgatctggcctcagtggatttttttttttgtattttttaaaattttatttatttgtttgtttgtttattgagatagagtctcactctgtcacccaggctggagtgcagtggtgtgatctcggctcactgcaatgcacttcatctcctgggtacaagtgattctcttgcctcagcttccccagtagctgggattactggcatgtgccactacacccagctaaattttttgtatttttagtagagacgggttttaccatgttggccaggctggtctcaaactcctgacctcaagtgatccactcacctcggcctcccaaagtgctgggattacaggcatgagccactgtgccccgctggtttttttttttttttttacttttctgtaaggggtttgcttaaaggtgaggggagaggaactcccctgccagatggctttgaccgaagcagggtttgctgggtggtctttcctcgtgggggctgagtacaatttctgaattgtggtgcaactgtaccacagacttttgggggccaccagggtcctacagcagaaagcccggtcccaggtgccccggtgacgcccctgcttgtgtctggctccaggaccgggcacatgctcacccaccagaagacaaagcccttcgtgtgcatcgagcagggctgcagcaagagctactgcgactaccgctctctgcgccggcactacgaggtccatcacggcctgtgcatcctgaaggaagcccccccggaggaagaggcctgcggggactccccccacgcccacgagtcggccggccagccgccccccagcagcctgcggtccctggtgcccccagaggccaggtcccccggctccctcctgccccaccgggacctcctgcgccgcatcgtgagtagcatcgtccaccagaagaccccttctcctggcccagccccggcgggggcttcagacagcgaagggaggaacactgcctgtccctgccccgcctcatcggggtcctcgtcctgcaccccagccggcccccacgcggccccagcagcgctggacaccgagcttcccgaggagccttgcctcccacagaaagagccggccactgacgtgttcacagcccctaattccagggccgccgagaacggcgcccccgacccgccagagccggagccagataccgcgctgctccaggcccggtccaccgcggagtgctggcccgaaggcggctccgtgcctgcctgcctgcctctcttccgaggccagacggtccctgccagttcccagccatcgagccacagcttccagtggctccggaacctgccgggctgtcccaaaagcaaaggcaacaacgtgtttgttgtccacaagccctcggccgtgccctcgcgggagggctccgagtctggcccgggacccagcagcggaagcccctcggaggagtccccgcccggccccggcggtggcctggaggatgctctgcccttccctgcc

SEQ ID NO: 22085 - DNA, 2300 bp, Homo sapien
caggcatgagccaccatgcccgcccccgaaagttagtttttcaacatttgtctcctatccctacctccccactctggtagtccccagtgtttatctgtcccatcttcatgtccatgcatacccaatgtttacctcccacttataagtgagaagatgaggtatttggttatctgttcctgtgtcagtttgcttaggataatgacctccagctgcatctgtgttgctgcaaaggacattatttcattatttatttatttatttatttttgagacagagtcttgctctgttgcccagcctggagtgcaacggcgctatctcggctcactgcaacctccgcctcccaggctcaagtaattcccttgcctcagcctcccgagtagctgggactacaggtgcctgccaccacacccaaataatttttgtattttcagtagagatggggtttccctttgctggccaggctggtctccaactcctgacctcaagtgatccacctgcctcggcctcccaaagtgctggaattacaggtgtgagccaccgcaccaggcttcattcttttttatgactgcatagtattccatggtgtacatttatcacattttctttatccaatccactgttggtgggcacctgagttgattccatgtctttgctattgtaaatagcattgcggtgaacaccactgtactaagttatagatctatcatgcttttatgtttgggacattgcataaggtattcacttgtggaactgataacttcctgtttacttactaatgataacggccagcatttatatggcacttcctctcaggtgcagctctccctagctcattcttcctcatgaccctatgaaatgaggcctattattatcagcatgttaaagatgaggacacacagaggtgaggtaatttgtccactgtcacacagcaagaaagtggcaaaggcaggatatgaaccaggggctgactggtttcagtcagggcccttaccctctgtggtctctcaaaattaatttcttcttcttctttttttttttgagacagggtcttgctgtctcccagactggagtgcagtggcatgactatggggaactacaacctcgacttcctggactcaagcgatcctcctgcctcagcctcccaagtagctgggagtacaagcacacaccaccatgctgggctaatttttgtttggacagggtctcgctatgttgcccaggctggataaattattattattattactatttttgagacagagtttccctcttgtcgcccaggctggagtgcaatggtgtgatctcggctcactgcaacctctgccttccggattcaagcgattctcctgcctcagcctcccaagcagctgggattacaggcgtgcaccaccacacccagctaagttttgtattattagtagagaaggggtttcaccatgttggccaggctggtctcgaactcctgacctcaggtgatctaccctcctcggcctcccaaagtgttgggattacaggtgtgagccactgcgcctggccgataaattataaaaaaaaaaaatacgttgaagtaaatattatgggtagtaccgccaagatactagaacacatgttaaggcttaaaaaaacagaggccgggcactttgggaggccgagaatagcttgaacccaggggacggaggttgcggtgagcctagatcgtgccactgcactccagcctgggcgaaagagcgaaactccgtctcaaaacaaaacaaaatataacacaacaacaacaaaatcacaatctgtctcgattactcatttattcaacccgcattcacctactgtgtgcacgagcttttctagggcactggggaggcagaagggactaaaacaaagtataaatctccctgggctgcaagcatcgggagggcaggtccgggggctctgtgtccccactgggcccccagcactgcgcagcgcacacagtgggcgctcaccaagcgctcgctaagggcaacgcgtgaatccgtgtcccgccagcagggcgtttacggcctggtggggcggaaacggacccgacaccaccgcggcgtcctggggcttctgggaatcccatcagcgcggccagagcggccggggacaggctccgaggcaggcccgacccgcctccccggcgccgccgtggctcgacggagaccagctagggtgagtgatcgagccacgcctggggtcccggcctgtcaccccgaagtccccgccgccttccaccctgtcaggctccaactctgggctccggcgcggtcccacctccgggggga

SEQ ID NO: 22086 - DNA, 2300 bp, Homo sapien
taccctaagatccccattcaggttctaaacactctccacacgtgacatcagtgaattttcacaggcatcccaggaggcaggttggttgtgaccatctggcagttaagagctcagggggttacagtggcctgcctggtcctcagtcggttggaggctgagccagagccctgtctgcctgccactccccgccactcaccagtggttgacccaggcagttccctcgtctgtgaaatgaggaagggagcagcacccgcctcatgggactgtcaccaacaacagcatggagaatcacaataataatgagtgatgatgatagatgcttctcgagcacctgccaggggccgggtgataccgtgaaccctccatgtggatttactgagaatcctggaagctgcagattttgatgggttatctggtcagtattggtggagatggaaatctgtatcataagtattgtttgtggggctttccacacatatgcctgcagatatttttccatgcgtgtcctgggttgcagtccaggatagcatgaaaagcacttaaaaagcattgaggctgggcacggtggctcacgcctgtaatcccagcactttgggaggccgaggtgggcggatcacctgaggtcgggagttcgagaccagcctgaccaacatggagaaaccctgtctctaccaaaaatacaaaattagccgggcatggtggcacacgcctgtaatcccggctgcttgggaggctaaggcaggagaattgcttgaactcgtgggcggagattgtggtgagccaggatcacaccattgcactccagcctgggcaacaagagtggaaactccgtctcaaaaaaaacccaaagaaacaaaaagcattgaactcacagtgcggttggcacagaagttcacaaatgggagccactgctgatgtgagctttactccaccagaactacgactgcttgtcagaaacctttagggccaggtgtgtttcagaatttcgaatttctccaattctggaaaagtggtgccatatgtgtggtgtgtgtcatgtcacacgcttgcctttcggcggccaaacttgggatgtcacatcatgtggataaatggatcccacctaaagtgccatgttggttctggtcaggttttgctgccaacagagctatgaaaacagtctcagttcttagagctttttgggttttgtaattacagataagtgttgtgggcctatatcactatttaaacaatagttgcttatttttatttatttttgttttgttttgttttgagatggagtctcactctgtcacccaggctggagggcattggtaggatctcagctcattacagcctccacctcccaggttcaagccattctcctgcctcagcctcccgagtagctgggactgcaggcacgtgccaccacgcctggctaattttcgtatttttagtagagatggtgtttcaccatgttggtcaggcaggtctcaaactcctaggctcaagtgatccacctgcctctgcctcccaaagtgctgggattacaggtgtgagccaccgtgcctagactttatttttgttttttgggcgtcagctggtagagattgggggacagcacccccgcgggcttgggctggatgggcatgggcgtgcgatgcaggatcacgttgggcgccgggaccagtggtgacaagctgaggcctggggccaccaccagcggctttcctgagggtgccccgctgggtcttactcttgtcacttaggctggagtacagtgacacaatcatagctcaccgtagcctggaactcctgggcttaagagatcctctcacctcaggctcccaaagtgctaagattacaggcgtgagtcactgtggccttgaacagtagttttttttattacattttactgatgggtacagatgaagaaactgaggtcagatcaagcacgccctaggttacacagctaagccttggcagagctgggatttgatcccgggtccagccacttgcaggtggaatgttcttttttcttttttttttctttttttcttctttttttttttttcttctcaaagtcttgccctgtcaccgaggctggagtgtagtgaagtgctcgtagctccactctgcagcctcaaactcctgggctccagtgatcctctcacctcagcctcccaagtagctaagaccacaggcacatgctgccacccctgactaatttttcttttttaaaatttttttctcactgcgttgcccaggctggtctcaaactctttggctcaagccatccatcctcctacctcagcctccca

SEQ ID NO: 22087 - DNA, 2300 bp, Homo sapien
atcgagaccatcttggctaacatggtgaaaccctgtctgtactaaaaatacaaaaaattagccgggaatggtggtgggcgccgtaatcccagctactcgggaggctggggcaggagaatggcgtgaacccgggaggcggagcttgcagtgagccgagatcgtgccactgcactccagcctgtgcgacagagcgagactctgactcaaaaaaacaaaacaaaacaaaattagccaagtgtggtggcatgcacctgtaatcccagctactggggagattgagggaggagaatagtttgaacccaggaggcggaggttgcagtgagctgagatcgtgccactgcactccagcctgggcgatagagtaagactgtctcaaaaacaaaaacaaaaaccaaaaccccaaaactcctgtttcttggagatatgatgagggttcgatgagctaatacatgcatgcaaagagctcagagcggtgcctgcacataggaatggctcagtcaacattagggattgtttctacaaatgtttactgagcccctgcagggagttgggcattgtgcaaagccctcacggggctcatgttctcagggcaaagacagtcccttaggcagagaaatgtggaatatgcagagtggttgggagggctgtggagaaaaatagggcagtgataagaggtagagagtgggttctaccttagccagggtgatcctggaggacttctctgaggaggtgacatttgagcagggacctgaaggaggggagagagtgaggcattcagatccctatggggaaagtactccatggagaggagtcagcaagtgcaaaggccatgaacttggagggttgggggtgtgtctgaggaatggtgaggaggccacggcggttggagccgcctgaggaagggggacaggggagatgtaggtggatcatgctaggctttgtgggccttggtgtggacttcggcttttactctgagagagaggagagccagggagggttgtcagctgagaagtttcatcaactcccttaagttttaatattaatattatatttacttatttatttgcgatggattctcactctgtcacccaggctggagtgcagtggcgtgatcttggctcactgcaacctctgcctcctgggttccagtgattctggaacttgggagcctcagcctcccaagtagctaggactacaggtgcgtgcctgcatccagctaatttttgtttatttatttatttttgagatggagtcttgctctgtccccaggctggagtgcagtggcgcaatcactgcaagctccacctcccctgtgtttaagtgattctcctgcctcagcttcccaaatagctgggactacaggcgcccgccaccacgcccagctaatttttttgtatttttagtagagatgggtttgcaccatgttggccaggctggtcttgaactcctgacctcaagtgatccacccgcctcggcctcccaaagtgctgggattacaggcgtgagccaccgcgccccgtcctattattttttttagaggtgaggtctcgctctgtcacccaggctggagtgcagtggcacaatcatagctcactgcagccttgacctcctgggttcaagctatcctcccacctcagctttccaagttgctgggatcacaggtgtgcacccctgtgcctggctaaattattttattatttattattatttttaatagacatggggtctcgctatattgtccaggctggtcttggactcctggcctcaagcaatcttcccaccctggccttccaaagtgttagggttacaggcgtgagccagggcgcccgacctgttattgttactattattgctgctgctgttgtgattcccgtgttaagaagagagacagactggggagcagcccaacgctggaggtggaggcggaattcgaaccccaggctggacgctggagctctcgcccgccgtgctaaggcgtcttccccactccccacaagggggcgccagaggccgggcgcccggttttgaggggggcgcctcgtcccgcccctccctcctgtcctccctcccgtcctccccgctccgggccccacccggctcagacggctccggacgggaccgcgagcacaggccgctccgcgggcgcttcggatcctcgcgggaccccaccctctcccagcctgcccagcccgctgcagccgccagcgcgccccgtcggtgagtgctcccagcaccgcagctgtcgcctcccgacccccgcccaagcctgccctggttcctcatgcctgacccctgctccc

SEQ ID NO: 22088 - DNA, 2300 bp, Homo sapien
agtaagggaagatagagaacacagtctgggtgctggaggtgctcattgctcctgggttggtcatggctaacctccctaactcagatctttagacctataataggattgcaacctctgaggtcaggctgcctgtgtttgagtcccagcttgagcattttccagctaagtgatcttgggtaatttattgctgtcttcctgagcctcctttgccttgttaaaaaagcagagatgagccggcatggtggcacacacctgtaatcccaacaatttgggaggctgaggtgggtggatcacctgagctcaggagttcgagaccacccagggcaacatggtgaaacccatctctactaaaaatacaaaaaaaaattaactgggtgtggtggtgcatgcctctagtcccaactacttgggaggctgaggcaggagaatcccttgagccccagaggtgaaggctgcagtgagctgagattgtatcactgcactccagcttgggctacagagtgagactccatctccaaataaataaataaataaataaataaataaataaataaataaaaagaaagaaaagcaaagcaaagcagggatgataatagacctactttacagggttataaatgttaagtgagttagtacagtacctggcatgcagtgatcataaatgttgcattatttttcttgttaacacccaacagccctcatgacctgggtgcacccaggcaaccttctcagctccatttctcacccctcctctttgtgcccctgtgtctggccacctacccagatgtttcatggctcccagtacaccaggacctttcacatccccagacctttgcacgcaccgtcctctctgcctaaatccccttgtcttgcctgctcttcatggagcagctcaaaagtcaaccctgccctgagtcttactggtgctgtggtctgtttctcatgccctcctctggatgtctggcatgtgtctgggtccttactgggggccctgggtgggtaggggatgatctctggctcatttctgggtccacagtgcctgaagcatggagtgagtgatttcagtgaaaaggtgtcaaatgatggaagggagaagggaggaagaaatgaatgaagcgattaaggaatccgtttcttccaggcagcttctgcatccttcgccttgtccatctcttggtcttccactaccaccatcaatcccccttcttcaaccatgtcaccattaatctttctcctccttcagctggttcgctacgatctccctattttttttgaaatggagtgtcgctctgtcaagtgcagtggcgggatctcggctcactgcaacctctgcctcctgggttcaagtgattctcctgtctcagcctcccaagtagctgggactacaggtggccaccaccaggcctggctaattttttgtatgtttagtagagacaggattgcaccatattggtcaggctggtctcaaactcctgacctcaggtggtccacctgcctcagcctcccgaagtgctgggattacaggcatgagccactgtgcctggcctttttttttttttttttttttgagatggggtcttactctgtagcccaggctggagtgcagcggcatgatcatagctcactgcagcctgcagccttgaactcctgagctcaagcaatcctcctgcctcagcctcccaaagtgctaggactacaggcatgcaccaccatgcccagctaattattttttttgtagagatgggggtctcactattttacccaggctggtcttcaactactgacctcaagcaatcctcctacctcagcctcccaaaatactaggattacaggtgtgagccatcgcgcctggcccaattccattcttcctcctgccacctgccatccatgctctgtgaccacatatttgtgaccacaaatatctgtgctcctcctcctcctccacccatcctgtcacccagacagtctacactcagacccctttcttcctccttggctgggccgcctatgctcatgccctctccccctcccacaggcagctctccatctgcacgtctctccgtgaaccccgtgagcggtgtgcagccaccatgttcagctggctgaagcggggcggggcacggggccagcagcccgaggccatccgcacggtgacctcggccctcaaggagctgtaccgcacgaagctgctgccgctggaggagcactaccgctttggggccttccactcgccggccctggaggacgcagacttcgacggcaagcccatggtgctggtggccggccagtacagcacgggc

SEQ ID NO: 22089 - DNA, 2300 bp, Homo sapien
tgtgtgtattcgggcacgaagtgctctcccagctcccgccctgcccggcaacgtgcccttgcacaacctgggtacataactcccgacgcgtaacaccaggaacacgctggtttctggttggggaagtggtgaccttgcccacacgggctgccaggagtgtgcgcgcgctcacgcaccggggactcttggccagagctgggcagcgcaccgtgcgcgccgagtcccgcgcactcacatccaggccacacccacggcgtcccgggacacgctggccgcgcactcatcccgcccacgcgggcccagtttcgcggctcgcggcgccccctggcggacgctcagaaaacagataggctgtggtcgccaaaatccctgcccaggtgattcggcgctcaggtctcggggctgcgatccagggcctgtcacctttagggcctgtcacctttccaacgctctgcgcaaggatccagttgaatttcgctgtgtgaccatgcgtgtgtcgcctgccctctctgtgcctttttcctttatgagtccagagtggcttttatgaggcctggattcctttgatttgattgttttgtttttgagacagggtcttgctctgtcacccaggctggagtgcaatggtgcaatcacggctcactgcaccctccaactcctgggctcaagcgatcctcccacctcagcctcccgagtacctgggactacaggcgcacaccatcacgcctggctaatttttaaatttttggcagacacaggatctcactatgttgcccaggctggtcttgaattcctgggctcaagcgatcctcctgcatcggcctcccaaagtgctgggattagaggcgtgaatcaccacgccctgccatggatccctttgaatggctgccagggcccaagagcctctgagcttccttccttatttgtaaatgacaaagatgagttgattctaagatgaagcctcagagggcaaggcagtaacaatagctaacactcagatgccagacgcagccttaagcgctttacatatgtttaatcttctgcatgacttatgacgcagatgtactgttatcatctttattttacagatgaggaaactgaggcacagtgaagtagcccgctcaagatgaatgattctgagtctgcacttctagggtcctaaaagtgtatgtttctaacattcctctaatgttctgtgcttccaactttgatattccgaaagttacttgatttctaagatcctaggattggaacatttgagaggacaaaacttctgagattggaatgtgtgttgtgcggaatctgccactgacggttctgactttctaagaaaacgagattaaaaaataatcaggccgagcatggtggctcacatctgtaatcctagcattttcggaggctgaggagggagaatcacttgagcccaggggttcaagaccagcctggacaacatagtgagacctttgtctcttaaaaaaaaacacacacacatcagtttggaccgggagtggtggtgtgagcctgtaatcccagcgctttgggaggcctaggaaggaggatcacttgaaaccagatgtttgagaccagcctgggcaacatggggaggctccatttctacaaaaaataaaaataaaaaattagccaggtgcggatgcacccttctgtggtcgcagctactcgggaggctgaggtaggagaatccctgagcttaggagttggaggctgcagtgagccattacccttccactgcactccagcctgggggcaacaaagtgagaccttatctattaaagaaaaaaatcagtttgagcaaagaccccaggcggccgggaaaggtgttcgcttaagggcgaaagctaagaacctgcaaccttcccgtctctttcctaccacccgccgccgttaggaatcttcagatcccgctgtaaagaatggaggaaggaggagccatttatcctttaccaagatggcagcctcctggcaactccagtcactttataaatatggctgccacaggaagtacgtcacggaagagggtgggaaatctgcgcgcgcacgctgcaaaggggctttttgggacgccagtggctgagttcttcctttgacaagatggcggcaggaggcagtggcgttggtgggaagcgcagctcgaaaagcgatgccgattctggtttcctggggctgcggcccacttcggtggacccagcgctgaggcggcggcggcgaggcccaagaaataagaagcggggctggcggcggcttgctcaggagccgctggggctggaggttgaccagttcct

SEQ ID NO: 22090 - DNA, 2300 bp, Homo sapien
tacaggtgtgagccacctcatcaggctgagtttattgagttatccccgtgtgccagtcagagctctagttcttcctacctgtataaactcgcttactgctcacatcaaccatctaatggaagtgctgttttcatgttgtttcctgccctttgtctctacctgccagatcactcccatgaaggaagggactttgtttatttattcattgctgtatccctggaaactgggactgcaggtggttatgaagtacctatttgttaaatgagtgaacatttcctgtaggcaattacacccaacttccaaatggagaaacaggctcagagataagcccctgcaccctcactcctcaactcaactgcctgtttctagcactttccatgacgatcccctctgcacggagagggttcatggggagtgactattgttctgtaatgaatgaccaggctgtgccaggtccggcagtaggccttttccttttccttttttttttttttttgagatggagttgagttttgctcttgtcgcccaaacaggagtgcaatggcgtgatcttggctcactgcaacctgtacctcctgggttcaagtgattctcctgcctcagcctcccgaagagctgggactacaggcatgcgccaccacgcctggctaattttcatatttttagtagcgacggggttttgccatgttgtccaggctggtctcgaactcctgacttcaggtgatccacccaccctggcctcccaaagtgctgggatttcaggtgtgacccactgtgcctggccaggccttttcctttctttcttttttcgagacagtgtcttactctgttgtccaggctggggtggcagtggcacaatcacggctcactgcagccccaaactcctgggctaaagtgatccttccacctcagcctccccagtaactgggagtacaggtacatgccaccacacggactaattttaaaagtttttgtagagatggggtcttgctatgttgccccagctggtctcagactcttgggctcaagcagtcctcctgcctcggcctcccaaagcattgggattacaggtatgtgccaccgtgcccagccgcagcaggccttttgtttttttagagagggtcttgcttggtggcctaagctggagtgcagtggtgcaatcacggctcacagcagcttccaaactcctgcgctcaagcgagcctcctgcctaagcctctcaagtagcctgggactgtaggcacacaccaccacgcccggctgatttattatctatttatttatttgaggtggagcctcgctctgtcacccaggctggagtgcattggcctgatcttggctcactgcaacctccgcctcccaggttcaagtaattctcctgcctcagccttccgagtagctgggactacaggcacgcgccaccacgcccatctaatttttgtatttttaatagagacggggttcctccatgttggccaggctggtcttgaactcctgacctcaagtgatccgcccgcctcggccttccaaagtgttgggattacaggcgtgagccaacgcacccagccactaatgtattattattattattctgtagagacgcagtctggctatgttgcccaggctggtcttgaattcctgcctctgcctcccaaagcgctggggttacaggcgtgagccaccgcgccctgcggctgcaggtctttataaggcaactgtgggccctggaccgctccctgaaaacctccccctcaactccctgtctcctccctcacctggtctaccccgaatccttcccctctcgccccctcgccctctccaggggaggtgagggactcaagaatcgcgccctgcttctgtccccaccgcgccgtccccaagcccacgcagtgaaaagaccacccttgaggctgattccgggtccagctgggagcggccagccgtaaatcaccgcccccgtgggccgtaccattctggccggggggacctgggaggggacgcgcggagggcttcccccggggactgcctgtatcgagactctctccagcccaacaggaggatgggaaggagacttgtgtgggggcctcgggctggcgggtcgcgggttccttatcctccgccttggcgcctctccgcccaccgcccaccgcccctccctggcattggttggcgccaggggaagccgaggctccatcctttctgcgcaggttcccgccgcactcgcgcagacctagcgcgtccaggtgggaggttagtgtggcccgggcgtccgctcctcagcggatgtggcagccccgagc

SEQ ID NO: 22091 - DNA, 2300 bp, Homo sapien
aatgtgtgcgatgaggaatcattgctggggatgctgctttctacagcagaactctaagtagcaggtgaaaacaatgagcgaggcccgtggtaacaatgtctacgttttattgaattttgaaattgattgcatgagtcatttctagttccctgcaccatgagccttgtcaatctctctaatccctgaacccacgtgggtcctgccatggggaaatgaggacagccaggtgtctgacagagaagacgcatctctgagggatccgatctctgtagaccaaggtcatgggtcccctgtatcatcagcagtaggttcattcactcacaagggcagaccagcagcggtccatgggcacgtccatcagacctgtgccccctcctgatacaggtctatgcagcttggagaggctgggctcatgtgaacccagcacacgagccccgtatataaactggaataaaccagcactgaggtcatttactctccaggagaaaccaacagaggtctatgtgaatgcctatcagaacttcaccccataggcaaatccactacagaaaccaaaccattatcagcagggccaatgtgtactaagctctgcttacacctataggcacctagggagcaatttttggaatggatagtaggggccagagtggccttgaggtaccaaagaggaggttgcaaggtcatccaggaaggagggatagtggctggacaaggcaggcagcccaggagccaggaggagtgggtagactcaccggcattggtcactcggggccccagccctgggaaggaacaaggatgactcctgggggctggctggcggtgcctctcctgagatggggaccccaaccacaggtcacgatgttgactcccccaaccaaacccgcatggaatgccacctcacctgggctagggcccatgagggtgaaaccaaggctgtgttgtccactgaggttctccagctcctagcacagctcagcaggcagtacctgatcagtgatgaaggattaatccatcattcaactcctccagggggcgggactgcagggcagggtgggaaagggagggtcccggcagggtgggccagggtgggcacagcagagaagtgatttaagagccaagcccttgtcagtacacacttgtgtttgggaacagatcaggactcaggatgcaagaccctggtcatctccaaggtgagcggggacagaggtgtgaggggtctgggctgatcctgtggctgaggctgcagagtgcaaatctgggcagccagagaagggctgggcctgtgcgggcggcttcctgtcctgcagacgggggagaacttagtggtgtctgggaaatgaaaaatcatgcagctgggtgtagcgtctcacgcctgtgatcccagctctttgggaagccaaggtgggaggatcacttgagcccgggactctgaaaccagccgagccaacatagtggagacccgtctttagcaaaaatacaaaaattacccaggggtcgtggtgcacacctgtggtcccagctactcgggagactaaggcggggggttccttgagcccaggaagtggaggctgacttgagccgtgatcacatcactgcactccagcctgggtgacagagcgagatcccctccaagaaaaagaaagaaggaaagaaattaaaccatgcagttgagtggagcagaggactgggcaggtggcggctcccctgcaagtgtcagggtccctataacccttggatgggaggggacggggcagctggggagggttgagcaggcctgaggcagccccgtctgctccgaggtgaggcgcctacgctgcctgccttcccaggagctgttatcgcgcctatttcctagatgtggaccctgaggcccagagaggtgcaaggtctggtctggataccaggctgctatccgcggtgccgccccagcccacactgcctgggctcctggcctggtgcaggggacggggtccctaggggggctgggggctgcctgggggtttctgtgacctgtttccctcccacccccaggccctcccctggccctggaccctccaaggagacagcggcaggagcgcacggtctacactgaaagccagcagaaagtgctagaattttactttcagaaggaccagtacccgaactacgaccagcgactgaatctggcggagatgctcagcctcagggagcaacagctgcaggtctgacccccacccccaccctgcccgccccagtcaccccaaggagcctccccaccgctgtcactcaccggggcctggcccgcccgaccacctcccgcc

SEQ ID NO: 22092 - DNA, 2300 bp, Homo sapien
tgaggctgagagaagtgtagtctccagttctgtctcccacgtcagcggcagagccagagctgggccagcacctgccccggagcctgtgccctcctgatcaccaggtgatatggcctcttaggatgctcgccacagccccacggagctcagaggtccctttctcagaggaggaaactgaggctgagagaggtttcgtcaatttccgaggtcacacaggtgatgagtggaagaaccaggggtagaatttaaatctctttggcccccgagccccgctcttcacccccgagtctgcctgggattcctagaagatggatgaggtcagcttcctcccctgctcccatgggattcccagggctcattgtgacagcttgtcactgtatccactttgcagaggaggaaactgaggcccaggagcccatatgaagggcccaaggccacgcagtgagaaaacaacaggatttaaacccaaactcatgtggctccatgccagctcttggcaagaccctcccgactcagccatgttcagggccctcccttgttggccctgccagcctctctctgccgcatccgtaggctcctctgtccagtgaggacaaggagctgagtggatgcacccactaccaggcatgggacctggtagaagcagggattcatggcacagttagagcctgaatgaattaactcaggaacaatatgatccctgaagcatccagagattcaaacactagtgggcagccccacagtctgacctcacagtgctgcaatcacagacccttggtccttttgggaaaacatcacaccacttctctgtgccagtgtctctacctggttctgccccaccatccatccatccatccatccatcacccatccatccatccatccatccacccatccatcacccatccatccatccatccatccatccatccatcacccatccatccatccatccacccatccatcacccatccatccatccatccatccatccatcatccatccatccatccatccatccatcatccatcacccatccatccctccatccatccatccatccatccatccctccgtccatccatccatccatttctttcacatttattgaacacacacttactgctgtgtgtctgggacagtcctaggtactgggaatacagctgagaacaagacagacagggccccatcctcctgacaagggcagacaagaaacaagatgtcagtaagagttttgcaaaagattaaataggatgaatgtgttagggagctaagggggtgcaggtatgaggagcacccccatcctgcagtagagcctggagtgaaactcatcaacaacctgatccaaggatcctccagtattccatacatcttcagactgtccccagaatttaaccccactttttttgtttattatactttaagttctagggtacatgtgcacaacgtgcaggtttgttacatatggatacatgtgccatgttggtttgctgcacccattaactcatcatttacattaggtatttctcctaatgctattcctccccctgccccccaccccacaacaggcccctgtgtgtgatgttccccaccctgtgtccaagtgttctcattgttcaattctcacctatgagcgagagcatgcggtgtttggttttctgtccttgtgatagtttgctcagaatgatggtttccagcttcatccatgtccctgcataggacatgaactcatccttttttatggctgcatagtattccatggtgtatatgtgccacattttcttaatccttaaccccactttttccagctgcaatcatgtgcattacaataagtctcaaagtcaggtagcgtaagttctccaactcgttttatttttccaagactgctttgattattctagatcatttatattccatagcaacttcagaatcagtttgacaatcaatttctacagaaaaatcctgatgagattctgattgggattgcagtaaatctaaagattagtttgagaagaattgacctcttaataacattgagtcttctaaaccatgaacatggtatagttcactattgacttgagtctcctttaatttcttccagcagtgctttatattgtttcagtaggataatgatctgatagaagagatgacaggacttatggatggattggatgtaagtggtgaggagaaaggggttaggggccaggctgagtgcccagatttctgcctgagccactgggtggagatgagaaggaaagcaagttgcctcagaagacctagctcagagaagaagtgcttgga

SEQ ID NO: 22093 - DNA, 2300 bp, Homo sapien
cacatttattgaacacacacttactgctgtgtgtctgggacagtcctaggtactgggaatacagctgagaacaagacagacagggccccatcctcctgacaagggcagacaagaaacaagatgtcagtaagagttttgcaaaagattaaataggatgaatgtgttagggagctaagggggtgcaggtatgaggagcacccccatcctgcagtagagcctggagtgaaactcatcaacaacctgatccaaggatcctccagtattccatacatcttcagactgtccccagaatttaaccccactttttttgtttattatactttaagttctagggtacatgtgcacaacgtgcaggtttgttacatatggatacatgtgccatgttggtttgctgcacccattaactcatcatttacattaggtatttctcctaatgctattcctccccctgccccccaccccacaacaggcccctgtgtgtgatgttccccaccctgtgtccaagtgttctcattgttcaattctcacctatgagcgagagcatgcggtgtttggttttctgtccttgtgatagtttgctcagaatgatggtttccagcttcatccatgtccctgcataggacatgaactcatccttttttatggctgcatagtattccatggtgtatatgtgccacattttcttaatccttaaccccactttttccagctgcaatcatgtgcattacaataagtctcaaagtcaggtagcgtaagttctccaactcgttttatttttccaagactgctttgattattctagatcatttatattccatagcaacttcagaatcagtttgacaatcaatttctacagaaaaatcctgatgagattctgattgggattgcagtaaatctaaagattagtttgagaagaattgacctcttaataacattgagtcttctaaaccatgaacatggtatagttcactattgacttgagtctcctttaatttcttccagcagtgctttatattgtttcagtaggataatgatctgatagaagagatgacaggacttatggatggattggatgtaagtggtgaggagaaaggggttaggggccaggctgagtgcccagatttctgcctgagccactgggtggagatgagaaggaaagcaagttgcctcagaagacctagctcagagaagaagtgcttggatttgatttcagcttacttgatcccagggccatgtgcaggaccagctgaaacccacctctctgtacccccacccctggaaggactctggatccaggagccaaccagtacccagattccccagggcaggtgatttaagagttgctgacaccttctctgtcccgctggaagttattttctcctccctctccctgtacagctgaccttccttccctgctgcagggccagggggtctgttccaggactggattctcccatcaggagcctctggactggtcgccgagggtcagacggcccctccctctcttgctgtcatccctggctcttcaagctaatgagacctgtcctgattcctcagccaggcctgtagccttaatctctcctagcagggggtttgggggagggaggaggagaaagaaagggccccttatggctgagacacaatgacccagccacaaggagggattaccgggcgtgtgtgtgtgtgtgtgtgtgtgtgcttgcgtgcgtgtttgggtgcacggggaagtgaaacagacccgtgtgggacccaggagctcagggacatattaatatctagagagacagacgagaggagagagacacaaagagggccagagaccaggaaaatcagaaatacagagcaacagaggtaccaagacagggagaaggacagaaatgaaaggaaatcctcccagctactcgggaggctgaggcaggagaattgcttgaaccggggaggtggaggttgcagtgagccgagatggtgccactgcactccagcctgggtgacagagcaagactctgtctccaaacaaaaacaaaacaaaacagaaatgaagggcaatccagggagaggggaagcaagaatcagagagagagagagagagagagagagacagggaaaaagagaaggaggaacagagattggagctgcagaggataagcgaggacagagggacagagatgaggctggagttacagggacaggtggacaggcagaaagacagcaaagggagggacagacagacaggaacagaaggacatggaggctgagggagaggggagaaagagcaagatagacagggagacacagagaaa

SEQ ID NO: 22094 - DNA, 2300 bp, Homo sapien
ctggaagttattttctcctccctctccctgtacagctgaccttccttccctgctgcagggccagggggtctgttccaggactggattctcccatcaggagcctctggactggtcgccgagggtcagacggcccctccctctcttgctgtcatccctggctcttcaagctaatgagacctgtcctgattcctcagccaggcctgtagccttaatctctcctagcagggggtttgggggagggaggaggagaaagaaagggccccttatggctgagacacaatgacccagccacaaggagggattaccgggcgtgtgtgtgtgtgtgtgtgtgtgtgcttgcgtgcgtgtttgggtgcacggggaagtgaaacagacccgtgtgggacccaggagctcagggacatattaatatctagagagacagacgagaggagagagacacaaagagggccagagaccaggaaaatcagaaatacagagcaacagaggtaccaagacagggagaaggacagaaatgaaaggaaatcctcccagctactcgggaggctgaggcaggagaattgcttgaaccggggaggtggaggttgcagtgagccgagatggtgccactgcactccagcctgggtgacagagcaagactctgtctccaaacaaaaacaaaacaaaacagaaatgaagggcaatccagggagaggggaagcaagaatcagagagagagagagagagagagagagacagggaaaaagagaaggaggaacagagattggagctgcagaggataagcgaggacagagggacagagatgaggctggagttacagggacaggtggacaggcagaaagacagcaaagggagggacagacagacaggaacagaaggacatggaggctgagggagaggggagaaagagcaagatagacagggagacacagagaaaaagaataagagagaccaaggggataatgcaggtttatcaacagagacagggacggagaggagcagatggagaatgaaagagtggtattcaggaaagtaggcagaaatgccacagcctaaggcccacaggaaaagaaactgaggtacagagaagccagacaaagaccaatggtgtgtagagagatggtgagtgctgggtttgttggctcacgcctgcaatcccagcactttgggaggccgaggtgggaggattgcttgaggccaggagtttgaagccagcctgggcaacatagagcgactccatctctacgaaaataaaaaaattagctgggcatcgtggtatgtgcctgtaaagtctcagctactggggaggctgaggagggaggatcccttgagcacaggaggtcaaggctgcagtgagctgtgatcatgccactgcactccagcctgggcgacagagtgagaccctgtctcaaccaaaaaaaaaaaaaaggaaaaaaaaaagaaaaaaatcccaaaccccaaactccaccaaaaacagaaaaacaaaacaccctttctaataagtctgcctattttcagtgctggaagcagcccctgccacctccgcccccaaaaagaggagaatatcatgtctgacaacacagagacagagaggccacagacaagacttgaccaagtcaaagagagagaaacaggggaaactgaggcagaaaccgagaccaatgaggcactacagagataaactagctgtcggacagactgttgtggagagaaagggggacccaggagagggatcccgaaagctccgtgcctctcttttttcagacgatctctcaggaccatctgacagtgctctccttcctctttgatgcctctctcttgggatactagctgaagctggagagacaccagttagacctaaggaaggacttccctgaggagtaggggcttatggtcaccggcaggagctggggcctcccttccccatcagccctaattgccaagatgtcatggggggaagaggaggggattaagcagacgggtgcccctccccctcccagccaatgtcacctcctggtgcccagtcgagtcccccaccttggccgggattaccctccgagttccaggccatgacaaatgacatcactcccggcccaggcttaaaatctccccatgtgaggggatgtgtttccttcagcctctgctgtctggccgctctgtctaggtcctgggccacgggagagccccgtccctcctttctgaaggtgagcgtctgcaggagaggcggaggggaccgaggaggggagaaaaaagagaggggagaagttgggtttatcttattcgtggctgtgtttgccgtg

SEQ ID NO: 22095 - DNA, 2300 bp, Homo sapien
ctttgcactttttcttaatcattttatatatatgcatatatatatgcgcatatatatatgcatatatatatacatatatatcttgtttaggttgttttgtacagatgtgggccaccattgcaacaaaataaattctttttgctctaaaatatttataaagaaaatacttaaatgtgatgtacagggtggtaataagggaaaaatcaagtattataaacaagaatgaaggctttttttctttccttttttttttttttttttttgagacggagtctcgctctgtcgcccaggctggagtgcagtggcgagatctcggctcactgcaagctccgcctcccgggttcatgccattctcctgcctcagcctcctgagtagctgggactacaggcacccgccaccacgcccggctaattttttgtatttttagtagagacggggtttcaccgtgttagccaggatggtctcgatctcctgacctcgtgatccgcccgcctcggcctcccaaagtgctgggattacaggcgtgagccaccacaccgtgcccagaccaagaatgaaggtttttgtaaagatttctgttcagtgttttgcaaggtaaaattctaggcacgttttccctgaagttatgtgtatgtgagtattctcattcttcccaacttgcctttgaagagtgaaaaaacattattatcaagtagacttctattcagcttttgctcctgccctgctgtttatcccttaagaatgagtttcttggactttcccaatatgtgatttttttttcccatttagaatggtgattttaaatgtgtgagtgcatgcattatcttatctcagatatttgcacccccaatccacccccatctccctaaagctagaacactgccaactgatctgttgtataggtcctttagaaacacataattaggctgggcgtggcggatcacaaggtcaggagattgaaaccatcctggctaacacggtgaaaccccgtctctactaaaaatacaaaaaattagctgggcgtggtggcgggcacctgtagtcccagctactctggaggctgaggcaggagaatggcatgaacccagtaggcagagcttgcagcaagccgagatcgcgccactacactccagcctggacgacagagtgagactccatctcaaaaaaaaaaaaaaaacaaacaaacacataattaacacttaaggttgggtgctgccaattctttgtgaaaatccaaatattattaaggaaacagggagatgccactacctcttgattttccatctaaaaacatacatgtttatgcaaacaaatctttccatattcatagtgacttttcaagtatttgagtctaaagattttcatctcacatttttataccgtttaaattgttcacaattattacatacacgtcagccatcaactaaagttgtactttaaaaatttactacaatatatacactgctaatatttgtacttactctttttttctctagagtggaggtataattgtgtgatacttcagaaatacagataaatgattcaaaaagtctcagggagaataatgtttctttgatcgtgaataactgattagtaattcttgcctatattttcctgagagcatatgacaaatgtttctaaggtaacaagatgagaacagataaagactgtgtggtcttttggatttggagagacatattttaatttttaaatgcagttacaaattataatgtattcatatttgtactttctgttaaaatgcacgattgcaggattatttagattttgtgtttatgcttgatgaaaagctttgttcttgtttttaagtttgcactcaaaccttaagaaataaattcacccatattatcaaaaaaaatatttgtcctcgtgtttgttattcgatcttgcagttcactctcaggaacgcaagctcagatgacccctaaaatggtctctagataagttcatgattgctcaacatcttcaatcttttgagtatgggtcacattatacctctctttatcagcaagtaaactttacaacaaacatgtgacatgctgggacaaggttaaagatcgttttatccttgctgtaaaagctgatctgcctgtagctgccacagcctccagcggtggctacagttgaaaccctcacaccacgcaggaagaggtcatcatcatgtcggacgatttcttatggtttgaaggcatagctttccctactatgggtttcagatccgaaaccttaagaaaagtacgtgatgagtttgtgataagggatgaagatgtaataatattga

SEQ ID NO: 22096 - DNA, 2300 bp, Homo sapien
accctcccgagtaaatgggattacagaagcctgccactacatctggctaatttttgtatttttagtagagacagagtttcaccatgttggtcaggctgatctcaaacaaggtgatccacctgccttggcctcccaaagtgctgggattacaggcgtgagccaccacgcctggcccttagttactattcttagaagaggggctgggcacagcggctcacgtctgcaatcccagtgctttgggaggttaaggtagggggatcgtttgcaaccaggagtttgagaccagcctgggaaacataatgagaccccccatctctacaaaaaaaaaattgacgaattagccgagcatggtggcatgtgcctgttgtcccagcactttgggaggttgaggtaggaggatcgtttgcaaccaggagtttgagaccagcctgggaaacataatgagaccccccatctctacaaaaaaaaaattgacgaattagccgagcatggtggcatgtgcctgttgtcccagcactttgggaggttgaggtaggaggatcgtttgagcccaggagtttgaggctgccaggagctatcatcgcaccactgcactctagcctgggcaacagagtgagaccctgtctcagaaaaaaattgtggaaaacgggctatcttttcatctccatttttttttctcagtaagatggaatctcctttggaaaaaagtgtcaaaagaaagccctccccccaactaaactgtcaaaaatgtcagcaactatcaaattagaaactcttatgaaataaaagcctatccaagactttaaaaatacctttgaggaatcctagtttttggaaatgactgttgccttcacttatttctaacatttcttttttcttttctttttttttctttcttttcttttttttttttttttacatggagtctcactctgtttcccaggctggagtgcggtagcgtgatcttggctcactgaaacctccacctcctgagttcaagcgattctcctgcctcagcctcccaagcagctgggaccagaggcgtgtgccagcagacccagctaatttttgtatttttacaaaaatacaaaaattttatttttggggtgtgctggggtgtgccagcagaccccagcagagatggggtttcaccatgttggccaggctggtcttgaattcctgacctcaggtgatccaccggcctcggcctcccaaagtgctgggattacaggcatgagccactgtgcctggcacctctttccttcttgtttgaacatcttttacagatcttgattatattctacaacataatgggtggtctctggcacactgcctttttgctattattattgatactttatgaagaccaagtgtgctaagacattgtacatttgcggagccacccattctcccctttaacatctttgtttcatgtcactcttcactgcattgcatgtcatcagtttcccattctgcaagtatttcttcaatcagtttccctttattattagccatacgagatccaaaaatcccttagcaggttaatgtggactgggtgcagtggctcatgcctgtaatcccagcactttaggaggccaaggtgggtagatcacctgaggccaggaatttgacactagcctggccaacctggtgaaaccctgtctctcctaaaaaatacaaaaattagctgggtgtggtggcatgtgtctgtggtcccagctacttgggaggctgaggcaggagaaaggcttgaacccgggaggtggaggttgtggtaagccaagatcataccattgcactccagcctgggcaacagagcaaaattctatctaaaaaaaaaaagaaagaaagaaaagaaaagaaaatagtagggctttttcattgttcagctgaaacctctccagctcctcatagctgaatttctgggaacgttccctcctctgttcattgatattcttgtccctgaccccagcccccgcaaggccccttctgtgtacacttgactgaattttatgggcctcgtggatatgcatgggcttatctccagacatcataaattaaccacagctgatctcatccagactgccttctgacagtaaccactgatgaagaaccctcctttgagaagctgcctttgtgtcctacagacaggctggggccaaagccattcaaccaatccccagataatccagagctcttgggagcagaaccttaaagagagatcgtggagagagccagggcccagaagaactctctcaaaggtacattttgacccggaaacttgggagggtgtgacaagt

SEQ ID NO: 22097 - DNA, 2300 bp, Homo sapien
tacaggcactaagaatagaggccctggccaggcacggtggctcatgcctgtaatcccagcactttgggagaccgaggcaggtggatcacttgaggtcaggagttcgagaccagcctggtcaacatggtgaaaccccgtctctacgaaaaatacaaaaattagctgggtgtggtatcgcgcacctgtaatcccagttacttaggaggctgagacaggagactggcttgaacccgggaggcagaggttgtagtgagccgagattgcaccattgcactccagcctggggacaacagtgaaaccccgtctcaaaaaaaaaaagtcctaacatttattctagagatggcaggatcttggataagatttataatcttcatgagcctcacttttctcatctgtttaattgggatacatgactgcttgcttactcctaatgtgtttgtgtgcgtgtttttgtttttgtttgtttgtttttttgaggattaaatcagataaagtatacagaggcattgatccattgcaggtgtttggaatacgttatttttcttccctatttattgatcccaccatggctggaaaaaaaaaggtgggggcctggttggtgggtgctgtccatggcattggctaattacaggcagacctcagagggtctgcctctaccatcaccagcaccatgacactgttaactcacctccttgaaggcatcccgcatctcctggacaccgatcatcccagctgtttctgcaagcaatttgggggtcatcagctccacaaagtcatcaaagtctacacggccacccactgaggaagatggcacaggattagcgagaccccacaagccctggccttccattacctcactttgtgcttcgagtcagttagatcagctcccttctccctgccctataagagccgtctttgacttcctccctccagcagctaactccaagctccaaactcatgtccctctagcctgaacaggagtggatagggtgtggtatggtggaagtaactgcctgtgtgactttcagacagttggttaagatgtttctcctcctctgtagacctgtacaaagaggagcatgaattaaatgagcatacaatttttttttcagatatgaatactatcattaccttgaattcaaccttgtttagttcgttacatgcccagaagcaaacccaatagcttttttttttttttttttttttttttttgagacagagtcccactctgttgccaaggctggagtgcaatggtgcgatctcggctcactgcaacctctgcctcccgggttcaagcgattctcgtaccttagcctcccgagtagctgggattacaggtgcacgccatcacgcctggctaattttttgtatttttagtagagacggggtgtcaccatgttgcccatgctgttcacaaacccctaacctcaggtgatctgcccacctcagcctcccagagtgctggaattacaggttacaggtgtgagacactgcgcccagcctcaataggaattttattctagctaaaatctaaaaatcagttatgatctccatccaaaaatccatccatcctttttgcagctgtattcaccaacattagctccagctccaagtttgtttccaacatccaatacagctccaatctcgtgctccactgatgaatcttagtggtgatagtaataactacctttaataagaatttactggaggctaagactttaactgcatcagcatctttatctcttccttctcttcctttccacagtcccatgaggtaaggagagaggcatcttcctctatagatgaggaaatggaaactgaagagtagcggataacttcacttttcaaaatgactgtaattagtaaataatagaactgagatttgaacccagacctatctctaaaagcttttaaccacttcaaatgctgccttcctgagtcgaatctgacctgttttcttccagacttctagtccctctcatcctcctctccacccccaactctactcttaacctctacatccttcccaattctgccctgatcccttccctaaccccggccatccctcccattccctggactcacggttcatgcggatttgctggccgagctcaatcagttccatctccgtgggcatgtaacccatcgtcctcatgagattccccagatccttacaagagatgaacccatctcggtccttatcgaactcaagaaatgcttcccgcagctctgaaagttaagagagaactttgggggaacttgaagcagtcagtggggaagagtggcatctcttgaagcta

SEQ ID NO: 22098 - DNA, 2300 bp, Homo sapien
tgattatgatgagattcaggaatcttacagaagcgatgctgttctcgtgacatcctgtcaggtggtgtgaaattccaacttgtcacattactgatgatgtccactttcattgactaagatggtgtttgccacgtttctccactataacgtaactcctttgaaattggtattttgtagggaggtattttgagctctgtaaatatcaaacttctcacttagctttttatttatctgagtatggactcctggtttcttctgtggtcctgtataatttgttactatcattatttattttgactctcaaactgcccagtatggccaatggagcttcttcaagcagactcctgtgttctttccacatgttctcacaacactttgagcaatttcttgctttaagcataggacgtttgtaggctcatcttgttctttttttgctctagacatggaatcagccaaatttcctaggcactctggttccatttggtggagaatggtatatagaagtcaagatttggatgctagtggtgctcattcatatgggccatcattgtttctatgttctcttagtggagagagctagagaatatgtgtacaaatgttcctatacacactgaaactatgtgtttatttttatctctctatgtataattgagatccatgaggacataccaacgcctccagttatagtccaacaccacagggctcattcgactttcctcctttctgtcttagtaactcccttttccaacagtaggagacctggcccccattccccttactcactgtgtgtagccaatttcccttttcctttgccatttcacccctgtggggatgtctttcccagcctagtctggcttcaacaccatacaccatgctattcccatgagtggacatttctctctctgcttgggttatgacaacccatgccagatcccctctatgtggcctccttcctaattgccttacagtgcaaacctccaccccagacaatgcctgcatataaatgcccccgccccactcagctcatgttccaacactgcacaccaagctgcccatctgtggatttatccccaccatctccagccccaacaccctgggtcatgctgcccctctatgtggacttctcctcaccccactaccccactggaatgctggctctccacgccagatggcccccagccccctcctcccctaaccctacctagtgtggagtcgcaaaacccctttgggctttgacaccaccataacttcacaccctccctgacacccccaccttgctttttccctctaaatcattcaggaaagacagaaggaaagagatgaacagaggaagagcaaatgccatgctcttagtcaccgtgtacgcccacttcctgaagtccatgcttgcatcctgctcactctcacacattcccgactcacccaggaaaactccctgaggccaggggtgctgagctctccatctcactgcccagaggccagtgttggagtgacccttcacatgcttgttggaacattgaataaatgatgccgtctgctctaatcctccattttcttttcttttttttctttttttttctttttttcgagacagggtctcactatgtcagccaggctggagtacaatggtgcaatcgtagttcactgcagcctggagtgcaatggtacaatcatagctcactgcagccttgaactcctgggctcaagcaatcctcccatctctgcctttggagcagctgggactacaggtgtgtgccaccatgcacggctaatttttttattttttgtaaagacagcctctccgtatgttgctcagctggtctcaaactcctgggctcaagcaatcctcccacctcagcctcccaaagcgctgggactacagacatgagcaccacatccagcctctaatccccatttataaaatgcactttccaattccactctggggataaaggcgtcacagaacctgactctgcatttccccacccatatcattcaagccagatggggaggcagggacagctctggtccctccccaacccgggtagagatttccagcccagctgtcacagctctaagacaccgggaccgaaggagaagccaagagaggcaggaagaggtggcaaaggagtgctggagaagataaggaggctgagctccgacagggagcagggaggaggggccatcttgagactggtgccctgcgagctccaccccacccctccatgcagttccccatgggccccgcctgcatcttcttgaggaaaggcattgctgagaaacagcgggtgaggtgggga

SEQ ID NO: 22099 - DNA, 2300 bp, Homo sapien
gagactttgcctccaaccctgaagaaaataagcgtgcaaaagatgagtagaggtggaggcagagatgaaggagctagaaaaaagaggccagaaagtcagagagagtgaggtaacatgggggtcagcagaaggcaaggggagagagggtcacctggagaaggaggtcacctcaggaggaaccgcagggcattgcagaagatgaggcagagcagggtctgtgatgttcttggtagggtacttggacagtgtctgagaccacctggatttcttgacgtagatgaaggcggtgagcctgaacacacctggctgactgagatgctcgagaattggaccaggacctccctggaaaagcaggagcagccccatgaggaccccgaaaggaaaggtaccatgtgtagtgtgataagtgtcatcaacagtaagtgccaccaaccttctcccccctcttgctcttccccacccctgtgggccagtcctgcaggggacatgaccagatgtcccactggtacagtttggatatttgttcccttccacatctcatgttggaatgtaatcccccaatgtaaattagttcaaccattgtaggagacagtgtggaattcctcaaggatctagatccagaaatactatttggcccagcaatcccattactgggtatatgcccaaaggaatgtaaatcattctgttagaaagatacaggcacatgtatgttcactgcagcactattcacaatatcaaagacatggaatcaacccaaatgcccatcagtgatagactggataaagaaaatgtggtacatatacaccatggaatactatgcagccagaaaaaggaacaagatcatgtcctctgcagggatatgggtggagctggaagtcattatcctcagcaaactattgcaggaacagaaaaccaaacaccacatgttctcacttataagtgggagctgaatgatgagaacacatggacgcagggaggggaacaacacacactggggcctgttgggggcgggtggggagaagaagagcaccaggaaaattagctaatgcatgtggggcttaatacctatgtgatgggttgataggtgcagcaaaccgccatggcacatgtttacctgtgtaacaaatctacacgtcctgcacatgtgtcccggaacttaaaattaaattaaattaaattaaattaaaagaaaaagaaatgtaatccccagtgttggaggtggggcctggtgggaggtgattggatcatgggggcggatccctcatgaatggcttagcgtcatcctcttggtgattagtaagtgcttgctctgagttcatgtgagatacggttgtttagaagtgtgtggcaccttccccctcgctctcttgctcctgctctcggcaagtgatgtgcctgctccccattcactttccatcatgattggaagcttcctgaggccccaccagaagcagatgccagcaccacgcttcctgtacagcatccagaactgtgagacaattaaacctcttttctttataaattatccaacctcaggtacttctttatagtaatgcaagaatggactgatacgcccaccctctatccacccaaccggccatccatccatctaggatgtcttgagtcattagcatgaaataataactctcctactagcaggctgggggtaggggtgacaaaggggaaatgtcagaccaagtgcctgcctggaggactcatggtctagaggacgagatggagaatagacaggtaagccaaccacaggcaagtccatccccgactgggctaatttctatggagagggctgggtgcagtggctcacacctgtaatcccagcactttgggaggctgaggcaggaagatcacttgagcccaggagttcaaaaccagcttgggcaacatagcaagaccccatctctacaaaattttttgtaaaaaattagctggacatggtagtgcgttcccatggtcccagctactcaggaggctgaggcaggaggatcacttgagcccaagaggtcgaggctgtagtgaactatgattgtgccactgcattccagcctgggtgacagagcaagaccctgtctcgaaaaaataataaataagtaaattatatggagagacaaggagaggcgagagcaggtatccggtgaaaaattctgagagtgaagtagcgtggatgagggacaatgaagacagttggtcgctgaagccactgccttcctgagatgacccaggtacagccagtctcacccccagacatccaacctctcacctctgtgatgacccggtgtccaggc

SEQ ID NO: 22100 - DNA, 2300 bp, Homo sapien
aagaccccatctctacaaacaacaacaacgaaagccttatatttcaacagctttgggttagttcctggagctgtcctttgtgggctgttacgagcccagacatacttctttgtgccttggtttcctccgctgttgagcattgtaagtgtggacgatgaagactgggaaaggatgtgtgtgaggaggtccttcacaggaacgcctgcctcatggagagggcgacacacagaggaaatggaaaatttacatgaaataaatataactgcagaacggtcaagttcaaaggagcactcaaaatcatctgggacagtccttccatttcacaggcaggaaaatgagagcacgatgggagaaaggcctcatcagagtcaaatgttttttgcagccagcatttattaaaggtttacatgtgacagcaacaaactgtgctgatctcacagggctgtttgagaattaaatgatgaaacacatgcaaatcgtcccaacctgagctatcaagtagagctatgtaacatgagccacatctattctatcattttaaattttctttctttcttttcttttctttttttcttctggagacacagtcttgctcttgtcgcccaggctggagtgcagtggcgcgatcttggctcattgcaacctctacttcccaggttcaagtgattctcctgcctcagcctcccagttagctgggattacagacgcgtgccaccatgcccagctaatttttgtatttttagtagagacggagtttccccgtgttggccaggctggtctcaaacttctgacctcaggtgatctgcctgccctggcttcccaaagtgctggaattacaggtgtaagccaccatgtccggcccattttaaattttctagtagcctcttcaagaaggtaaaaagaaacagtgaaatgatccattttctttaacccaatatatccaaaacattagcattttgacacatcgttaagaaaaaaattgttaatgagatatttgacattccttttgtcagactaggtctttgaaagctgctgggcgttttatactgagcgcattccaagttggatgcagaagtctcattagatgttaaaggaggcccggggcagtggctcacacctgtaatcccagcacttcaagaggccgaggcaggtggatcacctgaggtcaggagtttgagaccagcctggccaacacggtgaaaccctgtctctactaaaaatacaaaaattagctgggtgtggtggcacgcacctgtaatcccagctacttgggaggctgaggaaggagaatcacttgaatccgggaggcagaggttgcagtgagccgagctcgaaccactgtacttcagcctgggtgacaagagtgaaactccatctcaaaaaaaaaaaaaaaaagatattaaaggaaagaacttttcatacccagcttgttccaaacatacttcagagtttcccaataactgaatggagtaccagtgtttaaatttaagctaattaaaatgaaataaatattttaaatcatgctagccacacttcaggggctcaagagctatgatgtatgtttaatacattggatggtgtgagggtagatagcacccgataagcagcattaagaacatcaaaaatttttattgagcccgggcacggtggctcacacctataatcccagcattttgggaagctgaggtgggaggattgcttcaggccacaagtttgagaccagcgtgggcaacatagtgagactccatctctacagaaaataaatttaaaaatgagcagggcatggtgatgcacctggtgggtagtggtcccagctacttgggaggctgaggtgggaggatcatttgagcctgggggtttgagactgcagtgagccaagatcatgccactgcactctagtctgggcaacagagcaagacctgtctcaaaaaaaaaaaaaaaaatatatatatatatatatatatagactctatgtgacacaccagctcccttgccttctgccatgagtagaagctttttgcaccatgcttcttgtacagcctgcagaactgtgagctaaataaacctcttttctttataaattaatatatataatatatatttattgagtgaacaaatgaatataaagtcttttttttctttttttttttctttttgagatagagtcttgctctgttgcccaggctggagtgcagtggcgcgatctcggctcactgcaagctcagcctcccgggttcacgccattctcctgcctcagcctctcgagtagctaggactatagtagctgggtctgcaaccac

SEQ ID NO: 22101 - DNA, 2300 bp, Homo sapien
gaggcgggcagatcacctgaggtcgggagttcaagaccagcctgaccaacatggagaaaccccgtctccactaaaaatacaaaattagccgggcgtagtggcacatgcctgttactcccagctactcaggaggttgaggcaggagaatcgcttgaacccgggaggaggaggttgcagtgagccgagatcgagccattgcactccagcctgggcaacaagagcaaaactccgtctcaaaaaaaaaaaaaaaaaaaaaaaagacttgtttctcatagctaagagttcctgatacagctctgccttaaagaactggcaaattagtgtgcatttgtgtttcaatttcaaataaaatgtttaaggcaaaaaaaaaaagtaaatgttgtatgtcaggggatccccacattactggctttgtgtggagaccatggttcctttgggcttggctcttcctccctgcaccagtgcagggccccaggaacacatctgccacacacggccgccatgtccctctgctgaagctagtcagggtcatcctcactcctcagtgaccctcatgatggctccaccaggtaggtacttttattctccccatttaacaggtgaggacactgaggggcacagggatgtaagttaccttccctaggtccactatctaggaagtggtgggccagggtttggtccatgctgtcagctccttgaccctgcatctataactactaactatactgtggagagcctcatgagctcctgcgaggtgtagaaccttatcccgcaggcggggcagtggcatggtcaggtctaggagtgaaaagatcctgcgatggttggagttgcgggcactgaagaggtgagcctggcgttagggggagcaggggagaccatcttccccctggtgaaatcctgttctaaaattggtgatactcctgccttggcctcccaaagtgctaggattatggcctcatatctatttttaaaaaataagaattcaagctgggtgcggtggctcgcaactgtaatcccagcactttgggaagccgaggcaggtggatcacttgagttcagcagttcgagccagcctggccaacatggtgaaaccctgtctctactaaaaatacaaaaataattagccgggcgtggtggcagatgcctatgttcccagctactcgggaggctgaggtaggagaatcgcttgaacccaggagacggaggttgcagtgagccgagattgcaccactgcacaccagcctgggcgacaaagagtaagactccatctcaaaaaaaaaaaaaaaaaattcaaaacccatcgagttgggatgacgcttagtgctgggcttcaggaagagtaggcaggagggtagtatgggaggtttctaggagccactcttggaagcggtgctccccacagatgcccgattgcactgactggaactcggtcacatgaccacataactcgctcacatgaccacacctagctgcaaaggtgctgggaaatgtggtaccctgttgggaggccacttctgggcttcaaaccttcactgtgaatggagctcacaggttttctaaaaatggacattaaatgaaccagagttggccctaaggatctggctcactgcaacctccacctcccaggatgaagcacctgcctcagcctcccgagtagtagctgggattacaggcacacgccaccataccgagctaatttttgtatttttagtagagaaggtgtttcaccatgttggccaggctggtctcgaactcctgacttcacatgatccgcctgcctcagcctcccaaagtgctaggattacaggcgtaagccaccacgcctggcctcaatatttctttttctgggtatttgagtatgatattatatatgatggttattagacagccagatgcataggaggattagctaatctgttttgaggaatacttatctccaatatagttatataacgacaacattctttttttgaatactggtctcgggtgcctaatgacagaagggtgacatcactaaggaagcctggaaagtcccagccctccacgtgatcccacggatgaaaatagctccgggtgagctctggaacagctgaaaaagctggagcaaccaagcagggcctacaagccgaggagggctgtttaaaggcgcaggggccattttacctccaggttggccctgctcaggaccaggaggaaacacctccagcccgcgacctcctcccacagggggaaaaggaaagcaggaggaccacagaagctttggcaccgaggatccccgcagtcttcacccgcggaga

SEQ ID NO: 22102 - DNA, 2300 bp, Homo sapien
tgctgcagcactaactgtaatgagagaagactggaaactggtggaatgtctacccttagggaactggttccctcattactggaataccatatggtagaatattgttcagggttaaaattaaatgaatgatggataaaaggtataggagttttttggggggatgataaaaatatcctaaaatcgattatggtaataactgcacaactcagcgcatacactgaaaaccactgacttgtacactttaaatgggcactttaaatacactgaaatacactttaaatacactgaaaaccgctgacttgtacattttaaatgggcaaaattgtacactttaaatgggcaaactgtataattgtgaattatatctcaataaagcggttaccaaaatgaagagataatgacaggaaaaatatcaagtaaggatgaaacagtactcagtaataaaaagaaacgaagcactgatacaagcaacaacttgggtggacctccagggcattgtgcagagtagaaaaaaggtaacatcctaataatatatgattccatttacataacaatctccgaatgacaaaactagagatggtgaacacattagcggttgccaggggcctggggaggagttcttatgtggagagggaactgttctatatcacaattacgatgggggttacacaaatctatacaaggaatcaagctgcacgggcacacagatgcacaatcacactcacaccacacaaactggtgaaaactgaacaaggtctgtaatctagttaacagaactgtattgatgtcaatttcctggtttcgatattgggactacataagatgtcaccattaggggaagatggatatactcttttcacaacttccttgaatctataattatttcaaaataaaaagtaaaaacaagaggtaagctccatccctttatcaagcatacattaggccagacgtctccccattcagatgattctccatcttttacgagccctttacctagacctggaccttaccactgacctctccctgacaccacccatctccctccagtagggcccactccttccaggtgatgctgctgcccgcgatttaccttcttctagccccgccccctcagcacttccaggtggcccccgccccctcagcacttccggttcccagccagccccacccttggcacctcccccttccaggtggccccgcccacacgcaatcttttccccggccccgccccttagctcccttcagcccctccccctcccagatagccccgccccctcggggggccttccgatttccagctggccccgcccacacagttttcccccccccggccccgcccctcagttccatttggcctctcccctttccaggtgaactcgcacctcaaggcctcttctcagaggacctgtccaactgtctctgtctctcgtctaccctctacctggcccccctccctctgggagacacctctctgcactctccggcggcccgcagcccgcgctcttccgtctccaccgcgctctcggcagcctcagcgtccccacgcccactcctctgcagacaccccgacatggcgaagcataggccccaagcattcggcgcacccgccgccctccgcctcccatctgcttgcggacggccccacttgccttgcgttggtcccgcgcgccgctgcccgggcaacacactcagatccgccaggcgcgcctctgcagtcccaagttcgcgccacggcattcgcgcgcagacgtctgcgggcgggggcggggcagagcctaggggcgggacctgggcaccgtccgcaccgccgccgtcgcgcggaggacactgggagtcgtagtctcccgaatgggaggagggcgggaaaaggggtgaagtggggcgagccctcccgcagagcacactgggaaaatgcccgcgctttccctcgccctggatgagcgggtgtggctgagggtctgaggagtgactggcagggaaagaggaggaatcggtggaagcgcccccgcgaggcacggcgggaagagaggcgggagaccgcgcggggcatcccgggagcaagggccgggccaggcctgggcgcggggcattgtgggaggtggacgccgctccggggcgggtaggtgagtggggaggggcgggaagggtgcacatcttggggaggggagaggcacagctaggtgggacggcggggctggaaggtgccgcagcgggcggggagggggggagtaggagggtcgggagcgggctggatggggctgctcgaggggagacgcgcagctggacgtggggggagcatc

SEQ ID NO: 22103 - DNA, 2300 bp, Homo sapien
ctgaggcgggagaatcacttgaacctaggaggtggaggctgcagatggcaccactgcactcaagcctgggcgacagagcgagactccatctcgaaaaaaaaaaaaaagtctgtaagtcgggcccacaccatctcttgctccgtgagtatctttgtctctctagctcctcttcttctctcagtacatgtccctccttgactcccgcctctctgcaaggtgtatttggctgcctcagttggcctctccccctctgcatctctgggtggggtgttctctgcccgtctcccacccacacccacccccggtgctccccttccccccagcaggacagcggctcaggttcacgcaccccacggcgggccggctgggcgcacgcacgtccttgcacacaagccgcacgtagctgtacttgagcacgtcgatgagcgtgtagagcgggggcgcactggcccagcggcagcgcgccaggtgcatggagctcttgacgaagaagagcgccagccgctgctggcaccacgcgtcgaagaagcggctgaactcggcccacgagaagaaggcccgctcccgcagctcctgctcctcctgccccgcagccgtgccgggtgggggctccggccgctccatcctgggggcctgcgtggaggaggggagaacaggtggatatcagacccattcccacccggggtatctcatctactccattcttggcctgccccgtcggttgctggtgcctctatcgaggtgggtagcccggggtcggacgtgcctgtttttctccaaatatataaatatcaacctccatcctatctttggcctcctcccaccgccttatccctggttcacttggagcctgtcatcttgattcctaattccaactcgtctcctcctccgcagatgtgacccttaggtacagttggaatctctcctcccaaaatacgacccttaagctcagatgtcccttaaggacatctcctcaaatgtgttctcaaattccagctaaaacctcctccccttccagctgtgtctctcacccaagagtaacttctaactctcgtattcatctggaactcctccttccatgtgccaacagttggctgtaacccctccaaagacgctccatctccagatgtgctcccacatccaggccacggacccctcacccggtcacatgcttcatgcacctgtggctccgcactccccagatgtgcctctggcgtgcagctgttgccccttcccccgattatgaccctatggctcgccacatgcagctgtagctggggcttccctgagacactctcatctccagatgtactccccacatgcagttatccacgcttcgcctacaggtgtgtgccccacttgtggctagttctcctcggaagtgtcaccagtattcacctgtggtcccctcctcctcagatgcggcccccagtccagctgtgggcccctcctcccagttacatccaccatcccccgcaatatgcatcttcgttctagacatggcccctcgtcctcggatgggctccttcaccccagatgctccccccacgtccagctgcgcgtctcccctcgagcagccccatccagcccgctcccgaccctcctactccccccctccccgcccgctgcggcaccttccagccccgccgtcccacctagctgtgcctctcccctccccaagatgtgcacccttcccgcccctccccactcacctacccgccccggagcggcgtccacctcccacaatgccccgcgcccaggcctggcccggcccttgctcccgggatgccccgcgcggtctcccgcctctcttcccgccgtgcctcgcgggggcgcttccaccgattcctcctctttccctgccagtcactcctcagaccctcagccacacccgctcatccagggcgagggaaagcgcgggcattttcccagtgtgctctgcgggagggctcgccccacttcaccccttttcccgccctcctcccattcgggagactacgactcccagtgtcctccgcgcgacggcggcggtgcggacggtgcccaggtcccgcccctaggctctgccccgcccccgcccgcagacgtctgcgcgcgaatgccgtggcgcgaacttgggactgcagaggcgcgcctggcggatctgagtgtgttgcccgggcagcggcgcgcgggaccaacgcaaggcaagtggggccgtccgcaagcagatgggaggcggagggcggcgggtgcgccgaatgcttggggcctatgcttcgccatgtcggggtgtctgcagaggagtgggcgtggggacg

SEQ ID NO: 22104 - DNA, 2300 bp, Homo sapien
ttggaattaggaatcaagatgacaggctccaagtgaaccagggataaggcggtgggaggaggccaaagataggatggaggttgatatttatatatttggagaaaaacaggcacgtccgaccccgggctacccacctcgatagaggcaccagcaaccgacggggcaggccaagaatggagtagatgagataccccgggtgggaatgggtctgatatccacctgttctcccctcctccacgcaggcccccaggatggagcggccggagcccccacccggcacggctgcggggcaggaggagcaggagctgcgggagcgggccttcttctcgtgggccgagttcagccgcttcttcgacgcgtggtgccagcagcggctggcgctcttcttcgtcaagagctccatgcacctggcgcgctgccgctgggccagtgcgcccccgctctacacgctcatcgacgtgctcaagtacagctacgtgcggcttgtgtgcaaggacgtgcgtgcgcccagccggcccgccgtggggtgcgtgaacctgagccgctgtcctgctggggggaaggggagcaccgggggtgggtgtgggtgggagacgggcagagaacaccccacccagagatgcagagggggagaggccaactgaggcagccaaatacaccttgcagagaggcgggagtcaaggagggacatgtactgagagaagaagaggagctagagagacaaagatactcacggagcaagagatggtgtgggcccgacttacagacttttttttttttttcgagatggagtctcgctctgtcgcccaggcttgagtgcagtggtgccatctgcagcctccacctcctaggttcaagtgattctcccgcctcagcctcccgagtagctaggactacaggcacctgccatcatgcccggctaatttttgtgtggttttttgtttttgtttttgttttgttttgctttgtgttgtttttttgagacagagtcttgctctgtcactcaggctggagtgcaatggcacaatctcggctcactgcaacctccacctcccgagttcaagcgttgtttctcctgcctcaacctcctgagtagctgggattacaggcacgcgccaccacgcctggccaatttttggatttttgtagagatggggtttcaccatgttggccaggctggtctcaaactcatgacctcaggtgatctgcccgtcttgcctcccaaagtgctgggattacagccgcgagccactgtgcccggcctgacttacagaatgtaatagagacttcgagaggcagagcgtaaaacacacacaccccaagaggagaaaatagtcacggaaaattccagaaacatggagacatggaggcagagacaccagagacagccagggaaacagaagagccaggttttgtacacgtgacaaagactgggagacagagactgggagactgaactgcagagaagccgcaggataaagaaaaggatccatctattcagtgaataaggggccaggtcccatgctgtgggctggggatattctagttggagcgatggagttgggcaagagacaaaaatccctgcccttctggtactttctgactggacagaaagattgacgttaaaagaacaagctcacaggtagttccctacaactgtgcaaagaggggcaggtgagaaatccaggagagccagaatcacacccaggtggccaggggtattttaatggaccccaattgtattttatttagtctttatttttttgagacagggtcttactctgttgcccaggctggagagcagtagtgcgatcttggctccctgcaacctccaactcctgggttcaagagattcccccacctcagcctcccaagtagctgggactacaggtgtgtgccactatgcccacctaatttttgtatttgtagtagagatggggtgtcaccatgttggccaggctggtctcgaactcctgacctcaaggaggctgaggtgatctgcccacctcggcctcccagaatgctgggattacaggcatgagccaccacacccagccaaattgaccccaattttattttactttattttattttattttatttgagacggagtcttgctctgccatccacactggagtgcagtggcacaatctccactcactgcaacctcagcctcctgggctcaagcaattctcctgccttagcctccccagtagctgggattacaggcatgcgccaccatgcccagctaatttttgtatttttagggtttcaccatgttggccaggctggtcttgaac

SEQ ID NO: 22105 - DNA, 2300 bp, Homo sapien
ggtggcgcacacccgtaatcccagctacttgggaggctgaggcaggagaattgcttgaactcagaaggtggaggttgcagtgagccaaaattgcaccactgcactccagcctgggtgacagagtgagactctgtctcaaaaaataaaaataaaaatcctataacaactgcacaatgctcaaacggcccaattccctacctttccttttataccttactactactctcttgttgctcccatcatgcctcactccctactcacatttcccagacggaggttacatgtgatatggcagctgagagcccagactctggggcccgattgtgtgggtccaaattctggttctaacacctctggccaagttatttaacctctctgtggtgcagtttcctcatctgtaaaatgggggtgtgacagtaacgctacctcataggaatgttgggatgcctcaacagcactcatgtaaagcagagatgggtacaagtagctttattatatattatctgtttaacaattgtatatgggccaggcgcagtggctcacgcctataatcccagcactttgggagactgaggtgggtgaatctcttgaggtcaggagttcaagaccagcctggccaacatggtgaaaccccttctctactaaaattacaaaaattagccgggcgtggtggtgcgcacctgtaatcccagctactcgggaggctgaggcaggagaatcgcttgaacccgggaagcagaggttgaaatgagcagagatcatgccactgcactccagcctgggcgacagcgtaagactccatctcaaaaacaagcaaacaattgtatatggccgaaactttccataataaaacgtttttaaaaataagagtacttagcatagtctctggcacacagtcagtgctgatcttggcgttagcttcaacactccgacttttcctgactatccccagctcctcctacaacccaattactctataatacctgtttcccctataataacccactcttcacaaacacttaaattaaccataatgagagctgccaaataaaatacaggatgcccagctaaatttgaatttcagataaacaacagagagtaactacaatattatgcattttccgaaattagaatttaactggccattgctttccccctaaatctggtaactctatcactaaatgcctttgcatactgaggaatcctcagtgcttcctagaggctgctactgagttggccttctataaataacaacagaattaacttatataatacctcaattcccttataaaacttccagcttctctttacagcgccagttcttcccaatcgcctcccagtccctcccatagaggacaacagtccccttttcttatacctccccttctccatgaaaccccaattccgtctatagtcacatctgtcctgtttaccagtactgtcaactgtgcctggcttccagcaggagctctataataactgcagaatggcaaaagagcttaataccccaattttccctactgctttgggaggctgaggcgggcggatcctactgcgtttccacttccccttgagcatcccaagtatctagtaacttgtcgatttcaatgatctccccaaatctccttattacataggaattcaccaaaacactccctgtccttgaaaacatcccatttcccctaatatcaccccaactccccttactgcagactgattcctccggcacaccctccatccctccagttcccaggctgttagtctaatttctcccgcgaggtctctaatccccgtctccttccactccagggttactgtggcaacgccaacctttgaatccccctcctgcgcgctgagcggctcgtaaccatggagaccgaagcaggtttcccgcgtccgcctcctcacccagagactgcagccccggcgcccagaccctttggacaaggagatccaagcgggccccacaatgctcagcgggtaaagagctcctccccactcctctcccgccagcagacgaaggaaacaccccgcagcctgcacatgctcagatggagctctgggcccgcgggttctactgcgcaggccctcacactcagcaaagggacttggacgcgaaagcgctggtggcgctcagccggctgggagttgtagctttctggctgctacagcaggagatacaggtggccaatgggtgagctggctggaggtaggaacaaggttaaggaagctgggatcttcgtgcagactggatcgtcactatagcaacaatgaaacatcgggaagggctagttctgcta

SEQ ID NO: 22106 - DNA, 2300 bp, Homo sapien
ggatggtatgggtggctctgtgttcaggagatggctgggaagagaggctagggctgtgcagacgctgggctctccgccggtgtctgcagaggagactggccatgttgatgctggtccagaccatgaggaacacaaacaggacatggcgaatcaccatgacatttataaatgatccttgggggagttttatctgtttagatcacggatgtatgccaaatccattaaatagtaccaagaataaggaacatgtgcaaaatatatttgtggaatgaataaaataagtcccatagagcagtgcaatttaacagaaatataatccaagccccaaatgtatattaaattattgtatgtatggcctagtttgacaacagtcttgcaaatatccaggaccagaaatggtgaaattggtattggcctctacggtttcagtgatgtgaacgtagattagcatgttggtgatccagaggaaaatgaaagagggaacaaacctcaaggctgatatgcggatcacacaatagtttaccaaactgcccaatatcataaccagagacgttcacactacaaaccaggagaaaaagttggtgttttcacactgtataactttctgcaagatgctgaaacaagactctatatcataatgagactttcatctcacttaattcgaccttttctacttagcagaataatggtgtaacttaaattttatgatcaattccttctgcttataacttaacagaacccaacctacaaaattctttagtatccattggttaagcaagaaattgtctgtgatgttgctaatacgacatgctatacctgaataaattcctctgagaaaagttgaggctcctatacacaaaataagaaagcaggccatgtggttaccccaggtctcacctaactccctgctgtctcgaataactgtttgagttcttcaattagttgtctttaaacctaggtttatggctcaaaaccatatgcaaactgaaaatctcatattgctcttaatttgtatttccccttactttgtatttctcctttttaaactttgtatgtgttacttgttaaattttttcagaggtgcagctcctaacaaaataatactgaatcagcactttaaagggatagcaaaagactgtagaacagacaaaattgaacttactaatggactccagggagacttagcctgagagccacatccttcaaatctcttttgttgctcaaatgtgcttttgacatcgattcctagtcaccagtcactccccacaacatgggatgagaccagcaaactgggagaggtccatgctggcatcaggggacatcaaatcttaattacagaatgattgatcaataatgcttttagagaaagttcttgatcacaaggagaaatctgaaagttgtcagaacaaaatggagccactaatgttaagatgaccctgacaaataaagccaggaaagccatgaagagggggggtcttatccttgtatgcttgaaaatgaaaaagactctacaaaacccacaaccttgcataaaggtcattgcaaccttaaacaaaaaatatttctgcaaggaatgctgcccagcaactgcctgtccaacctcagactaatgtcacctttgtgcctgatcctgtggccaaggaaaatcctgtcaaaacaatatgcaatcctccccatttctgtcttcctttatcttcctgaatatatacatagtttaatatggcatatctattcccaattgcaatgctctattcccaaataaacactgtttcctttaggaagctttcatatgtttgttatttaggttaacacttgtaataattaaaggattacagttacaatgtaaaattattagtattaacaacacaaacattggtataaaaattattattacagaaattaaaacaacttgagtatggagagattaagactgtcccagccaagtcattgaagtcataaatttaagctatgactaacaggatgcaaagcttcctgagggttttgttttgttttcaacaagcggagggccccatttccctttccgacagcctcataggaacttctccctttcttctcaagtgaccaagaggaacagaacacagagcagcctggcagtgtccaagcaacaagcctccgctcctccttcctgcaccctggggctcctgaaactcacatggtaagcgctgcagaaacgcagcaggtggtgactttaggggaggacaggccaaatgggagaatccccttaagcttcggtttctctagttctcaacttcttttgaaataatgttcatagagaagga

SEQ ID NO: 22107 - DNA, 2300 bp, Homo sapien
agaagttatattaagattccaataaaagaatgcaagatgactatctgtgtaaaaatgtaatcaatggggagcaggtgcacctccaataatattagacaaaatatattttacctaaacagcattactaagtataaagtagatcacttcaataagaataacaattttaattttgtgtatacatattcacactttcaatatgtatatagtatacacgggtagaatgataaacagatatagaataatcctccactcttgtgggaaatctgttcaatagtctttcagcaattaacagaataacagagtatcagtaaagatataaaaaattgaccaaagcaattcatattcttgacttaagtgccctagaataacaactcacacagccattgaagaatccccatcatcctatctcaagcatagaggaaacacatagcatacatatgtagccacatagcaaacacagaaatgactatcaacaaagtggaagagtttaatgcacagattaagttatctgaatatatgtacaatgagttataaataataaataattgagccaggtgaagtagtacatgcctgtaatcccacctacttgggaggctgaggtaggagtttgagcccaggagtttgagtctggtctgggcagcattgcaagatcccatcccccaaataataaataaactaactaagtaatcaataattgaatgagaaaagttagctcatatttcaatatgttcaatcttaggatatatacttctaggcaaccacttagtgacaaaaattctgtagaaatccatcattgaaagttcattatgtaaataaatgtgaagactagataagaaccacagaacacaatgacattggaaaaaatgccacagtaattctttgaaaaaagaaatgcaggcctggtgcggtggctcatccctgtaatcccagcactttgggaggccgaagtgggcagatcacaagtcaggggttcgagaccagcctggccaacatagtgaaaccccgtctctactaaaaacacaaaaacaattagctgggtgtggtggtgggcacctgtagtcgcagctactcgggaggctgaggcaggagagtgctttcagagaaacttcttgatcacaaggggaaatctgaaagttgtcagaacaaaatggagtcacttatgttaagataaccctgacaaatagagccaggaaggccatgaagagagggctcttatccttgcatgcctgaagatgaaaaagactctacaaaacccacaaccttacataaaggtcttcacaaccttaaaaaaatatatatttctgcaaggaatgctgcccagcaactgctggtccaacctaggactaatgtcacccttgttactgatctttgtagccaaggaaaattctgttaaaacaatatgcaatcctccccatttctgtcttcctttatctccctgaatatacacatagtttaatacggcatgtctattcccaattgcaatgctctattcccaaataaacattgtttccggctgggcgcagtggctcacgcctgtaatcccaacactttgggaggccaaggcgggctgatctcgaggtcaagagacggagaccatcctggccaacatggtgaaaccccgtctctactaaaaaataaaaaattagctggatgtggtggtgcacgcctgtagtcccagctacttgggagactgaggcacgagaatcgcttgaacctgggaggcagaggttgcagtgagccaagatcatgccactgtactccagcctagccacagagcgagactccatctcaaaaagaaaaaaaaattgtttcccttaggaagctttcatatgtttgttagttaggttaacacttctaataattaaagttatacagttacagtgtaaaattattagtattaacaacataaacattggtataaaaattattattacagaaattaaaacaaattgagtgtgagagagattattaagactgtccaagccaagtcactgaagtcataaatttaagttatgacaggatgccgagcttccagagggttttgtttttaacaagggaggggccctatttccccttctgacacgctcatatgaacttctcactttgtcgtactccttccttgctgactaagaggaacagaacacagagcagcctggcggtgtcctaccaacaagcctccgtttctccttcctgtacactagggctcctgaaactcacctggtaagcgctccagaaaagcagcaggtggtgactttagggtaggacgggccaaatgggagaatccccttaggtcggtttct

SEQ ID NO: 22108 - DNA, 2300 bp, Homo sapien
cagctgaggtcaggaaaataccaagtatgaccttccctatttaagttaaaatattggaagcttattccaaaatattggaataaatttgaaatacagtgattgaatggaaggacattaaattataactcattagacatgttattttactctatagacaaacacaacaaatcacctgaaataagctataaaagataaaccagtaagttagagaaataatctttttttttttttgagatggagtctccctctgttgcttaggccagagtgcagtggcgcagtcttggctcactgcaacctctgcttcctgagttctagtgagtctcctcctcagcctcccaagtagctgggattacaggcatgtgccaccatgcctggctaattttttttgtatttttagtagagatggggtttcaccatgttggacatgctggtcttgaactcctgacctcaggtgatctgcctgcctcaggttcccaagtgctgggattataggcttgagccattgcgcctggccagaagaatcttaatgtacaaaaatgaataggtttttaatacaacagactatcccaattccttgaaagaagaaaatacacccattaaaacagaaactatggtgcctagaattaaactgcacaaaaaactacatgacccatataatttttttatgttgaaataattttaaacatgcaaaattagcaaagattcatataaatcctcaaccagcctatcctgatgttagctatatatataattgtattatatgtataatagttgttatatataaaactgtatatatacatttattgtattataatcatatatatacatttattgtattatatataatatacaactgtatatgtaattgtaatataataattatatacataatagtatatgtaatacaagtatccaaccaggaaattgatgtcaacgtatcttaccattacctaatgtgcagaccttatttgaattttgtcaatatttctcttaacgtcctctttcttctccaagatcgaatcgaggatctcacattgcactcagttgttatgtccttagattcctccaggctgtgaccgtttcttattcttcccttgtcttttgtgattgtgacacttttgctgagcatggccaattattttacagaatgtttatcaatttggatttctttgatgttttctcacgattaggctgaggtcatgcatgtttgtcttctgtgttcagtcaatatgccccatcctttttcaaatatttcttcatgttctggcgtcagaatttgttccaatgttatcttatatattcctgccccagccctcgaagtaaccatttctccacagatacttcaaaatagtatttagaaaccaaggccgggcacagtggctcacgcctgtaatcccagcactttgggaggccgaggcgggctgatctcgaggtcaagagacggagaccatcctgaccaacatggtgaaactccgtctttactaaaaatacaaaaaattagccgagcgtggtggcatgcacctataattccagctactcgggaggctgaggcaagagaatcgcttgaacctgggaggcagaggttgcagtgagccgagattgctccattacactccagcctgggtgacagacggagacttcatctcaaaaaaaaaaaaaagtaatattgattaaaaatcaaattgcatgagaatgcatagcaggataccaagcaaatacaacttttaaatattacagaaaatgatatttaaaatacaaaccaaatacataaatcatgcaggcggattaagacgtttctggatagtggtaacagctgagagtggctggatgaattccagagaaatttcatatattgcttcaattttatttaaaatatactattacctatgtcttagatattttattttaaataatgaacaaggatattataaactctgcagaagtaagtgtaatcgtgtttttttcctgcccacattaaagatggcccagatgcttgcactgaccccattgactgcccacagccatcatggcgaccggaagtcctgagagcttacttccctcagttctcagaaagcccacctcctctgcgagcgttatttcaaaagaagttgagaaccagagaaaccgacctaaggggattctcccatttggcccgtcctaccctaaagtcaccacctgctgcttttctggagcgcttaccaggtgagtttcaggagccctagtgtacaggaaggagaaacggaggcttgttggtaggacaccgccaggctgctctgtgttctgttcctcttagtcagcaa

SEQ ID NO: 22109 - DNA, 2300 bp, Homo sapien
ccagccatacattttacttttgaacactacataccgtggaatacttttcagactttaaaaggaatgaaatactgatacatgcttcaccgtaggtgaacttggaaaacattgtgcaaaattaaatacgtcagacacaaaaaggcaaaggccgagtgattccacttctaggagattcctagaacagtcaaattcctggacacagaaagtagaacagagcttaccagggactgagagaaaaagggaatggggtgtgattatttaacgggtacggagttttaattgggaaagatgacaaagttctggagatgaatcgtgatgatggttacacagcgatgtggctgtacttaatgccactgaagtgtacactttaaaatggttcacatggaggccgggcacggtggctcatgtctgtaatcccagcactttgggaggccgaggtgggtggatcacgaggtcaggagatcgagaccatcctggctaacatggtgaaaccccatctctactaaaaatacaaaaaaaatagctgggcgtggcagatgcctgtagtcccagctactcaggaggctgaggcaggagaatggcgtgaacccgggaggcagagcttgcagtgagccaagatcgtgccactgcacctcagcctgggtgacagagggagagtccgtcacaaaaaaaaaaaaaaaaatggttcacatggaaatgtttgtgatgtatattttatcaccgtaaaaaaatgtaactggggtaagtatgatcaatatttggcaatttaagctttatggtagaatttcattactagagtgaagaaagacagtccataaaaaataaattatttaggccggggtgcagtggctcatgcctgtaatcccagcacttcgggaggccgaggcaggtggatcacctgaggttgcgagttcgaggccagcctgaccaacatggagaaaccccgtctctactaaagacacaaaacttagccaggcatggtgacgtgtgcctgtaatcccagctactcgggaggctgaggtgggagaattgcttgaacccgggaggcagaggttgtggtgagctgagattgcgccatcgcactccagcctgggcaacaagagcgaaactccgtctcaaaataaataaataaataaattatttaattgaccagatagggactcccagcccttccttcctggggagctccaggagctggctgggctgggcttaatctttcctcccaaagaaccaaaagaaaaagagatgcacatcaaggtttgctggggaccctcaaaggaaaagaaacgatgtaactcgagtagaggataaacgctttgttcagctgatttgcatcaggggcacctgaagatcaagcgactccccagttaagcagagtcagggtgggaaactgagtctgtgtcctagaggtctgggtttaggcagtcattttgggttttgttttgttttgtttgttttgaaacggagtcttgctctgtcacccaggctggagtgcaatggcgctatctcagctcactgcaacctcctcctcccaggttcaaacgattctcctgcctcagcctcccgagcagctgggattacaggtatgcaccaccatgcccagctcgtttttgtatttttagtagagacagggtttcgccatgttggccttgaactcctcgcctcaggtgatctgcccacctcagcctcccaaggccagaggatcactttaagcccagtgtcaggcctctgagccgaagctcagccattgtaacccctgtgacctacacatatacgtccagatggcctgcaggagccaagaagtctggagcagccgaaaaaccacaaaagaagtgaaacagccagttcctgccttaactgattaacccaccttatgacattccaccattatgacttgttcctgccctgccccaactgatcagtcgaccctgtgacattcttctcctggacaatgagtcccatgatctctccacaatgcaccttgtgagcccctcccctgctgacaacaaataaccacctttaactgtaactttccactgcctaccccagccctataaagctgcccctctcctatctcccttcgctgactctcttttccaactcagcccacttgcacccaagtgaataaacagcctttgttgcttacacaaagcctgtttaggtggtcttctatacggacacgcgtgacacccaggagttcgagacgagtctgggcagcatagtgagttttcatctctaaaaaaaaaaaaaattaaaattagccaggcatgccttgtacgtgcctgtggtcccagctactt

SEQ ID NO: 22110 - DNA, 2300 bp, Homo sapien
gagtagaggataaacgctttgttcagctgatttgcatcaggggcacctgaagatcaagcgactccccagttaagcagagtcagggtgggaaactgagtctgtgtcctagaggtctgggtttaggcagtcattttgggttttgttttgttttgtttgttttgaaacggagtcttgctctgtcacccaggctggagtgcaatggcgctatctcagctcactgcaacctcctcctcccaggttcaaacgattctcctgcctcagcctcccgagcagctgggattacaggtatgcaccaccatgcccagctcgtttttgtatttttagtagagacagggtttcgccatgttggccttgaactcctcgcctcaggtgatctgcccacctcagcctcccaaggccagaggatcactttaagcccagtgtcaggcctctgagccgaagctcagccattgtaacccctgtgacctacacatatacgtccagatggcctgcaggagccaagaagtctggagcagccgaaaaaccacaaaagaagtgaaacagccagttcctgccttaactgattaacccaccttatgacattccaccattatgacttgttcctgccctgccccaactgatcagtcgaccctgtgacattcttctcctggacaatgagtcccatgatctctccacaatgcaccttgtgagcccctcccctgctgacaacaaataaccacctttaactgtaactttccactgcctaccccagccctataaagctgcccctctcctatctcccttcgctgactctcttttccaactcagcccacttgcacccaagtgaataaacagcctttgttgcttacacaaagcctgtttaggtggtcttctatacggacacgcgtgacacccaggagttcgagacgagtctgggcagcatagtgagttttcatctctaaaaaaaaaaaaaattaaaattagccaggcatgccttgtacgtgcctgtggtcccagctacttgggagactgaagtggtaggatcgcttgaggctgcagtgagccaagattgcgccactgcactccagcctgaaggacagagcaagaacttgtctcagaaaaaaaaaaagaaaaaaagaataagaaaaggaaaaaaataaaaaaggaaggaagggagggagggaggggcagagagggagagaggaaggggggaaggaaggaaagaaagaaagaaagagaaagggagggagagagagaaaggaaagaagggagggagggaagaaagagaaagaaaaaagaaagaagaaagaaagaaagagaagaaagaagggagggaggaagggagggagggagaaaaggaggaagggagagagagaaagaaaaagaagaaagaaagagaaaaaaggaaggaaggagggagggagaggaaaagaaagaaagagaagaaagaaagagaaaaaagggaaagaaagaaaagagaaaaaagagaaagaaagaaagaaagaaagaaaagaaaagaagggccgggcgcggtggctcacgcctgtaatctcagcactttgggaggccgaggcgggcggatcacgaggtcaggagatcgctgaaaccctgtctttactaaaaatacaaaaacttagccagggtggtggcgggcgcctgtagtcccagctactcggaggctgaggcgagagaatggcatgaacccgggaggcggaggttgcagtgaaccgagatcgcgccactgcactccagcctgggcgacagagcgagactccgtctcaaaaaaaaaaaagaaagaaagaaaagaaaggaaggaaggaagaaaaaaatcatttcaagggtaggcgacgggagccttgcggtttagccgctagtcaacggatgggggggagtggtagcaaaaacataaaaatggggacaagagagaaactggagactccccaacctgtctgtttccgcccttttacagtactgaggggaaaaaaaagccttctttccttgggaaatgcaggaagccagcaagcggccggagtctccggagcccgcaaggaggcgcgttggctgcgcagagagcgcgcttcccagctggagagcctaggaacggtggcgcgggcggaggcgacagcgaggacccaaggctggggtttcctgcttggatcaggagtgcctggggagtaagttctacaggaaatgtcaatctactggtcgtgggggtcagactctggggtcgggtcgatcgggtcccgggggcggggggtgggacgggggtgggcaggcaggagtgcgggcgctgggatcccctgcctgctcggctcccctct

SEQ ID NO: 22111 - DNA, 2300 bp, Homo sapien
gccctgggggcggaggttgcagtgagccgagattgcaccactgcattccagcctgggcaacagagtgagactccgtctcaggagaaaaaaaaaaaaaaagcgcatctagcacatatatagtgcagcagggttcctggaagcatctggcgaatttgttattcgtcagcattggttgcaagggacagagatcctctcgggccaccttcagatagaggcacactgtaaggagttgaggagctgaagctgctttaggtgttggcttctctctccctctctggggctctcatgagctccatgctctctctctcactccatccctgtctctttctcagcttcgccctcttcttttgctccaaatgctttcttaccttctactaagttcttctctggcttctgttttctcatggtccctgatcgacatcagctgtggcctgggtcggccttagggtctctgtgatttctctctttctctctctctgttaaaacaaacgtggcaaaattcaccattttaaagcgtagaatgtagcagcatttagtacattcacggggccgtgcaaccgcaccacttctgtctagatctgaaatatttccatcactccaaaaggaaaactacctgccaccgggaagtacaggaatcctcgctttttagtcttacttgggagaaagaattctgccaagagactgatttagccaacaaagagaatttactgaaggcaaatagagaacagagagtttacctagagagagacagtacactctgaaggatgaggagagcaggctgctgaaagaacgtgagccagcagcacaccgagagttttgtgttgtgtttctaatatgatgtcgcactcttttgaagttcttgcttctgtcttttttttttttttgagacagtttcgctcttgccacccaggctggagtgcagtggtgcgatctcagctcactgcaatcttcacctcccaggttcaagcgattctcttgcctcagcctcccaagtagttgggattacaggcatgcaccaccaggtctggctaatttttgtatttttagtagagatggagtttcaccatgttggccaggctggtttcaaactcctgactgcaggtgatcctcctgcctcccaaagtgctgggattacagcctgagccaccgtgcccagccagttctctgctttttgtgaccacaggataactgcaacctgattcagccccattcctgtgaccccaggctggccctgcccatctgggacaccagctgactccacctcaccccccacaacctctggctgaccccgcccatccccaggaccccaggccgaccccagtccagcctccagtcatcctgaccccggctgacccccgcagggaggaggcgaaggccaagatgggcttgctgcgggagcgcgcggagaaagaggaggcccagagcgagatggaggcgcaggtcctgcagcggcagatcttgcacctggagcagctgcaccacttcctcaagctcaagaacaacgaccggcagccggatcccgatgtcctggagaagcgtgaaaagcagggtgaggctggggctgctgcctttgcatctcaagggcctggccgcccctggggcacctgcagcacaccttcgtgccccaggtgggaccacacttcgctccccctcacccaggaggtctctgtgttggaggccacccaggaggccgacctgctgttctctcttcccctagccggggaggtggccgagggcgtctggaagacctcccaggagaggctggtgctttgctacgaggacgccctgaataaactgtcccagctgatgggggagagtgaccctgacctgttggtgcagaagtatctggagagtgagtggggccctgggtggagggaggaggcccgggaccccggcaccccctgagtccagtgcaggctggcctcagctctggccctggggaactcctccatctgtgctggaggaacaaggcgtcatgcctgggacccgccgcccgcgtccactggcgtcttaccgtggccctgtctctgcccctccccaccccctcctaactcctgggcctggggtcactctccacatccttccctcaaccctgtccctctctgtttctctccttacccatatctaccgttctccccgcctgcatctccccatctcccttgctattgccgagtctctggctttccctctctgccttgctgtgtatttctgtgtcccacctgccgtatcttcccacacctctttgtctctgtgactcctctctgttcgtctctctgccttggtttctgtgtggccttcct

SEQ ID NO: 22112 - DNA, 2300 bp, Homo sapien
tcaggactcatgaaacacgtcagaacctattttttctcccataatatcccctttttctctctccccgccaccagttccccacctccactggcaaggtcctgttctgtctttttttttgagacagagtctggctctgtcgcccaggctacagtgcagttgcgctatcttggctcactgcaacctctacctcccaggttcaaacaattctcctgcctcagcctcccgagtagctgggattacaggtgcccggcaccgtggctggctaatttttgtatttttagtagagatggggtttcaccatcttgaccaggctggtcttgaactcctgagctcatgatctacccgcctctgcctcccaaagtgctgggattacaggcatgagccattgcaccccaccggccctgttctttttcttgggcatgtaaattaacctctactgaccccatctagcacataagaatgtatctactggctgggcgaggtggctcacgcctgtaatcccaacactttgggaggccaaggcaggcagattgcttgagctcaggagttcgagaccagcctggccaacatggtgaaatcccatctctaccaaaaatataaaaacttagctgggcatggtggcgggtgtctgtggtcccagctacttgggaggctgaggtgggaggattgcttgagccctgggggcggaggttgcagtgagccgagattgcaccactgcattccagcctgggcaacagagtgagactccgtctcaggagaaaaaaaaaaaaaaagcgcatctagcacatatatagtgcagcagggttcctggaagcatctggcgaatttgttattcgtcagcattggttgcaagggacagagatcctctcgggccaccttcagatagaggcacactgtaaggagttgaggagctgaagctgctttaggtgttggcttctctctccctctctggggctctcatgagctccatgctctctctctcactccatccctgtctctttctcagcttcgccctcttcttttgctccaaatgctttcttaccttctactaagttcttctctggcttctgttttctcatggtccctgatcgacatcagctgtggcctgggtcggccttagggtctctgtgatttctctctttctctctctctgttaaaacaaacgtggcaaaattcaccattttaaagcgtagaatgtagcagcatttagtacattcacggggccgtgcaaccgcaccacttctgtctagatctgaaatatttccatcactccaaaaggaaaactacctgccaccgggaagtacaggaatcctcgctttttagtcttacttgggagaaagaattctgccaagagactgatttagccaacaaagagaatttactgaaggcaaatagagaacagagagtttacctagagagagacagtacactctgaaggatgaggagagcaggctgctgaaagaacgtgagccagcagcacaccgagagttttgtgttgtgtttctaatatgatgtcgcactcttttgaagttcttgcttctgtcttttttttttttttgagacagtttcgctcttgccacccaggctggagtgcagtggtgcgatctcagctcactgcaatcttcacctcccaggttcaagcgattctcttgcctcagcctcccaagtagttgggattacaggcatgcaccaccaggtctggctaatttttgtatttttagtagagatggagtttcaccatgttggccaggctggtttcaaactcctgactgcaggtgatcctcctgcctcccaaagtgctgggattacagcctgagccaccgtgcccagccagttctctgctttttgtgaccacaggataactgcaacctgattcagccccattcctgtgaccccaggctggccctgcccatctgggacaccagctgactccacctcaccccccacaacctctggctgaccccgcccatccccaggaccccaggccgaccccagtccagcctccagtcatcctgaccccggctgacccccgcagggaggaggcgaaggccaagatgggcttgctgcgggagcgcgcggagaaagaggaggcccagagcgagatggaggcgcaggtcctgcagcggcagatcttgcacctggagcagctgcaccacttcctcaagctcaagaacaacgaccggcagccggatcccgatgtcctggagaagcgtgaaaagcagggtgaggctggggctgctgcctttgcatctcaagggcctggccgcccctggggcacctgcagcacaccttcgtgcccc

SEQ ID NO: 22113 - DNA, 2300 bp, Homo sapien
gcttcctcccacaggaaaccgcaggcttcgggcacacccagcctgcagggagaggcgcccactgcccgcccgcccggggaggcccacgtgggcagcagccgccgccgcggagggggcgtgccttacagagcgagtgggtgtaaccagagggggcgtggccagaaaccggggggcggtatggagtgcccgaggtctcacccacttccgccctccagcgcgcggacgtggtaggcggccaagcgtttttggctgcttcccgggaagccgttggtcgcgcttgcgtagtgaaccgctgaggctgtgttgagcgctccttctccgcgcaactcccggcttcgacaccgccttccttcctatgaatccttaatttaacgtggtcacagtcagcttaagaccggcacctctcgggctccgtcttgtaggacctcggcctggcttcgagggcttccatacaggtcaccgcaggctctttcaactcccgccgcttccaggcccgcggtactagtgagacctcagcctcgacctccccaggaccatttcgacctcccgcaggccttcaaggcctgagcgcctcccgattagcccgcccttcaccgcccttccaccgggcccctcgtaaggccttccaaacgcgaccctcgaagcccgccccttacggggaagcccctccgctcgctgtctgcgaagccccgtcctgtactggtgtccgtgcccctcccctcgccggccccgaagccccgcccctcgaagttcttcccactcactctcctcacaggtctcagccccgcccatcacagctccctacggcacgcccctctcaggcctcacagccgtgcacctctcagggctccgcagcaccgctccacaggccctcccggctccgcccctttcaggacctcgccgcccatcagttttgtttgtttgtttgtttgttttttgagacggagtctcgctctgtcgcccaggctggagtgcagtggcgggatctcggctcactgcaacctccgcctcccgggttcaagcgattctcctgccccagcctcctgagtagctgggattacaggcacgagccgccatgtccggctaattttttgtacttttagtagagacggggtttcaccatgttggccaggttggtctcgaactcgtgacctcaagtgatgcgcccgcctcggcctcccaaaatgctgggattgcaggcgtgagccaccgcgcctggccttgcccatcagttctcagtccgtgggaaccctgcaggtctacgcctcgcatccttctccgcccctcctcccatagtttctcccgcggcctcagtccctccctggccgctgtcctcagtcctcattggtcccttatctccccagtaaccagaccacaacactgaacttggagcaccaagaacaggtcaggcccgtcggcaggtagggcccaggactcccccgaccctgcccaacccccactacagcaggccggggtttccccctctcctgcgaccaaacagcctggcctcagatatcctgagagcccaggaggcctgtcccctgccaaacccgcgccagaatcggagcctagacgcaagacccagagtgtgagaggtgggagggctggagaggtgtgggagaggcctgagagaggtccccctccaacccctcttggaggaatgaggccagcgtggttctagggtcaccccctttcaattcccagtccctcgcagttcattgtccaccctctctgggccctggcccgcctgctgtctgaagggtcttatatgtccatccctacaggagccccaccctgtttggccaggatgcctttgggacgcttggcagggagcgcccgctccgaggagggaagcgaggcatttctggagggaatgggtaattcattcattctttatatcattcacccattcttttccagcccccagctttcccaagttccaggtcctgtagggagggagggagagtgtctgtccaggagcgccctctggtgggaacagacatgcgccctaagggaggcggggcgggcaccacggtgggtgggccaagcctgggcagtggggcaggctggagacttcaggcagcagaagtttgagtggggcccagaactccctgtaggaattgccaaggggagaaggaaggaagggtgtttctacagagatgacagaatgtggctagagtaggctttctcaaccttggtactgttgactcttggggtgggataattctttgttgtgggggcagtcctgtgtgtcgtaggatgccaagcagtgtccatggcttctactcactggataccag

SEQ ID NO: 22114 - DNA, 2300 bp, Homo sapien
cctgattcaggatctctaggagttggggaaggggcaaattcttgggtccattgggtctcaaggctaaagttgggaatccaaaatgagggtccctgggggagaataagtagtctcaaacttaagtgcctgagagacagaaactggggtccgcactcagatccctaaggaagttgcaaagtctgggtcactgaaggaaaaattaggggctggggagacatacgttcctcttggggagcaggaaaagagggctccactttcttgagaggactagggggagccaggggctaggaagatggaaacttgagccggggaggtgaaaaacacgagtctaggactcagaatcaagttccctgagtgggatcggcgccaggcttgggtaccctggggatattaggggggtccccgcactatggctatgtagaaggggaagaatcaaaggatctgagggtggcggcgggatctccccatcctgggcctccgagattatgagctgagctgagcgtacgcaggccgcttcctcccacaggaaaccgcaggcttcgggcacacccagcctgcagggagaggcgcccactgcccgcccgcccggggaggcccacgtgggcagcagccgccgccgcggagggggcgtgccttacagagcgagtgggtgtaaccagagggggcgtggccagaaaccggggggcggtatggagtgcccgaggtctcacccacttccgccctccagcgcgcggacgtggtaggcggccaagcgtttttggctgcttcccgggaagccgttggtcgcgcttgcgtagtgaaccgctgaggctgtgttgagcgctccttctccgcgcaactcccggcttcgacaccgccttccttcctatgaatccttaatttaacgtggtcacagtcagcttaagaccggcacctctcgggctccgtcttgtaggacctcggcctggcttcgagggcttccatacaggtcaccgcaggctctttcaactcccgccgcttccaggcccgcggtactagtgagacctcagcctcgacctccccaggaccatttcgacctcccgcaggccttcaaggcctgagcgcctcccgattagcccgcccttcaccgcccttccaccgggcccctcgtaaggccttccaaacgcgaccctcgaagcccgccccttacggggaagcccctccgctcgctgtctgcgaagccccgtcctgtactggtgtccgtgcccctcccctcgccggccccgaagccccgcccctcgaagttcttcccactcactctcctcacaggtctcagccccgcccatcacagctccctacggcacgcccctctcaggcctcacagccgtgcacctctcagggctccgcagcaccgctccacaggccctcccggctccgcccctttcaggacctcgccgcccatcagttttgtttgtttgtttgtttgttttttgagacggagtctcgctctgtcgcccaggctggagtgcagtggcgggatctcggctcactgcaacctccgcctcccgggttcaagcgattctcctgccccagcctcctgagtagctgggattacaggcacgagccgccatgtccggctaattttttgtacttttagtagagacggggtttcaccatgttggccaggttggtctcgaactcgtgacctcaagtgatgcgcccgcctcggcctcccaaaatgctgggattgcaggcgtgagccaccgcgcctggccttgcccatcagttctcagtccgtgggaaccctgcaggtctacgcctcgcatccttctccgcccctcctcccatagtttctcccgcggcctcagtccctccctggccgctgtcctcagtcctcattggtcccttatctccccagtaaccagaccacaacactgaacttggagcaccaagaacaggtcaggcccgtcggcaggtagggcccaggactcccccgaccctgcccaacccccactacagcaggccggggtttccccctctcctgcgaccaaacagcctggcctcagatatcctgagagcccaggaggcctgtcccctgccaaacccgcgccagaatcggagcctagacgcaagacccagagtgtgagaggtgggagggctggagaggtgtgggagaggcctgagagaggtccccctccaacccctcttggaggaatgaggccagcgtggttctagggtcaccccctttcaattcccagtccctcgcagttcattgtccaccctctctgggccctggcccgcctgctgtctgaagggtcttatatgtccatccctacaggagc

SEQ ID NO: 22115 - DNA, 2300 bp, Homo sapien
ctcaggaggctgagacaggagaattgcttgaacccgggaggcggaggttgcagtaagctgaaatcacgctactgcactccatcctgggtgacagagcaagactccatcttaaagaaaaaaaaaaataaaagaagaaaagaaaaataaatacaataataaatcaaacagagtgatggagataatgacagagtgcagggaagactacttgaaacaggaaaatcagggaaggcctcttggaggaggtaacatttgagctgaagacaggagtcatttgaacgctggggttggggagtggtgggggggcgtcggggggagaggaagtgcaaaagctcttaaagcttttgagaacaagctcaggttgtttagggagcagacagaagggccagtgtggctggagcacagggagacagagggagtggtgagaagggaaatcaaagggtgcccttgaagactaggggaggggcttggatttcattctaagtgcagtggaaagccattaggttttaacagagtgtagtaccaaagatttttattttttttttgagatggagtcttgctctgtcatccaggctggagtgcagtggcatgatctcagctcactgcaacctccacctcccggttcaagcgattctcctgcctcagcctcctgagtagctgggattacaggtgcccgccaccacgcccagccaatttttgtatttttagtagagacgggggtttctccatgttggccaggctggcctcgaactcctgacctccagtgatctgcctgccttggcctcccaaaatgatgggattacaggcgtaagacactgtgcctggccccaaaggtttactgttaactattattattaattttggggatattaaattagggtcggggtgatgactactatgtacacgagtctcttgggaggggaccaggtgcccagaactctgataaattgagagcaggggaattcaaatcctggatccagggaagggaactggatgatgggatgtctgggtatctgatgggccagagctgggtttgggatagctgttggtgattcgggctccctgagggggtgagggatggacagttcagtgcttggctgggtaccccaagacctggaagctggaataccagtatagcacagactctagagccacactggttggactcaaaatccaagctgttttactcaatggctgtgtaatttttggcaagttactaataacttctctatgcctcagtctcttcatctgaaaaatagagataatagtaaatacattatagggcagttcttagggtagtgctagtcatatcaggcattggggctctgagtggagtcagtactgggggaccctgattcaggatctctaggagttggggaaggggcaaattcttgggtccattgggtctcaaggctaaagttgggaatccaaaatgagggtccctgggggagaataagtagtctcaaacttaagtgcctgagagacagaaactggggtccgcactcagatccctaaggaagttgcaaagtctgggtcactgaaggaaaaattaggggctggggagacatacgttcctcttggggagcaggaaaagagggctccactttcttgagaggactagggggagccaggggctaggaagatggaaacttgagccggggaggtgaaaaacacgagtctaggactcagaatcaagttccctgagtgggatcggcgccaggcttgggtaccctggggatattaggggggtccccgcactatggctatgtagaaggggaagaatcaaaggatctgagggtggcggcgggatctccccatcctgggcctccgagattatgagctgagctgagcgtacgcaggccgcttcctcccacaggaaaccgcaggcttcgggcacacccagcctgcagggagaggcgcccactgcccgcccgcccggggaggcccacgtgggcagcagccgccgccgcggagggggcgtgccttacagagcgagtgggtgtaaccagagggggcgtggccagaaaccggggggcggtatggagtgcccgaggtctcacccacttccgccctccagcgcgcggacgtggtaggcggccaagcgtttttggctgcttcccgggaagccgttggtcgcgcttgcgtagtgaaccgctgaggctgtgttgagcgctccttctccgcgcaactcccggcttcgacaccgccttccttcctatgaatccttaatttaacgtggtcacagtcagcttaagaccggcacctctcgggctccgtcttgtaggacctcggcctggcttcga

SEQ ID NO: 22116 - DNA, 2300 bp, Homo sapien
cactggaggtcaggagttcgaggccagcctggccaacatggagaaacccccgtctctactaaaaatacaaaaattggctgggcgtggtggcgggcacctgtaatcccagctactcaggaggctgaggcaggagaatcgcttgaaccgggaggtggaggttgcagtgagctgagatcatgccactgcactccagcctggatgacagagcaagactccatctcaaaaaaaaaataaaaatctttggtactacactctgttaaaacctaatggctttccactgcacttagaatgaaatccaagcccctcccctagtcttcaagggcaccctttgatttcccttctcaccactccctctgtctccctgtgctccagccacactggcccttctgtctgctccctaaacaacctgagcttgttctcaaaagctttaagagcttttgcacttcctctccccccgacgcccccccaccactccccaaccccagcgttcaaatgactcctgtcttcagctcaaatgttacctcctccaagaggccttccctgattttcctgtttcaagtagtcttccctgcactctgtcattatctccatcactctgtttgatttattattgtatttatttttcttttcttcttttatttttttttttctttaagatggagtcttgctctgtcacccaggatggagtgcagtagcgtgatttcagcttactgcaacctccgcctcccgggttcaagcaattctcctgtctcagcctcctgagtagctgggttacaggcgcccactaccatgcctggctaatttttgtatttttagtagagacagggtttcaccatgttggccaggctggtcttgaactctcgacctcaggtgatcctccagccttggcctcccaaagtgctgagattacaggcatgagccaccacgtccagcctattgtatttatttttcaagtcacttatccttatctgagatttatcttcatcattgatgttttctcttgtctgtcttcctctactagaatacaagctccataataccagcagggctcatgtctgttttcattattaactcccagatcagagtacatgttcaataaatgtttgatgaaggaaggaacaggttaggtgtgtgagtgtgccagtattaccttattcattcagcataagtatcagaattattattatcagtattagtattttgtcagcattattatactctcaacatagactaagatactggagcccaggtgggtgaaataattggctcaaggtcactgaaccaggaaatgatggcgctgggattcttagcttccgcttcctccccgcttccagagtttcacaaggtttttttttttgtttgtttgttttttgttttgttttgttttttttttgcgacagaatctcactttgtcccccaggttggaaggcagtggtgcaaactcaactcactgcagcctccacctctcgcgttcaagcgattctcatggctcagcctcccaagtagctgggattacagtcgcccgccaccacgcccggctaatttttgtatttttgatagagacgggtttccaccatgttggccaggctggtctcgaactcctgacctcagatgatctgcccgtctcggcctcccaaagtgctgggattacaggcgtgagccacaacgccctgccgagtttcacaaatttcatctcccatcctctgaccccccaccacggggccaacttcaccagcccaatctcaagtccatgccacagaaatctggcctcttttcccagactcctatccagctccaagctccatcagggaaagcagacatccggccccagggcaagacctcaaaactcaagggtcctgagaatcgggccctcccacccctgacgcttgccccccccaagaaccccattccaagagtttctcatctcaaccctgggagggagccccagatgatgtctgtctggagggattgggtgggggcccaaagaaagaggaaccggagtgcctgggccctcccactggcagccgacctcagctgggtgcggtgagggtgggtttataaaagggtcagtatatattgagaggaggagagaaagagaaacgggagcaagagagaaggaggcccagacagtgagggcaggagggagagaagagacgcagaaggagagcgagcgagagagaaagggttctggattggaggggagagcaagggagggaggaaggcggtgagagaggcgggggcctcgggagggtgaaaggagggaggagaagggcggggcacggaggcccgagcgagggaca

SEQ ID NO: 22117 - DNA, 2300 bp, Homo sapien
gaagccaagatgggcagatcacttgaggccaggagttcgagaccagcctggccaacatggcaataccctgtctctactaaaaatacaaaaattagccaggcaagagtcccagcctctcgggggctgaggaaggaggatcacttgagtctaggaggcagaggttgcagtgagctgagattgtgccactgcactccagtctgggcaacagagtgagaccctgtctcacaaaaataaataaagaaaaataaatgaataataatcctcaaaatcctcaataatgacaatgatgatgatggtggcaataagacctcaggttctagagtgagaccaagactaggatgaggtgaatatggcacccaagggtgcaaaatttaacggggcactcactcttagggtcaagcgagtgccctacttgcctaaccctagtcctgggccagctctggagtcagaccactttggttcaaatctaagccactatgttgtggccttgggtaagtcactttccttccctatgcttccattatctcatctgtaaaatggggatgatggtggtatctctcttactgatgattcaacaatacatgaaaaatgtctggcacagtgccatggagtcagagctcaaattgtgtgataataattatgattacagcgttgtgactttataggtacaattattatcaggtagtagaaatagtaatgatgaggatgattactatacccatcttaaagagggaaaaaccatgccccagagagtgcctgttcaagccctcagaacaagccagagttgggaatggatgctgcgtctgcatctcggagacctggctcctgcattccagctcatctcccgcccactagggaaacacgaagggacccgggaactacaactcccaggaggcgccagggcagctctctgcagcaactagggccctgccgccgcgaagcctgctgggagccgtagtccccaggctcttgggcctgggacaggcggtacctgtattaggaggcggagcagctgctccttggagaagggaatgaagcgctcgcggtactgctgggcccagtcgcggggctccctggggttccacatcttgcgatactcccccattttggctgccagcgatgagagggcccgggggggcccgaggagcgcgggcaacagtggccatactcggaccctggacccccagaccccccgggtcacatgcagcatggctagaccctttccccggagcctaaacagaggaaaatgggcaggggtcaaaggccatctagaggaaaagcgccctctccacctccacgtcccaccctccagaagccgtctctaccccaggcagggcgcagagcccatccgctcgcctcaaagcccctgttgcctgtccccttcccacactgctcagttggcctgggtcccagacaggggtcagaggtcttaggttctggggcgtttttcaggcccagagaccctgtagtggtacaacgtttctttggggtctagacagcgaggtagatcttaggagagcaggaaatgctcgtaaaggttacctagggggtgcagggccgccctccctggccatgcaatcccccgatttctccctcaccttagccaaagctcgactgtcattgagcctcctgcgcatgtgcaggagggcgtcctgggctcccgaggttcggcttcacccagcagtaaaacgcatgcgcaaagcttcggtcaatgcgggctgtccatttctcaccgccgactccctacatcaactacgcatgcgttgcctgcctttctccaccgccggcctcgtttgggcgcgacgcatgcgccgcaggagtgtctccttgtcagcttgctacaaagggaaggggcggtgtggacgcgagactccctagagggatggggcggggtagggctcccgcgcgcagtccgccaacggcgcgcagtccaacgttcgccgaggccacgccccggctcgtgtcagctcctgagtaggcggaaagagggagggggcgggacttgggcgcagccaatcagctgtggaggagcgaaaaggcgggaaaaagcggaaccaaaagaaggctgaggtggcgctagggaccaggaggggtgggggtggcgaaaggaagggcgggccctcaggtgacgcagattggccctccagagaaggggcggccccttctcaggtgccgtcacccccaaacctcagcactgccattccaggtccttaaaggggagaccgcgattctaagaaggtagcccagtgccggggcgtggcctcattctgaggttccccacaaatccgaggtcccgactc

SEQ ID NO: 22118 - DNA, 2300 bp, Homo sapien
gtctgaccccttccttgtcctcccatctcccgcactgtgtctgggagttgagagctcctggctcctgtcacccaggggcacagtcgggccatgggagggcctcaccccttcgaagacccgcgtgatggtcttgggccttctcagaaactgcacggcttcgctgttggccagctcctggaggcttttggggatgtgcatggcagctgttttcctttggggccactgggaggtgggagccagggtgctgggcgctgcctgctgggcactgccgtccgggggcttcaggccagccctgggcttggctgctgtgggatgacacagatgggggatgccagtcaggggcacggggtggaagggctgttgggggccccaggattgggggacatggggtggggatggggggggtccccggaatggagttgtgtggggtgaggggactgctgagcctcttaggagtcagggtgtggggtgaatgggctgtcaggggccccagaagtcggggacgtaggatgggggtgcaggtgggtcccagggaatgaggttgtgtgtgctgagggggcttctgtgggccccaggagtggggggcataggatgggggtgctgggggtcccaggaatggggttgtgtggtgagggggctactaggggtcccagaagtgggaggcataggatgggggttctggggggtcccaggaaaggtgttgtgtggagagggctgctaggggtccctgaagtgggggacataggatgcgggtgctgggggttcccaggaatggggttgtgtgtggtgagggagctttctgggggtcccaggagaggggggcataggatggggatactaggggtcccaggcaaggtgtcgtgtggggagggctgccaggggtcacagaggtggaggtgcaggatgagagagtcgctaagggtcccctgggttgaggtgtgggttaagggggtctatggaggattccagagaggtgagggcctggggtgagggtgattctgggggtcccaggagtgggggacataagtgaaggggctgcttcaggttccagaagtcaggaatgtgggctgagggggttgttgggcgagagggctgtcagggatcccagaggtggagtgcaggggagggctgggatatttggggaccacgtcttgtgacccaggagctgaagggcctgcagagggactgggtccttctgtgagaggacacaggtgggactttctggggactagggggtgcggccattgagatcagagcccctgggaggtctgaaaccgaataatccctttcaggtttgggggtgacagcacccttcgtggagaacccaggtatctcagggcatatttcaggctgtccttgtcacttggggccatttcccagaataagggcctccctttcgaattcagctccattttcacggaagtgcacctcctcaagctgggagtcgggacctcggatttgtggggaacctcagaatgaggccacgccccggcactgggctaccttcttagaatcgcggtctcccctttaaggacctggaatggcagtgctgaggtttgggggtgacggcacctgagaaggggccgccccttctctggagggccaatctgcgtcacctgagggcccgcccttcctttcgccacccccacccctcctggtccctagcgccacctcagccttcttttggttccgctttttcccgccttttcgctcctccacagctgattggctgcgcccaagtcccgccccctccctctttccgcctactcaggagctgacacgagccggggcgtggcctcggcgaacgttggactgcgcgccgttggcggactgcgcgcgggagccctaccccgccccatccctctagggagtctcgcgtccacaccgccccttccctttgtagcaagctgacaaggagacactcctgcggcgcatgcgtcgcgcccaaacgaggccggcggtggagaaaggcaggcaacgcatgcgtagttgatgtagggagtcggcggtgagaaatggacagcccgcattgaccgaagctttgcgcatgcgttttactgctgggtgaagccgaacctcgggagcccaggacgccctcctgcacatgcgcaggaggctcaatgacagtcgagctttggctaaggtgagggagaaatcgggggattgcatggccagggagggcggccctgcaccccctaggtaacctttacgagcatttcctgctctcctaagatctacctcgctgtctagaccccaaagaaacgttgtaccactacagggtctctgggcctgaaaaacgc

SEQ ID NO: 22119 - DNA, 2300 bp, Homo sapien
tcatagatgcaggagtccagaccacaggctgttccccgggggtcccacacccagatgcccagcattcccctcctgctagagggctgggcccggcacttttataaagccacccgtggggctctggggtagagcgtggggcaggacaccggggcctctgagggtggaagagggtgtgtgtgtgtgggcagggcagaaactctggagcaggggggaagccagggccaggggctcctgaggtagtttgggtcagagttttggccttgagcctcctgggtgaggctcctgtttccttcatcctcaaggtctgggagaacagggtgaggtgcacattcctgaaaaagaagagaatcagggcctaaatctgtgggtcgtaaagggagaaactgtagatctagattcttaaggttaggatgtttgatccataagatggtgggggtgggaccctaagttccaaggaacagcgtcctaggagggaaaagggctggggccctgaactcctgggtctgagggaggaggggctggggccctggacccctgggtctgagggaggaggggctggggccctggacccctgggtctgagggaggaggggctggggccctggacccctgggtctgagggaggaggggctggggatctggactcctgggtctgagggaggaggtgctgggggtctggactcctgggtctgagggaggaagggctgggggcctggactcctggatctgggggaggagggtctgggggcctggagtcctgggtctgagggaggaggctgggggcctggactcctgggtctgagggaggaggctgggggcctggactcctgggtctgagcgaggaggagctgggcctggactcctggatctgagggaggaggggctgggggtctggacttctgggtctgagggaggagaggctgggggtctggactcctgggtctgagggaggaggggctggggacccagacttctgggtttgacgaacgggctggggccttgagtcctgggtctaggggaggaagtaggtggggtatctttcttgtcttctgggggattggagttagagtgcctgaaagctgcaaaagctagcagctgagcctccgggtccctgcaggatttttcaagctcagagggcagtctctacatccctgcaagggctgaggctggtgtactggactgcgtctcttccagagacacagactgcctgggcgaaccggtgctggatttggcactttccgaaccctgcgaccctcccaagttcctatggggcagctttgggggtgcgtttagcgccgccacggcaaagcaggaggtgggcgatagggggcgccggggatccaggccccgccctcgggggcggagcctctcctcccggactcctccccctctcgctctcctccctcttcccggctccagctccgccgccagctccagcctttgctccccctcccaaagtcccctccccggagcggagcgcacctagggtccctcttccgtccccccagcccagctacccgttcagaccagcagcctcggggggcacccccccgccagcctgcctccctcccgctcagccctgccagggttccccagccatgaatctcttccgattcctgggagacctctcccacctcctcgccatcatcttgctactgctcaaaatctggaagtcccgctcgtgcgccggtgagaggcccaccagggctggcgaaggagagagattgcgggcgggggttgggggacgtcgcaggactcaggaagggtttgggggcactaggggcacaggttccacccccactgcttgctggggatctctcttctaggttctgggtctccaggggatcagctcccttccccagactggcgggggtgcatacagtttcatgtgaatggctttaggcccccaattcagccacccccagccccaatctgggcagcccgagggttcatggaccgggaacagggaaccatggcaggcggggaggtggctgtgagttggtgacgtggaccgtggcggccaggaagggaacgggagggaggtgaccggatccggggcctgaggtcagggaaggtcctccctaggcctcacctcaggtccagactgcgggaggaccctgaggggccaggggtagccatgaggcctagtctgggacggagcctcgggctggagtagcttcgggggcctgggctgccccctggctgtggtccgtgggaaagggccctgctcaggcggggcgggctggggaggcctccggggacagctgcactccagagctgcctccaggctggtcccgggcg

SEQ ID NO: 22120 - DNA, 2300 bp, Homo sapien
gtccccgtctgccactgccgggagacccacagccccccctcctggcctccctggggaccccttctcctgccaggcttggggagggggccgccccccacccctagctaccagcctctgccttcctcctgggacaagggagtgaggggctgaaaataaaaagggaggaagaagtcaggctggggacaggcaggcagggactcagaacccggtatggagacaccagcttcagagctagactccagggctgggggttgctgccctctgcccccgccctgccttgaggctctggaaacaggaggcctttccctgacttcagtgttcgccacactaagacccaagctgtggcttttattgccccagaaggccaggcctgaaaaccaggtctcgaccctggtcccaggagtcccaccccccagcccctcctccctcagacccaggagtccccttctctactgggacccaggaatttggggaccgcctccaagtcggagtctcttttaaggactcagtcatcccgactctcccccgtacaagccaccctcagggacccaagactcgtggatgtcacccttgggcaccccgtccttccagccctctgaagaaatcaacacgcctgcaccccttcttttattgagggaccctggcctccatcatctgtgggtaccccatcatccggaagggaagccacgtctgtcccctcatagatgcaggagtccagaccacaggctgttccccgggggtcccacacccagatgcccagcattcccctcctgctagagggctgggcccggcacttttataaagccacccgtggggctctggggtagagcgtggggcaggacaccggggcctctgagggtggaagagggtgtgtgtgtgtgggcagggcagaaactctggagcaggggggaagccagggccaggggctcctgaggtagtttgggtcagagttttggccttgagcctcctgggtgaggctcctgtttccttcatcctcaaggtctgggagaacagggtgaggtgcacattcctgaaaaagaagagaatcagggcctaaatctgtgggtcgtaaagggagaaactgtagatctagattcttaaggttaggatgtttgatccataagatggtgggggtgggaccctaagttccaaggaacagcgtcctaggagggaaaagggctggggccctgaactcctgggtctgagggaggaggggctggggccctggacccctgggtctgagggaggaggggctggggccctggacccctgggtctgagggaggaggggctggggccctggacccctgggtctgagggaggaggggctggggatctggactcctgggtctgagggaggaggtgctgggggtctggactcctgggtctgagggaggaagggctgggggcctggactcctggatctgggggaggagggtctgggggcctggagtcctgggtctgagggaggaggctgggggcctggactcctgggtctgagggaggaggctgggggcctggactcctgggtctgagcgaggaggagctgggcctggactcctggatctgagggaggaggggctgggggtctggacttctgggtctgagggaggagaggctgggggtctggactcctgggtctgagggaggaggggctggggacccagacttctgggtttgacgaacgggctggggccttgagtcctgggtctaggggaggaagtaggtggggtatctttcttgtcttctgggggattggagttagagtgcctgaaagctgcaaaagctagcagctgagcctccgggtccctgcaggatttttcaagctcagagggcagtctctacatccctgcaagggctgaggctggtgtactggactgcgtctcttccagagacacagactgcctgggcgaaccggtgctggatttggcactttccgaaccctgcgaccctcccaagttcctatggggcagctttgggggtgcgtttagcgccgccacggcaaagcaggaggtgggcgatagggggcgccggggatccaggccccgccctcgggggcggagcctctcctcccggactcctccccctctcgctctcctccctcttcccggctccagctccgccgccagctccagcctttgctccccctcccaaagtcccctccccggagcggagcgcacctagggtccctcttccgtccccccagcccagctacccgttcagaccagcagcctcggggggcacccccccgccagcctgcctccctcccgctcagccctgccagggttccccagccatgaa

SEQ ID NO: 22121 - DNA, 2300 bp, Homo sapien
cacacacacaccctcttccaccctcagaggccccggtgtcctgccccacgctctaccccagagccccacgggtggctttataaaagtgccgggcccagccctctagcaggaggggaatgctgggcatctgggtgtgggacccccggggaacagcctgtggtctggactcctgcatctatgaggggacagacgtggcttcccttccggatgatggggtacccacagatgatggaggccagggtccctcaataaaagaaggggtgcaggcgtgttgatttcttcagagggctggaaggacggggtgcccaagggtgacatccacgagtcttgggtccctgagggtggcttgtacgggggagagtcgggatgactgagtccttaaaagagactccgacttggaggcggtccccaaattcctgggtcccagtagagaaggggactcctgggtctgagggaggaggggctggggggtgggactcctgggaccagggtcgagacctggttttcaggcctggccttctggggcaataaaagccacagcttgggtcttagtgtggcgaacactgaagtcagggaaaggcctcctgtttccagagcctcaaggcagggcgggggcagagggcagcaacccccagccctggagtctagctctgaagctggtgtctccataccgggttctgagtccctgcctgcctgtccccagcctgacttcttcctccctttttattttcagcccctcactcccttgtcccaggaggaaggcagaggctggtagctaggggtggggggcggccccctccccaagcctggcaggagaaggggtccccagggaggccaggagggggggctgtgggtctcccggcagtggcagacggggactgaatgttaatcgcatcccgagtgagtgtgtgtgtgcgagaacacagcgagtgtgtgagtccctcccgctccagctcctccaagccgcggccgccgccgccaccctcgcccgcagcctcccgcagcctccctcggccaccggtgcctgctgggggtgttgcctgggtaggtcggcccggcccccaggggtctctcgagcgtctgccatctgcccggtgaggatctgtgtgtccgggtgtctggggctggctggtggagggggggtgtgtctgtaagcgctgcggcggcggagggagggaggggtctgtctgtctgtaccgaccctgagctgcctgcctgggtgtcgtggggctcccgctccttccccccggcccccccaaacccagatggatggtgtgtacctgggttctgtgcctcctgcctgcgtccggccaggcgtctgggcgtccccggctgcctgtgtcctcctgtctgtccaaacagcccctatcagcagtggcagcctggcccccattagaccccccactctgtgtgtgtgtgtctgtgtgtgtgtccctcctcaagctctgggggtgttgagggggaatcccagggaagtgagatcgtgcgtgtgtgcgtgagtgtatgtgtgtttctgcctgtgtttgagagtgggggagtcaagggggggtctagaggtggccaagcgaggaaggggcaagcagttccccaagcaggcaatctcccgctcctcacacgcacacaccagccactagcttcagaggtgacccagacagacagatagacacagacgctggaagggggggtgggggggctgagggcacaaagcgggggtgcgagtgagccagggagaggcgggactggacacatggaaaggggggaggagccggggctgaagcggcagaggggggcaccccgggtgggcggaggggggatccccacggggtcggggcggcaagaggacaccccgacagcctctgcaatgtccggggcccaacttccagagcaacatgtgtagccacgtcctcgcctagtccaggtggccgcaaccttgggggagagacagggcaggacaggaccaaggaagaggaaggagagacggagccagggacagacaggaggtccgggctgccgctgctgccgccaccaccactgccgccgccccggggcctgccccccgacatcggctctctgagccctcctcggaatcttggggtcgctggacgccgggttccggtcctggcccccccgccatccccccaacagaacagggtcatgaaaaggtaaggcggggacaggggatgcagggatggtggtgggaatgtggacccccaaatctaggacagaggaagttggcaagaagcctcgtggagggagggggtttgaacggtgggcaggggtcttgacccccacctagctcc

SEQ ID NO: 22122 - DNA, 2300 bp, Homo sapien
gggacctcccgccgcccgcgcccacctcgcgctcgctcgaggacctcagctcgtgccctcgcgccgcccctgcgcgcaggcttaccgggccctcccgccacgctcgcaggtgtccgcacgccgcgcactgggggccgccgctgcccacagcttcccaccggagacaccggggcggggacctgggcacccgcaggggctcggcgcacttctctagcctcgagtccgaggtatgacgcggccccgggggccccaccgcccccttggtcagcgcaggccacggcccgagggggcgcccgcagtggacaggacccgcgtgggttgggaaggaaagcagtggaactggccggaccccgcctggagcagcgtcctgcgccccctggttctggaggaaccgcaagccggagaggatttggtccctcaactatcacccagcctgagaacgagggggcgggggccttggagcccaccggacttttttttaaacccgacaagggctttttaacgtcaccagatggggcgggaggtggggggttcacgccactcccgcgtcccacctccacgcccggggccgtggcccccacatcactgtgcagctccccggccccagccgcgcctccggggaagcccgtttttaacctttcatccattgggactcaaaactgtgagacgcgttcgccaaactgtgaccccagaccttggccccgccacacagaaacccctgacccagactgtgacatccgactcctaaaatggtcatccgactccagactgtgacccctgaccccaaactgtgacccgaaccccagactgtgccccgaccagactgtgacccttgacatcaaaccgtgacaccccctcctcctcttccaccctcggtcgcttttccctactctgacctaggacacgtccccaacggaagccccgccttcccttgcaccgcgatgaacccaacctccctgaagccaaaacttcccaccctgccgcacctccggaccaccccacttgccaccaagcacatcctctccaaatccaacccttatttgcgacccttcagtgatgacccagcagacctccaaaaagcctcctctgcccagatctccagccgggtctggggctgggttgcggaggggagggtctgggagtccacacttctccaccaacttcccttcccactctcttattccacattgcagtgtttggaataaaccatgtttttatgcctcctcagtccaagcctaagctccgtatctgttagcccccctcaaattctctggaggaaacagaaacacaaaagtcccacaggggaagaggagacagaattagagagagaacagagactctgaaaggaggtgcctggggagacaaagaccaagaaagaggaggtgggaagagaccctgaaaagaaagtcgagagggtactggggcagataagagaccccaagagagtggtgagatagatcccggagacaaaacatattaagatcaaaggtatggttttatttcctatggctataggtaccaaggcttgctacattctcaatatcctgttcatgcaagctaggagagtgtctgacatatcccagccaatccgcattatcttgaatgctgttaatctcaccaatgagaatctatttctaacatttcattatgtcaattagccaaaccgctggtgctgatgggcgataaagagagacgaagcacttgtaatagctgcctccagagggtggactttctgattaagtgctcgctgaccagagctgaaatgtgaatgtctggttaggcaattgactgcccctagagggtagattgaaccgcctaacttacagataatatccatcctgtctacaagaaagcatttttgaaacaaatgaaagccatcacaacagagagaggaaaagaaaccggccttatgggtcctcggggagtagaaactcagtctccttgccagtgaaagagcaaatttgcatatatgaataattaattaactggaaagaacgctctcggaatcaaactggacaatggggaaaacaagcctcccgtagaactacaactcccagaaggccttgccactaccgcgaggaacagcgcccaaagtcacgcgaagatgcagtttctccgtatccgcaggcttctttcgctggcgccattacctgagttctcctccagcgtttccgcaccctctccgattagcggtcccaggagtttccaaggtaaccgcgcagtagggcggatctcattaggcggaaagcgaaacccggaagtgacgctcttaccgggtgtcagcagcgagagggttcgaa

SEQ ID NO: 22123 - DNA, 2300 bp, Homo sapien
ttctgtttgacgtattgttctctagaaggcctggctctgatccagtgacccctctcaccaaagaactcggtttaaccagggctctgtaagaccactcccacccagagacttgtgtggcctggtgtggcctgtgtgtcggattccttcctgtcagctgtgacccatttgacctgtgtccccagaacccagttttttgtttgtttgtttgagacggagtcttggtctgtcgcccaggctggagtgcagtagcacgatcttggctcactgcaacctccgcctcctgggttaaagtgattctctcagctcagtctcccaggtagctgggattacaggcatgtgccaccacaccccgttaatttttgtatttttagtagagacggggtttcaccatgttggccaggctggtctcaaattcttgatctcaagtgatctgtccgccccggcctcccagagtgctgggttgggattacaggcgtgagccaccgcgtccggctcaggacccagttttggctgctggttcccagcaggggactcgggggatatacagtggctgcaccaaattggaggtgtgggttcctccaacacaatttgcttctgcccgttgtcttcctgccagctgggtttggccaggatttctccgtgtgggggctacatgcgaccctctcccctcctccctgactttagaggctggtgctgtgtcgggaggaaggtcagggctcctgagcagcaataaaggaccaggaagaggcctgaggtgtatttgagactctggtcctttggccacagccctatgaggaaacggggtgtggggggagtttgggggtggggaggaatttggcaccagctgcccccaggccgctaggctgggggaggccactgggagtccagtgcaacccaaccttccgcccactgggtgccgccgcgttctgccttctctaagtgtccttccatctggaactcactctggcttagtgaaaggggcctcatccctgacccccaccagcttatgaaggcttcatctcagggaactctggaccccccatttctccctccgtccatctcccctttatcacgtttctttctttcttctctgtgtccccctctttcagagtctcccgtcccccactgccagtctccctgccccctagtcgctgtctcgctcctccgccgctgtctcctgtccagcctgcctgggctgtggcccagccgctctgcctggctggcctccctggctccccctctgcggctctgagctagccccacccccggcccccctccatccagcctctgatccatctgtggactccgaggtcgggtgcccgtcacacggcccctgggaccaaggacagactacagcccctcagcacccacagaggcttcccctcagccctagccgaggagcccccagcggagggcatgggggtgggccgccccaacaggtacgtgcctccatgcaaggcaccgctgagccatcccctcctgctctgctgcgtcgcccccatccacccctgccccagcatccctgtcctcagcttgtccccttcaagaaggccttgtcttcccatcagtgacaggctcagcgccaggagaatccacccccaggttcagtgcctccaactctcaccccatccccattttatgcattttctcactggcttccatcctttcagagaaaccctctcagtctgtctgtctctgtctctgtctctctcccccatctctgtctctcccatctctctctgcctctctctgtcttcacaatttcatctccccatgtcgccatttcttaaaacatttcttttctccttttcgttttcccaattgccctgtccgcctctatcttctctgtccccctccatctaggtctctgtccccccctctctctgggtctctgtccccctctgtctctgagtctctatcctctcaaggtctctgttcccctctctctgggtctctgtcctctctcaaggtctctgtccctttctctctggatcaatgtccctttcctgctgccctctctgggtctctgtccccctctctctcagggtccctgtcctgcttggtccctgtactttttcttggggcaccctctcaacacccctcctcctgcctatctctgcatctctttgtctttctgtagtctctgctttccaacctgctgtccagcccccaccagtaggtggggagtggtggggaacacccctggtttcggaagagtgagagtgttgatttgggagggtgagggtggggcctgggggcggggcttcttggcctcagattagacagtgactttgacacga

SEQ ID NO: 22124 - DNA, 2300 bp, Homo sapien
agaatggcgtgaacccaggaggcggagcttgcagtgagccgagatggcgccactgcactccagcctgggcaactaagcaagactccgtctccaaaaaaaaaaaaaaaaaaaaagtttggggggtgttacttatcttttcatgattgagttgcaagggctctttatatagtctagatacaagttcctcatcaggtatatgatttgcaactacagtatcttctcccattagtgggttgtcttttccctttcttaaaaagcttttttgagacatggtcttgctctgtcgcccaggctagagtgcagtggtacagtcgtaactcactgcagcctcaaactcctgggcttaagcaatcctcccacctcaaccttccaagtaactaggactacaggtttgcattaccacatctggctaattttttaatttttttgtagagcaagccccttgctatgttgtccaggctggtcatgaactcctgggctcaaatgatcctcctgcttcagcctcccaaagcgctaggatacaggtgtgtaccacctcgcctggcctctcttcactttcttgatagtgtctttcggagcacaaaagttttttagttctggccgggtgcagtggctcacgcctgtaatcccagtactttaggaggccaaggcaggaggatcacttgaggtcaggagttcaagaccagcctggccaacatggtgaaaccccatctccactaaaaatacaaaagttagccaggcgtggtggcatgtgcctgtaatcctggctgctcgggaggctgaggcaggagaacccaggagacagagattgcagtgagccaagatcgcgctactgcactccagtctaggtgacaaagtgagagtccatctcaaaaaaaaaaaaaaagttatttagttctgatgcaattcaattgatggattttttccttttgttactttgtgagcctgtttttgaaccacagctgacctcagagccctgaggcatctctccatgctgagaagcagttacaccttacgattatgagcatggaccctggagctggatggctagcattcaaatcccagtttacttacctgtggtcttggggaagttttatttatttattttttttgagacagagtttcactcttgttgtccaggctggagtgcaatggcacgatctcggctcaccgcaacctccacctcccaggttcaagcgattctcctgcctcagcctccctagtagctgggattacaggcatgtgccaccatgcccggctaattttgtatttttagtagagatggggtttctccatgttggtcaggctggtctcgaactcctgacctcaggtgatccgcccgcctcggcctcccaaagtgctgggattacaggcatgaaccaccacacccggcagtcttggggaagttgcttaaactttctgtgcttcagtttcctcatctagaaaatggggataatgatgtctgcctcataggcttgctctgaggttcaaatatgtaaattcatgtaaagtacttacaacaacctccaaattgtataaacagtataattgatagaacacaaattatgaattcagtacatagatttagcactgtataaatgcatgctgtaattattgtggcacttgctataatatcgttattgttatagtattttccgttgttgttgtacaagtatcttctatagtattgttgctgtttatcttccaacttggaaggtgagtatgggccaggtggggtggctcaggcctgtaatcccagcacttgggaggttgaggagggaagatcgcttgaggccaggagtttgagaccagcctgggcaacatagtgaggcccctgtctctataatataaaaattaaattaaaaaaaaaatttaaaaaagaaggtggctggccaggcgcggtggctcacgcctgtaatcccagcactttgggaggccaaagcaggcggatcacgaggtcaggagatcgagaccatcttggccaacatggtgaaaccccatctctacttaaattacaaaaacttagctaggcatggtggcccgtgcctgtaatcccagctacttgggaggctgaggcaggcgaatcacttgaacctgggaggcagaggttgcagtgagctgaggttgcggtgagctgagattgtgccgctgcactccagcctggcgacaaagcacgactccgtctcaaaaaaaaaaagaaaagaaaagaaaaaagttaaaaaaaaaattacccaggagtggtggtgtgcacctgtagtaatcccagctactcaggaggttgagacaggagaatcgcttaa

SEQ ID NO: 22125 - DNA, 2300 bp, Homo sapien
ttctccatctccctttatccctcagaatccccatgtaataaccggatgggattaattagctggctgctctctcagctcagggtgtctggggtaggtagggatgggggcaatggaaacgcagggttggggaaggatgttaagttggaagtgaaggggcagggagggggtttcgtttgaaaggagtatgggagcagggcagcccagcctgggtttccactggggagggcagggcctgggccactcataaaggtcagtgaggggattaggagcctccatgtctaatccgacagcttaactaggtcctggccctgaatccgtctccacctgcccagcccagggacagcaaatgaggacgaggcccagacaccacttcagcccccattacggcttccctctttacaggggtgcctgggttccctattccagccagtcccttgaccacattccgttacaaataatgggacatagaggctggggaaggggaaggggaaggggcctcagaggagggaggagtttaagaagggcaagggtggctgggcacggtggctcacgcctatgggcacggtggctcacgcctagcactttgggaggctgaggcgggtggatcacctgaggtcaggagtttgagaccagcctggccaacatggcgaaaccccgtctctactaaaaatacaaaaattagccgggcatggtggtgggcgcctataatcccagctccttgggaggctgaggtaggagtatcgcgtcaaccttgtgggtggaggttgcagtgagctgagatcatgccagttcattccagactgggcaaaagagcaaaactctgtctcaaaaaaaaaaaaaaaaaaaaaaagggcaagagtatgagaggacaagggggaccgtgacgtgaggggagccagagaggaaaaaaggcctctgagatgggagaaggaatcagagaggtgggaggatgctgaggaaaggggagttgtcttagcaggaggatgcttggggaagggaggagtcttaggaggatgctaagctaaaggaaggagtttggagaaatgagggaggagtctgagcggcagaaggtgccaggaaggccgagcctgtgctttcactaaatttcaccttcccctgttccattccccatgaccgataccaaatagcatagcatttagaaaaaagtaaatcttggccaggcgcggtggctcacgcctgtaaccccagcactttggagggccaaggtgggcggatcatgaggtcaggagttcgagaccagcttggccaacatggtgaaacgcccgtctctattaaaaatacaaaaaatagccaggcatgcaccatcatggtgcaaccctgtaatcccagctactcgggaggctgaggcaggagaattgcttgaacccgggaggcggaggttgcagtgaaccgagatcgcgcaactgcactccagcttgggcgacagagcaagactctgtctcaaaaaaaaaaaaaaaagaaaaaacgaagaagtcttttgtttcaccactccacgactccgaagaggctgagggggatggggagggcatagatggtgataaagaaggagttcggcggtaagaaggggctgagaggaggggaaatacgcggagaagaaatgcaaaagaaaaggaggcctaaagccgctcccggttgcatggcaacctttgcggtcagaagccagcatggcctgctaggaggtgtggcttacggaaacaagccagttctagccccgcctcctagcaacaagactaacaaagtaccgccccctagcaacgtattatcggaggcggggctcggtttacctagactccaagtgtccagggcctttgagcaggcgcagaggtggctgtaccgcgtggctccgcctccgcgcgacacttttccggggcttctcattggagagcaagcctgtcaagtgctttctgttgtttcggaggcggggcctgctgccctgcctgcactccgattggccccgcgggccgtctacctctggccggacatacctacaccggctttttgtacgactgttggccctggagaacgatcctttggtggcgagggcggggaggacgaaagcgcccactgtggattggacagtgtcaaaaagaggggcggtccctactgaaggggcggttgggcgacgaagggaagagtcttttcagcgctgaggactggcgctgaggaggcggcggtggctcccggggcgtttgagcgggctcacccgagcccgcgggccaacgcggatccaggcccgactggcgggaccgccccggattccccgcgggccttcctagccg

SEQ ID NO: 22126 - DNA, 2300 bp, Homo sapien
acaggcataagccaccgaacccagccaatcaatgtttgttgaatgactgaacagaattccaattgcttcaggaaagaataacgtgacaacctgttagcagacgcagtccttcaagggctgtgaactcgaagccctggctagactggaggtttctctcactctctgtgctacgaagacctctctactactgctttatctcactgtgaactgtggtatcggtgtccaagggctctctgagcacaaggcagcatctaattcttctttgggtccccagcattgccctacacaggatcagactcttgagaggcctcagaaaatgggtgttaaatgagtatgtgaacaggccaggcacggtggctcatgcctgtaatcccaacactttgggaggctgaggcgggcggatcacctgacgtcaggagtttggaagcagcctggccaacatggtgaaaccccatctgtactaaaaatacaaaaattagctgggcatggtggtgggagcctgtaagcccagctacttgggaggctgaggcaggagaatcgcaggaggcggaggttagtgagccgagatcacatcgctgcactccagcctgggtgatagagcaagactctgtctcacacacacacacaaagagtaggtgaacaaaagcctttcctccacctggtgaacacctactcatccttcaaacccgacctgaatgtctcctcctcaaggaagccctccctgactccaccagcctgcctcctccagaggtccactaccctgataccttcctccgtcacggcacctttgtgggagagaggtcaactctcctttgtgcatgtcactttgtccacagcccctacaagactcgagctcatcttgggaccagaaatgcgcccatacaagtagaaagtggaagacgaccttccaggcaggggacaaaacagtcaggagggctggaacacttggtcagtgttcagtgttcagaaaacaaatggacagccagtatctgaatccagggattaggaccaagtctgtccacctagaatagacccggcaccatcacgcttctggaacccggaggtgccagaagcccctgcctggatgtttgcccagctgatcccagtcctgtggccccaagcaccttcttggggtccatgttgaacttcttcctgcccattgccatcttccggttccgttgcaaggtcttactgcaggagcagagagcagggttgggggtggagggtcaatgcctgggcatccctggcctcagccaaccccacgccccctaggtcatccgccccagccctcacctgccctcattggcctccagcccctccacctcgctcatggcttcactgagctcctcccgcaggcgctgaatctccaccagcagctcctgcttccgccgccggatgttctccagctccatccgctcctccggagtcaggtctgggggttctagggatcggggtcaaggtttaaaagtcagtgctaggggccgtgagcctgaattcctgcaatctgggggcggacagagctgggagaggatgtgtaaggggcttcctatgtctgcacagaagaatgggctgggggcctggattcctccctgcagaggagaaagagctggggctctaaactcttgagtcctgggggacaaggggaattggggcccggattcctgagtctgagggagaaggggaatgggtgcctgagctcttagatctgagggaagaaagggctgggggcctcggcttctaggtccattacttggaaggggactgaggccttggttttctgactccattactggcgaggtagctggggacctggttatccggactactgggtccatgaaaagtcactacagccgggggaactgatgacagctcaggagagttgggaaggtggggcgggacatcgaaggcccccgccccccaagatttctcccctccccgcaacccaagcgcccctccccggccccggcaggcgctgggctcgcccgcccctccagcgggaatggttccgccccggcctcgcctccaccactccatcccgcccctcccgccgccaccggaaacaggctcagcccaaacaatggcctggaacgcccggctttcgggccccgccggaagcccgtccagcgcccaacaaaagcggcgcgacaagtctacgactgagccgaacgcttctgggcgccgcgcgccagggggaaacgttcgcggcggaacgttcaggagaaaacgctccagcaactcccagccgaccccgcccctccccgacctaccatagacgccgtcctccatggcggctaggaagg

SEQ ID NO: 22127 - DNA, 2300 bp, Homo sapien
ccggaagatggcaatgggcaggaagaagttcaacatggaccccaagaaggtgcttggggccacaggactgggatcagctgggcaaacatccaggcaggggcttctggcacctccgggttccagaagcgtgatggtgccgggtctattctaggtggacagacttggtcctaatccctggattcagatactggctgtccatttgttttctgaacactgaacactgaccaagtgttccagccctcctgactgttttgtcccctgcctggaaggtcgtcttccactttctacttgtatgggcgcatttctggtcccaagatgagctcgagtcttgtaggggctgtggacaaagtgacatgcacaaaggagagttgacctctctcccacaaaggtgccgtgacggaggaaggtatcagggtagtggacctctggaggaggcaggctggtggagtcagggagggcttccttgaggaggagacattcaggtcgggtttgaaggatgagtaggtgttcaccaggtggaggaaaggcttttgttcacctactctttgtgtgtgtgtgtgagacagagtcttgctctatcacccaggctggagtgcagcgatgtgatctcggctcactaacctccgcctcctgcgattctcctgcctcagcctcccaagtagctgggcttacaggctcccaccaccatgcccagctaatttttgtatttttagtacagatggggtttcaccatgttggccaggctgcttccaaactcctgacgtcaggtgatccgcccgcctcagcctcccaaagtgttgggattacaggcatgagccaccgtgcctggcctgttcacatactcatttaacacccattttctgaggcctctcaagagtctgatcctgtgtagggcaatgctggggacccaaagaagaattagatgctgccttgtgctcagagagcccttggacaccgataccacagttcacagtgagataaagcagtagtagagaggtcttcgtagcacagagagtgagagaaacctccagtctagccagggcttcgagttcacagcccttgaaggactgcgtctgctaacaggttgtcacgttattctttcctgaagcaattggaattctgttcagtcattcaacaaacattgattggctgggttcggtggcttatgcctgtaatcccagtgctttgagaggccgaggagggaggattgcttgaagccaggaatttgagaccagcctgggcagcatagtgataactcatctctagaaaaaatataaataaataaattagccaggtgtgttggggcatgcctatagtcccagcttctgaggaggccgaagtgagaggatcccttgagcccagcagttcgaagctgcaatgagctgtgatcacgccactgcactccagtctgcaatagagcgagaccaggtctcagaaaaaagagaaaatgtactgagcacctgtgccttgccagaccctgttgttggtgctggaattaaccaggcaaaggcagagagggtaggccatgaagtgcaaaggccatgagttgggaagaatgctatttaagacctgtgagaaggctgaaaatgaaacctggccctggtctgttgagggtgggggtaggtctggatgctgaggttcccagggaggtgagtggggtggctttctggccctcagcactgagaccttgtccccacccaccaggggatccagttcttggtggagaatgaactgctgcagaacacacccgaggagatcgcccgcttcctgtacaagggcgaggggctgaacaagacagccatcggggactacctgggggagaggtacggtcaccactcagctcctgtggggcccctccctcccaccccccagacccagctcctgccctcacactggcagctcacaggtggaacagccctgcagcctccccgcagaggggccctggcagatcagccttctgactggactgtgacagaatggactgacatgggctaggggagcctgcggccaaccgagagcatctggggatgtggggccttctggaattacctggcagttgtggggaagcatccatttatgtctgagaagggtagagaacatctctcaaggatcatgggagcttgagaaccgtgggtagaccatggctgtgcataggcactgggtggccatctgggagctgtggggaccgctgggcccttgtgggagcttaggagttgtgggggtcatttggaagcctagggtgcacaggactggacatcagatgattggaggccatctgtggacgtctgggaatcagggat

SEQ ID NO: 22128 - DNA, 2300 bp, Homo sapien
cagcatctgctacttgcagggggacacaggcaggggatggcagagctgtgatttgaacccacttcaccctaagaggtccctgcttcttacctgtctgattccagagctcacagcgcaaacagggacaccactaccctcaccagccgttcccatctgctgctgtgtcccctctgcctccaggtcccgtcagcctctctctatgggcatcttccccccacccctgcttctttgggtctcaatacccagctccccagcccagttacctcctctgaatctctaccgtctgctgtcccctcttctccctggatctctgccccactttttgggtctatgtttccctctctctctaggtctctgtccccctctctctgggtctctgtccctctctctctgggtctctgtccctctctctctttctttttttttggcagatttttgcttttgttgcccaggctggagtgcgatggcacgatcttggctcactgcaacctccgcctcccgggttcaagcggttctcctgcctcagcctcccaggtagctgggattacaggcaggtgccaccacgctaggctaattttttgtatttttagtagaaacggggtttcaccatgttagccaggctggtcttgaactcctgacctcaggtgatccaccggcctcagcctcccaaagtgctgggattacaggcgtgagccaccacgcctggatctctgtccctctctctctgggtctctgtccctctgtctctggatctctgtccctctgtctctgggtctctgtccccctctctctgggtctctgtccccctctctctgggtctctgttaccctctgggtctctgtccccctctctctggttgtctgtcccctccctgggtctctttcccctccctgggtctctgccctgctcactctgccccacctctccccaggtatgacattcttcagtcctgctggcggccacctgcccagcgcccttcagcctctgatctccaattgcagctcacctacttgctctccgagcggcctccccggcccccaccgccgccacccccaccccgagacggtcccttcccctggccctggccccctgcacacagtgcgccccgcccggggaccctctcctcaccgttccccctactggatggcttccctggagccgaccccgacgatgtgctcacggtcaccgagagtagccgcggcctcaacctcgagtgcctgtgggagaaggcccggcgtggggccggccggggtgggggggcacctgcctggcagccggcgtcggcccccccggccccccacgccaacccctccaaccctttctacgaggcgctgtccacgcccagcgtgctgcctgtcatcagcgcccgcagcccctccgtgagcagcgagtactacatccgcttggaggagcacggctcccctcctgagcccctcttccccaacgactgggaccccctggacccaggagtgcccgcccctcaggccccccaggccccctccgaggtcccccagctggtgtccgagacctgggcctcccccctcttccctgcgccccggcccttcccagcccagtcctcagcgtcaggcagcttcctgctgagcggctgggaccccgagggccggggcgccggggagaccctggcgggagaccctgccgaggtcttgggggagcgggggaccgccccgtgggtggaagaagaagaggaggaggaggagggcagctccccaggggaagacagcagcagccttggaggtggcccaagccgccggggtcccctaccctgtcccctgtgcagccgcgagggggcctgctcctgcctgccactggagcggggggacgccgtagcaggctggggaggccaccctgctcttggctgcccccacccccccgaggacgactcctcgctgcgggcagagcggggctccctggccgacttgcccatggccccccccgcctcggccccccccgagtttctggaccccctcatgggggcggcggcgccccagtaccccgggcgggggccacctcccgctcccccccccccgccgccacctcctcgggcccccgcggacccggccgcgtcccccgaccccccttcggccgtggccagtcccggttcaggcctctcgtcgccgggccccaagccgggggacagcggctacgagaccgagacccctttttccccagagggagccttcccaggtgggggggcggccgaggaggaaggggtccctcggccgcgggctccccccgagccacccgacccaggagcgccccggccacctccagacccgggt

SEQ ID NO: 22129 - DNA, 2300 bp, Homo sapien
cgcgcccggccgcacatctctttaatgtctggctggatccttgcatctgtgtctgtcttcagtgcagccattcattacatgtcaggcaacttctggaaacttctactgtccacttatgagtgaatgagaacgaaaaaggcagttaacatctcaggagggtagtatacaaatacttttgacctcatggaccccttgaaagggtctcagggactcctaagcgactctgaaccatactttgagaaccactgacatgtagtttcagttttgaaatcaataaagtgtcaaaaaggaaaaagttttagggcaagtttggtgataaaactgacctaaacagactgatactctttttttttttttttttttttttttttttttttttttttgaggcagactctcgctctgttaccaggctggagtgcagtggcgcggcgatctcggctcactgcaatctctgcctcctgggttcaagcgattctcctgcctcagcctcctgagtagctgggactacaggcacgcaccaccatgcccagctaatttttgtatttttaatagagaccgagtttcaccatgttggccaggatggtttcgatctcctgatctcatgatccaccctcctcggcctcccaaagtgctgggattgtaggcatgagccaccacgcccggcccccattaaaaaaaaaaaaagtgctgattgccacggaggattttttgtctttctttcttttcagagagtgactttgtttctgagaccaccgaggatcttgatatcacccctgctaatggctgggcgctcacagtttggaaagctctagggaaccctctgttactccccagacaagacccactccatccccaccctgactcagtggtgcccggcagtgctaagtcctgatgtgcaattattccactcgtggctgctttccttgaacccccgagactcccagaaggtgagggaacgcgtctcacttgcttcctgctgcagccccagcttctggcccagcgcctgcctaatcacatagtgggcacctagtaaacgttcgttgagtgaatacatgaacaagcgagctggggccagagtcaggactgcagccccgcctgtgccgctccctaggacttgataattctgcccacatcacttccaaagacccaggcagcggacccttcctcggctcctgctacccgcatccaaccgcagcttaatctgagcctccttgctgggtcgagcaggactacatttcctacaagtctcaaggccaggactacacctcccataagcctctgcttccgccaggttctgtgcccttcagccacccgggcagcgaattgcgtcttttctcactccccgccccccgattgcatcccctccaccctgcagcctaggccgtgcgccccctccctcccgcgatgaacctgcctcagtttctccaatgagacaccctgagggcagccccttcccctgagccccccgatgaggacggctgcgctctgcggggagtgtgcactgcccggccggtgtgcgccacggctgcgcgttttggtggaaagccctgggcccctgctgggggttggggttgggggctgggtcgcctgcgccgagtgttgctgaggctgcgtcttgggtgcgcagctccggcccagcctcacccaggggaacgcctcgcaggtgctcacggacgatggagaggtccgcgcccagggtgggagtccgcgcttccgggtgtgtctgcagctcggggcgctggagggtgggatgtgaccccgagacggcggcggcctggcacgtgatgtatgtgtgtccttgtctgatgtgtcggtgtccccgatggaccgggttccagtcccagctttgccactccccggcttgtgtgccttggggcaggtgactaccccgcgctgtgcctcagttgcctcatctgtacaatgggcatgattaaaaaatacctgtctcagagggcggttgtgaggattgagaggtaattctgtacgtgtaaaacgctgcggacgatacctggcacagactaaatactcataagaataaatacattaaataaactatgatcatgtatcttttgtatgaggcaagtgctgtggttgtgtaatgtctgcgtaaccgcacgggaaacgtgggtatttgcgacccgtgtgtctgtgcgcgtgtctgtgtctgtgttgtgggtgtgtgactctttgtatgtgttatgtgtgccagtgtgtgtttatgtatgtgatgtgtgactgtggtggggttctgtgtctttgtaaccttgtgtgaaaggtgtgtgtatttgtgatgtgtgtgt

SEQ ID NO: 22130 - DNA, 2300 bp, Homo sapien
gagccagggacaaagggtcattgaatagaaaacaaaggtgaagacagcccagccggaggcctggtggggtgtcatggttcagtcccccacctccgacatcagaggggttcactcagcctcagagggggatgcctggccctctcacccttccacccaccctgcaagagagcctttttatcagcaggaacatcaaggcttaacactgaaagtatcaaggcagaatgttgaggatgtggactcggtagtggctgggggcaggggcgggtgctcccacagctcagcctcctggagacgggtcttggggtggtgaattgagagatgggataccccagaaccctccttttctgcttaccatcagagtgaaggcgggcagtgctgtgtgccctgggggaagccacattacctctctgggcccccttcctgcatctgttaggtgagtctgacgtcttccatccccctcacctatgcaacaataattggtcagtatatacaattttatttgttttggctttttttttttttctttttgagatggagtttcactcttgttgcccaggctggagtgcaacagtacaatcttggctcgctgcaacctctgcctccagggttcaagtgattctcctgcctcagcctcccgaatagctgggattacaggcacctgccaccatgcccagctaattttttgtatttttagtagagatggggtttcactatgttggccaggctggtcttgaactcctgacctcaggcgattcacccgcctcggcctcccaaagtgctggaattacaggcgtgagccattgcacaggctttcttttggcattttttttttttttttgagatggagtctctctctgtcgcccaggctgcagtgcagtgatgtgatctcagctcactccaacctccacctcccaggttcaagcgattctcgtgtctcagcctcccaagtagctgggattacaggcacctgccaccactggtggggagactggcttcatgactccaggactctgaggggtcagggaccaacagctggggagggccagggtttggggtgggggcagaagagaagagaacaccgtctatgctgagctcactgtgtaccagatcctccaccagcagctgagagtgtctccctcagtcctcacaacagcccgatgggtgccattcacagatggggaaactaaggcaagatgagcctatgagcaagatggttcccggccccacagctgggaggcactggagctgggatttgaaccagggctgtgaccttcagactctcacgcccaaccatatctggcagttgtctctcatatctgtgtctctccctgtccctgacctttctatgtatctctgtctctgccctctgtatatcgctgctgggtctctcagggtctctgacccctgtgtgtctctgtctcctctgggtgtccgtgtgtctctgtctccgccctccgtgtatctctgttgcgtctctcaaggtctctggcccctgtgcatctcagtcccctcctggtctctgtctcccatgccctctgccctctccctttctccctggctcccgccctgtctgtgctgccgtggtcctggctgtgcctctgtccctgtgtctgtttccagggtgccccttacgcgtcagcccgtgagggcaagtttctgtctgccccttccccagcggtggcctagtgcttggaacagcgcctggcagacaggagatgctcagtaaatatttctcaaatgaataaaggaatgaatgagtgaatgaatgaatgaatgaatgaactcgctgagatgggcgagatcagcgccatttcccaaatgagcaacgtgggctccaggtgggtgcccacaggcccagaactgccagcccggaaggttctggcgtgggcttggcactgaccccctggactctgcccccagctgagcaccagacgccaggacgtgcccatcactgctcctccccgccctcagagcagggtggctccctctggcctctccccgctgttggaggcgtgggtagcagctgggagaaccggctgggtgctgcccctccccttgggccgggcacggagtaggcacctggcgggctccccaggtggcagacgctgtcgctgcgcacacctggcctctgtgccgcctgctccctgctcgtcctcccctccccaccctcacccacctgccatggacgggcccgccgagccccagatcccgggcttgtgggacacctatgaagatgacatctcggaaatcaggtgaggcccagacctgggcaggagccaggagatcccagggaggaggtg

SEQ ID NO: 22131 - DNA, 2300 bp, Homo sapien
gtgcatttggaggtcttggctggactgtggcgttcatggggaaggagggactgagtctacagggctgagaggccaccacagcttgggttcaaatcccagctctgttcagctcttgtgtggccacagtcaaatcgcttccctccttgaagctccatgtcctctctgtagcaatggaagctacagcggagcccaattctaccccacccactgcacgacaattggtttgtttctatgtttgttactagagtcagggtctcactctgtcacccaggctggagtgcagtggcgcaatctcagctcactgcagcctcaaactcctggctcaattgatcctcccgcctcagactcccaagtagctgggactacacgtgtatgctaccacagtcggctaattttttatttttaaacagagacagtgttctcgctatgttgctcatgctggtctcgaactcctggcctcaagtaatcctcctgtcttggcctcccaaagtgctgggactacaggtgcaagccactgcgcccagcccttgaggagttttcaaagtatccacagcacccaaggctgagaactgctacagcagctgaaagccataagtgtctttgactttccttttgtcctggtaaaccccttcattccttccttccttccttcctacactcattcaatcaaacactggttgaacaccaacaagtcccagcactgtgggctccaccctggcctctggggagtgggggagggacccccgatttggagattgtaggtgccaagaggaacgggcaagatgccctcctattcattcatttattccttcagggcctctccaagggcacagggtcttttcttgttggcatctgggttttcctctcctgtaagctgggaaggagatttctccctcaaggagctgttggccagatcaaagactaaaataatgctaaacagagcttccgtttcctgataaatgtatcaggagccaagcacttaaaatatattatcccgttgaatccccaagtaggattaaaacctcaaagcagagattgctcttatcctcacatgacagatgaggaaactgaggatcaaagaagtgaagtccgctgcccaaggcacagaaaggacaagtaggacctatggaagcccagccaaggcccagcaggcgctcagtggctaatcctcctgaaaactaattacctcactgcgcctgcccactggactaaatttgcctggtaaccgatgacatcatcactaattccgcgcccacgctcaacctatgggataactgatgacatcactgaacaaacaaagtaactgcagtttattgaaggcctactgtgtgcgcaaggctgtgctaggcaggcctcctctgagttcacataaggccccgtggtgcctgctactgcatgaaatagccataataattttaactcaaagttatggaatgcagactatgagctactctctgttttaaccttttttttttttttttttttttttttgagacagagtctcgctctgtcccctgggctggagtgcaatggcacagtctcggctcattgcaacctccacttcttggattcaagcaattatcctgcctcagcctcccgagtagctgggattgcaggtgcccaccaccacacctggctaatttttgtttttgtttttgagatgaagtctcactctgttgcccaagctggagtgcagtggcgcgatctcagctcactgaaacctccacctcctgacctcgtgatccacccgccttgacctcccaaagtgctgggacaacaggtgtgagccaccgcgcctgggatctttattaactttttaaaattaaaaatatatatatatatatatttatatatattttgagatggagtttcactcttgtcgcccaaactggagtgcaatggtgccgtgatctcggctcactgcaacctccgcctcctgggttcaaacgattctcctgcctcagcctccggagtaactgggagtacaggcatgcgccaccacgcctggctgatttttgtctttttagtaggggcggggtttcaccatgttggccaggctggtctcaaactcctgacctcaggtgatccacccacctctgtctcccaaagtgctgggattacaggagtgtgccactgcgcctgaccagctttataaagtttatagggacagtgtcaccactttacagaagagggactgaggctctgaggaggaagttccttgccagggtccgagtgtcgccaccctgagaactccagcacccacctccctactctccctcatggcgtctcccccacctttc

SEQ ID NO: 22132 - DNA, 2300 bp, Homo sapien
aaattagccgggtgtggtggcggtgcctgtagtcccagctacttgggaggctgagacaggagaatggcttgaacttgggaggtggagcttgcagtgagccaagatcgtgccactgcactccagcctgggcgacagagtgagactccgtctcaaaaaaaataaaaaataaaaagagataaggaaataaatgcagaaagagagatggagtcagagagagacagggagagacaaggaaacaggaggagacaggcccctggtactaagaaaggcagcgccctttggccacgtgttcctttctctgctgctgtcagagaccctggctttggagggaaatccaggtgtgtggaggcggactggatggacagatagacaaaggccccccaagatgggcaaccaggggagaagcaggttggaagagccccagaacttggtggaaatgtgggggctctgggggagggcatccagctctgggggctggacctgggggtttgtggggcacagctagttagacccatgagccccagtggggctgggggaaccccgccactcagccctcaccccacttgtccctctgcccacagtgcagtttggctcctggttcgaccacattaagggctggcttcggatgaagggcaaagacaacttcctatttatcacctacgaggagctgcagcaggtgagtccccacctcctccaggtgcagcgtcccccccataccctctgctcacaccccacactctccccttcccgagggtctcaggacccctccgcttccccatgcaatgcgccagcccctggggatactgcaggaacagaacagaggccctgagcctgtgagcaagaccacagacaaaatccctaaaccacacagcaggctggcggggcagaggagctgaggagcaaaggcgagtgggaaggaagataaggaatggtcaggggcgagatttaacccaggagggttggccggacacagtggtagtggctcacacctgtaatcctaatgctttgggagcctgaggcgggaggaccccttgagcccaagaggtcaaggccacaatgagctatgatggtgccactgtactccggcctgggcagcagagcaaaaccctgtctcaaaagagagagagaaggccaggtgtggtggttcacacctgtaatcccagcactttgggagcccaaggcaggtggatcacttcaggtcaggagttcaagaccagcctggccaacatggtgaaaccccatctctactaaaaatacaaaaattagccgggcacagtggcacatgcctgtagtcccagctgctcaggaggctaaggcaggagaatggcttgaacctgggaggtggaggttgcagtgggctgagatcacaccactgcactccagcctgggcgacagagcaagaccttgttccaaaaaatagaaagaaaaaagattgaaccacatgaaatgcctgcattcaaccagtttttatttatttttatttattttatttaattaatttatttatttttgagacagagtttcgctcttgtggcccaggatggagtgcaatggcatgatctcggctcaccgcaacctccaactcccacgttcaagcaattctcctgcctcagcctcccaagcagctgggattacaggcatgcgccaccacgcccggctaattttgcatttttagtagagacggggtttctccatgttggtcaggctggtcttgaactcctgacctcaggtgatccacccacctcggcctcccaaagtttttatatttggaccagttatatatttatataactggtcggccccgccaactagtttttattttaagatggtaattttggctgggcacggtggctcacgcctgtaatcccaacactttgggaggccgaggtaggcagatcacctgagctcaggagttccagaccagccttgccaacatggtgaaaccccgtctctgctaaaaatacaaaaaaattaggcggccatggtggcgggcgcctgtagccccagctactcgggaggctgaggcaggagaatcgcttgaacctgggagctggaggttgcggtgagccaagatcgcaccattgcactccagctgggttatagagcaagactctgtctccagaaaaacaaaaacaaaaacaaaaaggtaattttatatggttttcccaaatgttgttattatccctattttatcgacgaggaaactggaggtttgtaacttaagagagggttgataatttgcccagggcacatggctcttgcctgcagactccatgtttattttttcccaacctggtaac

SEQ ID NO: 22133 - DNA, 2300 bp, Homo sapien
aattgaggctgcagtgagccgtgataataccactgcattccagcctgggcagcaaagcaagaccctgtccccctcgcccccctcccaaaaaaaaaaaagccagatgcggtggctcactcctgtaatcccagcactttgggaggctgaggcgggcagatcatgaggtcaggagtttgagatcagcctgaccaacatggtgaaaccccatctctactaaaaatacagaaattagctgggtatggtggcacatgcctgtaattccagctactcaggaggctgaggcaggagaattgcttgaacccgggaggtggaggttgcagtgagctgaaatcacaccactgcactccaacctgggcgacagagcgagactctgactcaaaaaaaaaaaaaaaaaaaaaaaacttatctggaatcagactggagtttaaacccaggctctgcctggtccccacttaggaacacctcaatgcctcagttttcccctttggaaagagacggaattcacttccggacactaacagggattgttttaagacccagctgcttcctagaatgactgccatttagtcagtcctggctgtgcaccaagctctccacgttgctgctccctgcagtgctcatctgcaatctggagcaaaaacctaggaaggccgtgtgcagtggctcatgcctgtaatcccagcactttgggaggccgaggcaggaggatcacttgaggctaggagtttgagaccagcctgggcaacatagcaagaccccatctctataaaaaattttacaaaattagccgggcatggtggtgcacgcctatagtcccagctactctggaggctcagggaggagaatcacttgagcctgggaagttgaggctgcagtgagccaagatcgcgccactgcactccagtctaggcaacagagcaagatcctatttttttttttttttgagatggagtcttgctctattgcctaggctcaagtgcagtggcacaatattggctcactgcaacctccacctcccaggttcaagcctcccaagtagctgggattacaggtgcacaccaccatgcccagcaaatttttgtatttttagtagagatggggttttaccacgttggccatgctggtcttgaactcctgagctcaggtgatccacccgcctcggcctcccaaagtgctgggattacaggcgtgagccactgcgcccggccaattttttaaaataaaaaataaaattaagaaataaatacaacataggaatattcaaatgactgaatttgaatcaagccccctgcacgtagctggccctgagagcctgtgagctgtgggggccggtgccctaacacttcctgtcatcacagtagttgttattgaaagcaccaagtgccaggcgtggtgtggtggctcacgtctgtaatcccagcactttgggaggtcgaggcgggcagatcacttgagctcaagagttcgcaaccagcctggcctacatggtgaaaccctgtctctactaaaaatacaaaaattagccagatgtggttgcatgcgcctgcagtcccagccactcgggaggctgagttacgagaatcgcttgaagctgggaagcagaagctgcagtgagctgagatcacgccactgcactccagcctgggtgacagagtgagagactccgtctcaaaaaaataaaagcaagcaagcactgagcatgaatcctggcacacagcaagtgctcagttaatacaccctcttctttcccagcctctttggaattcaatgaacctggctctcatcctggctcggggaccctggatacatcactttccccagccttagtttacccatctggaatatggggtcactatgggaggtgtgaggctgaagtcaagcccttggcgggtgtacagcacagagaatgcggacaagcttgtggccagcgtcctctgggttcagggcgtcttcaccttggcagggatggcagagccctcttgcgccccggcaggtcggcggggcaggccaccccttggattgtgacacccactcctctcacctatgacctcatccccagagcggccagtgggaaccctgagggatctgtgagatcactcattccattcacagactcttgttgggcagcagccacccgctcacctccatccccaggacttagagggacgcagggcgttgggaacagaggacactccaggcgctgaccctgggaggccaggaccagggccaaagtcccgtgggcaagaggagtcctcagaggtccttcattcagcggttccgggaggtctgggaagcccacg

SEQ ID NO: 22134 - DNA, 2300 bp, Homo sapien
tcaccggcctttgccagcccaggctgggaccctccaggtggtggggcaggtgcttccatagcccctcctggctccttggcttcccactctgccaagcttttccagcagcattgactctcctggggctgaatgtgacaggcttgtggtgttcctgtgccactccacaatggcctcctttaagagggcccccctctcactccctcctctccccacagaccctacgtccgctccaagggccggaagttcgagcgtgccagaggccgacgggccagccgaggctacaaaaactaaccctggatcctactctcttattaaaaagatttttgctgacagtgctctgtgtgtgttattgggggatgggttggagaattggttcctgcgggtgagaatgcatttggtttggggacagggacgtcatgccagtgaagaccagccctcttcctgcccccactgccccggaagctccctgcctccttcccaacagccaggtggcaggtgttcccacaccggcttccttgggtcagccacgcccgcccctcttaaaggatcctgtgcccctccctggtgctgggatggcgggtggggcgtggaccgggaagtgcagggtgcaggctggcagggctgtggggagggagagactgcctgggaacaggtgaggcaatctcaaccccccggggaccgggaagcctgagtctagaggggcgttcaccccctgggagagcacaggtaaagaaagcgtgtgagccgcacccccggacctcctccaggggcctgtgggggccctcctgtgtttacacaaggggccgggctccctggattccaggtcgaggcctgatgagtgaggccagaagccgggaagcaccgcagaagtagaagccggggagccacagcctacgttctcggaaaaagcaggcactggaagggaggccattgagcccggcactagccggtgtgggtgagccccggcgatgggggggatgggtgagggtggggcggggaggctggcctgccttgactcctttcttctctttgcagctccctgctgtggtctggaggaagcagcggcctgggttggtgggattggaatgaagggcttctggtttgcagggatcaagggtccagggtccccgaggttgggtcaggagcctcaaggggataactgaggcttgggagggagacagggcgagatagagactggcccctgtccgggaagaagcgtccgggtagctggcaggagatagcatttaggcagaaaccaggctgggggcagcttgggtagggctccccgcagatcagaggacggcctggaacaggtcccagggccaggccccaggcaggggcagccagcctgaggagggtggctggttaggtggcactcacacctagatgggctgtgaagatcatagacctgtcccatagtaatggagacccctgtagcgcatttcaccctccactgcagcagctggaaggagtgtgaggagggtccagggagcagggtcccccattgacagggtagggaagggtttgccaagccttcggcctttaaggctgagcgagcaggcccagtggagaggcatcctggctggtctgcgggtgagagctgatgagcaggagaaactcgtgggggctgtcagatttggccagagacagatgctccaacaggcagatactgtgactgtcagtcggaagccattggcgtttgccagacagtggaaggagagggtcagttcgtcgtgctcttggccgggggcaggcaggcaacctgtcgtgcctttaaggacctttgggtgattagagacaggcaggcagcttgccgcctggaaatgatcaagtggtcagcctgaccaaattcaggacagctgaagggtctgactgggcactgtgtgactggtgggttggaggctgtcgtgtggctgagcagagatggccagctgatgggtcacacagttggggatggtgtcaggaggtcaacctgaccagcagagacggctggcaggaaggtcacggaaggccagccaggcatggtgccactgggtgcaggcaggtggcggatctgagtggcctgacacattggatggtcgcttatttgggcagcgtgattgtcagaacagtgtggcaggggctgctgcagggagccatttggacatctgcagggccccgccggaggcctcggatggccacgtagggtctgcctatcaggagaacccccagatgatcacagtccccagagacagccagacccccggggacccagcctctcacagtcagtcctcccacccgagtgaccccgatggcggcct

SEQ ID NO: 22135 - DNA, 2300 bp, Homo sapien
gcgactggctgagacaaacccttgatgccctggttgctcccagagctccaagtcctgcctcccttccagacagacaagacccagcggctcccaggtctaccgtgctctctggaccagccactcaccatccgggaaagggacagaggcggccggttggtgcgactcataaacaacctcttcaacacaacctggttgaatgtggagttggttcttctggccagaaacctgtataactggagggacgggaagacagtgagaagctgggacagcctgctcccccgcagccttccagtgaaggggcaaacacatgatgatctggactaaaataatctttatccctttcccccaacccaccgacctagagggagaaagctggcccaggtccttcctggccaaggacctagaaaatcctggctccactcccgagctgtacacagcctagaggctgaaaatacaaatgcaggagaccctggaacagaaccagagacccgagactgctctgcaggcccctgggaggagcttggtgccagcactagaatggaggatctgcaagtcagacctggggtgacccttcccaaagacctcagggcccagcctcaccttgaccaacagcctcaggtagatatcctggctcttgggctccttgcgccgaacctttcggtccttgttatggcggatgtccactccctgtgggggtgaagaggcaaccatggacccaattacccccaaccatagccaattattacttatttctgaaactgagagctgggacacaagcccaggtctgaacacaccagctcaaatcccaggcccaccaccaggagacctgtgggctgccactgatccctctgtaaaaaggggctgtttacaaagccttcagcccatggcacacagaaccctgaaacatcgtaacacagcaatcatattaacttaatacaaaaaggtcaattctttacaacttgtattttgcaacaatgttatcaaaactggttcccatacccggagggataaccaaaaatatcaaaccaatggcagtaatgatgaaaacgaatccttattcagaacctagcaatactactagaaccacctctcctacagcatcagtcaatccaacaacccttaccaaatagtgtctttttaaaacatcgtttttaaagtggagacagggtctcacaatattggccaggctggtcttgatctcctgggcaaggaatcctcccgcctcggcctcccaaagtgctaggataacaagcgtgagccgcctcgccaggctcctaccgccctgctgcctttctgagcaacttaagtttttcagactgtgttgacaattacaagaactatttaatagctccacttatgcagcacttactgtgtgcaaaaccccgtgatgagcatctcctgtgaattatttcttcccaaattcacaaacttgtcagatgagattactgtgtacccaacgaacagccagacactggggcaaaggctcaaaaaccatcacaaggtgggaaggggcctgagactcagagacctgcctggtccccaaatccagttattcggctctcgatcctctcacccgccgcggcccccatcgaacccgacttttcatactagaaagtgacaggtccagataaaggcagcaaagccaaataactaagagtggctgcgggtccagccacctgggtcggaatcctggctctgccacttcctggctttgtaaacccagtcatatcagcctccgagtacctccacttggtcatctactaagtgggggcggtaggctatgactgacccatccctgctttcctggcccccagagtaggtccccagtatcgggaattgctccctccgggcagccgcagaccccctgccgccctccagcgtgcccctagcccaaaaccacggcggatggcagcggattatccagccccgaacgccgcaaagcgagctcaccatgatggcgcctcctgctcggccaggtccggaaagagagaacgggctggggtgggcggggaaagcctcaagcgagtggcgccgccgtgacgtcacatgggtgcgacgcggcgctctaccacgatccggacttctctgtggtgagttggacgactgactagccgggcgataacggcagagagcatagagcgcaggaacaagcgcaacgtccaagagggaagggccagcacgtcgggggcctctctggccctacccaggccgtgttctcgatagctttccggaagaaagggatctgggagcgagatgcgtgtagctagcacgatgcgtcgcgcggtgacgctctggcccga

SEQ ID NO: 22136 - DNA, 2300 bp, Homo sapien
gttatagccttgcaaggccccatctcaccatctttctttgccactacttctccctgggtctccatctcacccctctttctaggtctccttcctaccctttgggcctccattccccccacccccaagccacggagtctccattttgcctcccctatgaaactctgtctccctctttctaggtcagggaagggccatctaggggccgggggagaaggagaagcggaactcaaaggatgggaatacaggatgctatagattgaggtgcagcaagatcatctcgggttagaccttaagtaggacttcccaagcagcggctgcgcctacgaagtgcagcgcgagatcagggagcggtgaacctgataaggaaacgcccgaagcgtggggtcggaaatttccagatgccccgactagccctgccagccccgcctcctcacctccaacactgggcccgccgggtcctccgggagccactgagaggccgtcggcgtcgggccagagcgtcaccgcgcgacgcatcgtgctagctacacgcatctcgctcccagatccctttcttccggaaagctatcgagaacacggcctgggtagggccagagaggcccccgacgtgctggcccttccctcttggacgttgcgcttgttcctgcgctctatgctctctgccgttatcgcccggctagtcagtcgtccaactcaccacagagaagtccggatcgtggtagagcgccgcgtcgcacccatgtgacgtcacggcggcgccactcgcttgaggctttccccgcccaccccagcccgttctctctttccggacctggccgagcaggaggcgccatcatggtgagctcgctttgcggcgttcggggctggataatccgctgccatccgccgtggttttgggctaggggcacgctggagggcggcagggggtctgcggctgcccggagggagcaattcccgatactggggacctactctgggggccaggaaagcagggatgggtcagtcatagcctaccgcccccacttagtagatgaccaagtggaggtactcggaggctgatatgactgggtttacaaagccaggaagtggcagagccaggattccgacccaggtggctggacccgcagccactcttagttatttggctttgctgcctttatctggacctgtcactttctagtatgaaaagtcgggttcgatgggggccgcggcgggtgagaggatcgagagccgaataactggatttggggaccaggcaggtctctgagtctcaggccccttcccaccttgtgatggtttttgagcctttgccccagtgtctggctgttcgttgggtacacagtaatctcatctgacaagtttgtgaatttgggaagaaataattcacaggagatgctcatcacggggttttgcacacagtaagtgctgcataagtggagctattaaatagttcttgtaattgtcaacacagtctgaaaaacttaagttgctcagaaaggcagcagggcggtaggagcctggcgaggcggctcacgcttgttatcctagcactttgggaggccgaggcgggaggattccttgcccaggagatcaagaccagcctggccaatattgtgagaccctgtctccactttaaaaacgatgttttaaaaagacactatttggtaagggttgttggattgactgatgctgtaggagaggtggttctagtagtattgctaggttctgaataaggattcgttttcatcattactgccattggtttgatatttttggttatccctccgggtatgggaaccagttttgataacattgttgcaaaatacaagttgtaaagaattgacctttttgtattaagttaatatgattgctgtgttacgatgtttcagggttctgtgtgccatgggctgaaggctttgtaaacagcccctttttacagagggatcagtggcagcccacaggtctcctggtggtgggcctgggatttgagctggtgtgttcagacctgggcttgtgtcccagctctcagtttcagaaataagtaataattggctatggttgggggtaattgggtccatggttgcctcttcacccccacagggagtggacatccgccataacaaggaccgaaaggttcggcgcaaggagcccaagagccaggatatctacctgaggctgttggtcaaggtgaggctgggccctgaggtctttgggaagggtcaccccaggtctgacttgcagatcctccattctagtgctggcaccaagctcctcccaggggcctgcagagcagtctcggg

SEQ ID NO: 22137 - DNA, 2300 bp, Homo sapien
agaaacctcatctctatgaaaaatacaaaagtagctgggtgtggtggcgcatgcctgtaatcccagctacttgggaggttgaggcaggagaactgcttgaacccgggaggcggaggttgcagtgagccaagatcgtgccattgcactccagcctgggcaacaagagcgaaactccacctcaaaataaataaataaataaaaataaaaaaattagccagccatggtggaggctacttgggaagctgaggtgggaagatcactttagcccaggaggttgcagctgcagtaggctgtgattgtgccactgctttccagcctgggcaagagtgagaccctgttttttcttttttttttttgagacggagtctcactctgtcacccaggctggagtgcagcgcgatctcggctcactgcaacctctgcctcccgggttcaaatgattctcctgcctcagtctcccgagtagctgggattacaggtgcgcatcaccatgcctggctaatttttgtatttttagtagagatggggtttcaccatgttggccaggctgatctcgaactcctggcctcaggtgatccgcaggccttggcctcccagagtgctgggattacaagcttgagctaccacgcctggcctccaattttttttttttttttttaaagaaaagcttcagattttgtctttccacagtatgaggatcttggcttttagatggtcccttacctggtcctgctgctcctctgcttcaaggtgtccattcatctgctggtcctctgctctgttacatcaacgggaccctggccctgggtcttaagccatagtaggctggtaggagcaaggagtcaggtctcactgtcctggcctgaccttcagctctgtggaggagaggtaagtgaggagcagcattgacagccaactgcaggaggcccttccaggctcaatgtgcctgagaaccaagaggcaggggcctccctggcgggtggggggaagagtagataagtcattttaatcactgccccagccagtccatctggttgcacacaatatgtatgctataataggagtgaaggctaatttttattgagcacttattatgtgcaaaatattgacctcagcagttttattaactttcataatcctgaaaaacacccctgtgtgccaggcctgttgtcatcccctttttgtccataaggagagtaaggcccaaagaagttaagtgattttcccaagatcacagagaggttaaatgacttgcccaatcaccccattagtaactagcagagccaggatttgaatttggttatagccttgcaaggccccatctcaccatctttctttgccactacttctccctgggtctccatctcacccctctttctaggtctccttcctaccctttgggcctccattccccccacccccaagccacggagtctccattttgcctcccctatgaaactctgtctccctctttctaggtcagggaagggccatctaggggccgggggagaaggagaagcggaactcaaaggatgggaatacaggatgctatagattgaggtgcagcaagatcatctcgggttagaccttaagtaggacttcccaagcagcggctgcgcctacgaagtgcagcgcgagatcagggagcggtgaacctgataaggaaacgcccgaagcgtggggtcggaaatttccagatgccccgactagccctgccagccccgcctcctcacctccaacactgggcccgccgggtcctccgggagccactgagaggccgtcggcgtcgggccagagcgtcaccgcgcgacgcatcgtgctagctacacgcatctcgctcccagatccctttcttccggaaagctatcgagaacacggcctgggtagggccagagaggcccccgacgtgctggcccttccctcttggacgttgcgcttgttcctgcgctctatgctctctgccgttatcgcccggctagtcagtcgtccaactcaccacagagaagtccggatcgtggtagagcgccgcgtcgcacccatgtgacgtcacggcggcgccactcgcttgaggctttccccgcccaccccagcccgttctctctttccggacctggccgagcaggaggcgccatcatggtgagctcgctttgcggcgttcggggctggataatccgctgccatccgccgtggttttgggctaggggcacgctggagggcggcagggggtctgcggctgcccggagggagcaattcccgatactggggacctactctgggggccaggaaagcagggatgggtc

SEQ ID NO: 22138 - DNA, 2300 bp, Homo sapien
caatctctttctcttcctcagggggaattgggttttttacatacaactgagtttttgcttacacattctttaatttcttttaattcctgtttcagtgtgaatagctttctccctacttcccagacaggacagctgaggccaagaattcaggggcttcccagcagtcacacagcaagtgtgtgtgagctgcagggtcctttctccttttcctcctccctgtcctctcgtctgtgtgacttaggctctatgtttgaatctcagcttctttgcccagtgtctctgcctttccttctcccagggccccaagctcagttgctgtgccccagtctcagtcttactgggtttctgttcccccttctctccgtgtcattccttggcacatactatctggtgctgttgctactgtgggttggatgctaggtacatgatttggcaataagcaaacttcttcctacatttgtctctcttttttttttttttttttttttttttgagacagagtcttggtctgttgcccaggctggagtgcagtggcatcatctcggctcactgtaacctccgcctcttgggttcaagcgatctcctgcctcagcctcctgagtagctgggattacaggtgcgtgctaccacacctggctaatttttgtatttttagtagagatgggggttttggaccagtgaggtggctcacgcctgtaatcccagcactttgggaggctgaggcggatggatcacgaggtcaggagatccagactatcctggctaacacggtgaaaccctgtctctactaaaaatgtaaaaaattagccggacgtggtggcacgtgcctctagtcccagctactcaggaggctgaggcaggagaatcgcttgaaccaggcaggcggttcagtgagcctagatcgtgccgctgcactccagcctgggtgacagagccagactccatctcaaaaaaaaaaaaaaaaaaagagagagagacgggggtttctccatgttggtcaggctggtctcggactcctgacctggcgatccacccgcctcggcctcccagagtgctgggattacaggcgtaagccaccacgcctggcctacagcctacatttgtcactttctagtgagctctgtccttgtctcctaatgcatatctctttctctctatgcaattctgtttctaagtctcctaatatatacttgcctttctttcaatttcaccatgtctttgcctcggtgcatctgtcaacatcttcactttctgtcccagttcctcccagcccctgggcttccaatattctctccctccctcacctttgacctagagatactgtccccatctctctgtctctgtcttgccatgtgactggttcattcactgggcagatgtttatctcatgccgcttccattctggtttgagcctgagataaataagtctgaattaatgagcctctccttcgcggcttccattccagaagtgtctgtctccatctgtctccgtgtctgtcattttcagggttttcttgtatccttaccttgcacattctcaatcccactgttttggtctcttgtttatatctctgcttttctctgggtctctctgactctgtaactgtccgaaaaaaaagtatccttcactttccccactctccctctcctcccagctctcttattgcctcatccaacctctgtgggtctctgccttgctctgtgtctggatcggatctctgggcctttgttacgcgtgttagagtctctgtctttgcagctaaagacctcctccctcacgccccttttcttttgtgaattcaatggatgagacaggcccactctcccttaacaaagatggcgacaacggcgctgtctatggggccgcgacgtcgtctccgctgcgcgtcggccctcacccacgatggcggccagtctcccgaagcgcgaggccccgcccagctctcggcctctcccgcggccggtccctgcaccaagctcgcgagctgactggctccaccccccgcgccctcgtattggtgcggcccaggccggctgcacggccattggctgagcggatgcacaccctccccccacccctaggtctgatgggggctgttggtgctgacttgcgggaccgcctggaggaggacccggcgtgtgaggagggtgcgggggtcggggcagggaccggagtctaggggactgagggaccaagaggaacagagactcaggcccgggactggggcaccggggtgggagatggaaatggaaaacctgggccaggactgaacccagccaggcctgggactgggttctgg

SEQ ID NO: 22139 - DNA, 2300 bp, Homo sapien
gcctcttgggttcaagcgatctcctgcctcagcctcctgagtagctgggattacaggtgcgtgctaccacacctggctaatttttgtatttttagtagagatgggggttttggaccagtgaggtggctcacgcctgtaatcccagcactttgggaggctgaggcggatggatcacgaggtcaggagatccagactatcctggctaacacggtgaaaccctgtctctactaaaaatgtaaaaaattagccggacgtggtggcacgtgcctctagtcccagctactcaggaggctgaggcaggagaatcgcttgaaccaggcaggcggttcagtgagcctagatcgtgccgctgcactccagcctgggtgacagagccagactccatctcaaaaaaaaaaaaaaaaaaagagagagagacgggggtttctccatgttggtcaggctggtctcggactcctgacctggcgatccacccgcctcggcctcccagagtgctgggattacaggcgtaagccaccacgcctggcctacagcctacatttgtcactttctagtgagctctgtccttgtctcctaatgcatatctctttctctctatgcaattctgtttctaagtctcctaatatatacttgcctttctttcaatttcaccatgtctttgcctcggtgcatctgtcaacatcttcactttctgtcccagttcctcccagcccctgggcttccaatattctctccctccctcacctttgacctagagatactgtccccatctctctgtctctgtcttgccatgtgactggttcattcactgggcagatgtttatctcatgccgcttccattctggtttgagcctgagataaataagtctgaattaatgagcctctccttcgcggcttccattccagaagtgtctgtctccatctgtctccgtgtctgtcattttcagggttttcttgtatccttaccttgcacattctcaatcccactgttttggtctcttgtttatatctctgcttttctctgggtctctctgactctgtaactgtccgaaaaaaaagtatccttcactttccccactctccctctcctcccagctctcttattgcctcatccaacctctgtgggtctctgccttgctctgtgtctggatcggatctctgggcctttgttacgcgtgttagagtctctgtctttgcagctaaagacctcctccctcacgccccttttcttttgtgaattcaatggatgagacaggcccactctcccttaacaaagatggcgacaacggcgctgtctatggggccgcgacgtcgtctccgctgcgcgtcggccctcacccacgatggcggccagtctcccgaagcgcgaggccccgcccagctctcggcctctcccgcggccggtccctgcaccaagctcgcgagctgactggctccaccccccgcgccctcgtattggtgcggcccaggccggctgcacggccattggctgagcggatgcacaccctccccccacccctaggtctgatgggggctgttggtgctgacttgcgggaccgcctggaggaggacccggcgtgtgaggagggtgcgggggtcggggcagggaccggagtctaggggactgagggaccaagaggaacagagactcaggcccgggactggggcaccggggtgggagatggaaatggaaaacctgggccaggactgaacccagccaggcctgggactgggttctggaaataagagtgcggatggcggtttgggggcccagggccagacacgcaggcctatggattggggaccaatggatggagacccaggtccaggtctcggggacccagggacagagacccaggcccaagactggaggacatctagggctctgtgcttgaacctgatttgaggttcccataatggggccagggcaggtttgggggtgaagcagacgtcctggacccgagagagccgctggggataggggggcagatgtagttcctaagggtgagtccacaggcggtggggggtggggggctgtcctggcgctctgggcctggggaatgtgaggggcaggactggcaggtggctgggcggggcagtggggaacaaaggtgagcgaaaggaggaggcagaatccgggcagagggcagggagagggcctgtggggaagggacctcagtcctgctcccacccgctccctggagagcaggcggccagacacccaggtcagtgctcagggaccagctcttggcccctgccccttgcaggcgctcgcatgtggctcctctcggaccccgtag

SEQ ID NO: 22140 - DNA, 2300 bp, Homo sapien
ctccttttccttcaggagacctgcgggccgggaaagacgggttgggatgagggtgaggtgggggagatagagatggagaagagaccccgagtccgagaggcacagggcggagatccagagaaagaggggacggggggtcggagaggagagacgggagaaaaagggacggagacgcagagtgggagagagacccagaaagaatggagacgggggtggcagagacaggtggacagattcacagagatggggacagaatgccgggaaggaatagacacacagaaagacagcgaaccagagaaagagagacggaagttcaggaataggggggcagggacagggtaggtggagggttgggcaggtgagagaaaaaatgacagctctgtaatttcactgtaattacccaacccccatcccctgcgcgctgtacccccttcccctcccccaccatctgtaaggggcaggaaggggctctattcctggggcacatccctcatccctagactccatgtgaccccatgacgccccgcccaagcccgtgtcaccaccgtgtgagcacccgacacaccccctccctgggaccccaggggtccagactcccggaccaaaaggaagaggaggctggggcctacactcttgtgaactaagcggggaggacgttggggacgttggtgcctgggtccttagggtggacgggcttcagagccggcgcttttgggtcctgggcgctaagggatctaggggcctaaacacctgagtaattgagtagattaaggttgggaagatggactccccgcacgcaggtttctatgggaccccaccccacggcacctgagtccctaagggggtagggtgtccgaagtgggtgagatgggggttagaactcacagctggccggctctttgggcttgctggtcccctgcagaaggctccgcaacccaagcagcgctcccccgccagggggtgtcccggccgggccgcccagcagcagaggggccggggtcctgtcgctcacaggccgcgccatcgcctggcacctgcccccaggctcacgggttcatggagaggcgaagggctggcctgccagtcaccagcacactccagtggtttggacgagtgtctgcccaggggcgggcgagtgtagcctgcaaccctccagtatccagaacgctgcaaatcctaggagcgacggggatttgaggtcctcggtgcagaaacgtgcaactcaagagggtcccgggagatcatgcaatctgggcgagggggtgtccagatcaagcggtcggctctttgcaaccgagggtgagaggggactcaaggcgctccttctacaaggtgggcgagcctggctcttgcaaaatctgcagctctcgcaacggaaggcgctttgcaatctgcaccgagaggtgtgcgcggaggggcggaggagggggcaggaggaggcggccgccttgaggcgtggccaaagcaaacttctttcgcggaaaaaaaaatccaaaccaaaacacccgacgccacagcgcgcgcccctcctccgggtccccgcccggcgcgtccagccccgccagcctctatgggcatgcaacccagccgcgtgcctccctccggctgcaaacacggaccaatcgtctccgacaccttgagacgcacagccaatggggcctctgggtccgccagggcccaggagggcgcgtgaggggctcagcgcgtgaagttgccttgcctttcggtgggaggcgggacactgacctacatttgcccaatgggaggcggtactggggggcgggaccgtgacccagtttgggccaatgaggcaggcgggagggggaagcacatggctctgctcgtgctgcctgatggcgaggggggtgatggggggaaaaggggcgccgcttaaaggggccgcggtcctaaagatggttttgagaagcaggaagccaaaataccgagagcggaggtttagaaagaggaagattggtttccggaagaagtctgttctttaatacccaaatgtttccccaccgcgcctagaatcagaccactgagaaaacaggaagtattctgtccctttaatagctttgttttaggggtaactcccctcgccttgtggggaggcttaggacgggcgggtgcaatcctcgaaggggagtctcagcgaccatgggggacaccatccactgtaagacagagaacaacggcagggggcgtcagtataggatggaaggggcggggggtgtgcagggggcgtgggctgcgccgcgctgggccctaccgtcggaagtctgcgagcggggaaccagaat

SEQ ID NO: 22141 - DNA, 2300 bp, Homo sapien
cccgcagatgatgcctactttcttcaagacctgagcctggagctcctgttccctgaatccttcggcttcatcacctatcagggctctctcagcaccccgccctgctccgagactgtcacctggatcctcattgaccgggccctcaatatcacctcccttcaggtgaccctctgtccgcaccgcccttcctaggcctgggtactccactcactggcctgggcatccccttgctcacctgccctccctctcctcatagactgaactcaagtaggtaagagggtcagaccaccttgggggtgggtggggctgagaacagaccccgcccacctgctcccaggggcggggtttcctgcgtgacgtcaccaagaccattcactattcactcccagtttcccaccctccttccactgcagatgcactccctgagactcctgagccagaatcctccatctcagatcttccagagcctcagcggtaacagccggcccctgcagcccttggcccacagggcactgaggggcaacagggacccccggcaccccgagaggcgctgccgaggccccaactaccgcctgcatggtatggtccagtctgcaccccctctaagtcttgggctaaccctcttatatgtgtctccccttggtgtctcagtgtgattcagtcccatcctccttcctgcgtctatatggtctagcctcgtgagctgtctctttttctctctttccctacatgtctatgtggtacagtccacctgccagccctaggccattgctagcccacgatttgtctttcctcttcactgctttgtaacttggtctataacccttgacccctgccttcctatggtccaattacctactgttctgtgcttcctattactgtgaatttccaaaatggtacaatttggatcctctctccctttccaagtcgtactaccttacgctgttccacaatctgatgctcccttcccccttactgagaatctacaaggtacaaccccttccctccacctctgcctccctgtggtttagcccaggaatctcacacacccccggcttcgcaacatggtacagtccacacccccccccccccatgaagaccttcaagtagttcagcctactgctgaatctggacgtcccgattcccccctcctattggcttcttgtggttcagcccagtgcttctcgacctagtacattctggttccccgctcgcagacttccgacggtagggcccagcgcggcgcagcccacgccccctgcacaccccccgccccttccatcctatactgacgccccctgccgttgttctctgtcttacagtggatggtgtcccccatggtcgctgagactccccttcgaggattgcacccgcccgtcctaagcctccccacaaggcgaggggagttacccctaaaacaaagctattaaagggacagaatacttcctgttttctcagtggtctgattctaggcgcggtggggaaacatttgggtattaaagaacagacttcttccggaaaccaatcttcctctttctaaacctccgctctcggtattttggcttcctgcttctcaaaaccatctttaggaccgcggcccctttaagcggcgccccttttccccccatcacccccctcgccatcaggcagcacgagcagagccatgtgcttccccctcccgcctgcctcattggcccaaactgggtcacggtcccgccccccagtaccgcctcccattgggcaaatgtaggtcagtgtcccgcctcccaccgaaaggcaaggcaacttcacgcgctgagcccctcacgcgccctcctgggccctggcggacccagaggccccattggctgtgcgtctcaaggtgtcggagacgattggtccgtgtttgcagccggagggaggcacgcggctgggttgcatgcccatagaggctggcggggctggacgcgccgggcggggacccggaggaggggcgcgcgctgtggcgtcgggtgttttggtttggatttttttttccgcgaaagaagtttgctttggccacgcctcaaggcggccgcctcctcctgccccctcctccgcccctccgcgcacacctctcggtgcagattgcaaagcgccttccgttgcgagagctgcagattttgcaagagccaggctcgcccaccttgtagaaggagcgccttgagtcccctctcaccctcggttgcaaagagccgaccgcttgatctggacaccccctcgcccagattgcatgatctcccgggaccctcttgagttgcacgtttctgcaccgaggacct

SEQ ID NO: 22142 - DNA, 2300 bp, Homo sapien
tatttatagatgtgtgtgtgcctgttcccaggtctctgtctctagctctgtgtgtgtgtttctttctttctttctttttttttttttttttgagatggagtctcactctgttgcccaggctggagtgcactgttgggatctcggctcactgtagcctccacctacccggttcaagcgattctcctgtctcagcctcctgagtagccgggattataggtgtgtgccaccacgctcagctagtttttgtattttttagtagaaacggggttgcaccattttggtcaggctggtcttgaactcctgacctcaggtgatccacccacctcgaccaccctaagtgctgggattacaggcgtgagccaccatgcctggctaagtttttatgtatttagtagagatggcatttggccatgttggccgggctggtctcagtctcctggcctcaagtgatccatccaccttgacctcccagagttctgggattacaggtgtgagccaccatgctcagtctgtgtgtgtgtttctatgtctctccctctctgtgtctctctccacctgtactgatgtatgtgtgtctctttctatgtctctctgtctcgttaatgtttggtgtcaggctggacaaggtggctcacacctgtaatcccagcactttgggaggccaaggcaggaggatcccttgagcccaggggttccggaccagcctgggcatcatagcaagactacatctctacaaaaaataatttttaaaaattagcctggcatggtggcatgtgcctgtagtcccaactatttgggaggctgaggtggaaggagtgtttaagcccaggaggtcgaggctggatcaagccatgatcgcaccactgctctccagcctgggtgacattgcaaggcttgtctcaaaaaagaaaataaaagaagacaatgagcagtttcactaccattagacggggtgaaaaataataaataacaacaacaacagtaatatgtggtctctctgaggctgggtatggttgttcatgcctgtaatctcaatgctttgggaggccaaggtgggaggatcccttgaggacaggagtttgagactagcctgagcaacatagcatgaccccatctcttctccccaaatacaaaaatgtggtgtctctctctgtctttggatcgctctttctctctttttgtctctccccaccccatctgctgcttggtctctgagtttctgtctatctctaagtgtgtgtctctatgtctccatgtctgtctcgctgcgtctctgtatctccttttctgcctctatctgtatctctctcattcattccttcctctctccctccccctcctcctctccctcctccccctcctctccctccccctcctctccctcctccccctcctccttcacctcctccccctcctcctcactcctgcctggcggtttgttcttgcctctctaaccttctgtccctccgcccttcctctccgtatccatctcaggctcccttcccctccccagcctacgcagatgtgggtcctcacctcccgctctccgcctctgccctcccggctcctcctccccgcccctctctccctcgccaggtctctgcctccccctccaggcgagcagccctcactgcacttcaggctcctaggggatcccccggccccgttaaggcagccccaggcagagacccagtggagccctggggcggggaaggggggctgcgggcgctggggcggctccaacctgggtcccagcgagcagggggaccctgcatccgccaaggccggcggcccccagcatggagacttccgaagccactcccagctccaccttaagcgcccccccttccccttgctgcggaggatggaaacagcctgctcccggccccaggtgtcccggccacccccgcccgcgtggccccagcgcggctgggagccgaggaccagccccctacctccttccgaatcctgccctttcgcacatcccaccccaagccaacccgaggagtgtttgccgctatgagatcacctgctcccccagcccaacaacaaaattaaataacaccacgggagaggagagagggagggggaggagggaggaagggacaagagagaagagagactgaaacagggagaagaggcaggagaggaggaggtggggagagcacgaagctggaggccgacactgagggagggcgggaggaggtgaagaaggagagaggggagaagaggcaggagctggaaaggagagagggaggaggaggaggagatgcgggatggagacctggagttaggtggct

SEQ ID NO: 22143 - DNA, 2300 bp, Homo sapien
accccctccgcccaccatgaggaaggtccattctttcttcctcatttaacagatgaggaaatgaaggcacagagaggttaagaagcttgttctcggtcacacagctaggacagaggtggatttgaacccaggcagtatggctggggttaccatcctggcctttttgaacatgtccgggagggcaggccctacccagccacacaatgcccagtaactcctgcgggtgacctgccctgcctcgtggagactccgttatatctgggccaccaaggcaggggttagaggtctgtgtgagcccagcactgaggttctctctgggttgaacccacctcagagatgtgccttgggcaggcctggccttctgtagaagctgtgagggtgaaggtctccagcccttaaagaactctccccaacaaaaaaaacagtctccttcccagcttggggcactatgtgctcggctgtggcagctccgtctgttcttccccgcctgcccccgggcacccgcaggggcgcccatcaactcaggcagctcaagctgcaaggaacaaaagcttccctccaggagccggagcttgagacttcgcccaggtggggaggaagacgcagcgagacctaagccttcttcctcagttttgtgtggcagcaaagctgggttctgtgctggcggtgggctcagcacaaatgcccctccgcatcaccccacttacatctgcaatccccgggcccccgtggccgccccccccacttgctttgctccaaggcacttggcaccttccaacaacctagagcacagaaggacctgcgctgctggggtctccccctccctctctggacactgagcctgatggggcaggggtctgtgttcccagcgcgaacccccggcaaagtcccatacagggggagctcaggcagggtcagcggagggacctgcgcctgaatcccgaagttccactctgactcacacagcctgggcccccagctctgacatgccccctctgatggggggcgtctcagccccattccatcctcctgcagctgatgcacctcccagctttcggagtgactcccttctttcaaatccgatgtccctgtcctgctcctgccaaatctggccccctccaacgtggtacctaagggtccagagtcgagggtcgcctttgctgtgccctcgcaccccctgggggcgggcctggggcagtgggtcccaagcctgtcaggattgggcccacgctacaccacgataaacgctggggccacccagggcagcaggtgccgcgccccaactccatgaggcccttgcttttctcagcgggaagtgacagaaaacattatttttctagtcaacccattcggagatggaatagaacagacagcaacattcgcatgaaaatgtcacgatgaaagcactgaggactcgcaggacaccagcggcactggggaggtgcttttgagcttggtcccccgcaccccgggggtccccgccttctccctctgccgcatgagaaacactggggcccaggtgttctcagctcatttgtcgccttccccaccatcttagaaagcgactgaggtcttttgaattccaggggctggtctgaaccttccaagagcacagattttactgaccttaaggctcggtgaacccacagctgacaaaaggttccagagaggaggaggaggggctggcttggggtcacgcagccagaggcaggggctgagcaaagtttccaacagcgattgtctcccaaaggtcagcccctgcccgatcgcgatggcggccaccacaaggcggggctgagccagtgggcaggggtggagtgggatggagcgggacccccgactgacagcctcccgtcctacctgcggtgagcctcctaggccaggctgctcggggctgtcctgctgctggaccgccgggggcaacggcactcacgtcccacaccgttgcgggtggcctggctggcaggggtccctgtggggatagcgtggctgcggttggtgagggattggggtgggaggggggtggcggtgttagattctgcgggctctgctctgagcccccgcccagcccagaaaccccactagcctggggcctgagaacagccacgccactccctcctgagagcccaccgcgccacagcttggaggaagagcctgcggggaactggctgcaggacgctctcttcttgagtgcaggtttggccaatgtcggggcctcagggctcgggttggggggtgcatgccaagagccagggaaaggaagcctgggtcccagatggaccccaggccgcccaggcagg

SEQ ID NO: 22144 - DNA, 2300 bp, Homo sapien
gagtcttgctctgtcacccaggctggagtgcagtggtaccatctcggctcactgcaacctctgcctcccaggttcaaggaattctcctcccctagcctcctgagtagctgggattacaggcgtgcaccaccatgcccagctaattttgtatttttagtagagatggagtttcactaaaaaaaaatgttggctaggctggtctcaaactcctgacctcaggtgatcctcctgcctcggcctcccaaagtgctgggattgcaggcatgagccactgcgcccaggtcattcccatgactttggaacatctgtgggacattcatggagttggaaagtctaagcctctgagccccaaatctgttttgcgttttttttttttttttttttttgagagggagtcttgctctgtcgcccaggctggagtgcagtggtgtgacctcggctcactgcaagctccgcccccggggttcacgccattctcctgcctcagcctcccaagtagctgggactacaggcacccaccaccacgcccggctaattttttttttatatatatttttagtagagacggggtttcactgtattagccaggatggtctcaatctcctgacctcgtgatccgcccgactcagcctcccaaagtgctgggattacaggcgtgagccaccacacctggcctgttttgcatattttatgacagctcacctccccacttccccgccccaccctgtttcttttttccttgtcgctgaatcacagggaaacaggtcgtttgtcctgtggacgggctcacattctggactgggctgattgctgcctcatggtgtcgtttcactgggaactttgtcctcctgttttctgcaaactggtggttagagtgggaagcttgatctgatttttttgtttgtttgtttgaagggagctccgtagctggtaggtagcctcctgctgcttagctgaagctggggagtggctgctggtttctctttcctcctgttaggactgctgggagctctggtggtgcctgcctcttctctcagtaaaattcctcatccatcttttttttttttgagacagagttttgctcttgtttcccaggctggagtgcaatggtgtaatctcagtttactgcaacctccgcctcccaagttcaagcgattctcctgcctcagcctcccaagtagctgggattacaggtgcatgccaccacgccccactgatttttgcatttttagtagagacagggtttcaccatgttggccagactggtctcaaactcctgacctcaggtgatccacctgcctcggcctcccaaagtgctgggattacaggcatgagccactgtgctgggccatggctaatttctgtattcttataaggacggggtttcaccttgttggccaggctggtctctgactcctgacctcagttgatccgcctgcctcggcctcccaaagtgctagaattacaggtgtgagtcaccacaccgggcccatttgtatttaaaaatttttttgaaataggcagggcgaggtggctcacgtctgtaatcccagcactttgggaagctgaggcaggagaatcccttgaacttgtgaggcggcggttgcagtgagctgagatcacgccattgcactccagcctgggcaacaagagcaaaactctctcaaaaagtaatactactaataattaattaataaataaatataagactctgaggggactcagagtcagcgagagcctggcctagcaggactctgtcccccgcctccatgctgccttcctggaggccttcctggctgcctggaggagcggagcagagtgggggcccctttctgttggggcatcacaacagttccccaaggaagaccctcggggacccggatgggggatgcgaccttgtcctgcctctctcccccacccttatggccaggcttggggtgcctggtgcaggtggaggagctaagggtagataacaagatggactttgtggccggcaatggggagggaggaggggctacgggctcacctccctcccgcagcccagccacacctgctctggaaagccctgtagctcctgggcggggtttgccagtcaccgatgctggaagggtttctttggccctgagtgaagagagacccagagggaacactgaggtgcctgcccaaccactctgtcccggtttccttcagcaggaccaggtgagagaaggtgagggggctcctctcccaccctacaacacgcacacctctgcacacacgcccaggcggagagcagggatttgggacgtggacctgtgtgc

SEQ ID NO: 22145 - DNA, 2300 bp, Homo sapien
tccaggtccccatcccggccttggcaatgaccctggcggcttcctcccagcgttcccaaatcattcgctccaagttccgatctggtgagagagggctctctttatgcgtgggggatgggatcctgagaatgctgtactctggggtgggaagggaggggtggtaggtcccatgaggcctgtgttttttgtgcaaaaggtcatgttgcataaaggaggcccaagcacaggggtccggctgtggtggatcaacgagtgtgcaaatggctagtagcatgctcacggggggagcaatggggattggaggccaggggtaggcgtgcagagggctcaagcactgaagagaaacaaaggcttatactggcgcacacgcaggggcagaagagcagaggagggacctcagaggaccagtgtgggagtttgggtgaggggacaatgagctgtcaagctgtgaaagtgtcaaaggtcttgttttaggtcccagggcaggcaaaaagtctgcaagtatagccgggtgtggtggcgcatgcctgtaatcccagctacttgggaggttgaggcgggagaatcgcttgaacccgggaggaggaggttgcggtgagccgagatcacgccattgcactccagcctgggcaacaagagcgaaactccatctcaaaaaaaaaaaaaaaaaaaaaaaagaagtgtgcaagtgtttcgaactacagatcagttcctgagaaggcaaagggtacttgagtgtgcacgtgagcgtgcctatgtggttggatgggtacaaagacaccagcaatcaaagagcaaggagtatacaaaaaggcgcatatgtccagagaaaagcagaaatgtgcagagagatccttgctcccaaattgggggacaaaccctgactgtgcacataagaaagtgaacattcatccaggtggggcgcggtggctcttacctgtaatcccagcactttgggaggccaaggcaggtggatcacctgaggtcaggagttcaagaccagcctggccaacatggcgaaaccatgtctctactaaaaatacaaaaaaatgacgccgggcaaggtggctgatgcctgtagtcctagcactttgggaggccaaggcgggcggattgcctgagctcaggagttcgagaccagcctgggcaacacggtgaaaccccatctctactaaaatacagaaaattagccgggtgtggcggcgtgcacctctagtcccagctactggggaggctgaggcaggagaattgcttgcacccgggaggtggaggttgcagtgagctgagatcgcaccactgcactccagcctgggtgacagagcgatactctgtctcaaaaaataataataataataattagccgggtgtggtggtgagcacctgtaatcccagctacttgggaggttaaggcaggagaatcgcttgaacctgggaggcagaggttgcagtgagctgagattgtgacattgtcctcaagcctgggtgacagagcgagactttgtctcaaaaaaaaaaaaaaaaaagatagttaacattcatcctgggcaacacagcaagaccctgtctctacaaaaaattaaaaaacaaaacaaaaaaatttaggtagtcccaggtactcaggagacttaggtgggaggatggattgagcccaggagttcaaggctgcagtgagctatgatcacacccctgcactccagcctgggttacagagtgagaccttgtctctaaaaaaataaaacaaattaaaaaaaggaaaaaaaaacagtgttaacatggatgctgaggcagagtgagtcaaggatgaagagtctgcaaaaacatgcaagtgcgtaaaaatggcatgtgtgcaaaactagagcccagagagatgcatactgaaaatgtggatatgcggagagtgttgactgtgggaaggccccgagatagcacagaaagtagcaggagtgcatggataaagggaggcgaggtgcaaaggggccaggctgccaagatagcgattgcgcagggggtggggtgggcacacgcttgctcatggagggggcaggtggagccgggggcagggctgcctccagcctgcacgctggctggctcgtagccccagaatggcgctggcccgcggcgctgcgctggcagggagcaggcgggaggcccgaggaagggagcctgctgcccgcccacccgcctgcacaggctgtgtaagggggctgggcacgcatatcccgccaacaactgcagctcccaccagcctgccaggccaggctcctggacactcccttcccgccttcctcctcccacctccc

SEQ ID NO: 22146 - DNA, 2300 bp, Homo sapien
tcagctttcttcttcttttgagacggagtctcgccctgtcactcaggctggagtgcaatggcgcgatcttggctcactgcaacctctgcctcccgggttcaagcgattctcctgcctcagcctcccgagtagctgggattacaggcatgcgccaccacgcctggctaattttttgtatctttagtagagacgggggtttcaccgtgttggccaggctggtctcgaactcctgacctcgtgatccgcccgcctcggcctcccaaagtgctgggattacaggcgtgaaccacctcacctttcttcttttctcaggatcttggagtccagatccccagtctccttctaaccccagattctggacccctgtccctccccaccaggacataagtgcaggacccagccccttcccccgtcaagatacaggagttcaagcccccagctccctttattctctggggttcgcatccctagtccattccctccaccagccacccacccaccacccctaggagtccaggtctcgggactttcactcccctgaacttgactcctccacctttaggaatctgtaaggcaagttcccagccctttctcggggatttgggaagccgtttcccaggcaacggtggccttccatcgtctgaactacaacttccatcatgcccaggggctcctagagtagcgtgtgaacggaccccgccccaggagttgctggggtttgtagtttttttcttcctttgggtgtgacgcagcctcggctcttcccgatgcaactacctcactcccactttcagactctaaccgcgccgccttcggcctcacaggggacatcttcgaaagcttctcctcgcacccgcccctcatcctccccctggggagctcgcgcctgcgcctcactggtccagtgacggacgatgccttgcaccgtgaactccgtaggctccgccgcctcctctgggatcttgagcagcaggagctgccagccaattatcgccatgggcctcccgtggccacgtctccttgagaaccaataccaaacgagcgcgcgaaccttgaaatgtcacgggcttctacggacaggagcccgcctgagcgcaaagctttctgggagttgtagttcttatcccgcgtggaatgttgggagattgagttttcgggaagtagcggatgggacggtgggagcatgggcttaggatgtgaatgccagggagcaataaaggtatccgtggtatcggcagcgcctcgattgttaagactcaggggcgctaatgatgattttctgcagaacaaggttgcagggcccttgtctgggcccctgccgagtctgaggaggtatttatagccacggccttggctcgcccttttgcatgtaatccaacccaagagcagaggagcctcccacacccctcagaacacggccctaagcttgctctgccgattataaggccctcagtcctgccagtgggaaccagcgattctcccttcgacacccccccaaatccatactccagccccctcctccctcagacccaggaatctaagtccccagccccctctggacctttctgcctgccgggcacaccgccgaatccgaacacctctgtccctgttcccaacaccccagaggcccctgcctctttttctttaaacccaggactccaggtccccatccctctcctttcttggatccaggaatctgggccccccgtttgaacttttcactcccctgaacttgactccagttgctgcgtcagggaaaaagtaggcgacaggtggcacctgccggtagggccaggacacgaccacctgccgctgctgctcacccggcgcccctctccgggcacctgcttctgtcagtccgcctgccaccgttccccccgaccccacaaccccaggacgtgcaggaggagcgagccggggaaccctgacgtccccgctctcaccccccagcatcccccaaggcccgcacaggccctcccagcgggtgctcccaccccttctcagggtccccggcggggctcccgtcacaccccaggaaggtgggttggaggcggtcccaggctggtggggcggagcctgtggtgtccagcctcggcctctagactcaacccgccccagagcacagcttcgccgagcccacctggtgagaagcccctggggtggacggggggggcgcactcctcaacggttctatcccctctctggtcccagtcccttccccagagaacctggtggctgacaccctactcactccttctcagatgcaggtcacaggggcccttctattcctcagaaacctg

SEQ ID NO: 22147 - DNA, 2300 bp, Homo sapien
aatccgtatgaagagtgaaggccggttgcagtggctcatgcctgtaatcctagttctttgggaggccaaggtgggaggatcatttgagctcaggagttggagaccaccggtggcaacatagtaagaccccatctctaagaaaagtaggaccagtctctatgagagttgtgcttctataaaaaccagggtattaactcttaagcccctcagtggatccccctcaccttgattctgatcttactgttccacaggaaaagattaaggaaattggagaccgtcagccagaaaagtaagagaaattctgagcagagtggtctggagggatgcaggggttgggttttgcgtctagttctgtgttcaccccatgcatgccccagtgcaagtttctgcttctccttgcgctcaacttttccagctgcgcaatgggagttggtcttgctctcccacttagacttagatcttggggtttgtaaactatgatgagggttgggcagggatcacaaattccttcctctttttcaagccaccctgagggggtccccgaggtgcccctgactcctgaagctgtgtctgtggagctgcggccactcatgctgtggatggccaacaccacggagctgcttagctttgtgcaggagaaggtgctggaaatggagaaggaggctgaccaagagggtgagctctgactcaggctcaggcttgtccaagtctcccatcatgccctgcacctggggacctgggctcctggctgccgacttctggttctccctcttaaccccaagcctgtcctcagacccacagctctgcaatgacttggaattatgtgatgaggccatggccctcctggatgaggtcatcatgtgtaccttccagcagtctgtctactacctcaccaaggttggcccttgcctcttacttcctgtttgacatagcatcacttcctgtttcacgtaatatcacttcctgtttgtggtaacatcacttcttgtttgaactacactgtgtggctctgatgtcactatttgactcaagattttctgcttttctctgacatgacatcccatctcacccaaggactttgctgttctgacaccacttgttagagcttacatcacttcctgcctttctggcttcttttcctttgtaatcatcacctgggcaaacgcggtggctcacatctgtaatcccggcactttgggaggtcaaggcgggtggatcacttgaggtcaggagtttgagagcagcctggccaacatggtgaaaccccatctctactaaaaatacaaaattagccaggcatggtggcctgcgcctataatcccagctattggagaggctgaggcacaagaatcacttgaacctgggaggcggatgttgcagtgaaccaagattacttcatgccactgcattccaacccgggagatggagcgagactctgtctcaaaagagtaatataacgccggatgcagtggctcacgcctgtaatcccagcactttgggaggccaaggtgggcagaccgcgaggtcaggagtttgagaccagactgaccaacatggtaaaaccccgtctctactaaaaatacaaaaattagctgggtatggtagcgcgtgcctgcaatcccagctactcaggaggctgagggaggagaatcgcttgaacccgggaggcggaggttgcagtgagctgaaatcgcaccattgcactccagggcgacagagacagactccatctcaaaaaagtaaaataaaattaaacgaaataaaaaaaaaagtaatcatcaccacttttgacaggctgacctcactacttggtaacatcaccattaccaccttctgaatctcccactttctaagtctactcttcagtcactgttaagtttcatatataatagatagataaatgattgatagatagctagagatcaaatagtgccaggaactgtgatttaaactgaagatcctctttcatcaggccccacttccttcgcttgctgacctcacttcctacagctctgaattcacttccctttcagaacgacagatctttttctctgagtgcccttcctggaagggcctgctttctgccccagtttcccccccattacccttgaccttaacaccacttcttggcattctcagggtttctggcttatggtgggcttgatgccctatgtgcaagaatgagagaggatcttttgggacagctaactatcagtctctaagttcctctagcagcctggattgtgaagccctttcctccttcacttcctgtacattcctgccaagtgtgcgtttatttc

SEQ ID NO: 22148 - DNA, 2300 bp, Homo sapien
gttcaagcgattttcccgcctcagcctcccgagtagctgggattataggcatgagccacctcacctggctaattttgtatttttagtagagagagggtttctccacgttggtcaggctggtctcgaactccctacctcaggtgatctgccggccttggtctccactgcgcccggcctcttttttttgagtctcactctgttgcccaggctggagtgcagtagcctgatcttggctcattgcaacctctgcctcctgggttcaagcgattcttgtgcctcagcctcccaagtagctgggactacagtcatgcgccaccatgcctggctaatttttgtatttttagtagagacaggtttcaccgtgtctggtcttgaactcttgacctcaggtgattcacctgcctcggcctcccaaagtgctgggattgcaggtgtcagccactatgcccagtccaagggaatctctttaaaagtacccattcattgcttgaggaatattgagaaaaactattattggaaggggaaatatatctggaagcctttaccatggtggggtgggggtgaaataatggacaggtgggaccagggatggggaaaaggagatttccttggaaaggtccattctttgagggtgagggtagttgcacagttcattttagaaatagggatctccttgaaagcatctaatgcttgagggaaagaaatggtagagcccatgttaagaaatgggtctctggctgggtgtggtggctcacacctgtaatcccagcactttaggaggccaaggcaggcggatcacaaggtcaagagatcgagaccatcctggccaacatggtgaccctgtccctactaaaaatacaaaaattagctgggcgtgatggtgcgcgcctgtagtctcaactactcgggaggttgaggcaggggaatcgcttgaacccgggaggcggaggttggagtgagccgagatcgtgccactgcactccagcctggcaacagagcgtgactctgtctcaaagaaaaaaaggggggtctccttgtacatagccggtcttcgggatgggtgttatgggaccatccaccatacaaagtgcctgggaagagtccactcagtggcgttgcgggtgcttagagagtcctttgagatccagatctccttggagtgtctattcaaagtcggtggggggccgggcgcgatagttcacgcctgtaatcccagcacttcgggaggccgaggtaggtggatcacctgagatcaggagtttaagaccagcctggccaacatggtgaaaccctttccctactaaaaatacaaaaattagccgggtgtggtggcaggcgcctgtactcccagctactcaacagactgaggcaggagaattgcttgaactcaggaggcagaggttgcagtgagccgagatcgtgccactggactccagcctggaggacagagcgagactccatctcaaaaaaaaaaaaaaaaaaaaaaagaagaagaaggaaaaaaaaagttggtgggaatagaaaagttgttgtagaaaacagagagaacagatctgaagatatggattgaagtgatgtccttagtgcatcctcgtttcccctccaggactttgtggtgtatgtgatgacgcgagagcagcacgtgtttgggcgaggtgggaactcgtctggccgcggggggtccccggctccctatgtggacaccttcctcaacgccccggacatcctgccgcgtcactgcacagtgcgcgcgggccctgagcacccggccatggtgcgcccgtcccggggcgccccagtcacgcacaacgggtgcctcctgctgcgggaggctgagctgcacccgggcgacctcctggggctgggcgagcacttcctgttcatgtacaaggacccccgcactgggggctcggggcctgcgaggccgccgtggctgcccgcgcgccccggggccacgccgccaggccctggctgggccttctcctgtcgcctgtgcggccgcggcctgcaggagcgcggcgaggcactggccgcctacctggacggccgtgagccagtcctgcgcttccggccgcgcgaggaggaggcgctgctgggcgagatcgtgcgcgccgcagccgccggctcgggagacctgccgcccctcgggcccgccacgctgctggcgctgtgcgtgcagcattccgcccgtgagctggagctgggccacctgccacgactgctgggccgcctggcccggctcatcaaggaggccgtctgggtgagcgccccccaatcgccgtccagccccaccagcgccc

SEQ ID NO: 22149 - DNA, 2300 bp, Homo sapien
caggaggcgaaggttgtagtgagataagatcgcgccactgcactccagcctgggtgacagagtgagacttcatctaaaaaaaaaaaaaaaaaaaaagagagagagaaagaaaagagaaaagacgaggttacaacaaatgtaaaggattaggggagggtaaagaaccgtgaaggaggcccggcgcagtgcctcatgcctgtaatcgcagcactttgggatgctgaggcaggcagatcacctgaggtcaggagttccagaccagcctgtccaatatggtgaaaccccatctctactaaaaatacaaaaattagccaggcgtggtggcaagcgcctgtagtcccagatactcaggaggctgaggcaagagaatcgcttgaacccaggaagcggaggttgcagtgagccgagatcgcgccaatgcattccagcctgggcgacagagcgagtctccatctcaaaaacaaaaacaaaaacagaatcatgagtgtcccatggtcatcccccacccccagagcggaatgtggaagttcctcaaatggaagacatgatcctggactgtgagttaaactggcatcaggcttcggaaggcctcactgattacagcttttacagggtgagggcctcaacttctgtaacccttgaactccctagactacaatacttgtgttctggatctatgggcctgcacccacgattctcatgacccaggagggtggtctattaggtgtggtctctacagacctctggggaccccgtgccctgaccagtgacaccctggacactcacctcccacactgaggccctgtgatcttctcacccctgtactcccccaacccctgaattcctcaggcctcagtgaccccttgagcttgggtctaggtttgggggaacaatacggagaccttggtgtccaaggggaaagaggccaccctgaccaagcccatggtgggtccagaggatgcaggcagctaccgctgcgagctgggctctgtgaattccagcccagccacgatcatcaattttcacgtcacaggtcagtgctgtggggctgagagaagtgtaggattcagggcccaggaaagctggggtccgcggcgggggcgtggccttggcgatgggggcgtgacttcctgttgggtgtggtttcggggcacggggtgtggcttcctgccgggggcgtggcctctggccccgaggacaggggttcccttgggtgtgttcaggcttgacactgttgaaggcgtgattatctctgggatggccggctactgggacgggcttgtctttgccagggcaggaactccacgccctgccaggactgctctttacgctttctctaacagtgttgcccaaaatgatcaaggaggaaaaaccttctccaaatatcgtaaccccgggggaggcgaccacggagtcgtccataagcctccagcctctgcagcccgagaaaatgctggcaagccgccttctggggctgctgatctgcggctccctagcactgataaccggccttacctttgcgtaagcaacccattgaagaagacaggcttggcttggagtaaggggcggggcttccaggaacccaacacagaagctggtctgggggctactgaggcctgagagcaggactttcctggggatggagtgcggggggcttgaataggaggacttcgaagggcgaggcttaggtaattgctagaataaggtcacaaagggggaggttgggaggggtgtcccccacacaattagtacccaaaccggttccatgatctgcaccccactcccacccctaggatatttcgtcgaaggaaggtgatcgatttcatcaaatcctcactgtttggccttggcagtggagcggccgagcaaacccaggtcccaaaagaaaaggccacagattcgaggcaacaataaagatttatcttgttgtctaagcatctgactcactccccgggacgggactgattctagcctttggttccccgagaggagaggtctggggatgggctccggcctgagggaggaagggcagaaaaccgggacccttgggtcctggaggggaccaactgactgcgatgtaattccagaatcaaggaatggggcagggccaaccctacccagatctcctcccccaggcctggtctcctcacaggacgccccctccccgctcttcctgccgggtttcctcttgccttttcctgtcccccacccagtgctgggagccgtggcagaggcaagagcagtggaactgacccaggccagtggagccagggcctccgggtgtgccggacccgaagcag

SEQ ID NO: 22150 - DNA, 2300 bp, Homo sapien
ggacccagcctcagatccaggcaggagcacgaggtctggccaaggtggacggggttgtcgagatctcaggagccccttgctgttttttggagggtgaaagaagaaaccttaaacatagtcagctctgatcacatcccctgtctactcatccagaccccatgcctgtaggcttatcagggagttacagttacaattgttacagtactgttcccaactcagctgccacgggtgagagagcaggaggtatgaattaaaagtctacagcactaacccgtgtctctgtagcttttttggagccagagccactgtgtatgtgtgtgtgggtttgtgtgtgtgtgtgtgtgtgtgtgtgtgtaagagagtggaggaaaaggtggggtacttctgaagacttttatttttttttaattaatttattttttttcagagatcgagtcttgctctgtggcccaggctggagtgcagtagtgtgatctcggcccactgcaaactcccacctctcggattctggtgcctcagcctcccaagtagctgggactacagacgttcgccaccatgcccagctaatttttgtatttttagtagagacggggtttcaccatgttagccaggctggcctcgaactcctgacctcagacaatctgcccgcctcggcctcccaaagcgctggaattacaagcgtgagccaccgcgccgggccctgaggatttttattactcgtgattgggagtactgtccctacttagatctgacagccccttgttgctggacttgtgtgagttgtggtccctgtttttctggttccctgtttctatcacacaggagagagagaccttccaggaccctaacgtctgagcccccagttgctcactcctggactgtcagtattggcccccagtcctctcctcccactgggacctccgcgtgggcagaagaggcggaggagggagcggattatcactgaactacatttcccggaaagctatgaggttggcagcgtcagtcagctacagagaaagaggccccagggcattttgggagttgtagtcttagggctaaaatgtccacttcgtggctcgacagccgtttccaaggaccgcggtgggggcggcagcggcctggggggccggatctagcccaaagcctgggtcctggggcaaggggaggggaggaaactgaaggcctgagtccggtccttgactctggaagccagagtagtcaggaggcttcctcttccctagatgctgggaaaattctagtccaaaaaggctgcagcctctgtgacgtcatggagcgatgggcgggacctccctttgttgcagtccaatcagacagagttgagtttctgggtggggccgaggaaaaccccaaggaatatctataaaggaattcgggcccctacgtgagaagctcggagggggtggtttcaggagttccttgtggagaggggatcgtccgtgactcagaccccgtcgaaaagctctcgatttcacgcaaccaaccttaccctcgtccccaacacaatccttgattttacccctgggaaaattagcgtaggtggtcatgaccccggcttcctctttaaaagccctcagaacctggaccgggctcctcaatgaaccctagtgttagaggccacaaatcgggaaccaaggtcggggagcggctgtttagggtgcatcactgttcaggatgcatcggggctcctttttctaagcggaagggtgcgccctgcaaattgggagcccgttagttttggggaagggtgaacaagggccccctaggtctagaggaccgcatggagtctcgcttaagtgttagtggggtcctcagttctaggaatctggtatgtgttttggttttgaaggagttccgagtttgataatatcgtggttgggtctgtgttagatgtttattggtttgggcattgaatcttcagcttgaggttcaacaggttttggggggctggcgggggagtgcctcggtgttgctcttaagggttggagttcaggctcacgtcaatctggggacttggaaaattccacagtttgggattttgggaaggggcgcatggggttgggagattccaggttctgagtttggggacttatgagtgattcctgtttaatagtttttctgatctctcagttgggggattcagtgagaaccctaaattttgggtcccctggattggggctcagtttcacacttcggaggcatttgatgaaggacataggtcctctttatttggagatttcctgaagatcctcttttcgaggtttgcggaccccatggatagg

SEQ ID NO: 22151 - DNA, 2300 bp, Homo sapien
ggataattttttttaatttttgtagagacgaggtcttgtgatattgcccaggctgttcttcaactcctgggctcaagcagtcctcccaccttggcctcccagaatgctgggtttatagatgtgagccagcacaccgggccaagtgaagaatctaatgaatgtgcaacctaattgtagcatctaatgaatgttccaccattgctggaaaaattgagatggaaaacaaaccatctctagttggccagcgtcttgctctgttcacagtctctggaaaagctggggtagttggtgagcagagcgggactctgtccaacaagccccacagcccctcaaagacttttttttgtttgttttgagcagacaggctaaaatgtgaacgtggggtgagggatcactgccaaaatggtacagcttctggagcagaactttccagggatccagggacacttttttttaaagctcataaactgccaagagctccatatattgggtgtgagttcaggttgcctctcacaatgaaggaagttggtctttgtctgcaggtgggctgctgagggtctgggatctgttttctggaagtgtgcaggtataaacacaccctctgtgcttgtgacaaactggcaggtaccgtgctcattgctaaccactgtctgtccctgaactcccagaaccactacatctggctttgggcaggtctgagataaaacgatctaaaggtaggcagaccctggacccagcctcagatccaggcaggagcacgaggtctggccaaggtggacggggttgtcgagatctcaggagccccttgctgttttttggagggtgaaagaagaaaccttaaacatagtcagctctgatcacatcccctgtctactcatccagaccccatgcctgtaggcttatcagggagttacagttacaattgttacagtactgttcccaactcagctgccacgggtgagagagcaggaggtatgaattaaaagtctacagcactaacccgtgtctctgtagcttttttggagccagagccactgtgtatgtgtgtgtgggtttgtgtgtgtgtgtgtgtgtgtgtgtgtgtaagagagtggaggaaaaggtggggtacttctgaagacttttatttttttttaattaatttattttttttcagagatcgagtcttgctctgtggcccaggctggagtgcagtagtgtgatctcggcccactgcaaactcccacctctcggattctggtgcctcagcctcccaagtagctgggactacagacgttcgccaccatgcccagctaatttttgtatttttagtagagacggggtttcaccatgttagccaggctggcctcgaactcctgacctcagacaatctgcccgcctcggcctcccaaagcgctggaattacaagcgtgagccaccgcgccgggccctgaggatttttattactcgtgattgggagtactgtccctacttagatctgacagccccttgttgctggacttgtgtgagttgtggtccctgtttttctggttccctgtttctatcacacaggagagagagaccttccaggaccctaacgtctgagcccccagttgctcactcctggactgtcagtattggcccccagtcctctcctcccactgggacctccgcgtgggcagaagaggcggaggagggagcggattatcactgaactacatttcccggaaagctatgaggttggcagcgtcagtcagctacagagaaagaggccccagggcattttgggagttgtagtcttagggctaaaatgtccacttcgtggctcgacagccgtttccaaggaccgcggtgggggcggcagcggcctggggggccggatctagcccaaagcctgggtcctggggcaaggggaggggaggaaactgaaggcctgagtccggtccttgactctggaagccagagtagtcaggaggcttcctcttccctagatgctgggaaaattctagtccaaaaaggctgcagcctctgtgacgtcatggagcgatgggcgggacctccctttgttgcagtccaatcagacagagttgagtttctgggtggggccgaggaaaaccccaaggaatatctataaaggaattcgggcccctacgtgagaagctcggagggggtggtttcaggagttccttgtggagaggggatcgtccgtgactcagaccccgtcgaaaagctctcgatttcacgcaaccaaccttaccctcgtccccaacacaatccttgattttacccctgggaaaattagcgtaggtggtcatgacccc

SEQ ID NO: 22152 - DNA, 2300 bp, Homo sapien
tcattagctattacttttattctttgttgtataactaatataaccaggaaacaaccggtgggtatagggtcaggtactgaagggacattgtgagaagtgacctagaaggcaagaggtgagccttctgtcacaccggcataagggcctcttgagggctccttggtcaagcgggaacgccagtgtctgggaaggcacccgttactcagcagaccacgaaagggaatctccttttcttggaggagtcagggaacactctgctccaccagcttcttgtgggaggctgggtattatctaggcctgcccgcagtcatcctgctgtgctgtgcttcaatggtcacgctccttgtcctcttgcattttcctcccgtactcctggttcctctttgaagttcgtagtagatagcggtagaagaaatagtgaaagcctttttttttttttttttgaggcggagtctcgctctgtcccccaggctggagtgcagtggcgtgatctcggctcactgcaatctccgcctcctgggttcacaccattctcctgcctcaccctcccaaatagctaggactacaggcgccctccaccacgcgcccggataattttttgtatttttagtagagacagggtttcaccgtgttagccaggatggcctccacctcctgaccttgtgatccgcccgcctcagcctcccaaagtgctgggattacaggcgtgagccaccgcgcccgcccgaaatagtgaaagtcttaaagtctttgatctttcttataagtgcagagaagaaaacgctgacatatgctgccttctctttctgcttcggctgcctaaaagggaagggccccctgtcccatgatcacgtgacttgcttgaccttatcagtcatttggacgactcaccctccttatcctgcccccccttgtcttgtatacaataaatatcagcgcgcccagccattcggggccactaccggtctctgcgtcttgatggtagtggtcccccgggcccagctgttttctctttatctctttgtcttgtgtctttatttcttacaatctctcctctcctcacaggggaagaacacccacccgcaaagccccgtagggctggaccctacgttagcctgccctgctcggggttggcgatgctggaggtgggccttggaccagagaaaatgctttaattaggtgacaagcgggcagaggcctttgtctctggcgccggcagccacggcccccgctgacggcgtgggaaacagaccctgttccactccggtctccagccttggaatggttgccttcgtgcagtgcaggtctggaaagtagcagtttggcacgggaccctagaattccccaaaaggagtgactaggggctgggattctggaatttgagtgtggacggtgaggcggggggtgtgggagatcggagaccctggtgggcgcgggagcacctgcaggctggaggccctcgcgcgctccggcggcagcctggcaaacaggttctccatcccccaggaggacgcggcagagggcggacgatcgctccactcgccgggaccaggtgcgggggccctgcccagccgctggggcgtggccaggctcgaagcacccaggtgtcgggggccgactctaagccctggcaccggaagagagagggcggcggattggacctcccggctccagcattgcaactgggcgctccgtctcctggtccacgcaatgatgctgcggctgctcagaagccaggtagcctgccctgggtgaagccttcgcgcaggtcaatgacggggcggaggggcagggcgcggtcccctgcatccccgatctggggagcggtgggcccaggggccatcgccttagcccctggcgctggggctcggcgccaagtgacgggcggggctccaccttccagccatccgcccggcccgggagggcggacgctgcgagactcccggccgcgccctctccttcctctcctccccaagccctcgctgccagtccggacaggctgcgcggaggggagggctgccgggccggatagccggacgcctggcgttccaggggcggccggatgtggcctgcctttgcggagggtgcgctccggccacgaaaagcggactgtggatctgccacctgcaagcagctcgggtaagtggggactgccccactcagttgttcctgggacccaggaacaactccttcagaaccaggaggtgcacccccaacctcttctccaggtcttcctaaggccctaggaatctccgccacctccccagccattactcctccaggaaccaagatgctccttc

SEQ ID NO: 22153 - DNA, 2300 bp, Homo sapien
gcattttctctggtccaaggcccacctccagcatcgccaaccccgagcagggcaggctaacgtagggtccagccctacggggctttgcgggtgggtgttcttcccctgtgaggagaggagagattgtaagaaataaagacacaagacaaagagataaagagaaaacagctgggcccgggggaccactaccatcaagacgcagagaccggtagtggccccgaatggctgggcgcgctgatatttattgtatacaagacaagggggggcaggataaggagggtgagtcgtccaaatgactgataaggtcaagcaagtcacgtgatcatgggacagggggcccttcccttttaggcagccgaagcagaaagagaaggcagcatatgtcagcgttttcttctctgcacttataagaaagatcaaagactttaagactttcactatttcgggcgggcgcggtggctcacgcctgtaatcccagcactttgggaggctgaggcgggcggatcacaaggtcaggaggtggaggccatcctggctaacacggtgaaaccctgtctctactaaaaatacaaaaaattatccgggcgcgtggtggagggcgcctgtagtcctagctatttgggagggtgaggcaggagaatggtgtgaacccaggaggcggagattgcagtgagccgagatcacgccactgcactccagcctgggggacagagcgagactccgcctcaaaaaaaaaaaaaaaaaggctttcactatttcttctaccgctatctactacgaacttcaaagaggaaccaggagtacgggaggaaaatgcaagaggacaaggagcgtgaccattgaagcacagcacagcaggatgactgcgggcaggcctagataatacccagcctcccacaagaagctggtggagcagagtgttccctgactcctccaagaaaaggagattccctttcgtggtctgctgagtaacgggtgccttcccagacactggcgttcccgcttgaccaaggagccctcaagaggcccttatgccggtgtgacagaaggctcacctcttgccttctaggtcacttctcacaatgtcccttcagtacctgaccctatacccaccggttgtttcctggttatattagttatacaacaaagaataaaagtaatagctaatgattaataatgtttacactaatgattgatactgtccatgatcatctctatatctaatttgtatgataactattcttattctaactattttctttattatactgaaacagtttgtgccttcagtctcttgcctcggcacctgggtaatccttccccacagactgaccctcccattcaagatacatcaatgtcaaagactcaggagtttgacttgattcccagaagtttaaccatcatctccccaggctcgggactcccagcacccagacccttctgctcacacccagcagtccaggcccccagaccctcctccctcagacttaggagtccaggctcccggcccctccttcctcagacccaggagtccaagccccctgcccctccttcctcagacccaggagtccaggaccccagcccctccttcctcacacccacgagtccagatccctagcccctactccctcagacccaggagtccagaccaaagctccctcctccctcagacccaggagcccaagttccccagcccctcctccctcagatccaggagtacaggcccagaccctcctccctcagacccaggagtccaggccccccacccctcctccctcagacccaggagtccagagccccagccctcctccctcagacacagaaggcctacccttgcacccttaggggctccaggaaattagccaacctgtcttccctctgggtgcccactccagggcctggcttggctgccaactccagtcagggactttcagccacccctccccccaggttatttcaggagcacctgcctgggcctgggatggcttctctggtgaaagaaacaccaggattgcatcagggaggaggaggctgggatgtccagggtctgagcatctgagcagggacagatgaggttgaggttggcccacggccaggtgagaggcttccaaggcaggatacttgtgtctcagatgcggtcgcttctttcatacagcaattgccgccttgctgaggatcaaggaacctcagtgtcagatcacgccctccccccaaacttagaaattcagatggggcgcagaaatttctcttgttctgcgtgatctgcatagatggtccaagaggtggtttttccaggagcc

SEQ ID NO: 22154 - DNA, 2300 bp, Homo sapien
atcctggctaacacggtgaaaccctgtctctactaaaaatacaaaaaattatccgggcgcgtggtggagggcgcctgtagtcctagctatttgggagggtgaggcaggagaatggtgtgaacccaggaggcggagattgcagtgagccgagatcacgccactgcactccagcctgggggacagagcgagactccgcctcaaaaaaaaaaaaaaaaaggctttcactatttcttctaccgctatctactacgaacttcaaagaggaaccaggagtacgggaggaaaatgcaagaggacaaggagcgtgaccattgaagcacagcacagcaggatgactgcgggcaggcctagataatacccagcctcccacaagaagctggtggagcagagtgttccctgactcctccaagaaaaggagattccctttcgtggtctgctgagtaacgggtgccttcccagacactggcgttcccgcttgaccaaggagccctcaagaggcccttatgccggtgtgacagaaggctcacctcttgccttctaggtcacttctcacaatgtcccttcagtacctgaccctatacccaccggttgtttcctggttatattagttatacaacaaagaataaaagtaatagctaatgattaataatgtttacactaatgattgatactgtccatgatcatctctatatctaatttgtatgataactattcttattctaactattttctttattatactgaaacagtttgtgccttcagtctcttgcctcggcacctgggtaatccttccccacagactgaccctcccattcaagatacatcaatgtcaaagactcaggagtttgacttgattcccagaagtttaaccatcatctccccaggctcgggactcccagcacccagacccttctgctcacacccagcagtccaggcccccagaccctcctccctcagacttaggagtccaggctcccggcccctccttcctcagacccaggagtccaagccccctgcccctccttcctcagacccaggagtccaggaccccagcccctccttcctcacacccacgagtccagatccctagcccctactccctcagacccaggagtccagaccaaagctccctcctccctcagacccaggagcccaagttccccagcccctcctccctcagatccaggagtacaggcccagaccctcctccctcagacccaggagtccaggccccccacccctcctccctcagacccaggagtccagagccccagccctcctccctcagacacagaaggcctacccttgcacccttaggggctccaggaaattagccaacctgtcttccctctgggtgcccactccagggcctggcttggctgccaactccagtcagggactttcagccacccctccccccaggttatttcaggagcacctgcctgggcctgggatggcttctctggtgaaagaaacaccaggattgcatcagggaggaggaggctgggatgtccagggtctgagcatctgagcagggacagatgaggttgaggttggcccacggccaggtgagaggcttccaaggcaggatacttgtgtctcagatgcggtcgcttctttcatacagcaattgccgccttgctgaggatcaaggaacctcagtgtcagatcacgccctccccccaaacttagaaattcagatggggcgcagaaatttctcttgttctgcgtgatctgcatagatggtccaagaggtggtttttccaggagcccagcacccctcctccctccgactcaggtgcttgagaccccagatccttctctctgagactcaggaatgtgggcccccagcccctttcacctgggtcccagctaacccgatcctcccctccctcatcccctagacccaggagtctggccctccattgaaaggaccccaggttacatcatccattcaggctgcccttgccacgatggaattctgtagctcctgccaaatgggtcaaatatcatggttcaggcgcagggagggtgattgggcgggcctgtctgggtataaattctggagcttctgcatctatcccaaaaaacaagggtgttctgtcagctgaggatccagccgaaagaggagccaggcactcaggccacctgagtctactcacctggacaactggaatctggcaccaattctaaaccactcagcttctccgagctcacaccccggagatcacctgaggacccgagccattgatggactcggacgagaccgggttcgagcactcaggactgtgggtttctgt

SEQ ID NO: 22155 - DNA, 2300 bp, Homo sapien
tcccagttcagacttcacagagaacattccagccctcggagccatcagtgctctctcaggccaggcggggtgtctccctagcactcaaggtcctggtcactttactggccatggcttccccgagtgtccctgtgcccagcatgagccgtgcacacaggggccgtgtgggcaggagcaggggttactgaatcacgagactcccaataacctgagcctcaggccgctccagcatccacacatcacatgattgaggtcactggcgccccggcctgggcctcagtttcctcatcttgcaaacactgatgacaacttcaacctccaaatgttgcagctgggggcgtgcagagcaaatagaatcaagtctggctccgggggggatgagcaagacaaggcaccccaggctgtgagggcgacatataggaggagcatggtgggtggtgaggagggtcctggaaactcaccgatccatacagggccccatctggccgctggcacaggaacctggatgtcttgactcccaagatttgaataactcccggcttcaaggctttcagctgcaggagacctaaggggtgaaagcgataaggtggttcgaggacctctcccacccgggactgtcccaccacccgactctgtcccaccatccggctctgtcccagccctgggagtccaagcccacagcctacctcctccctcagacccaggagaagcccaagccaaagccccctcccaactcagacccaagagtccaggaccccagcccttccttcttcaaacccaagagtccagacccccagcccctcctccctcagacccaggggtccagacccagcccctcctccctcagacccaggggcccagatccccagcccctcctccctcagacccaggagtccagatccccagcccctcctccctcagacccaggggccaaggcccccagcccctcctccctcagacccaggaatccagacccacagcccctcctccctcagacccaggctctggcccacactcactttcggggctctggtcagcagcgccccccaccgtcccatcctccctgatctccaggtgggcttctgtctgctgggcatcatctgtgtagaggtaccgctgccggacttggcccccgaattgcaggagaggactggagtcagggatggggtgtgcctggcaggctcccagcagaagaccagccagcacagaaacccacagtcctgagtgctcgaacccggtctcgtccgagtccatcaatggctcgggtcctcaggtgatctccggggtgtgagctcggagaagctgagtggtttagaattggtgccagattccagttgtccaggtgagtagactcaggtggcctgagtgcctggctcctctttcggctggatcctcagctgacagaacacccttgttttttgggatagatgcagaagctccagaatttatacccagacaggcccgcccaatcaccctccctgcgcctgaaccatgatatttgacccatttggcaggagctacagaattccatcgtggcaagggcagcctgaatggatgatgtaacctggggtcctttcaatggagggccagactcctgggtctaggggatgagggaggggaggatcgggttagctgggacccaggtgaaaggggctgggggcccacattcctgagtctcagagagaaggatctggggtctcaagcacctgagtcggagggaggaggggtgctgggctcctggaaaaaccacctcttggaccatctatgcagatcacgcagaacaagagaaatttctgcgccccatctgaatttctaagtttggggggagggcgtgatctgacactgaggttccttgatcctcagcaaggcggcaattgctgtatgaaagaagcgaccgcatctgagacacaagtatcctgccttggaagcctctcacctggccgtgggccaacctcaacctcatctgtccctgctcagatgctcagaccctggacatcccagcctcctcctccctgatgcaatcctggtgtttctttcaccagagaagccatcccaggcccaggcaggtgctcctgaaataacctggggggaggggtggctgaaagtccctgactggagttggcagccaagccaggccctggagtgggcacccagagggaagacaggttggctaatttcctggagcccctaagggtgcaagggtaggccttctgtgtctgagggaggagggctggggctctggactcctgggtctgagggaggaggggtggggggcctggactcctgggtctgagggagga

SEQ ID NO: 22156 - DNA, 2300 bp, Homo sapien
ccgagtagatgggctcaagcgatccacctgcctcagattacaggcatgagccaccatgctggtcttttttttttttttttttttttttttttttgagagacactctatcactcatgctggagtgtagcagtgtgatcgtagctcaccacagccttgaccagtaggtcaaggtgatcctcccaccttagccttctgagtaactggaattacaggtgtgtgccaccatacctggctaatttttaaattgtttgtagagacagggtcttgctatattgcccaggctgatcttgaactcctggcctcatgcagtcctcccacctctgtctcctaaagtgctgtgattacaggcatgagctactgagccagctgcctactttctttctttgttttttttctttttaattgagacagagagtcttgctctgtcgcccaggctggagtgcagtggcaccatctcggctcactgcaacctccgcctcctgggtttaagcaattctcctgcctcagcttcccaagttgctgggactacaggcgcccgccaccacacccagctaacttgtattttctgtagagacagggtctccctatgttgcccaggctggtcttgaacacctggcctcaagctatcctcctgcctcggcctcccacagtgctgggattacaggcgcgagccactgcgtgtggcctctttctatgattagatctattttggcatctcttgtttcttggcgtcaatttctgtttttgtttttttttttttctgtttgtgcgcccctttctgtgtttctttttctcatccttcctcttccatctcttactctctttttttcatcttggctctgagggcagctctcctgcccacaggctggctgtcgcactgtgtttgtgtctctcatactgtgggtgtcctatccctctgggcagaagcatggctgcaaggctgagcagtctagatgtcgccacccaaaggcaatctggggacccacgctctgatcaccccggaatccctggagcctcacaccagcaagaccacgctgcaggcccatctcccagcaactcacctagcgacaagtgaccacgcccattcacgtccatcttccagaatcagtgccaactcacccagctcacagggcaggccaggccaggccactctgtctctctcaacctcacgccccaacgcctccccacagggctggggaaagaggccttgtgaggtcaaaggtcaccagagagggcccagcctgctggacacagccagacctgctcttcctactcccctctgggaggacccgcctgagcctcatgcagtgaggactgcagtggctccccaggcccctgtagctgcccctcagccccaggggctgaagggaattggagtcactgccaaaatgggtttgtatttcaggtaatcagagcccagttgatcgaataccttcagagaataagcacctgtactcctgggtctggcggaggaggggctggggaactggactcctgggtctgagggaggaggggtggggcctgtactcctggatgtaagggaggagggtctgaggcctggactccagggtctgagggaggaggggctgggggcccagacttcgggtctgagggaggaggcagctagagtctggactcttacttaggtctgagggaggcgggcctggggtctgcacccctgagctctgggggagcaggacctgtcggtccttggtcttctaaggcctgtcagcacttgggtacccggaggccttcacttacctgtgtgccttccctggttgttttcttgtctgagctgatctccaggctgcgaccaaaggtctctggggtgggaggcgcttgcgtttgactttgccgcagcatggaggagggggcgggagctgactcagctctttccagcgagccctcgtcagggcagggaggggacttggcctccttcaggaccacctgccccgtctagaatggactgaaactgggacagaacaggcaggccagtgggacctccaagtgcaggaggtggcgagcgagctgccagggcccctgctgtgccccactcaccccctctctcacttctttctccacccagatctgggcacgaaagcttctctctgtcccttggcttctgtgtggtcccagaagatatgcctcctccagtttcaaggtgaaaggagggaactcgatgcttggctctgagagaggagggggctggcagctggttttgggcatctccaaaaggtccacagcccagagatggcagtgagtggtggtagcttaacagcctgccattgggccgcagacaa

SEQ ID NO: 22157 - DNA, 2300 bp, Homo sapien
cggggtgtggagaggacagtgctggaccatggtagggacagtctggaaggtactggcctagacagcaacatagggatagtcctggggattgaaaaagacaacaatgggattttttttttttttttaatttcagacctggtgaataggaaataagccctgatatttggcagagacaatgctggttataatggggaaaagtgctgggctttggataggggacattcctgagctgtttgggacagtacttggctctgctggggaccagttctgataagttacaggcacaatctggacttgtgatgtggagcatcttgggccatcatagaacagccctggtctgtgatgggggagagtcctgggctataaagggggcagttctagacgtgatggggtcatgtgtgggctgtgacaagggcagactgcggtatgatggggtctctccggggccgtgatatggggacagtcctggagtatggagggcactgctgggctttgacagtgacactcctggtctttgatggtgatactcctgggctgtatgggacataatggaggttctatcacattatagagacctgccctgtgaacccccaaacgtactttatttctttgtctcgtcttttctttttgaccgagtcttgctctgttgctcaggctggagtgccgtggcacgatctcggctcactgtaacctccgcctcatgggttcaagtgactgtggtgcctcagcctcccgagtagatgggctcaagcgatccacctgcctcagattacaggcatgagccaccatgctggtcttttttttttttttttttttttttttttttgagagacactctatcactcatgctggagtgtagcagtgtgatcgtagctcaccacagccttgaccagtaggtcaaggtgatcctcccaccttagccttctgagtaactggaattacaggtgtgtgccaccatacctggctaatttttaaattgtttgtagagacagggtcttgctatattgcccaggctgatcttgaactcctggcctcatgcagtcctcccacctctgtctcctaaagtgctgtgattacaggcatgagctactgagccagctgcctactttctttctttgttttttttctttttaattgagacagagagtcttgctctgtcgcccaggctggagtgcagtggcaccatctcggctcactgcaacctccgcctcctgggtttaagcaattctcctgcctcagcttcccaagttgctgggactacaggcgcccgccaccacacccagctaacttgtattttctgtagagacagggtctccctatgttgcccaggctggtcttgaacacctggcctcaagctatcctcctgcctcggcctcccacagtgctgggattacaggcgcgagccactgcgtgtggcctctttctatgattagatctattttggcatctcttgtttcttggcgtcaatttctgtttttgtttttttttttttctgtttgtgcgcccctttctgtgtttctttttctcatccttcctcttccatctcttactctctttttttcatcttggctctgagggcagctctcctgcccacaggctggctgtcgcactgtgtttgtgtctctcatactgtgggtgtcctatccctctgggcagaagcatggctgcaaggctgagcagtctagatgtcgccacccaaaggcaatctggggacccacgctctgatcaccccggaatccctggagcctcacaccagcaagaccacgctgcaggcccatctcccagcaactcacctagcgacaagtgaccacgcccattcacgtccatcttccagaatcagtgccaactcacccagctcacagggcaggccaggccaggccactctgtctctctcaacctcacgccccaacgcctccccacagggctggggaaagaggccttgtgaggtcaaaggtcaccagagagggcccagcctgctggacacagccagacctgctcttcctactcccctctgggaggacccgcctgagcctcatgcagtgaggactgcagtggctccccaggcccctgtagctgcccctcagccccaggggctgaagggaattggagtcactgccaaaatgggtttgtatttcaggtaatcagagcccagttgatcgaataccttcagagaataagcacctgtactcctgggtctggcggaggaggggctggggaactggactcctgggtctgagggaggaggggtggggcctgtactcctggatgtaagggaggagggtctgaggcctggactccag

SEQ ID NO: 22158 - DNA, 2300 bp, Homo sapien
gaggaggatatcgttatatttatttcccatcctttagacgagtccttctgccccacttagcccttgcaccccagacccacaagttgcctcgaccctgaaggactgcagctccccccgccccccaaccccaggccttgcagcaagcaggtgcctgatgttgctagccctgtcgctgtcgccaggggctcctgggaagggtagagcggtttggcttcaccagcgcgctaactaaaggcccgcaggggagagtaaattaagcgctaattaggaggtaatggagggggagacgcagaaggccctcttactcttggccctcagggaaaaggagttttcctctcactgcctgtagaataggaaggtggctggcaagaaaagtccaaagggaagagaaagtagggggttgagacatctggatcagagggaggaggggctgaaactcctgggttttggtccgcagggcactgggggacgcagactccccagctggacccagggggggggcagggcccgggtgcgctggcgtcccccaggtgaggggtggagctgcagggctgctgcggattggctgtggccgggggggcgtgtgcaccaaccgctgattggccgcggcgggggcgggagctgtcagtgggccccgaccctacagcccggggctggcgggtggggcaggaggactggggcggagcgcagaaaaacagggcgacgccctgtgagggaagggtcccgcggtttggctgtttgggcctgtggctgttaggggtggcaggatagtgacccggggacaggacttgggggcactgtgggggtagaatttggagacagagtgtcccagggtaggattgccgagacacgatggccgagggatacgattttttttttttttttttaatttgagacggagtctcactctgtcgcccaggctggagtgctgtggtgcaatgtcggctcactgcaacctccgcctcccgggttcaagcgattctcctgcctcagcctcccgaatagctgggattacaggcccccggcaccacgctcgactaatttttgtatttttatgtatttatttttatttatttatttattttgagacggagtctcaccctgtcacccaggctggaaatgcagtggcgcgatctcggctcaccgcaacgtccgcctccagggttcaaatgattctcctgcctcagcctccctagtagctgggattacaggcgcacaccaccacacccggctaatttttgtatctttagtagagacggggtttcaccatgttggtcaggcgggtcttgaactcctgaccttgtgatccgcccacctcggcctcccaaagtgctgggattacaggcgtaagccaccgtgcctggccttaatttttgtatttttagtagagacggggtttccccatgtcggccaggctggtcttgaactcctggcctcaggtgatccacccgccttggcccccaaagtgctgggattacaggtgtgagccaccaagccaggacttttttttttttttttttttgagacggagtctcactctgtcgcccaggctggagtgcagtggcatcatctcggctcactgcaacctctgcctccccgattcaagcaattctcctgcctcagctttccgagtagctaagattacaggcgcccgccaccacgcccggctaattttttgtatttttagtagagacggggtttcatcatgttggaccaggctggtctctaactcctgacctcaggtaatccgcccgcttcggcctcccaaagtgctaagattacagacctgagccacttcgcctggcagggaccgtatttcaagtcctgccctcccaccagcgcctgcgccccgcagcagtgtccggctccctgccgacgccctggagctgggacggcctggggcgctggtcggccgccttcccccagaaggaggcgtgagcggggcgtggccggaacgtctctcttcggagccgcgccccgggcgggcacagttacgcgccgcacggatcatggccgcagccgctctggggcaggtgggttcgcagccccgcgccggggtctgggaaataaccgggggaggcgcacttccgggaagaccactggcctgcagccggtccgactcggcgccgctcctcccgccctggggttccgctgcagggcgcggaggaggatggcgccctttggaaaggagcacgaggctttaatggggtgagggggagcaggtagacgcggatgaggtggggcaagtaattggcggggaggtaaaaaaaaaaaaaaaaagggaaacatggtggaggacc

SEQ ID NO: 22159 - DNA, 2300 bp, Homo sapien
ctaggactctcccaccccaaactccaacctgtatcagatgcagcccccaagcccttagactctaagcccagttagcaaggtgccgggtcaccctgcaggttcccataaaaacgatttgcagccagaaggaggaggatatcgttatatttatttcccatcctttagacgagtccttctgccccacttagcccttgcaccccagacccacaagttgcctcgaccctgaaggactgcagctccccccgccccccaaccccaggccttgcagcaagcaggtgcctgatgttgctagccctgtcgctgtcgccaggggctcctgggaagggtagagcggtttggcttcaccagcgcgctaactaaaggcccgcaggggagagtaaattaagcgctaattaggaggtaatggagggggagacgcagaaggccctcttactcttggccctcagggaaaaggagttttcctctcactgcctgtagaataggaaggtggctggcaagaaaagtccaaagggaagagaaagtagggggttgagacatctggatcagagggaggaggggctgaaactcctgggttttggtccgcagggcactgggggacgcagactccccagctggacccagggggggggcagggcccgggtgcgctggcgtcccccaggtgaggggtggagctgcagggctgctgcggattggctgtggccgggggggcgtgtgcaccaaccgctgattggccgcggcgggggcgggagctgtcagtgggccccgaccctacagcccggggctggcgggtggggcaggaggactggggcggagcgcagaaaaacagggcgacgccctgtgagggaagggtcccgcggtttggctgtttgggcctgtggctgttaggggtggcaggatagtgacccggggacaggacttgggggcactgtgggggtagaatttggagacagagtgtcccagggtaggattgccgagacacgatggccgagggatacgattttttttttttttttttaatttgagacggagtctcactctgtcgcccaggctggagtgctgtggtgcaatgtcggctcactgcaacctccgcctcccgggttcaagcgattctcctgcctcagcctcccgaatagctgggattacaggcccccggcaccacgctcgactaatttttgtatttttatgtatttatttttatttatttatttattttgagacggagtctcaccctgtcacccaggctggaaatgcagtggcgcgatctcggctcaccgcaacgtccgcctccagggttcaaatgattctcctgcctcagcctccctagtagctgggattacaggcgcacaccaccacacccggctaatttttgtatctttagtagagacggggtttcaccatgttggtcaggcgggtcttgaactcctgaccttgtgatccgcccacctcggcctcccaaagtgctgggattacaggcgtaagccaccgtgcctggccttaatttttgtatttttagtagagacggggtttccccatgtcggccaggctggtcttgaactcctggcctcaggtgatccacccgccttggcccccaaagtgctgggattacaggtgtgagccaccaagccaggacttttttttttttttttttttgagacggagtctcactctgtcgcccaggctggagtgcagtggcatcatctcggctcactgcaacctctgcctccccgattcaagcaattctcctgcctcagctttccgagtagctaagattacaggcgcccgccaccacgcccggctaattttttgtatttttagtagagacggggtttcatcatgttggaccaggctggtctctaactcctgacctcaggtaatccgcccgcttcggcctcccaaagtgctaagattacagacctgagccacttcgcctggcagggaccgtatttcaagtcctgccctcccaccagcgcctgcgccccgcagcagtgtccggctccctgccgacgccctggagctgggacggcctggggcgctggtcggccgccttcccccagaaggaggcgtgagcggggcgtggccggaacgtctctcttcggagccgcgccccgggcgggcacagttacgcgccgcacggatcatggccgcagccgctctggggcaggtgggttcgcagccccgcgccggggtctgggaaataaccgggggaggcgcacttccgggaagaccactggcctgcagccggtccgactcggcgccgctcctcccgccctggggttccgctgcagggcgcggaggaggat

SEQ ID NO: 22160 - DNA, 2300 bp, Homo sapien
tttttttttttgagacggagtcttgctctgtctcccaggctggagtgcaatggcgtgatctcagttcactgcaacctccgccttctgggttcaaatgattctccttcctcagcctccctagtagctggaattacaggcacccaccaccatgcctggctaacttttttgtattttttggtagagactgggtttcaccatgttggccagggtggtctcgaactcctgacctcaagtgatccgcccgcctcggcctcccaaggtgctgggattacagggataagctgtcgcacctggcctgcttttttttttttttttttaatttttaatttttgttggtacatactaggtatacatatatttacgagataattgagatgttttgatacaggcaggcaatgtgaaataagcacatcatcgggaatagggtatccatcccctttcaaggatttaccctttgatgtataaacaatctagttacaccctttaatttatttaaaaatgtacaattaaattattattgactatagtcattctgttgtgctatctaatagtaggtcttattcatccttttctttttgtaccaattaaccatcccccacctctcccccatgtacacacccccacccccaatcttctttttttttctagtccaaggaacaccaccccttacttgccgacttccgaaggtcaccgggagcgggttctcagcctctcccaagccctggctactgaggcgtcgcagtggcacagaatgatgacaggtgactggctggggatgttggacttctgggttttagggaggagagagctggagacctggaatcccaggtcctggagaggaggggtctgggggccggtgagaattttttatcttggtgagtaaagagttgggcagggtttgggagttttaggtctcaggcaagaggtgactggggtccgggacacttgggaggaggggaggaagaggtcagggggcggggagagggccgacaactgagtctcaaagaggactggactggcgtatccagactcctggatctgagggaggaggggctgggggcctggactcctgggtctgagggaggaggggctgggggcctggactcctgggtctgatggaggaggggctgggaatccggagtcctgggtctgagggaggaggggctgggaatccggggtcctagcgctgaggtttgccattctcatgtcccactcatcctctccaggtggaaatttggactcccagggagaccctcttcccggtgtgccgctgcctccttcggaccccacgcgccaggagacccctccccccagatctcccccggtggctaattcgggttccacggggttctctcgccgagggagtgggcgtggaggaggtcccaccccctgggggcccgcgtgggatgccgggatcgcccctccggtcctgccacaagacgagggggcatggcctctgcgagtcactctgctacaatccagcttctaatccgcccaaaagcggcagccaatcggagcgcgaggacgtggtctggaggtaccgccggagatctgggaccactcagggcatcagggggcgtggtctggtccccattgcgggcccgggaggggaatggtttctatggccaaagtttggttttctcaacactgtctaaatttggattaaaactttgaacttttagtcaatagctttctttctgtctgtctggggttgtggcactggtgtctctgaggggcagagctggagtcgtggactcctgggtcctgagagaggaagggacagggggcttggacttataggtctctgggaagaagggatagagaacctgatccctcggtctgagagtggagggggctgggccaggattcccgggtctgagggaggaaggggtgggaccctgactcctgggtctgagggaggagggactgggaggctggactcccgggtctgagggaggaggggctgggaccctgactcctgggtctgagggaggaggggctgggaggctggactcccgggtctgagggaggaggggctgggaggctggactcccgagtctgagggaggaggggctgggggcctggactcccgagtctgagggaggagggactgaggcttctggattcctgggtctgtgggaggagggactggggctcctggattcctgggtctgtgggaagagaggagtgtctgagggaggaggggctggggacaaacttccaggtctctagccttcctggcaacgccccccgaggccggacttccaggatccagcctctattgaggatttgatgcgacg

SEQ ID NO: 22161 - DNA, 2300 bp, Homo sapien
cagaggtcgtggtagacccaggctgctcactcccagccccacaaccgacctccactctggactccagatgcggagggcgaggagccccgagtgagtagggaggacatggttgtgggcgtggcctaagagaagggcagggccggaaactggttgggggcgggccttagcgctttctgcttgagtgtgtgtgacttgctggggctcccgtgggggtcacagcctgtcggggagaagactggaggggaagatgccacaaagcggacattactgaggatttggacagtagaggaggattctaacccagtgggacagtaagacacagtgaagtgagacatgtccttgaggctgacttgatgggtaaggaggtggatggagagggctctagttgactcagttccccgattctctccttcccacagcctgttcacccccctctctcgccctccctcgcctctgagcctcccccgtccccgttctgcccctgcgcggcgaccccctgccccctcaggagacacagcaccccctgcccgacctcacaccccgttgagtcgcattgatgtccgacctcctctggattggggcccccaacgccagaccctctcccgaccccctactccccgccgaggacctccctctgaggctgggggaggaaagccccccaggagtccccagcactggagtcaggagcccagaacacaggtgagcagagaggtgagaaggaggggactacgtttcccatcaggcctcagggctgtctttccgtattctcaaggccattgctccctgggtgtcatgggtattgtagtccataatgatctcagctgggctcaggtgagagagagcttgaacctatcaggtgtccagctcctctcaggtgtctgggctgtctttctaggctggtcttcggccattgctttttttttttttttttgagactgaggtcttgctctgtcgccaaggttagagggcagtggcacgatctcggctcactacaacctctgtctcccgggttcaagcgattctcctgcctcagcctcccgagtagctaggattacaggcacctgccaccacgtccggctgatttttatatttttggtagagatgaggtttcaccatgttgaccaagctggtctcgaactcctgaccagctgacaggtgatctgcccatctcagcctcccaaagtgctgggattacaggcgtgagccaccgcgcctggcccagccattgctctttaagcatcatggggattgtagtcctggatactctgtgccaagacagtgcggtgagaggtttgcatctcccttgtgtccccagttcaccttgcaagttggttgcctgctgttttgtctgagcatcatgggacggtagctcagaatatccacagctgactgcaagtctgagaatgagagtagcaaattccatcatcttgtggggctgttttgccaggctggtgcatttattatcaccctctgtgtccccacagtggcacacagctggagagcaggtagttgaggaagttgagagggcccagttctgaacctcaaaatatctcctaaagcacttcaattatggacatgcccactctactatttgtcactaagacatgccagtttctttttttttttaattattattattatttttttattgatcattcttgggtgtttctcgcagagggggatttggcagggtcataggacaatagtggagggaaggtcagcagataaacaagtgaacaaaggtctctggttttcctaggcagaggaccctgcggccttccgcagtgtttgtgtccctgggtacttgagattagggagtggtgatgactcttaacgagcatgctgccttcaagcatctgtttaacaaagcacatcttgcactgcccttaatccatttaaccctgagtggacacagcacatgtttcagagagcacagggttgggggtaaggtcatagatcaacaggatcccaaggcagaagaatttttcttagtacagaacaaaatgaaaagtctcccagacatgccagtttctaaacatctccatttcaacgttcctcccaggcacactctggctcccccacttatctccagctccccccgcggccccctgggacccgggcctccatggttttattggtaggtatcctggagtaccctaaatctaccggagccccctcccttcctttcttctctatgaggaatgtcatctcttggcctagggtgcctagagaactgtagatatttcaaagaccctgggtaggtattagattcatgtggtggctgtaacaaagcgcatggc

SEQ ID NO: 22162 - DNA, 2300 bp, Homo sapien
acaatattagaccagatgggccgggagccccccgagggcggcgcttcaccttcaccgtgagtccatccatccatgttgtgcaccaggcgatgggaactggagatgagggcgggtagatatctgtcgaggaaactccaagtcctaacaagcactggaatatccattactggagataaaaggtcttgacaagcgtcaattgcatcctcgttttgttttgttttggtttgtttttttgttttgttgttttttgagacagagtctctctctgtcacccaggctggagtgcagtggtgcgatctcggctcactgcaacctccgcctcctgggttcaacggattctcctgcctcagcctctggagtagctgggattacaggcgcacgccaccacgcctggctaattttttgtatttttagtagagatggggtttcgccatgttggccaggctggtctcaaactcctggcctcaggtgatccgcctacctcagcctcccaaagtgctgggattacaggcatgagccaccgcgtctgtccagtcctttcctttcctttcctttccattttcctttcctttcctttcctttttcctttcctttcctttttttttctctctctctctttctttctttctctttctctctttctttctctcccttcccttccctctttccctctttcctttctttcttgacggtcttgctctgtcacccaggctggcgtgcagcgacgcaaagtgcagtcttcctgcctcagtctccccggtagctgggactacaggtgcgctccaccacgtccggctaattttttgatttttttgtagagacgggggcggaaggaggtggaggggggtgtctcattatgttgcctaggctggtctcaagccatcctcccgcatcggcctcccaaagcactgggtttactggaatgagtcaccggtccggcctgtcctcctttttacaaggcccgggagtccggattccaagccttctcttcccgcaggcagagcacccgggcatgaggacctacgttttggccgctgacaccttagaagacctgcggggctggctacgggcgctgggccgggcctcccgtgcggagggggacgactagtgagtagaggtccaagccatgctcctgaccctccaccctgagtcagtctcgtcatcccaactcctcccctttggggccctgcccccttgagtgtccaatcaccagtcttctagctaaggcgcctcgtcttctaggccccacctccagggaacttttccaatcagcaaaagtctttctcccttaagttccgcccaccaccttgtccgtccccgcccccaagctgacccttcagtcacgcactcagctctgctccaggaatgatcaatattgcacactctctgattggctccttctgaagtcccctgagctgccacctaaacaatgccaggtaaaagatagtatcagattttaaaaaaatgtcagactatctcttaggctctgacatggcctgcgccaattatcaggctggaaactggactacctggctgagtctatcccatattccggggcattgggtccagcaacctggatagacgttgtggcctggcgcacaggtcagtttcacattggaggcctcagtttccccttctgaagaagggggacgatgatttatagtgcacaactttccttttttgggtgcatccttgtgttctcacctgtgacaagagaatagggctgttatgaagttcgaaggagtgatatcttgtctatgtccactcgctagtgggcaacccaggtcacctgcacgaccccagcccggggagggccccggcggccccggtggtcccccggaggtgagcagaggggaagaggggcgcatctcagaatcaccggaagtgactcgactctccagaggtcgtggtagacccaggctgctcactcccagccccacaaccgacctccactctggactccagatgcggagggcgaggagccccgagtgagtagggaggacatggttgtgggcgtggcctaagagaagggcagggccggaaactggttgggggcgggccttagcgctttctgcttgagtgtgtgtgacttgctggggctcccgtgggggtcacagcctgtcggggagaagactggaggggaagatgccacaaagcggacattactgaggatttggacagtagaggaggattctaacccagtgggacagtaagacacagtgaagtgagacatgtccttgaggctgacttgatgggtaaggaggtggatggagagggctctagttgactcagttccccga

SEQ ID NO: 22163 - DNA, 2300 bp, Homo sapien
ggccgaccaggctggtcttgaactcctgacctcaggtgatctgcccgccttggcttcccaaagtgctggaattacagttgtgatccactgtgcctggcctcctaccccaatttagcccacaggccccagcctagagtctcccattttcttttttttttcttttctttcttttttctttttctttctttttttttttttttttttgagacggtgtctcactctgtcacccaggctggagtgcaatggcatgatcttggctcactgcaacctccgcctcccgggttcaagcaattctcctgcctcagcctcctgagtagttgggagtacaggagcttgccaccacgcctggctagagtctcctattttcacatgtggttggtttcctccccgagtgcgagggtgtcattgttcccatttcacagatggggaaacaggcttggaaatgaagccacttgaccaagatagtcacagcagggtccagattccttgcaaatgagaatgaggatgtaagcactatgagatcaggcactttgctgggctcaatgcttttcaaaaaaaagtaattaggctgagcgcggtggctcacgcctgtaatcctagcactttgggacgctgaggcaggtggatcatgaggtcaggagatcaagaccatcctggctaacacggtgaaaccccgcctccactaaaaatacaaaataaattagccgggcgtggtggtgggcacctgtagtcccagctactcgggaggctgaggcaggagaatggcgtgaacctgggaggcagagcttgcagtgagctgagatcgtgccactgtactccagcctgggcgacagagcgagactccgtctcaaaaaaataataataataattaatttaggccgggtgcagtggcatgtgcctgtagttccagctactcaggaggctgagtcaggagaatcgcttgaacccgggaggcggaggttgcagtgagccgagatcacgccactgcactccagcctggcgacagagcaaaacaccgcctcaaaaaaaaaaaaaaaagaaattcattttctaaatagagacaaggtctcgctatgatgcccaggctggtgttgaactcctggtctcaagcgatcctcctgccttggcctcccaaagtgctgggattacaggcgtgagccattgcacccagccagggctcactgctttcttctcagtggctgcaacagacagtgcctgcacacagtaggtgctcaacaggtgcatggtgaatggcagttaaaccgaaagctcagattccttcccggtcacaggcacaaggctccactcctgggtgtcatctgcttcagacttaggcagtagctctgcccccacaagccgcgattctgcctgggtggcactctttgtgcgggtgggggcgcttctgctacaagttccaggccctgggtgacagttccagccccccgctctcctcccctgcctacggatgcataatcttgttcctcaaaatataccaaggaatcatgtctctctcctgagggagttgtcctcagtctagaagagaattctcacctggatctgaggtggaggtttggaactctccatttcaccctgccctactgggaccatccccttttctccctaggggacctggacaaaccgtccctggccccttccaagcacagccatgtttccagacccccagctctttcacgactcaggagtcctgatcctagctcagaccttctcgggcacccaggagtctggatccctaacccattccctccagggctttggaaatttgagtccccaccccttgcaggacacaagcctcctccgtttaggacaccagtggctcaggcccccaaccacagcagcaaacccacgggggccctggagtgcaggcctcaagtccaactctccaaacactgagaagtcccaaccttggtccttaggggacctgggaattggggggcccaagcccctcccttcagctatgggggcagctgagccagaggtcaggctgtagtggggaggccagaaggggcggggacagccgggattgggaggggagaacagcagcgtgggcggctggcagaggcagggaaagaccagcagagaggaaagagaaactgggagagggaggaagggagaaagtgagaagggaaatcggaaagagaaaagggaggaaacggcagagccagagagaaagaggaagagactgagtgtgaaggagagaggacacaggggatgactgagagacagagagagagagagagagagaatgagacagagacttaaggaagagaccctgtgagtct

SEQ ID NO: 22164 - DNA, 2300 bp, Homo sapien
ggggaggaaaccaaccacatgtgaaaataggagactctagccaggcgtggtggcaagctcctgtactcccaactactcaggaggctgaggcaggagaattgcttgaacccgggaggcggaggttgcagtgagccaagatcatgccattgcactccagcctgggtgacagagtgagacaccgtctcaaaaaaaaaaaaaaaaaaagaaagaaaaagaaaaaagaaagaaaagaaaaaaaaaagaaaatgggagactctaggctggggcctgtgggctaaattggggtaggaggccaggcacagtggatcacaactgtaattccagcactttgggaagccaaggcgggcagatcacctgaggtcaggagttcaagaccagcctggtcggccgggtgcggtggctcacacctgtaatcccagcactttgggaggccgaggcgggtggatcacaaggtcaggagatcgagaccatcctggttaacacggtgaaaaaccccgtctctactaagaatacaaaaaaaattagccgggcgtggtggtgggcacctgtagtcccagctactagggaggctgaggcaggagaatggcgagaaccagggaggaggagcttgcagtgagccaagatcgtgccactgcactccagcctgggcgacagagcaagactccgtctcaaaaaaaaaaaaaaaaaaaaagacctgcctggtcaacatggcgaaacactgtctctactaaaaatacaaaaattacccaggcattgtggcacatgcctgtaatcccagctactccagaggctcaggcaggagaatcgctggaacccaggaggtggaggttgcagtgaaccgagatggcgccactgaactccagcctgggcgacagagtgagacgcctactcaaaaaataaataggctgggtgcagtagctcacgcctataatcctaacactttgggaagccgaggcaggcagactgcctgagctcaggagttcgagaacagcctgggcaacatggcgaaacactgtctctactaaaaatacaaaaaattagctgagtgtggtagtgcgtgcctgtaatcccagctactcggaggctgaagagggagaatcgcttgaacccggaagatggaggttgcagtgagccgagatcacgccattgcactccagcctcggtgacagagcgagactccatctcaaaaaaaaataaaaaaataaaaaataacaaataaataaataggcctggagtggtggctcacgcctgcaatcccagcactttgggaggccaaggcaggcagaacacctgaggtcaggagttcgagaccagcctagcaaacatggtgaaatcccgtctcagaaaaataaataatgaataaataaataaataaataggccgggcgcggtgactcacgcctgtaatcccagcactttgggaggccaaggcgggaggatcccctgacgtcgggagttccagaccagcctgaccaacatggagaaactacgtctctactaaacaaatacaaaattagccgggcgtggcggcacatgcctgcaatcccagcactttgggaggccaaggcgggaggatcccctgacgtcgggagttccagaccagcctgaccaacatggagaaactacgtctctactaaacaaatacaaaattagccgggcgtggcggcacatgcctgcaatcccagatactcgggatgctgaggcaggagaatcgcttgaaccccgaaggcggaggttgcggtgagccgagatcgcccctttgcattccagcctgagcaacaagagcaaaactccgcctcaaaataactaactaaataaataaataaattggggtgggaaggcattgaccctgagctgagagagaactggctcgctgttgaagcagggccacgcatttgattgacagttcgtttgttggaggggcgtggtcacgctcggaaactccgccgtgacgttgcaaaagctggaatctccgcgagaagtcctgtcttacttccacttcccacccttcgggttgcggtctcgaaaccccgcctctcttcgtgacgtcagcacgccgggcgcggtaggctataaaagcctagtggccattgtgttcgttgctcttatcggttcccatcccagttgttgatcttatgcaagacgctgcacgaccccgcgcccgcttgtcgccacggcacttgaggcagccggagatactctgagttactcggagcccgacgcctgagggtgagatgaacgcgctggcctccctaaccgtccggacctgtgatcgcttctggcagaccgaaccggcgctcc

SEQ ID NO: 22165 - DNA, 2300 bp, Homo sapien
gcccgccttggccttccaaagtgctaggattacaggcatgagccacagtgcccggcctgatccttacctttaaatttgcttccggacccaggcagcccgaatcccagcacccactcctgtcgggatctagtagcctgtttccagcttcccacgggggtccgcaagtccgcttctctctcccccaaatatctaattctccagcacccaggcatcagaactcaggactgtgcacttcaaacacccagcccccagcggcctagaactccactgcccacctgcctgggatccgggagacttgttctcctcaccaggtgcctggagaggctgctcacattgatgcctcggtaccttgcctctctggccaatctctaaacatacctgatcctctctttggaagctggggacctaatctcgggatatctgcgaaatagggaggagaagaaagacggctcagagggagggaggattccctctgggacctgaactggtccactcccttctgaccctccactctccacttccaacaaagtaacgaactcggtcactgatgcagccaggcaaccctgctccgggggttctgaacacgaatgccgtgtgggggttccttaaagagaccagagaccggcccggcgcggtggctcacgcctgtaatcccagcactttgggaggccgaggcgggcggatcacggggtcaggagatctagaccatcctggctaacatggtgaatccccgtctctactaaaaaaaaatatatatatatacacaaaaaaattagccgggcgttgtggcgggcgggcgcctgtagtcccagctactcgggaggctgaggcaggagaatggcgtgaacccgggaggcggagctcgcagtgagctgagatcgcgccactgcactccagcctgtgtgacagaggtagacaccgtctcaaaaaaaaaaaaaaaaagagagagagagagcgggagaccagagacctcgcggcctcactgtacacatctcgcttacaagaaacttaaaagaggcggggcgcagtggctcacgcctgtaatcccagcactttgggaggcggagacggggaggcaagattgcttgagtccaggagatccagatccagaccagcaacacagagatttttttttttttttgagacgtagtctcactctgtcgcccaggctggagtgcagtggcgcgatctcggctcactgcaacctccgcctcccgggtttaagagattgtcctgcctcagcttcctgagtagctgggattacaggcatgcgcaaccacgcctggctaatttgtatttttagtggaggcgaggtttctccatgttggccaggctggtctcaaacccttgacctcaggtgatctgcctgcctcagcctcccaaagtgctgggattacaggagtgaacccccaagcccggcttgacatccgtctctttaaaaaacaacaacaacaaagtgtgagaagtgtgaaagacagaacgttaaaaaaaaaaaaaggctaaaaaagaattaaagatttaaatatttgtattaaaaatttaaaaaatatacattagccaggcatggtagtgtggcctgtggtcccatctacttgggaggctgacgcgggaggattgcttgggcctgggaggtagaggctgcagtgagaagtgattgcgccactgcactccaacctgggtgacagagcaaaccctgtctcgaataataagaagaagaagaaagaaactcataagaaaggctatgcaattgctaccgcgctataacttccaggcacttcgtggggcgaaaataaatgggaaaactacagctcccatgaggcgaaggggccacgatgcccgcggaagttatttttcccccggccggcagggagttgtagttatctttgaaagccttctctctcttttggcataggcgggaaatgtggcgtcaagaggctgggattccgagaaagaagcgaggctttcacgaaaatgcgagcggcttcggcaaggggcggggccgctggacgtggatgaaagctacagagccagcgtggaccaatcagacctctttggggcggggcctctgtggataagtgggcgtggtctaggggggaagtcaccaagaacgcaccggaggtccttgcccgccctggaaaacgccctctgcggtgaaggagaggtgagaggccagggttcccatactcttgggtcctagggaggatgggggccagagggctggaaaactgggtcccggaggaggatgcactgggtgccagtactttaggtcctgggaaaagaggaggctgggaccctggact

SEQ ID NO: 22166 - DNA, 2300 bp, Homo sapien
acagaaggagggttcctcggggcccagagggaggcatggcagtgtggtctgtgggggatggagggctggataatgcataatgtctgtcccaagcctcttcctcccctggaaccaggagttcgggcccccagcgccgcccccacttccaagaatcaagacacaagcattttgttacccaggccccaggattccaggcctccggccttcccttcctccgacacaggagtctgggccctcagacccaggggtcctggctcccaacacgctcctctctcacactcaggaatccgggatctcggccgcctcctcccccagacccaagagtccagggtcccagcctcctcttttcccaggacctaaagtactggcacccagtgcatcctcctccgggacccagttttccagccctctggcccccatcctccctaggacccaagagtatgggaaccctggcctctcacctctccttcaccgcagagggcgttttccagggcgggcaaggacctccggtgcgttcttggtgacttcccccctagaccacgcccacttatccacagaggccccgccccaaagaggtctgattggtccacgctggctctgtagctttcatccacgtccagcggccccgccccttgccgaagccgctcgcattttcgtgaaagcctcgcttctttctcggaatcccagcctcttgacgccacatttcccgcctatgccaaaagagagagaaggctttcaaagataactacaactccctgccggccgggggaaaaataacttccgcgggcatcgtggccccttcgcctcatgggagctgtagttttcccatttattttcgccccacgaagtgcctggaagttatagcgcggtagcaattgcatagcctttcttatgagtttctttcttcttcttcttattattcgagacagggtttgctctgtcacccaggttggagtgcagtggcgcaatcacttctcactgcagcctctacctcccaggcccaagcaatcctcccgcgtcagcctcccaagtagatgggaccacaggccacactaccatgcctggctaatgtatattttttaaatttttaatacaaatatttaaatctttaattcttttttagcctttttttttttttaacgttctgtctttcacacttctcacactttgttgttgttgttttttaaagagacggatgtcaagccgggcttgggggttcactcctgtaatcccagcactttgggaggctgaggcaggcagatcacctgaggtcaagggtttgagaccagcctggccaacatggagaaacctcgcctccactaaaaatacaaattagccaggcgtggttgcgcatgcctgtaatcccagctactcaggaagctgaggcaggacaatctcttaaacccgggaggcggaggttgcagtgagccgagatcgcgccactgcactccagcctgggcgacagagtgagactacgtctcaaaaaaaaaaaaaaatctctgtgttgctggtctggatctggatctcctggactcaagcaatcttgcctccccgtctccgcctcccaaagtgctgggattacaggcgtgagccactgcgccccgcctcttttaagtttcttgtaagcgagatgtgtacagtgaggccgcgaggtctctggtctcccgctctctctctctctttttttttttttttttgagacggtgtctacctctgtcacacaggctggagtgcagtggcgcgatctcagctcactgcgagctccgcctcccgggttcacgccattctcctgcctcagcctcccgagtagctgggactacaggcgcccgcccgccacaacgcccggctaatttttttgtgtatatatatatatttttttttagtagagacggggattcaccatgttagccaggatggtctagatctcctgaccccgtgatccgcccgcctcggcctcccaaagtgctgggattacaggcgtgagccaccgcgccgggccggtctctggtctctttaaggaacccccacacggcattcgtgttcagaacccccggagcagggttgcctggctgcatcagtgaccgagttcgttactttgttggaagtggagagtggagggtcagaagggagtggaccagttcaggtcccagagggaatcctccctccctctgagccgtctttcttctcctccctatttcgcagatatcccgagattaggtccccagcttccaaagagaggatcaggtatgtttagagattggccagagaggcaaggtaccgaggcatcaatgtgagcagcc

SEQ ID NO: 22167 - DNA, 2300 bp, Homo sapien
tggatggatgggtgggtggatgagtggatggatggatgggtgggtggatggatggatgggtgggtggatggatggatgagtggatggatgggcgggtggatggatgggtgggtggatgagtggatggatggatggatagatggatggatggatggataggtgggtggatggatgggcaggtggatgagtggatggatggatggatgagtggatggatggatggatggatggatgggtgggtggatggatggatgggtggatggatggatggatgggtgggtgggtggatggatggatgagtggatggatgggtggatggatggatggatgatgggtggatagatgggtgggtaggatgtatgtatggatgggtgggtgggatgtatggatggatgggtgggtggatgcatggatgaatgggtggatgcatggatggatggatggttggatggatggataaaagtatgattcacagcttcccaacaagtcatgtccactctgagcacccactctgggcagtattgggctgggtgttcactgatgtgattttcatttcatctttgctgcatatgtgggaaaaggtaaaaactgagtcccttgtcagctgccccagggagcaggccatagcagtaacaggagtgagggtggggatggggatgggagcaggggctgctatgtctgtccttgttgcctcaggacacaggcctgtactaccaccggtacctccaggaggtcatcgatgtactggagacggatgggcatttccgagagaagctgcaggctgccaatgcggaggacatcaaggtgcggctgggggagtgggggctgtgggaggggtacgtgctgggagggcagagttcaggggaggactggtttctttttttttttttttgagacggagtcttgctctgtcacccaggctggagtgcgatggtgcgatctcagctcactgcacctccaccccgcaggttcaagcagttctcctgcctcaacctcccaagtagctgggattacaggcgtacaccaccatgcctgactaatttttgtatttttagtagagacggggtttcaccatgttggccaggctggtctcgaactcctgacctcgtgatcctcccatctcggcttcccaaagtgttgggattacaggcatgagccaccatgcctgaccatactggtttcttcaaaggggccacatggctccagctgtgcctgtatttgaaaatcaccaaagtaagactcagggagaagttgcttcttggggtcacaagctgggaagagctttggggaacacagaatacgtgtttagtgcagagtcccgtgggcaggctttcagtcgcagctccgccgcttaccagctatggggcctcccctcaccgtgcctcagtttccccacctgtaaaatgggagacatcatagaacctgctgcacagttcggatttggattttccaagggaaggattttggggtttggattttccaaaggaagatgtgtaaagggtttggaagagcatggtgacactccttagcaagtgttgtgggagggctgcgtcaacagaatgctcctatggtgccttctacagaggaagaattcaaaataagggaggtgctggtgtcccttacatcaccatgaactcccatatcaggcctctaggagcaccatcattgtccccatttcactgagtaggacactgaaccctcgtatcaggatctgtccttctcatggacctgggtctcaccaccatgcacggctaattttgtattgtttctagagacagggacttgccatgttgcccaggctgatcttgagatcctcccacctcagcctcccaaagtgctgggattacaggcgtgacccaccgcacctggcccctaaacatgtggcttgatgaatgacaggagatggggcagcacaggtgggcagggccttgaatgccaggctgacgggctgggagctgtccttcctggagactctgaggagctgggggactataagcagggaaggggcagtataagactggggcatgagaaagcttataagaagcttccagagaagacagagagcaggcccccaggctgaccagggtctcctctcctgtcagagcgggaagctgagccgagagctggactttgtcagccaccacgtccgcaccaagctggatgagctcaagcgacaggaggtgtcacggctgcggatgctgctcaaggccaagatggacgccgagcaggatcccagtgagcaggggcagggcgggagggacaggcagggaggggtggggaagggtggcctcactcccggc

SEQ ID NO: 22168 - DNA, 2300 bp, Homo sapien
ttttttttttttttgagacgaaatctcgctgttttcccccaggctggagtgcaatggcacaatctcggctcactgcaacctccgcctcccgggttcaagcgattctcctgcctcagcctcccgagtagctaggattacaggtgcctgccgtcacgcccagaaaatttttgtatttttagtagagacagggtttcaccatgttggccaggctggtctcgaactcctgacctcaggtgatccacccgcctcagcctcccaaagtgctgggattacaagtgtcagccaccgcacccagctcttcttatagtgatacccaccgtaatctagcaggccatcatcttaactaattacatctgcaaacactctatttccaaataagatcacattctgagattccaggtggacatgaatttgggagtgtggggggagtatactgttcaacctggtattgttaactccattttacagaggtggaaactgaggcacaaagaggctgagtaacttgcccagtgtcacagagcttatgagatttggtcacaaagcaaagcctagatttgaacgctgggcaaaatagttagaaacctcttgttctttttttggtttatttttactttttttttttttttttttacctgagacagcgtcttgctctgatgcccaggctggagtgcagtggcatgatcacagctcactgcagcctcaacctcctgggctcaagcaatcctcccacctgaccctcctgagtagctgggaccagaggtgcaagccaccgcaccaggctaattttaaaaatttttagtagacacaaggtctcgctgtgttatgtgagttagtcttgaactcccgggctcgagtgatcctcccaccctagcctcccaaagtgctaggattccaggcgtgacccacctctcctagtctgaccttatgttcttggccacctagctgtacctgaaatacataaatactaagttcaccacatatgttgttcctatttacttattcctccaagatctggagattgtggaggacttgaaagaggtgggttgaagttgctattgtataaccgtcccaatctgttttgaataaagagaagaaagtgtgttatggggcaggagcagtcatggaaaccaaaaagggcgacatcaggctgtgcgcgatggctcacgcctataatcccagcactttgggaggctgacgtgggcggatcacctgaggtcaggagtttgagaccagcctggccaacatggtgaaacctcgtttctactaaaaatacaaaaatcagctgggcctggtgacacatgcctataatcccagctactcgaaaggccgaggcaggagaatcacttgaacccggaagacagaggttgaagtgaggcagtgagcagagattgtgccaccgcactccagcctgggcaacagagcaagactccctctcaaaaaaaaaaaaaaaaaaagggacattaggacacgagacgtaagaaagacaggtagaggctggggctgccctcagccaggttcagggccaagggcctgccatttacaggctggaattgggggctgggcagagggggcagaggggaatgaccctgtgcctttccccaggccacccgggaccttgcccagtacgacgcagcccatcatgaagagttcaagcgctacgagatgcttaaggaacacgagagacggcgttatctggagtcactgggagaggagcagagaaaggaggcggagaggaagctggaagagcaacagcgccggcaccgcgagcaccctaaagtcaacgtgcctgtgaggaccccatttgtgcccatccactccctaccacatccagttcaaacgcaagacaagaaagcagttaaagaactacaattcccaggggcccttgaggcaaaaaaactccctgttactgtacctggctgccccagggtctgctgggagttgtagttttcttagttttcttgcttgagggagatgatgtttgttggatgagggtaaagggatatttggttttatcccatggcatccagacttcttgctcatgagctcctggctctcccctccacagggcagccaagcccagttgaaggaggtgtgggaggagctggatggactggaccccaacaggtttaaccccaagaccttcttcatactgcatggtaaggtggggagggagttccagagccaggatgaaccctagattctgacccttctaggacctgaatgctaagaggggtgtgtctgtcccaggagggcttagtcaggcccaagagccaagcctatgtcccctggttgaccagaca

SEQ ID NO: 22169 - DNA, 2300 bp, Homo sapien
gcgagactctgtctcaaaaataaataaacaaataaataggcccggcgcagtggcttacccctataatcccagcactttgcgaagccaaggcggctggatcccttgagaccaggagttcaagaccagcctgggcaacatggcaaaaccccatctctatgaaaacaaatacaaaaattagctgggtgtggtggcgtgcatctgtagtcccagctacttgggaggctgaggtgggaggatcacttgagccgaggagttcaaggcttcagtgagctacgatcacaccattgcactccagcctgggtgacagagtgagaccctgtctctaaaaaataaaaaaataaaaaccttatttaatctttttaatcaggcagtccctacagaccagaataggttcagagcaactccctatacctttttttatttttcattttttttatttttagagatggggcttccctttgtcacccaggctggagtgcagtggcgtgatcatggctcactgcaacccagacctcctgggctcaagtgattcttccacctcaacccttagagtagctgggatcataggtgcacaccaccatgcccagccaatttttaaattttttttttctttttgaggcagagtcttgctctgttgcccaggctggagtgcaatggcatgatcttggcacactgcaacccccgcctcccaggttcaagctattctcctgcctcagcctcctgagtagctggggttacaggcacttggcattatgcctggctaatttttgtatttttgtagagacggggttttactatgctggccaggctggtcttgaactcctgacttcaggtgatcctcctgcctcggcctcccaaagtgctgggattacaggcgtgagccaccgcacccggcccaattttttacttttttttttttttttgtagagacggggtctagccatcttttctaagctggtctcgaacttaatgtgctcaaatgatcttgccttagccttccaaagtactgggattacaggcatgagcccctaaatttggcccctacattttctttaatcttaatcaatttacatttaaacagcccatgtggctagcggctactgtactggacagcgcagatccagagtttaggcagagaagagacccccaggcctgagccctgggccacactagcatgtggaggtcaggaagaggatggagccgtcaaaggaggtggaggggcagccagagaggacagaatcatgttctggaagccaagggcagaaagtcaagtcagatgcaggtggaaattaaccactggatttgcaagatgagggttcctggcctcctcctcaggaggaaggttgtgcttgtctgagggagccgaggaaggagggccggtggtgaggacaggaagtgtggctgaccgagcctgaagccctgcagctgtggggtctacgttggtaggagaggctcccctcacaactggagtcggcactggcctggttgtctgggaggcagaggtccctgataaccctggagctgactctgtgtccagagcactgaatgccagggccagagaatcctgcatgacagtgacccaagcatgtttcctcgaaccctccctttgatctattccattctcaaccccctggtcgctaggcagtggccctagcaacgggtctagtggggtactaaagcctgggggccaccgttccaccgcgggagacccgtagttacctgtcctctgataacagaccccacatcagcccaaaatttcttcaccagggaccttacacatcccgtcctcggtcccctgagataccttgctatcctcttcccttcagatatcaacagtgatggtgtcctggatgagcaggagctggaggcactcttcaccaaggaggtgagcatcttggaagcctcgggcacctggagggacgcccaaatcagccacttgtttcctcctgcagtccccttaaatccccctggatgggagctcagtgaaaactacaactcccatcagcccctggggcaaaaacggctcccaggagtggtagcgtgcccaaaggactgctgggagttgaagttgtcgggaatgagctcgctggggacctctcaatgctgtctgcctctcgcttgctcctgcagctggagaaagtgtacgacccaaagaatgaggaggacgacatgcgggagatggaggaggagcgactgcgcatgcgggagcatgtgatgaagaatgtgaggtgggggccaggcgggggagaggacgggcccccagctctgtcactcacccttatctggctccccaggtggac

SEQ ID NO: 22170 - DNA, 2300 bp, Homo sapien
gtctaccaagtaagagaaagtgacaatatcctgccctgtgtgaagctggccagccagttaggaattatcatgtcccaaccagcctgggaaacttggcaagaccctgccttgataaaaagtttaaaaatcgactggacacagtgtctcatacctataatcccagcactttgggaggctgaggcaggaggattgcttgagcccaggaattggagaccagcctggacaacaaagtgagaccttttctgtacaaaaaattgctgggcatggtggctcatgcaggtaatctcagcactttgggaggccaaggcaggcggatcacctgaggtcaggaattcgaggccagcctggccaacacagtgaaaccccatctctagtaaaaatacaaaaattagtcgggcgtggtagtgggcgcctgtcatcccagctactcgggaggctgaggtaggagaattgcttgaaactgggaggtggaggttgcagtgagccaagattatgccactgcatgatcaccccagcctggatgacagagcgagacttcgtctcaaaaacaaaaaacaaacaacaacagcaacaaaaattagcaggctgggtgcagtggctcatgcttgtaatcccagcactttgggaggccaaggcaggcaaatcgcaaggtcaggagatcgagaccatcctggccaacatggtgaaaccctgtctccactaaaaataaaaaaaattagctgggcatggtggagggcgcctgtggtcccagctactcaggaggctgaggcaggagaatcacttgaaccagggaggcggaggttgcagtgagctgagatcacaccactgcactccagcctggggatagagtgagactccgtctcaaacaaacaaacaaacaaatagcggtaagtggggcacatgcctatactcccagctactcaggaggctgaggcgggaagatagcttgagcccaggagtacaaggctgctgtgagctattatcacgccactgcagtccagctaggtaacagagtgagaccctatctctaaaataattaataaataaaacaaaataattagccaggtgtagtagccagtagctactttgggtcccagctactgtagtcccaggtactagggtggctaaggcaggagctaattccttgagctaaggaatttgaggctgcagtgagctatgattgtgccactgcactccttcctgggcgacagagcgagaccctatatcaataataattataataatacagtatattttacataatagaccatagagctcaatgaatcctcctcacaaccctatgtaggtagatgttatcatgatctctgctttccagaatagaaaagtgaggaccagagagggcgacctcttgtccaaaagcaatacagccaagaaggggcaaggagggttttgaaaccagtcggccaggctctggggctcctaacaagcaaagcagcctggtttctaaaactatagcttctggaagcagccaattcacaggtctttacctcctgactgtgagacctccaaaaaatgaccagggatcttggagtctgtttccccctttgtgaactggggacaatagaagctacttcccaggtctgcggggagaaattaggaacgaagaaggtaaagcgcagagctgaggagctggtctacaggtgctctatacatattagtaataattattaagtttgctgttacaatcctctctctctctgtgaacaacccctaatgatgcgtggctttgagagcaaaaaagtcagggcaaagttttgccacaaagtccagagggcaagacattaaatctaactctcaaggattggtgttggcaagaaagcaaacctctcctccccacgctgtccttaccccgcgtatccgacgagcctaaagtcataggtaagagatctgtagaagcgacgtcaaggtgtggttccctctgtaaggcggagctaaacggtgcattcgcccagcggggaagctagaactaaatgaccgctctgccgactggagccaacgagaatcggcgtaggcgcaatacgggcggaggatggggacccgcccccggggtgggcggggcgtcaggtacttaattcgcgcctggagggaccgaaggtgccgagggctccgcatcgcaaccatggcgctgcgctggggcatcgtgtctgtcggcctcatctccagcgacttcacagccgtgctgcagacgctgcctcgctctgagcaccaggtctgcccgccctccggattctggggaagaggaggcggggggcgggactccagagtctaaaggaggaggg

SEQ ID NO: 22171 - DNA, 2300 bp, Homo sapien
ccccaacattcaatcatacagttattgaataacacattttgagagataactatgaatcaagtaacatgctggtttctgggagaattgaggacaaattaaccttgtggaaattttgggtggatgaaaaaaaccaacatgaaattaaaacactgcacacatttacagctgtgagaagcattacacatcctgggtgctatgcgagctttttttttttttttttttttttttgagttggagtttccctcttgttactgaggctggagtgcaaggtcacgatctcagctcactgcaacctctgcctccagattcaaacgattcccctgcctcagctcccgagtagctgggactacaggtgcctgccaccacacctggctaatttagaatttttagtagggatagggtttcaccgtgttggccaggctggtctcaaactcctgacctcaggtgatctacccatctcggcctcccaaagtgctgggattacagaagtgagccactgagcccaaccaggagctttttcgagaaagaaggaagtccaagagatcttcctgacaccctagtctgactctgccctttgcctgctcaaaatttccccatgcttcccagcggccttctggacatagatcaagtcccttctctgacaggcccaaaccctttatcatctgatcctagctcatttttctgagttttccttagttgctattattttctgtctaaagtgacatgtcataatattcataaagcacacaagtcttatgtgtacagctcaatgaattgtaaatatgtgtatacccggccgggcacagtggctcacgcctgtaatcccagcactttgggaggccgaggcaggtggatcacttgaggtcaggagcttgagaccagcctgaccaacatagtgaaaccccatctttactaaaaatacaaaattagctgggcgtggtgtcgcatgcctgcaattccagctacttgggaggctgaggcaggagaattgcttgaacccggaggcagaggttgcagtaagccgagatcgtgccattgcactccatcctgggcaacaagagcaaaactccgtctcaaaataataataataataataataataataataataataatgtgtatacccatgtaaacaccattcagataaaaatatggcatatttggggcacccggggagtgtctcttgtggcccctcccctccataccctgctgatctatcagcacagattagtttctgccactttttaaacttcatattccttttctttttacacaaacacaaacattcgagtcatgactgggtggggtggctcaagcctgtaatctcagcactttgggaggccaaggtgcgaggatcgcttgagtctgggagttcagagaccagcctgggcaacatagagagacctcatctccacataaaaagttttaaaaattaaccaggggcggtgtagtcccagctactcaggaggctgaggtgggaggcttcagcccgggaattccagactgcagtgagccatgattgggccactgcactccagcctgggcaacacagtgagaccctgtctcaaaaaaaaaaaaaaaaaaaacaggaaaaaacaaacaaacagaaaagcaggcctggcgcggtagctcatgcctgtaatcccagcgctttggaaggctgagacggggttatctcttgggctcacaagttagagacaagcctgggcgtgggctatattgctagatccaggtctctgcaaaaaacaaaaccactcagtttttagtcatctataacgtcctgcctggaagcatgctattttgggcctctgagcttttgcacttgctaattccttctgcgctggggagagctcaaaccctgcccgaaacttctaaaaatggtgcctggataaatgaaggcattagagctgcgattggacggacggctgttggacggcgccactgctggcacttatcgggagatgctcattggacagtcacgtgacgggaccaaacctcccgagggagcgaggcaggtgcggtcacgtgacccggcggcgctgcggggcagcggccattttgcggggcggccacgtgaaggacgcacgttcagcggggctctcacgtgacccgggcgcgctgcggccgcccgcgcggacccggcgagaggcggcggcgggagcggcggtgatggacgggtccggggagcagcccagaggcgggggtgaggcgggaggcagacgggcgggaggagggcgagccccctcgccggcccgtccgggatccttcctaccggcctggggctgtgcgatctccaagca

SEQ ID NO: 22172 - DNA, 2300 bp, Homo sapien
tccccccccacctctgtccccccctctctctgggtctcttttcccctccctctgggtctctgccctcctctctctaggtctgtccccctcccctctctctcagggtctctgtacccctctgtctccgggtctgttttcccctctctctgggtctctgtccccctctctctcagggtctctgtctgagtctctttttctctgggcctctgtctccccaccccacgttctctatggtcttcagatcctgtctctctcagcccctcctctccctccacctatgggccccaaggcccctctcggccgactaaaggtctctgggctgaggtatgacatttggtaaatgagtaactcgggccccacagtcaacggggtgctttggacggctgcccctcctccatggactcttcccagagaccccaagtcaggggagagagaggggcagaggatcaatgagtgtacactgagccaccacccagagtgaggggacaatatggccacaggcaggatcccagaaaaaaaaaaattatgggaaccaaaaagacacggagacaaagcacacagccggcttccaacaaggggggaccttggggtagggggcccgatttgggtctgagccaggtctagttctgagggtcccaccaaaaaagtcggggagtgccaaggggatgaggtcagcgagtggccccacccccatccgtccccgcgggggccccttcccgcgctgagctcagcatgactcagcagtcgctgcctgcaacaaggaccccagataccggcctggcggggcatctgcagatcccctcggtcaggggctgccccgcctgggctgttcggagcagctcctctgtagggcagggcctgacctcaccccacaccccagtggcttcagctccctgcccagcgcacgggctgcctccatcagggcacttaagtagagtcaaggtttgcgccgactccgtctcccagaaatcaacgtggaccaggcccacttaaaaaatatgcattagtcgaagacagacgtctcgtccataggtccccagactgtttgtccacaacgcagggcttctctttgtgggcctgaaggagcacacgtcaggcaagacacgagggcaacttcagagacactgttcagggccacggagaattctcgaagtctgtgagttgtctccaaaacagcctccaggaaatgcaatcccagagacaccgcaaagctcaaaacagacttttcattcctccccatttccactcccagaaaaagcctgggcccctgaaagagctccaaggtatccccaaagtcccagcccatctttggagggttccagagggctgtccagggttccagaagtcaccctacctcatacaatgctcctcctgggcttcccgcactgggtgaaacccacggctccagaataactgccctttccaacttgcagagcacctcaagaacctaaagatttccccggggagggctccaaaatatagagagtttgcatcgtgaacccccacccctgtaaatcccaggactccagtccccgcaacactccatcttccagagatctccaggggtccagaaataacacctcacagccttccaagcttcccaaggatccggagactccttatctcgcagcgcaaacctcaggcaactacaggtcctccctgcacctttgaggtgcccctccccccactcaaggttccagaaaaatccatgccctcggaaaccccagaatcttactttcccgaggcaccccaggaccccagggtcatcagttcacagggctgttagtgctcccataaaactctagcctcccagagggaccccagcccccaccctcccgcccacgaacccctgcatttccagaatcagccccagggccccaacccccccaagcccccatttcacaacacgctggcgctacaggcgcgtgacttccccttgctttggggcggggggctgagactcctatgtgctccggattggtcaggcacggccttcggccccgcctcctgccaccgcagattggccgctagccctccccgagcgccctgcctccgagggccggcgcaccataaaagaagccgccctagccacgtcccctcgcagttcggcggtcccgcgggtctgtctcttgcttcaacagtgtttggacggaacagatccggggactctcttccagcctccgaccgccctccgatttcctctccgcttgcaacctccgggaccatcttctcggccatctcctgcttctgggacctgccagcaccgtttttgtggttagctccttcttgccaaccaacca

SEQ ID NO: 22173 - DNA, 2300 bp, Homo sapien
agttgtcgccccattcgtcccctgtcaccttcgccttcgtctgcagcaccgtgtagatgccacccactgtgggcccaagcgtgtgagggcaggccccggccgaggtccatagttctggggcctggggtggggtgggccggggatgtagggggcactcaggccccagacctctagctcagggggaagaggggactgggagcccatagtttggagtaggggttggaagcttggatgaggggaacacgagggctggagggcagtcctcctgggtctaagggagaagggggctggggtcaggaccctgaaggaggagggggctcaggctagacttctgggtctgagagagaaggggctgggtgccgggaccccttggtctgaaggaattaggcactggggctctaaggatggcagagctgaggactgactacccggactcaggttcccgagttcccagctcacaggagctgggtttaaatcgcagccaggctccaaaacccagtgagggagaccccctcatggccaatccagcttctcaccattgcccaagagaagcctgcatggtcattccctgcccccagggaccttgctgacctgcctcccaatttcctctccctgactagggacaccagcatgcagggctctgcctctcccatgaccctatcccagacccaggagccccagcccccagcctcctcccatcctggagcccaggccctggcgatacccggctgggtgttcacgggccccctctcctcctgggagacacagtccctttctcctccaagacccagcaaagcaaccccccagaccctgctctttgaggtgtgagattggcttgttcctggggatttcagccccagccttctccaaggccagaacctcagctttctgaagcccaagacacagaaatgcaggctcctagcccctcccatcctagggcccagcctctgactaacttaggacttcccagccttcccctattccagtacgcatgtgtcccaggccatgggctcctctactcctaggaactaatagctcaggccctcagctccttcaaagcccaggcattcattacagtctccagcccgtcccatctttattcttaagcagccagatcctcaggtcctcccaccgccgctcaggcctcctatctcccagtcagctctctctcaaatctggagttttatcccctagaccatgctgttagggtcataggtctgaaaccccggcagcttcccaggtttgcacgcagaaatcccatccccccatccccttccctgttcaggacccaggtatctagtctctcggaagcctgcctccaggacctaggagtctcattttagcgccctcttccctaggacccagaacccgggcttccagcctcctttcatcttaagtcaaacgaaccatccctctcccacccacctccggcttcccagcccctcctcaaggacacagcctccttgcccaggtcacaagggttcccctagtagccccgtcctcctacaactcagagttccgggcccccatccactactgtccttctcgtcaagggccccgacgcctggcgtgctcacccttgttagccacctcccaggccacttcgaagagcactgcgttctccaggtcgaattcatcctcccagtcctccagtcctggcagtgaggacatggacaaagtgcggtttaaaggcatggctggcgcaggaaggggggctccggggatctccaggtagggaccccggaggtgtctagggaatgcaccaggtagggtgcggggccgagtagctggtgcccgacgggaagcttgcaagacgctcggcttcctattgcaagaccgcacccctgccccgaagcgttgggacctaggcagaaggaggccgcagcgtcactgagcccactggcgcccctgcagtgaaacctcgcagccgccaggaggcggtggccgccccccccagccagcgccattggcccacgcccgggggcggggatttccgcgtgtcctcattggtggaacgggttggagtcgctgtgtcccggccccgcctcggccgtgagacctccagggggcggagcttgccgctgcgctttacggaaacgagtggccttcagctctgtcaatctggagctggaggcctcaaagtggggaggaggaggagggtgggataaagaggaaaggagcgtggaggacgtgtggttactcaaagaacagctaagaattttgcaatcggcctgagcggggcggtggtggggctgagcaaaaggaggaggagccaggagacattgggaatggacccagga

SEQ ID NO: 22174 - DNA, 2300 bp, Homo sapien
ataggaagctggaacccaggagcatagaacattacccccagactacaagcagaagactaggcatccccaccccacaaaaaagacatgaatccaggaatcccaaatgtagctctctcaacataaacaggccccttaccaaggactgtctcctataaagactttctctttcatcataagtctctccaaaaccttgctgcccgctgttcccatgaaaaccaaggtcatttcaaaactcagcacacaccgtcccctcatacttccaatactttctccacggtagttctggtcatagccttcctcttctacttccctatccacctcctcctcctccttgccctggtgacagcaacagactcaaatctcatccccagctaccaacaactttctccccctcccttcctccatcttgactgggctcatcatggaaattgaggcacctgtaagcccagcccagtccctaagttcaggtcacattacctttttttttttggagacagagtctcgctttgtcgcccaggctggaatgcagtggcgcgatcttggctcactgcaacttctgcctcccaggttcaagcgattctcctgcctcagccttctgagtagctgggattacaggcctgcaccaccacacctggctaatttttgtatttttaatagagacggggtttcgcaatgttggccacgaactcctgacctgaagtgatccgcccgcctcggcctcccaaagtgctgggattacaggcatgagccaccacgccaggccaaaatcgcttctttattcaggtaattgagcaggtgccaggccaagtttcctggcctctccttcattcacatgtattcattcattcaaatattcaagtgataatttattgagcatttacactgagacgtagcccgtgtgaaatactggaaatatgaaaatggccaaaacggtagcatgacaagatcccgatttctgggtccctaatccttcagtcctctccactaagactctcttgttcctcgacaatttcttcccactaaaggctcactaggcgccctcgcgctctcagacacactgaacaggtacctgcctgtgcttccagcttggaactcaagtgccattggcaccactaacaatccaaggctcccaaatggctcgaagcgcaaggtcctacaaccctcctcatcacacactggcgccaaggactgcggaaccggccgttgcgccaagatgattttgaaagttggagttcctatagcatgatggggccagacccgagattctgggatcccagccccctccccgcctcagatccagaagtccagcccccatgtccccttctcccccagatctgggtggccgagcttcctcctctttcagacccaggagtctgaacccccagatcccccctccctcagacccaggagtcagggcctccagcatcctcctctctcaaactcgagactgctagctcgctcctcaccctccatgcacccacacttacaacggttgccatgatgctcaccaactgccagagtcctagcggaaacggaaacgcgcgaggagcgagatgttctggctcctctaggctagctggttcttcaaagatctcgatggttcctcataaatatgtaaatattgtgggggcgtggcgggactttatgccccgccctcccaccgaggctgcgctggaagacgggcgtccggaactcctgggtccattcccaatgtctcctggctcctcctccttttgctcagccccaccaccgccccgctcaggccgattgcaaaattcttagctgttctttgagtaaccacacgtcctccacgctcctttcctctttatcccaccctcctcctcctccccactttgaggcctccagctccagattgacagagctgaaggccactcgtttccgtaaagcgcagcggcaagctccgccccctggaggtctcacggccgaggcggggccgggacacagcgactccaacccgttccaccaatgaggacacgcggaaatccccgcccccgggcgtgggccaatggcgctggctggggggggcggccaccgcctcctggcggctgcgaggtttcactgcaggggcgccagtgggctcagtgacgctgcggcctccttctgcctaggtcccaacgcttcggggcaggggtgcggtcttgcaataggaagccgagcgtcttgcaagcttcccgtcgggcaccagctactcggccccgcaccctacctggtgcattccctagacacctccggggtccctacctggagatccccggagccccccttcctgcgccagccat

SEQ ID NO: 22175 - DNA, 2300 bp, Homo sapien
cgaagcagatcctccgcatccggtgcgggcaggaccaggccgtgcgcctgagacgcagggctggggtctaccctgtttgacaaatgctgacactgaggtccagcggagtggcatggtggctgggcctacaggagagagggctgagcgggcacccagacggtggcctccgatccgggagcaggagccacggtgggaaagggaggcgaggtacccgtgactggtgttggggccagcgccctgggggtggtcaggaggcctcggttttaggtccagcccagcccctgtctccgtggctcttctagcctcagcattctatggttctaagatgcaggcgccacatattcccagtggggaagggccagagggttgctgtggccacttctgctgcagtcagaggctgggccccggctgagccacccctgtcccccactgcttgcaggtgcgaggaagaagatgtggagatgagtgaggacgcctacacggtgctgacccgcatcgggctggagacgtcactgcgctacgccatccagctcatcacagctgccagcttggtgtgccggaaacgcaaggtcagccggccgaattagccagcagggccagatggcggcagtgagtgacacagtacttcaggggcttccagggttccgatttcatcctagaatgtacgttttcagacgcagggaattttcatccctcaggttggcttctgtatcatccagcctggcctatagtaggtatcagtaaatctctcttgacttaagtagatgctgttaggtccaccttacagataaagaaactgaggaatgaagaggctgggcccacaacaaggagatggccaggcaggatttgaacccaggcaatctggcccagaatgccctcccctcacatgccacactctgctgcctagagcatggaggtggcatacgctggggtctgtgccttgagcctcacggagaggggcccaactgaggactcgccctccccctccagggtacagaagtgcaggtggatgacatcaagcgggtctactcactcttcctggacgagtcccgctccacgcagtacatgaaggagtaccaggacgccttcctcttcaacgaactcagtaagaatccccaccccgcacctgcactgccagagccaacctcagagggaggaagagggagctcggcgtagaaggctcaggccctgccacctgggcgacactgaccatgtggccttccttctccccacagaaggcgagaccatggacacctcctgagttggatgtcatcccccgaccccaccctgttttccaccagagttctgacactgtgactctgtataaaatggttgggaagctgcacccaccctgtgtatgtgtggttgccctgagcccacagaaagacacctccagagtgcggattgagaagcctttattgtgggaggatcggggtgtcagggctccaggagtcgggatggacttggaaggctgcggggagggtctttagaggaagaggaggcctgagagttgggggtggtcacaggtcaaggggtggtctttgggacccccacagtcagaggtgctgcggcggcagggtccacagcgacagctgagagccacagggaaggagaccacggggtccacaccacgcgggcagccagggagccggatggactcgaagcgcacatcacggtaggtgcacaccacctgaggcaggggcggcaggaccgcctgcagcacgcgcatctggaggccgtgtgagtgggggaatgagcatgtgcctgaggccagcgcctcagctgagctcccaagctgaccccacaggtcctggactcaggagcccaggaagccctctgttcctgccttcccacaccccattccccaaccgcaggccagagaggcagaccacccttcctcccccgctgcctctgtgggtctggccctgaggtggcagcatctgcccctggccccaggcagctcaccatggtggggcagtagccggcacagatggtggtgttgacggtgatgcacactgggcagccctccttctcgacagccaggatggcattgatggggtggcaccatggccgaagcggctccctggatgcccatgccccgcccatgctcagcagcagcaacagcagcagcccctgggacaaggacactgcttcacccaggtctgagaccgcagccccgagtcctggccttcccatcccgcgtggtacaccacccacaaagacccagagacccttcccggcatctcctattcaggacccaccacccggacacctgcctttcagagcccaccccacagccc

SEQ ID NO: 22176 - DNA, 2300 bp, Homo sapien
atgagaaaggaagctgaagttccctggcgtgggtggcaggaagggctctaaccctggggcggggtgtgagggccgtggccgtcatggctgtcgaggccgaaggagagggattctgaactcgggacccagggcttgggatggggtatgaaatctatgtcttgggtatgcctcctcccccaatcttgctcaggctctaattgcctggacgaagaaccccgagctgtctggccggcctttcacagtatccgaccggggcgtcctggaccgccgccagctctatctgaccacctcggcgcgggactttcggttctatcccaagtaagccgggctctcgctcggcaccgcctcctgcacagcccccgccgtggccggtgcacgccgagcccctgggctggctcccattccctgagccggtggtctcagcctcgacttctgtagcagcaagaaccaaagttcaggcctcagcccctcccttttttttttaagcacccaggagtccttagtgtcacctctcaggaaccgcggtagggacaggaagcctgcacagcggctcgaggggattccggatctgagggcagggcctccttcggtacttgagcccccagatactccttcccaaggaagcgaaagtccccttttacttccctaggatgcgaaagctcagtttccaggacgttaagtacctcgaggacccaggaacgcaggcaacgcgtgccgggtcgcgtccttcctaaggggtgctcgcctggaaatgcaggagtttgaatgtgcagactccttagatcccgaggtctgaaactcgtccccaaggatccagctgtatcctcaccatcccgccctgctcccacaggacggagctgtccggatacccccgcaaggactccctgacctactggagcttcgaagagacgccccaggtctggagccacggcccgcagcggccgccctgtccgcgctcctcccggccgccccgaccaccgcgggtccgcgtgccgcgcgtcagcccggtgacctcggccatgccgcaccggggagccctgtctctggctcaggagtcctacagccccctgctgcacccgctccggcggctcgaccgcttctgcccgctggaggcgccctggggcggcccgcactggaagcccctgcggggcatctacagcgtgccgaaagcctacagtaccgagaactccagctatggcagcttgaagccggcgctggtgtgagccgtcagggccagccccaccccagacccgcccccagggccgcgctgccgagcggagctcgggacctccgctcactaggaagggttccggacccagcctgagtcgcactcattacgtctattggcaacgtgggggcgggactagcccagacacccactcagctgcggcatcacggagaggggactaagtccagataatgtccttgcaggctgtggccccgggggcaagacacgcaccctgcgggcgtattaaataatgagttaaatcacctgaaccacacccacttccggggacgctccgggcatcctggcttgagggtagggtgggcggaggtccctaagggagaggtggggctcgggcttaatccctccttgggggcatctgggtcaagtggcttccctggcagcacagtcacggggagaccctctctcactgggcagaagctaagtccgaagcagcgcccctcctgttaggttggactgtggtgcaggaaagcctcaagtggagggttgaggcttcagtccagcacctttctcgggtcatggcctcctcctggctcccaagaccccacaattggcagaggcaggccttcctacaccctactccctgtgcctccaggctcgactagtccctagcactcgacaactgggtctctgaggtcacttcaccgtggtctctgcctcacctctggcgctagaccactgaggggagagggctggggcgctctgctgagccactcctgcgcctccctggccatgtgcacctctcgcccccggggggattagtgtccaggttaccccagcatcctatcacctcctggtggccttgccgcccccacaaccccgaggtatatagccagatacacgaggcaggggatgcaccaaggatggagatgctccaggtaagactacagggcccctgggcaccttccacctccttccaggccatcactggcatgagaaggggcagacccgtgtgagctgtggaaggaggcctctttctggaggggcatgacccccagtaagcttcaggtggggcagttcctgagggtggggatctgaaatgttggggcatctc

SEQ ID NO: 22177 - DNA, 2300 bp, Homo sapien
aggcgtgcagcaccaggcctggctaattttggtattatcagtagagatgttgtttcacagtgttggccaggctgctctcgaactcctgacctcaagtcatccacccgcctcagcctcccaaagtgctgggattacaggtgtgagccatagtgcctgacctgtagttgttgaatatttattattaatctacaagttgggtgtgatgcaagtcctatatatggagtcccccaaacttctagagcaagggcttccccataatcctggcaggcaggcctcccctggggtttccaacttctgaccccactgaagtgtttatcctcttctctaatcccagcctccttttccctgtctccatgtgctctgagagatgctctgagagatgctcccactcccccaggctccctccgcatccccctcattttcctcctccccagtgtgtcaatggagtcctaaccccatcctcgacattgtcgccttttcctcctccagagtgggaccttcttttcccccgagtggtcctgtctaggggtgccgctgccgggccccctctggtcttcctgctggagactggagcctttcgggagtcagcaggcgcccgggccaaccgcagccagcgaggggtgagcgatacttcaccggcgagtcatcagggtgagctggccgtgtgcgatgcagtcagtgtctgggtgacagacccctggactgctgtggacttgggtgtgctcgaggtggaggtgttgggcgaggtgcctgcagctgtcggcagttccctccgccagcacttctttgttgcccacttcgaggccgataaatctgaggaaggtggcccgggggtaggtggagggggctgccgccggggtgtggaccggggggcactgggtgtctgagtgcaaggccaagcagtcctatgtgcgggcattgaccgctgatgcccagggccgtgtggactggcgatggattcaaactggcacagcctgtgtctgcacactcctcagccggactggccgggcctgagacttatacccaggaactggtcaggcagaaaaagaacagagctggatgctgagagacctcagggttggcccagctgctctacggacggaccccagttggggaactcatcaaatcatcacaaaatcacaactctctgaatttgagctcaatctctgcaggatgggtgccaccacatgtggttttgaaggttgaataggagctctcccaggggaacttgagggtaatcatgatgatgatgatgatgatgataataataatagccactatttactgagtgtttactctttcgtagccctaatacataactcctcggatcaactctcatggatttgatcattggtgacctttggtgttaagttgctgactgctcagtcacagaggacaccaccttgctcatcctggggagtgggagggcacatttcacgatgtgcatgggggaggagggaaactggaacatgcaagcagatggccaggggaccttgaggacatggtctacagaaggcctttaagtatctgggagctggggttcaaatgagaaatcttacttggtgagagcaggcaggggttggcttagaatattctgttttgagataaagagctaccgatcacacggggagtataagcaaggttcaatgagaagtgatcaggatgctggagagttcagccctgggcggggagctcaagtcaggtttctagccctcttccctgtgccaacctataccctacattgggaaagaaacagaccttaaaattgtccagcttgatggcatcgcggggaagggactaagtccagataatgtcctccgaggcttcggccccatgggcaggacacacctcctgcgggcctattcaataatcagttaaatcacctgaagcacacgcatttccggggacagctccgggcatcctggcttgagggtagggtgggcggaggtccctaagggagaggtggggctcgggctgaatccctcgttggcggcaccagggtcaagtggcttccctggcagcacagtcacggggaggccctctctcattgggcagaaactaagtccgaagccgcgcccctcctgggaggttggactgtggtgcaggaaagcctcaagtagaggagggttgaggcttcagtccagcacctttctcgggtcacggcctcctcctggctcccaggaccccaccataggcagaggcaggccttcctacaccctactccctgtgcctccagcctcgactagtccctagcactcgacgactgagtctctgaggtcacttcaccgtggtctccgcct

SEQ ID NO: 22178 - DNA, 2300 bp, Homo sapien
gtcctaacccccacccttgacattgtccccttttcctcctccagagtgggaccttattttcccccaagtggtcctgtctaggggtgccgctgccgggccccctctggtcttcctgctggagactggggccttttgggagtcagcaggcacccgggccaaccgcagccagcgaggggtgagcgatacttcaccggcgagtcatcagggtgagctggccgtgtgcgatgcagtcagtgtctgggtgacagacccccggaccgctgtggacttggttgtgctcgaggtggaggtgttgggtgaggtgcctgcagctggcagcagttccctccaccaacacttctttgtcacctgcttcaaggccgataactctgaagaaggtggcccaggggtaggtggaggggctgccgctggggtgtggaccggggggcactgggtgtctgagtgcaaggccaagcagtcctatgtgcgggcattgaccgctgatgcccagggccgtgtggactggcgatggattcaaactggcacagcctgtgtctgcacactcctcagccggactggccgggcctgagacttatacccaggaactggtcaggcagaaaaagaacagagctggatgctgagagacctcagggttggcccagctgctctacggacggaccccagttggggaactcatcaaatcatcgcaaaatcacaactctctgaatttgagctcaatctctgtaggatgggtgcaacaacgtggggttttgaaggttgaataggagctctcccaggggaacttgagggtaatcatgatgatgatgataataataatagccactatttactgagtgtttactctttcgtagccctaatacataactcctcggatcaactctcatggatttgatcattggtgacctttggtgttaagttgctgactgctcagtcacagaggacaccaccttgctcatcctggggagtgggagggcacatttcacgatgtgcatgggggaggagggaaactggaacatgcaagcagatggccaggggaccttgaggacatggtctacagaaggcctttaagtatctgggagctggggttcaaatgagaaatcttacttggtgagagtgggcaggggtcggcttagaatattttgttttgagataaagagctaccgatcacacggggagtataagcaaggttcaatgagaagtgatcaggatgctggagagttcagccctgggcggggagctcaagtcaggtttctagccctcttccctgtgccaacctataccctacactgggaaagaaacagaccttaaaattgtccagcttgatggcatcgcggggaagggactaagtccagataatgtcctctgaggctgaggcctcgggggcaggacacacctcctgcgggcctattcaataatcagttaaatcacctgaagcacacgcatttccggggaccgctccgggcatcctggcttgagggtagagtgggcagaggtccctaagggagaggtggggctcgggctgaatccctcgttggcggcaccagggtcaagtggctaacctggcagcacagtcacggggaggccctctctcattgggcagaaactaagtccgaagccgcgcccctcctgggcgaggaggttccacctcctaggttcctgtgattctcctgcctcagcccgagtagtgggacatcccacttgctcccgccattctgtttaccacaggtgacgaccgccatggctgacaggcagggaggtcccccgaggaccgagcaagcctcggtctcccaaaaaaaaaaaagatacattgaagtaatttaaaaacacttaggaagatgtcatttcttcctatcaaggcgtcctccctttatgttttgttattatatagggaacgataaaaaaatttttttctcaaccaatgtggacccggttggcctcgaactcgtaccctcgaaccctcccctccctgagggcccgagggcacgcgcaaccggtcggagccacaatagctcggggtgtcggggatctcctttcttccttttgaccttacgcagggtgatggagccaatcaggagaggctcacccctgacgtcacccagtccccagggccagtgagggccctgcgttccgtggcgccccctggagggaggaaggggaactgtatctgagagagagcagccaattgggtccgctgactccggccgggttcccgtgccgcgtccaacacccctcactccctgtctcactcccccacggagactcaatttactttccatgtccacatccccagtgcttgcgga

SEQ ID NO: 22179 - DNA, 2300 bp, Homo sapien
gctcgaggtggaggtgttgggtgaggtgcctgcagctggcagcagttccctccgccagcacttctttgttacccgcttcgaggccgataaatctaaggaaggtggcccgggggtaggtggaggacctgccgccggggtgtggaccggggggcactgggtgtctgagtgcaaggccaagcagtcctatgggcgggcattgaccactgatgcccagggccgtgtggactggcgatggattcaaattggcactgcctgtgtctgcacactcctcagccggactggccgggcctgagacttatacccaggaactggtcaggcagaaaaagaacagagctggatgctgagagacctcagggttggcccagctgctctacggacggaccccagttggggaactcatcaaatcatcgcaaaatctcaactgtctgaatttgagctcaatctctgtaggatgggtgcaacaatgtggggttttgaaggttgaataggaactctcccgggggaacttgagggtaatcatgatgatgatgataataataatagccattatttactgagtgtttactctttcgtagccctaatacataactcctcggatcaactctcatggatttgatcattggtgacctttggtgttaagttgctgactgctcagtcacagaggacaccaccttgctcatcctggggagtgggagggcacatttcacgatgtgcatgggggaggagagaaactggaacatgcaagcagatggccaggggaccttgaggacatggtctacagaaggcctttaagtatctgggagctggggttcaaatgagaaatcttacttggtgagagcaggcaggggttggcttagaatattctgttttgagataaagagctaccgatcacacggggagtataagcaaggttcaatgagaagtgatcaggatgctggagagttcagccctgggcggggagctcaagtcaggtttctagccctcttccctgtgccatcctataccctacattgggaaagaaacagaccttaaaattgtccagcttgatggcatcgcggggaagggactaagtccagataatgtcctccgaggctgcggcctcgggggcaggacacacctcctgcgggcctattcaataatcagttaaatcacccgaagcacacgcatttccggggaccgctccgggcatcctggcttgagggtagagtgggcagaggtccctaagggagaggtggggctcgggctgaatccctcgttggcggcaccagggtcaagtggctaacctggcagcacagtcacggggaggccctctctcattgggcagaaactaagtccgaagccgcgcccctcctgggcgaggaggttccacctcctaggttcctgtgattctcctgcctcagcccgagtagtgggacatcccacttgctcccgccattctgtttaccacaggtgacgaccgccatggctgacaggcagggaggtcccccgaggaccgagcaaggctcggtatcccaaaaaaaaaaaaaaagatacattgaagtaatttaaaaacacttaggaagatgtcatttcttcctatcaaggcgtcctccctttatgttttgttgttatatagggaacgataaaaaaattttttttttttttcctaccaatggggcccaggttgacctcgaactccagtccctcacaccctcgcctagccttgagagcccgagggcaggctcaatcggccggagccacaatggctccggttgtcgggcccatcctttcttccctttgatcttacgcagggtgatggagccaatcacaagaggctcatccctgacgtcacccagtccccagggccagtgagggccctgcgttccgtggcgccccctggagggaggaaggggaactgcatctgagagagagcagccaattgggtccgctgactctggccaggttcccgtgccgcgtccaacacccctcactccctgtctcactcccccacggagactcaatttactttccatgtccacattcccagtgcttgcggaagatatcccgctaagagagagacatgtcaaaggtagggtagatccacatttccgggcaccaaagatggagatgttccaggaaagactgcagggcccctgggcaccttccacctccttccaggccatcactggcatgagaaggggcagacccgtgtgagctgtggaaggaggcctctttctggaggagcgtgacccccagtaagcttcaggtgggtcagttcctgagggtgcggatctgaaatgttggggtatctcaggtcctct

SEQ ID NO: 22180 - DNA, 2300 bp, Homo sapien
atcctcgacattgtcgcgttttcctcctccagagtgggaccttcttttcccccgagtggtcctgtctaggggtgccgctgccgggccccctctggtcttcctgctggagactggagcctttcgggagtcagcaggcgcccgggccaaccgcagccagcgtggggtgagcgatacttcaccggtgagtcatcagggtgagctggccgtgtgcgatgcagtcactgtctgggtgacagacccctggactgctgtggacttgggtgtgctcgaggtggaggtgttgggtgaggtgcctgcagctggcagcagttccctccgccagcacttctttgttacccgcttcgaggccgataaatctaaggaaggtggcccgggggtaggtggaggacctgccgccggggtgtggaccggggggcactgggtgtctgagtgcaaggccaagcagtcctatgggcgggcattgaccactgatgcccagggccgtgtggactggcgatggattcaaattggcactgcctgtgtctgcacactcctcagccggactggccgggcctgagacttatacccaggaactggtcaggcagaaaaagaacagagctggatgctgagagacctcagggttggcccagctgctctacggacggaccccagttggggaactcatcaaatcatcgcaaaatctcaactgtctgaatttgagctcaatctctgtaggatgggtgcaacaatgtggggttttgaaggttgaataggaactctcccgggggaacttgagggtaatcatgatgatgatgataataataatagccattatttactgagtgtttactctttcgtagccctaatacataactcctcggatcaactctcatggatttgatcattggtgacctttggtgttaagttgctgactgctcagtcacagaggacaccaccttgctcatcctggggagtgggagggcacatttcacgatgtgcatgggggaggagagaaactggaacatgcaagcagatggccaggggaccttgaggacatggtctacagaaggcctttaagtatctgggagctggggttcaaatgagaaatcttacttggtgagagcaggcaggggttggcttagaatattctgttttgagataaagagctaccgatcacacggggagtataagcaaggttcaatgagaagtgatcaggatgctggagagttcagccctgggcggggagctcaagtcaggtttctagccctcttccctgtgccatcctataccctacattgggaaagaaacagaccttaaaattgtccagcttgatggcatcgcggggaagggactaagtccagataatgtcctccgaggctgcggcctcgggggcaggacacacctcctgcgggcctattcaataatcagttaaatcacccgaagcacacgcatttccggggaccgctccgggcatcctggcttgagggtagagtgggcagaggtccctaagggagaggtggggctcgggctgaatccctcgttggcggcaccagggtcaagtggctaacctggcagcacagtcacggggaggccctctctcattgggcagaaactaagtccgaagccgcgcccctcctgggcgaggaggttccacctcctaggttcctgtgattctcctgcctcagcccgagtagtgggacatcccacttgctcccgccattctgtttaccacaggtgacgaccgccatggctgacaggcagggaggtcccccgaggaccgagcaaggctcggtatcccaaaaaaaaaaaaaaagatacattgaagtaatttaaaaacacttaggaagatgtcatttcttcctatcaaggcgtcctccctttatgttttgttgttatatagggaacgataaaaaaattttttttttttttcctaccaatggggcccaggttgacctcgaactccagtccctcacaccctcgcctagccttgagagcccgagggcaggctcaatcggccggagccacaatggctccggttgtcgggcccatcctttcttccctttgatcttacgcagggtgatggagccaatcacaagaggctcatccctgacgtcacccagtccccagggccagtgagggccctgcgttccgtggcgccccctggagggaggaaggggaactgcatctgagagagagcagccaattgggtccgctgactctggccaggttcccgtgccgcgtccaacacccctcactccctgtctcactcccccacggagactcaatttactttccatgtccacattcccagtgcttgcgga

SEQ ID NO: 22181 - DNA, 2300 bp, Homo sapien
ttgtattttttttagtagagacagggattcaccatgttggccaggctggtctcaaagtcctgacctcaagtcatccacccgcctcagcctcccaaagtgctgggattacaggtgtgggccataatgcctgacctgtagttgttgaatatttactattaatctacaagttgggtgttatgcaagtcctatatatggagtcccccaaacttctagagcaagggcttccccataatcctggcaggcaggcctcccctggggttcccaacttctgaccccactgaagtgtttatcctcttctctaatcccagcctccttttccctgtctccatgtgctctgagaggtgctctgagagatgctcccgctcccccagactccctctacatccccctcattttcttcctctccagtgtgtcaatggggtcctaaccccaccctcgacattgtcgccttttcctgatccaaagtgggaccttcttttcccctgagtggtcctgcctaggggtgccgctgccgggccccctctggtcttcctgctggagactggggcctttcgggagtcagcaggcgcccgggccaaccgcagccagcgaggggtgagcaatacttcactggcgagtcatcagggtgaggctggccgtgtgtgatgcagtcactggctgggtgacagacccccggaccgctgtggactcaggtgtgctggaggtggaggtgttgggcgaggtgcctgcagctggcggcagttccctctgccaacacttctttgtcacctgcttcgaggccaataactctgaagaaggtggcccaggggtaggtggaggggctgccgcagggtgtggaccggggggcactgggtgtctgagtgcaaggccaagcagtcctatgtgcgggcattgaccgctgatgcccagggctgtgtggactggtgatggattcaaattggcactgcctgtgtctgcacactcctcagccggactggccgggcctgagacttatacccaggaactggtcaggcagaaaaagaacagagctggatgctgagagacctcagggttggcccagctgctctacggaccccagtttgggaactcatcaaatcatcacaaaatcacaactctctgaatttgagctcaatctctgcaggatgggtgccaccacatggggttttgaaggttgaataggagttctcctgggggaacttgaggataatcatgatgatgatgataataataataggcactatttactgagtgtttactctttcttagccataatacataactcctcggatcaactctcatggatttgatcattggtgacctttggtgttaagttgctgactgctcagtcacagaggacaccaccttcctcatcctggggagtgggagggcacatttcacgatgtgcatgggggaggagagaaactggaacatgcaagcagatggccaggggaccttgagaacatggtctacagaaggcctttcagtatctgggagctggggttcaaatgagaaatcttacttggtgagagtgggcaggggtcggcttagaatattttgttttgagataatgagctaccgatcacagggggagtttaagcaaggttcaatgagaagcgatcaagatgctgcacagttcagccctgggtggggagctcaagtcaggtttctagccctcttccctgtgccaacctataccctacattgggaaagaaacagaccttaaaattgtccagcttgatggcatcgcggggaagggactaagtccagataatgtcctctgaggcttcggccccgtgggcaggacacacctcctgcgggcctattcaataatcagttaaatcacctgaagcacacgcatttccggggaccgctccgggcatcctggcttgagggtagagtgggcggaggttcctaagggagaggtggggctcgggctgaatccctcgttggggggcatctgggtcaagtggcttccctggcagcacagtcacggggaggccctctctcattgggcagaagctaagtccgaagccgcgcccctcctgggaggttggactgtggtgcaggaaagcctcaagtagaggagggttgaggcttcaatccagcactttgctcgggtcacggcctcctcctggctcccaggaccccaccataggcagaggcaggccttcctacaccctactccctgtgcctccaggctcgactagtccctagcactcgacgactgagtctctgagatcacttcaccgtggtctccgcctcacccttggcgctggaccagtgagaggagagggctgggg

SEQ ID NO: 22182 - DNA, 2300 bp, Homo sapien
ctaattttggtattatcagtagagatgttgtttcacagtgttggccaggctgctctcgaactcctgacctcaagtcatccacccgcctcagcctcccaaagtgctgggactacaggtgtgagccatagtgcctgacctgtagttgttgaatatttattattaatctacaagttgggtgtgatgcaagtcctttatatggagtcccccaaacttctagagcaagggcttccccataatcctggcaggcaggcctcccctggggtttccaacttctgaccccactgaagtgtttatcctcttctctaatcccagcctccttttccctgtctccgtgtgctgagaggtgctctgagagatgctcccgctcccccaggctccctctgcatccccctcattttcttcctccccagtgtgtcaatggggtcctaaccccaccctcggcactgtcaccttttcctgatccaaagtaggaccttcttttcccctgagtggtcctgtctaggggtgccgctgccgggccccctctggtcttcctgctgcagactggggccttttgggagtcagcaggcgcccgggccaaccgcagccagcgtgaggcgagcgatgcttcaccggcgagtcatcagggtgaggctggccgtgtgtgatgcagtcagtgtctgggtgacagatcccgggaccgctgtggacttgggtgtgctcgaggtggaggtgttgggcgaggtgcctgcagctggcggcagttccctctgccagcacttctttgtcaccgcttcgaggccgataactctgaggaaggtagccgtggggtaggtggagggggctgccgccagggtgtggaccggggggcactgggtgtctgagtgcaaggccaagcagtcctatgtgcgggcattgaccgctgatgcccagggccgtgtggactggcgatggattcaaattggcactgcctgtgtctgcacactcctcagccggactggccgggcctgagacttatacccaggaactggtcaggcagaaaaagaacagagctggatgctgagagacctcagggttggcccagctgctctacggaccccagtttgggaactcatcaaatcatcacaaaatcacaactctctgaatttgagctcagtctctgcaggatgggtgccaccacgtggggttttgaaggttgaataggagttctccagggggaaattgagagtaatcatgatgatgatgatgataataatagccactatttactgagtgtttactctttcgtagccctaatacataactcctcagatcaactctcatggatttgatcattggtgacctttggtgttaagttgctgactgctcagtcacagaggacaccaccttgctcatcctggggagtgggagggcacatttcacgatgtggatgggggtggagagaaactggagcatgcaagcagatggccaggggaccttgaggacatggtctacagaaggcctttaagtatctgggagctggggttcaaatgagaaatcttacttggtgagagcaggcaggggttggcttagaatattctgttttgagataatgagctaccgatcacagggggagtataagcaaggttcaatgagaagcgatcaagatgctgcacagttcagccctgggtggggagcgcaagtcaggtttctagccctctttgctgtgccaacctataccctacattgggaaagaaacagaccttaaaattgtccagcttgatggcatcgcggggaagggactaagtccagataatgtcctccgaggcttcggccccgtgggcaggacatacctcctgcgggcctattcaataatcagttaaatcacctgaagcacacgcatttccggggacagctccgggcatcctggcttgagggtagagtgggcggaggtccctaagggagaggtggggctcgggctgaatccctccttgggggcaccagggtcaagtggcttccctggcagcacagtcacggggagaccctctctcattgggcagaagctaagtccgaagccgcgcccctcctgggaggttggactgtggtgcaggaaagcctcaagtagaggagggttgaggcttcagtccagcacctttctcgggtcacggcctcctcctggctcccaggaccccaccataggcagaggcaggccttcctacaccctactccctgtgcctccaggctcgactagtccctagcactcgacgactgagtctctgaggtcacttcaccgtggtctccgcctcacccttggcgctggaccagtgagaggagagggctgg

SEQ ID NO: 22183 - DNA, 2300 bp, Homo sapien
gctggcgagaccagcggagctccgggagcctggggcggggccagaaggaaatcacagctttggggcgtggctaaaggatctggggcgggatcgggaggttagaggagcgggaggaagggctgggcatccacgccaggccagaaggaccaggggctggaaactcgccttcagggctcctaagctgctgcggagctagacggcgggctgtgggtggggaggagactagaatattctgagacgtggtagggtgggagttaggagaggtaacctggagttgttgcccaagatgcagctcagctccagtggccacaccaagaaggcttgagaccgggggcagaaccagggggattttgtggtggctgggggcctgcatttgagttccttgaccagcaggagggcttggatttagggaggtgaggctgggaagggttcgggtatgagaaaggaagctgaagttccctggcgtgggtggcaggaagggctctgaccctggggcggggtgtgagggccgtggccgtcatggctgtcgaggccgaaggagagggattctgaactcgggacccaggacttgggatggggtatgaaatctatgtcttgggtatgcctcctcccccaatcttgctcaggctctaatcgcctgcacgaagaaccccgcgctgtctggcccacccttcacagtatccgaccggggcgtcctgaaccgccgccagctctatctgaccacctcggcgcgggactttcggttctatcccaagtaagccgggctctcgctcggcaccgcctcctgcacagcccccgccatggccggtgcacgccgagcccctgggctggctcccattccctgaccggtggtctcagtctcgactcctatagcagcaacaaccacagttcagaccccagcccctccctcttttagcacccaggagtccttagtgtcacctccaggaaccgcggtagggacaggaagcctgcacagcggctcgaggggattctggatctgagggcagggcctccttcggtacttgagcccccacatgctccttcgcaaggaagcgaaagcccccgtttccttccctaggatgcgaaagctcagcttccaggacgttaagtacctcgaggacccaggaacgcaggcaacgcgtgcccggtcgcgtccttcctaaggggtgctcgcctggaaatgcaggagtttgaatgtgcagactccttagatcccgaggtctgaaactcgtccccaaggatccagctgtatcctcaccatcccgccctgctcccacaggacggagccgtccggatacccccgcaaggactacctgacctactggagcttagaagagacgccccaactctggagtcacgacccgcagcggcagccctgtctctgctcttccaggccgcctcgagcgccgcacggcgggccatgtctccggctcaggaaacctacagctcctcgccgcacccgctccgccggctcgaccgcttccgcccgctggaggcgacttggggtggcccccactggaagcccctgccgggcatacacagcgtcccgaaagcctacagcaccgagaactcccgctcaggccgctgtaagccggggctagtgggagcctgccgggccagccccaccccagacacgccccctggcgtgggggcggagcagagctctgggcagccgctcactacgcggtgtcggacctaggtgggctcgcactcattaagtctatccgcagtgtggggacaggactagcccagacacgcccactcagctgcggctggatcgcggggaagggactaagtccagacaatgtcctccgaggctgcggccccgcgggcaggacacacctcctgcgggcctattcaataatcagttaaatcacctgaagcacacgcatttccggggaccgctccgggcatcctggcttgagggtagggtgggcggaggttcctaagggagaggtggggctcgggctgaatccctcgttggggggcatctgggtcaagtggcttccctggcagcacagtcacggggagaccctctctcactgggcagaagctaagtccgaagccgcgcccctcctgttaggttggactgtggtgcaggaatggctcaagtagaggagggttgaggcttcagtccagcacctttctcgggtcacggcctcctcctggttcccaagaccccaccataggcagaggcaggccttcctacaccctactctctgtgcctccagcctcgactagtccctagcactcgacgactgagtctcagaggtcacttcaccgtggtctccgcctcatcc

SEQ ID NO: 22184 - DNA, 2300 bp, Homo sapien
ggtctcaaactcctgacctcaagtgatccgcatgcctcggcctcccaaagtgctgggattacgggcatgagccactgcgcccggtgatcaaaagctgtttatagtgaagaagtgacaagggaagccagggacagaccacaggccttcacaatagcccttcacatgttacccatcgccccaccaactctctctctctctctcaggtccagctttgagcaaaggacataggcaacttctccccgcatctatacagaccaggcccctgggcagggtggggcgtggctgcctcagtttctacgtctccttgttttccatctgtgactttggtcgtttttgccaccttcatctctgtctctaacttccagtgtctgtcgcctctgggtagtactaatagctccctttccatcgtggtctctttcttcctccctgtctctcccctttcttgttgtatttattcctcactcatcaaagcccatctttttcgctatggtccggtgcacttctctctagatccctttctctttccccacccagcctacccaggtggaagttttcaaccaaatcaaaggcaggcaggacagctgacaccagcgctgactccttcagcacgtgcgggaagggttggggagccccggggacatctggaaatcgttaccccgaggtgggcaggcctggcagagggaggaagcagccaggaggttctggaccctggagcaaaggggggtgtttctcatggatgtcctgaggtgctgggggcagtgcaggggtctctgtctgtatctctgacacccccaggtctctgtccttctttctgtgtctctgtctcccccaccccctgggtctctgaaatcctgaacttctccatccccttctgtccgcctctttctgactctccatcccccactccgtgtttctctgtgcccctcttggagtccctgtctctctgtctctgggtctcttaatcactccatccatccatgtgcctgcaggcctttcattggctggattggggtgggcgggttctgtcacctggggcaacagcaacaaaccagctcctgcttggctacagggagggggtggaaccatggccagtggcaccctggctgtgcgctgtggccccccgtggtctttcatctctgcaaccgagatgcctgaatcctggcccaactggcatctcaccagcagctacgttacccatggcattatcccacccgtacccttccccccgcccacggtgcaggtgggcagaccctaggctgaagccctgcggggcctggggacccagaaagatgggggctgagaaaaggggattgggagcttggactcctctctgaaggaggagggtcctggagtcctgggtctgagagaggaggcgccagggaatttggatgccagggactgcagaggaaagggctgggggccgactggaagaggtcagagtttggggtggggggtgatagggactcctgagtctttctagctgatgtgcggcgccttctctccagtccacggtcgcggaccctctacctccgactgcaaagcaggattctcgcatctgggctttcgacgaggtcctcagcagatgggagacaacctctggctcggcctacgtgcccaagacccatggcgggccctgcgcccagcccagagccccagagcctgcagaccccacgcggactgtggggatcaaggattcaggagaaaaggtaagatttggggagcgccggagtctgcgggggactgcatttgagtcccctgctccttcacatgagtctctgggttgcctttccgcagctcagacaccgcagctgaaccctcctactgaccacaaagtaccagagcagcgagacgagggcgcagtacacttgctctcccggcccggacgcgcgcgcccccaaatacgtcgggccccagcccctcacaactctcggaccaccaccgcggggggccttcccaggtgtctgggtggaagccggcgctggcgagaccagcggagctccgggagcctggggcggggccagaaggaaatcacagctttggggcgtggctaaaggatctggggcgggatcgggaggttagaggagcgggaggaagggctgggcatccacgccaggccagaaggaccaggggctggaaactcgccttcagggctcctaagctgctgcggagctagacggcgggctgtgggtggggaggagactagaatattctgagacgtggtagggtgggagttaggagaggtaacctggagttgttgcccaagatgcagctcagctccagtggccacaccaagaaggctt

SEQ ID NO: 22185 - DNA, 2300 bp, Homo sapien
ggagagaaactagaacaggcaagcagatggccaggggaccttgagaacgtggcccacagaaggcctttaagtatctgggagatggggttcaaatgggaaatcttacttggtaagagggggcaaaggttgacttagaatattctgttttgaggtaataagctaccgatcacagaggagtacaagcaaggttgaatgagaagtgatcaggatgctggagagttcagccctcggcagggagctgaagtcaggtttctagccctcttccctgtcccaacctttactctacattgggaaagaaacagaccttaaaattttccagcttgatggccaggtgcgatggctcattcctgtaatcccagcactttgggaggccgaggtgggtgaatcacctgaggtcaggagttcgagactagcctggccaacatggtgaaaacccgactctactaaaattatataaagaaattagctggtcgtggtggcggatgcctgtaatccaagctactctgaagggtgaggtaggagaattgcttgaactcaggaggcagaggttgcagtaagccaagactgtaccattgcactccagccttggcaaaaagagcgaaactccatttcaaaaaaaagaaaaaaattttgtccagcttgagtggggcatgagtttctgactaactcatcggccccctggctaggatcagggggtcactgtccattgagagctgttgagtagggccagcaaaatccaacagaaaggccccagaagcctgaatgggggaggaggggtaagtgggatcctgggcatggctgcagaaagtagcctcagttttccttgtctgcagaatgggctggtaggatgagataatgggggttgagcagtcagaggccttgaccaaaagctttttttttttttttttttttttttttttttttgagatggagtctcgctctgtcacccaggctggagtgcagtggtgtgatctgagctcactgcagccttcacctcccgggttgaagtgattcttctgccttagttgggattacaggtgtgcgccaccacgcccggctactttttgtattttttggtagagacagggtttcgccatgttggccgggctggtctcaaactcctgacctcaagtgatccgcatgcctcggcctcccaaagtgctgggattacgggcatgagccactgcgcccggtgatcaaaagctgtttatagtgaagaagtgacaagggaagccagggacagaccacaggccttcacaatagcccttcacatgttacccatcgccccaccaactctctctctctctctcaggtccagctttgagcaaaggacataggcaacttctccccgcatctatacagaccaggcccctgggcagggtggggcgtggctgcctcagtttctacgtctccttgttttccatctgtgactttggtcgtttttgccaccttcatctctgtctctaacttccagtgtctgtcgcctctgggtagtactaatagctccctttccatcgtggtctctttcttcctccctgtctctcccctttcttgttgtatttattcctcactcatcaaagcccatctttttcgctatggtccggtgcacttctctctagatccctttctctttccccacccagcctacccaggtggaagttttcaaccaaatcaaaggcaggcaggacagctgacaccagcgctgactccttcagcacgtgcgggaagggttggggagccccggggacatctggaaatcgttaccccgaggtgggcaggcctggcagagggaggaagcagccaggaggttctggaccctggagcaaaggggggtgtttctcatggatgtcctgaggtgctgggggcagtgcaggggtctctgtctgtatctctgacacccccaggtctctgtccttctttctgtgtctctgtctcccccaccccctgggtctctgaaatcctgaacttctccatccccttctgtccgcctctttctgactctccatcccccactccgtgtttctctgtgcccctcttggagtccctgtctctctgtctctgggtctcttaatcactccatccatccatgtgcctgcaggcctttcattggctggattggggtgggcgggttctgtcacctggggcaacagcaacaaaccagctcctgcttggctacagggagggggtggaaccatggccagtggcaccctggctgtgcgctgtggccccccgtggtctttcatctctgcaaccgagatgcctgaatcctggcccaactggcatctcaccagcagctacgt

SEQ ID NO: 22186 - DNA, 2300 bp, Homo sapien
tctcagggtctctcaggggctctgtccccttctcgggggggtgggggggtctgccctcacgctctctgggcctctgtcttctctctgggctcctgccctcccccactctctctagtctcggtccccctctttcttttggtctctccccacttttccatgtcttctccctatctctcccttcatgtcaccgcgcaccatttctcaaggtagctgattgttcttaagacacatctgtctatctctggtcctatgataccttgcacgtctcttatctgagctcaggacaagaccttctccccggtccccagccaggaaattccaggggagaggagtatgcgggagcccccacatccactgtctccccgggcctggggccttatcactgcccaagcccagctggttaatgtctggcgtggagctcctgggaagtggggaggagagcagagggtgggaatctgccccgggattgacacgcaattggcaaaagacggcaaaggaatctcaggcccagactcctggggctaatggaggaggaggctgggggctggactcctgagtctgagacggggcggggttgggaggtggtggggggaactgtgggcttagtactcaggcgcctggggctggggggagaggtggctggggtcgcaagtcctgggtctgagggaggaggggccggatgcctggactcctgggtctgaagggaggaggggctgggggcctggactgctaggtccaaaggaggaggcagctggaaactgggactcctgtgaccaaggcggccgcgttgaacgagccaggcctggcttccaaggtcccggcacgcgagtgcaaggcaggatcccccggcccctcctctgccgcccggcgccgccccgcccccgcccccgacccgggccctgcggagcgtgagcagctagcacccggcgggccagcgagcgtccctgcagccagcgagcaggaggaggagctgctgccgggcggagggcagccgcgggagccgaagagggcgccccaggtaagatctccactcctcctccctcgggattccggcgtcctggtcgccctgccctcgggtggggagggacgggggcggggccgaccggggcggggcttggcggaggaaactgaggcaagagggaagtgtcccagatatgcagccggtttcccctgaggggtctcggagtccggaacccccaacccaaatctggaggatgaggaacccggagtctgcatttcttagtatccgagaaggaggggcctgaattccagaactcctgggtctgagagaggagggcactgggggcctggattcctgggtctgagggagaagggcgctgggggcatggactcctgggtctgaaggaggagggcgctggggacctggactccagggtctgagggagaagggtgctgggggcctgggcctggactcctcctgggtctgagggagaagggtgctgggggcctggacttctgggtctgagagaggagggcgctgggggcctggactactcctgggtctgagggaggagggcgctggggatctgaactcctgggtctgaaggtggaggccctggggtctgcactactcggtctgagggagaaggcggtcctggttgggtcagcctgggctcctttcactctccacccttcccctttcctgtaccgaggagccagggcaggcagccactccaggtatgtgcagaagtcttgggcgggccctggcctgtcctgtgaggagggaacattccaggaagcagcttggggaaccagggcttcttgagtgtgggccctcagggacccgggtgtccaggccagttccgccccatctgggagatgaatgggccgagggggatgtaatctcttccagcctccttcatccactgcctctcccttcccctattctcccttcccctccctccatctgcttcccatcccagccaggagccatcacctgggtagaaaaggggcctctggaaagggggcggggccttgactcttgggtaccctgcacttgaagaggaactctgggaaggggttgttcagggatttggccccttccccacctgcctctataacctgtctattcttttcttcccctaggtggttgccccctccctctcctgagatgtcaggaaggagggggccacctgtgtcctccacaggggccccccgaagcctggggactcccagccccagagctccgaggcggaggaggtgctgacaggtctggtaactactgactgtttcccagtcttctccacgccaccctttcccagaaccacaggcttccagaa

SEQ ID NO: 22187 - DNA, 2300 bp, Homo sapien
ctctggtggccctgtccaggcataacagaaggctcgcactcttgtcttctggtcacttctcgctatgtcccctcagctcctatctctgtatggcctggtttttcctaggttatgattgtagagcgaggattattataatattggaataaagagtaattgctacaaactaatgattaatgatattcatatataatcatatctatgatctatatctactataactattcttattttatatattttattatactggaacagctcgtgccctcggtctcttgcctcggcacctgggtggcttgccgcccacaaacaattagccgcgtgtggtgggcgcctgtaatcccagctactccagaggctaaggcaggagaattgcttgaattcaggaggcggaggttgcagtgagccaagatcgcaacactgcactctagcctgggcgactgcaagactccgtctcaagaaaaagaaaaagaaagaaaaggccgggtgcagtggctcacgtctgtaatcccagaactttgggaggccaaggcaggcggtcacgaggtcaggagttcgagaccagcctggccaacatggtgaaaccctgtctctactaaaaatacaaaaattaggtgggtgtggtgacgggtgcctggagtcccagctactcaggagactgaggcaggagaatcgcttgaaactggcaggcggaggttgcagtgagctgagatcacgtccccacactctagcctggacaacaagagggaaactcctctcaagaaaaaaaaaaaaagaaagaaagaaagaagaaaagaagagagaaggaatggaaggaaggaagacaggaagagaaagagtgccaggattagcagggcgttcgaacccttagtacctacctctctccacacccccagcagagggcgaccaggacttctttcctgggagtctcagtgatcaaacccctccacttcccccaagcccatctgatggagctatttttatgcagtgtcaccggacaccagtggctagaaggccaccgtcttgtctctgcgcccttcagttcctgaaaatgaccctgtggcatctccccggcccacacccccaacccccgcccgttccggcaagaccagactccttttgccagagtcatagccgcagctcaggtcctgctaggtctcagaaagtcttgcgaagaatccaggtggagactctggagcgaactctggggagagaatggggcgtgtgtgcacatgctcagtggtttgcagctgccagagtgaccctaggatgggacagccaccgggactgtggcagcacccacatggagtgatggtcagggagagatcaagagatatgactccggagaccctaagtcctctagagaccccaaggggagacccaaaggggagcggccgaggaaccctgagacagagacatggagggctaagagataatgagcaaaaagagacctagagaggagagacaaagagaccaagagagacaagagataaacggagacagaccaagagtcaaaataaaggcggagaccgagacgtagaggctggcagagggacccatacagaggcccccagaacgacgaatctcagaaataaatgacccatagagatactcagagatacatcccaaaagagacagagacccagaggggacagccggacacagacacacaagagagtgagagacaaaggtgcaaacagggcgactccaggccgggcgccgtggctcacgcttgtaaccccagcaattcgggaggccaaggagggcagatcacttgaggtcgggagtaccagacctgcctggccaacatggtgaaaccccttctcaactaaaaaagaaaaaagaaaaaaaattagctgggcttggtggcgcctgtaattccagctactagggaggctgaggcacgagaatcgcttgatcccgggaggtggaggttgttgcagtgagccgagatcgcgccactgcactccagcccgggcgacagagggaaactgtgtctcaaaaaaaaaaaaaaaaaaaaagacagaaagaaagaagaaagagaaaagaaaagaggcgactgcaactgaagcctgattctgacgaaacacacgcacacggaaacttggagagacgcaggacaggatcccggcggcagaaggacggagagaaaggggaccccgggacgggaaaggcgcagagcaggcgcgggcggcggcggcggcggggcagggcagggcgggcgtcccggcagagggcgcgcggtcgccctgtcgccctccgccccgccggggtcacagtgccccctccctcgcgcccta

SEQ ID NO: 22188 - DNA, 2300 bp, Homo sapien
tggccaggatggtctcgatctcttgacctcatgatctgcctgcctcagcctcccaaagtgccaggattacaggtgtgagccaccgtgcccagccatcattattattttttgagatagagtcttgctctgtccaggctggagtgcagttgcacagtctcagctcactgcaacctccacctcccagattcaagcgattctcctgccttagccttcaaagtagctgggattacaggtgcatgccaccatgtccagctaatttttgtatttttagtagagaaggggtttcgccatgttgcccaggctggtcttgaactcctgatctcagggatcctcctaccttggcctcccaaagtgctgggattacaggtgtgagccaccacacccggcctattttatttgtttttttgagacagattctcactctgttgcccaggctggagtgcagtcgtgcaatctctgcctcccgggttcaagcaattctcctgcctcagcttcccaggtagctggaattacaggtgcgtgccaccactcccagctaatttttgtatttttagtagagatgggatttcaccatgttggccaggctggtctcgaactcctgacctcaggtgatccgcccacctcggcctcccaaagtgctgggattacaggtgtgagccaccacacccagcccttttctttctttttttttttttttttttgagacggagtctcgctctgtcgcccaggctggagtctagtggcacaatcttggctcactgcagcctcaactttctcggctcaaacgatcctcccacttcttttttttatttgagacggagttttgctcttgtctcccaggctggagtgcaatggtgccatcttggctcaccacaacctctgcctcccaggttcaagtgattctcctgcctcagcctctcaagtagctgggattataggcatgtgccaccatgcccagctaattttgtatttttagtagagacggggtttctccatgttgatcagtctggtctcgaactattgacctcaggtgatctgcccgccttggcctcccaaagtgctgggattacaggcgtgagcactgcactcggcctttttcttgaaacataaaattagtcattttaatttgcaataatttctgtagttattaaacaggctattgaatccatccacaaaacttaagatacaatacttaagaacagggctctaaataacaagtgccagctctctgatctcatggccaacaacctgagattcctgccatctggtctcagttcaggacctttgcacttactgttaaacaccgcccccccggccccaccccagatctcgcttctatctgtcctttattcaaatgttacctcttcagaggggccttccattatcaccctttctaaaacagcctcgctctcacttcccatccctttattctgctccatcgttcttcattatgctggccactatctcaaattatcttttattatttatttatttatttacttttgagacggagtcgctctgtcgcccaggctggagtgcaatggcacgacctcggctcactgcaacctccgcctcccgagttcaagcgattctcccgcctcagcctccagagtaaccgggcttacaggcgcgcacggccacgcccggctaatttttgtatttttagtagagacgggctttcaccatgttggtcaggttggtctcacactcctgacctcaggtgatctgcccgcctcagcctcccaaaagttctgggattacaggcgtgatccaccgcgcctggcctcaaattatctttattcagttaaatgcttttattgtctctcccagtacaatgtaagccctagcagcagaagactttgctttaatcacgtgctgtacccccaaagcccagacagtgcctagcacacacgagatgctcgatgaatagttattgattgaatagattagacatcaacgcaatcaggctgttcacctagggactctttgctaggcggcggagaggtacgttacagttctctacgcaaaacgcatgcgcgaaagatccgggaagtgtgatcggaaaggggcggagcatcagggagagtctcgcggacataggcggttcggcgcggaaagcgggaggtggaggggcggcttggggcaagcgcgcgcgcgcagtgcagaagccagccccccgcggctgaggtactcaaggtgcccaaaggcggggtagtgacctcgcgcgtgcgctgtgcccgcggcagcgccgggtcctagtgtgtgggttgttgttggcaccgcacggcgcgtgcgcagtg

SEQ ID NO: 22189 - DNA, 2300 bp, Homo sapien
tctctcaagcctccctggctgtgcacgtgtcctttctttttcccttagaacttccctgtccttggccaggcacagtggctcacgcccgtaatcccagcactttgggaggccgagaagggcagatcatgaggtcaggatttcaagaccagcctggccaacatggtgaaaccccatctctactaaagatacaaaaaattacccaggtgtggtggcgcacgcctgtaatcccagctacttgggaggctgaggcaggagaatcgcttgaacccgggaggtgcaggttgcagtgagctgagattgagccattgcactctagcctgggcaacagagcaagactctgtctccaaaaaaaaaaaaaaaaaaaagaattcccgtcccattggcattcacaactccctcctgtttccctaattccatttgtgtcctcctgactccacgtagaccacccacattggcccttccttgctcaacacccttcccagctcctcagcgaccacacttctcggcctggcattggggcgcttgatgaccccgggcctgcccacctttgtggcttcatctcctgggactctctgtcatcagtacatgagccagccctgccgaagcgcatccccagcctcctgccctcctgcccccgggcccttggacctctggagttactgctattccacctgacaggctgacacctcactgtcttccttcatctctcttctttctttaggtcttagcttaagtgtcattttctccaggaagccgcctctgtgtcctctgctcctgccattagaacataagtcactcagggctcttgaaggacagagagggtctgaggcctcatccggcccagggcctggtgtgcaggctgttgtggggttggtggggcggagccgccctgtggcaggactcacccctgtccccatgtgccccacagatacacatggtctacagtaagcggtcaggaaagccccgtggctatgccttcatcgagtacgaacacgagcgagacatgcactgtgagtacctcccgccgagccctgccctctgacctgctctcacttctctgctgccccagcccctcccagtctgtcccctcccccaccctgccacacctgacattagcgatgtctcttctcctcctccctctgtttctgatgtatcttttttttttttatatacgtgttttttaaaaaacaaaaaccaaatcccccacaacgtgtgtgtgtgtgtgaacctggggaggtaagtgtcacacgttgaacctcaggggcaaagagggaactgggtggggggctggggccagctggaggtggggggaggggtcggattttgggggaacctcccccattccccccactgaagttgggggtggccaggttgcaatgaggactggcctttgaacctgccctctcttccccccccagtagaactggggctgggccacccgaccctccgcttccccaaccctggccccccaccctgttcctcagcgggcagtggggtgataggcatgttgagcgcctgcccctacagttccaaagccccctttgaggctgccgcggcgtccacatgggcagggatgggtgggggagggtgggcagggctgcggcgtgtccaggggccgccgtattaattgactgttcttattgtcactgcagccaccacgcagctggcttgcagctgatgcttacgctccccttacaacacctcagtgtatggttggtataagggtttgtatcatgggtaagatcactcagcaccgcacaccagcccagcttagccaggcagctcaggagcagcgaggcgcccctcctcccaccccagtcgcccccgtagcctccccgcacccatggccctttccttgtttgggtgccctttgtccctcctgccccgatccgtatgctctctgagaatcttgctgatcccaggaggggaaggatgaacctggtgggaaaggcggcggcctctccgcttgggttccacccagcctctgatgacccggcttcgtgatgtcagcggcgaggtggcaggaacaccgagggcagggctccaggccagggctccactggagcccttcagccttccctccctgcccccgtgctttctatggggctgctactgtgctggccctggagagtctttttggctgctagttttggggtgctctgccccctttctgtcttccttactgtggttgaggcctcccgagggggctggctgtggtgtccagcagctctccagaggtggtcaggagctccctaaagtgcatggaattggggcttggggtgtgggagggaccaaggggt

SEQ ID NO: 22190 - DNA, 2300 bp, Homo sapien
ccctttgaggctgccgcggcgtccacatgggcagggatgggtgggggagggtgggcagggctgcggcgtgtccaggggccgccgtattaattgactgttcttattgtcactgcagccaccacgcagctggcttgcagctgatgcttacgctccccttacaacacctcagtgtatggttggtataagggtttgtatcatgggtaagatcactcagcaccgcacaccagcccagcttagccaggcagctcaggagcagcgaggcgcccctcctcccaccccagtcgcccccgtagcctccccgcacccatggccctttccttgtttgggtgccctttgtccctcctgccccgatccgtatgctctctgagaatcttgctgatcccaggaggggaaggatgaacctggtgggaaaggcggcggcctctccgcttgggttccacccagcctctgatgacccggcttcgtgatgtcagcggcgaggtggcaggaacaccgagggcagggctccaggccagggctccactggagcccttcagccttccctccctgcccccgtgctttctatggggctgctactgtgctggccctggagagtctttttggctgctagttttggggtgctctgccccctttctgtcttccttactgtggttgaggcctcccgagggggctggctgtggtgtccagcagctctccagaggtggtcaggagctccctaaagtgcatggaattggggcttggggtgtgggagggaccaaggggtaggctgctagcagctgaaggtgtcgtaggtttttactaaagaaccttccactgtctagagacttgagagagggaaagagagagagaggcctagacgaacacaatcacatgttttctttgctgttcctcccgggatgggcctgttttggggtttgggactctgaacccgagcggggttccttcgcttgactttgatcctggtccttaaatgcctttccccactcccctcccgtgggttcaggggccaagcggcccctcctcagagcacgggcagcaccgtctcctggacccctgtgtgccagcctctgcagacgcagctggtgggagggagcatggatttggaggtggagaagtcactcctggtcctcggagggggtgggctgtgtgcctagttcagtgtgactcggggattggtgagggcggacaggtttctgaggcctccctagccttctttgtaaattcacacgagatagtccagggctttccagcgcccagcttggatgataatcctcgtctcccccactctaaggcctccttgagatttctttggggtctaccacgtcctctgcctgtctccaggtggtacaggagatgtggttcctctccctctcctggctccctagaaccccccacttcccctccctgtagctttagctgaccccgtggtggtgggtgtggggtctgtgcgcgtgctcaggtaagcttgggggctccaggtaagcggtcccgtgtcccccccccgggaagcccgcctcctcgccaggcccccaggagttgccgagccccccccatcccgctcggtttggacacccgcaaggccggcatcggtaaatggcacctttttctcttcctctggttgttatttgggggggagcgggctggggcggggcagggtattacggttggttgaggacagccccctaggccagggctgggtgggggaacggggactttttggccttcatgacagccccacgttgatcacaggccagggcctcaggcttgccttctgctacgcgctgcccgagagcagcagtgagcctctcccccgtctcccctctacgactcccctttcctggcaggctcaggctggggtgcgctcccagcacgtgttgagccgggggtgtggagggcgagatggggcagggctggggggaggcagagtcagtcgtctcaggtaaggcagggattttcagtagcaccgcacggctccccatgcttcctccactgcccctctcccctgctgcaggggccccgccaggccccctgggagtgtataacccgcctctctgctccctgccatttcctgaagatttctcccacccccttctggttcattttctgttctgatgtctgttccccccacactcacccccctccaaaaaaaacaaaaacagaaaaaaccggtgtggtctggggtgcggagcgtcccagctgggcctcctgccccggcttggtgtctcagggtgcatgcttggggttgtggaggagccccctcccccacagcagagtccagcgtggagttaaccttcagtttc

SEQ ID NO: 22191 - DNA, 2300 bp, Homo sapien
tgaaaccgcatctctactaaaaatacaaaaattaactgggcgtggtggcgggtgcctgtaatcccatctactcgggaggctgaggcagagaattgcttaaacctgggaggcagaggttgcagtgagccaagatagagtcactgcattccatccagcctgggtgccagagcaagactctgtctcaaaaaaaaaaacaaaaaacaaaaaaactggggcgacccacctgtgatgtgtgacagcccacagcttgcttctgcctcgtttgcctccatgcagctaggtcggtcccatgcctctttgcactggcccagcgcagcaggccacaggccccagctttacactcagtcctggatgagtctcttgtttcggggtgggcacatttgattgactcagtgttgggcctggggtcctgttgctcaggcatgcttattgaggactgaatcctgcaaagctgagtgacagttgtcagagaagatgatggtccctgggcagacacccaggcagtagtagccacttggggctcctgtcctgcctcccagccctgtgtcctggctctggactcgcctgtgctagggagaccacgctctcagctgctgagcctcggagcttaccaggcatgttcttaccttactctggtctctctggggtggagtgggttcttatagctctgctgtttcctgttggggcgggaaaatgctagaatctcagtctttccagaatctcagaatcttctagttcaattgccattcaaactttttgttggtgttagccaataacatcttgactcggtgcacccgcagaaatactgtaacctaaagtttgaggaaacagttttttctatgtagtaagtatatagttgtattctgctgttttgtttcttaagatgttggttgcaacccatcagattgatgatgggactcatttctgggtcatgacctgaatataggaaaggctagtctagctgccctgtgcctgtgacatggcaggtgcctggtccgctgcctgcttctataagaatgtctccctgcagcctcttttctatacagaactcagccctgcctcacggaagcttttccaggcagtgcgagatagaggagcgcttgagaaggcaggttttgcagcagacggcagtgacagcccagttctgcaccttctttgctgagtcactgtgggccagtgacttgatctgagattgtttccccatcagaaccatgaggttatcatctgtgccttggggctgttcatctatctattcacttgacacacacacatccacctttctataccagctgcagcgccacctgctggtaccgtgagcaagagctgggcatgcccacggttccggtgccctgcagtctggtgggagaggcaggtaggggtcgactcaggtagcaaacctgaaactccaggggaaggaagcgtttctgcaactgtgagtacataggactgtgaggagagacttcccgagaaaggatgttcgggctagcgttaagggtgagcgtgagttcaccagagaaggaaggggagaccagtccagggcaaggagaatgcacagacactggcaggaaggtgagcgtggggacactgggaaaggcctgggacacgcagccaagagccgcggctcagacgctagcagggcccgctcttgctgcctctaccaccagttgacgaggagtttggaccttaggctgggggacgccagcaaaggcttctaagcagatcacatttttgggtggaaagatcattggcttcgggtttctgtgagggcgaggatgattggaagggagggttttgaggaggctgtgaagtgcgctatggttaagatgatgcgctttggggccagacatgggttccagtaacggctgttgcctagcgaacgctttgtgtgagttaattagagaagacgtggctgtcttgtgatgggagtgcgcgggatgaactgcacggggggacccggccctgtgaacactaagccaggggctgccttcctgccctttgctcttggagtcggctcatttctgctcctccgggccctgtccctgcccagattcaccctctgtccgtctgccctgccccaggaggaggcctcggtggtaccagaagaggaggggctgatgtgaacatccggcattcaggccgcgatgacacctcccgctacgatgagaggtaagattgggcgaccggtgtcctggggtggggggcggtcacggggggagcccagccacacaggtctgcccacctcatccaggcccggcccctccccgcttccgcacagggaccgggaccgggaccgtgagcgg

SEQ ID NO: 22192 - DNA, 2300 bp, Homo sapien
cctgcctcagcctccccagtagttgggattacaggcatgcaccaccatgcctggctacttttgtatttttagtacagacagggtttctccatgtggtcaggctggtctcctgacctcaggcgatccacccgcctcggccccccaaagtgctgggattccaggcgtgagccaccatgcccagccacacttctttttaaaaacactcgcagccagacacagcggttcgtgcctgtaaactcagcactttgggaggccaaggcagggggattgtttgagcccaggagttcaagaccagcctgagcaacaaagacccctccatctaaaacaaacaaaaaaagaagataaaatttaaaaacccctcttctcatggtttctcccacctgggtttctgcctacatttcaggccattctctgctgtcctcctgacttttaagtgttagagaggtctggggaccagttctaggccgtcttaatattcgcttgcccctgacattcttatccactccggtggttttatttaccacctatgccccaatattcaaacatgcctgcagaccaggttgctcttttgagccctagacctagatcgatagtttctccccatggattctgcataggctcctcaaattcaaaatatccagtatcggccaggcaaggtggctcgcgcctgtaatcccagcactttgggaggctgaggcaggtggatcacttgaggtcaggagttcgagaccagcctggccatcatggtgaaaccccatctctatgaaaaatacaaaaatttggcaggtgtggaggtgcacacctgtactctcagctactcaggaggctgaggcaggagaattgcttgcacccgggaggcagaggttgcaatgagccgagatcacgccactgcactcgagactgggcaacagagggaagactgtgtctcaaaaacaaaatatccagtatccctctttcagtgtagaccatcttaaaaatggcaccaaagcaccttaatactgtcttctcctgcacctcccaatccccttatatagccaagcaccaaggcttgtctagacatttcccacatctgcccacccatcttctgtgctttggccctggtgctagctgccacctggatggctgtggtagcctcgtaagttgccccgctgcttctcctcttgttcttgtccaaaccagtctccacagtggctacagtgattttttttttttcaatagatacgaggtctcactatattgcctatgctggtcttgaactcctgggctcaagtagtcttgctgcagcctcccaaagcgctaggattacaggtgtgagccaccgtgcccggccccagtgatcttaaaatacaaatttgaggcccaacctgggcgacagagcgaggctccgtctcaaaaataataataataataatataataataatacaaatttgagtgtcatatttttctcttaggagtttgcatgaagccccaaatcctcaaggcgcatatgccaacgcaggagcccaggcataaactatcctgccgaccttttcacctcatcatcaaccaatcctaactctgcttccagccacgtgggctctttctgggtggtgggggtgacccaagctccacctcttgttcatcttacctcccaggactgtatgtcaatgtccctcctctaggatttccttcgttttctagatcatcacctccccactctcagctctcatcacagccgtagttggtcgtctacctcccctatagactggaagcttcgttcgggccgtgggcttggctgtcctgctcaccacggtgtccatgacttgggctcagatgtttcacaagagtttgttgaatgaatgtggggaaaggatggacaggggatagacgggtgtggagggcaggcagacacggatcctgaaaggtacacacagaccgaacctgcagtgggaggggtcgccaacaggaccgactggccggggcggagggcagggcgcggctggcgcgcggcaggtggtcggagcagtcgggcgagggagagctgggcgctctccaggctgcgcctccgcagggggcgcccgtggcccggggcgtggcctcgcgcagccccgccctcctcgccggcgccagggcaggcgggcggctggcagctgtggcgccgacatggctgcgctggtggagccgctggggctggagcggggtaagcgtgcgccagggggccctgcccacccgggccgcggcctacatacccagcccccggtccccgcccttcccgggtcaggccagtgcgggtgggccagcggacccggagggggtggg

SEQ ID NO: 22193 - DNA, 2300 bp, Homo sapien
agatggctggggtcagccatacaggacctgagtgccagcctgagaagctgggactttgtcccatgggtgctggggagctatgggaggggtgagccagggataaactcagcttgcaggtgcagaaggaccactctgggactctatgggagatgaactgaggggagagattagaagccaggccagggaggaggctggggtaagagtccagagaaaagaggacaaggcctgagctggcccagggctgtggggacaaaaaagagggagtcaaggcgggcggacattagtgggctgtgggcagggaggccacaaagatgggtctggacgtttggccagggactgagggaacacggggctgtccctgacatgggaatcctgggaggttttggaggaggacactgaaccaggagttaatgactcccacgaggaggacatgaggcattgacatctcagggctggcaccaggctcactagcagtgggtcccatctcccagtgggggctggacgagggcagcgggccccaggctcagctgtctgtgttgggccctgcagagcgttgagggtgagcagcatgagaaggcggtggagctgctgaaggcggcccagggctcggtgaagctggttgtccgttacacaccgcgagtgctggaggagatggaggcccggttcgagaagatgcgctctgcccgccggcgccaacagcatcagagctactcgtgagcccctgggtcaccacacccctggggcctccacgggctccctttaaccccaggctcccaaaccaggccagtgcttcctggatcttccagccctggcccctcctctgggatcctgacccttgacccttggcccaggctctcaccccaggctagtttggccaaatcccctggggagcccttagcttccttccatcccaagatacggaacctactgtggctgggatccctcagcccacttacctgggcccttgcctctgcaaccccagtcctgcccctcttgtctacccggagcctccctgatcccgggtcccttgtccaccccccttgcaggtccttggagtctcgaggttgaaaccacagatctggacgttcacgtgcactctcttcctgtacagtatttattgttcctggcactttatttaaagatatttgaccctcactgagtgtctgtgtgtctgtcctgcatccctgggttggtgtcttgagatgtggagggaatgcgaggagctgaggtcaggccaagccgttgagaagccttttccagagtctgagaacagaggttaagacctctccctaggtctgaaggcggagacaggccggcttccaagagactagtccgagggcggagggcggaggcagggacccagtctgggtctgagtgctggggcagaactgaggacaacgctgcctacccttaagagcgtctgagggcgaaggccaagtcccttcctccagagtcctgaaacgcagccggagccagtgggcggcctctgtgtgggcggggcggagcgaaccattagcctcgtccgccgggggaaccctgcaggccgcactactgtctgcgtgggagtcgcgggtgggggtgccgcgtgcagttcccgaggcgggcgcaggggtgcagaatgaggtgccctcgcccaccgggcgctcactccaccttccaaacacagcgcgtctttccggaagcagcccccgccttgaaatccaacctttagcctcatcccgctgcccgcccagccctcgtgtcccgtgcggcgcgagggctagtgcgcgccactgccgggagccggggtcgcgactcgcgttccacgccgcgcgctactcgctccaggtgacatcatccccctgccgggctccgcctcccgccccagccgcctcacgccgcgtgcctattggtcgacgcgccttatgccccgcctctcgctctccgcccgcgcgacccctcccggccggtgtggaggcggggtctagtcgccggccggcgccgacgctctctcccattggccgctcttcgccgtctgtcagtctcctgttaaaggggccacgaccgcccgggagccgtggggggggagggggagggaggaggaatttttttggggggaaggtgggatttggggggcgctggtgggcacccctggatctggcggctgcggcctcgcggggggaggctgatcggtgacaggggcagggggctattttgggggtagaaggcagtgagagcgtgagggggaggggggtccccagcgcccaagccggagccagagacgcggagcccgcgcgagcgtcggagacagggctccaggg

SEQ ID NO: 22194 - DNA, 2300 bp, Homo sapien
tctggaggaggtgatgtgtgttcggctcattggcctgggagagtgtacttggagaaggggaactcatctgagcctcagggggcaatggagtgctagaaacatctcaacaagctgcatcttaggggaaagagtagagagtcctgaagcccgccacctggggtgacatgaggatgagacaggggtttggtagggccacaggagatgtgaagttgatggggcagagtgatgaggctgtgaagacctggttcctaaaagtgagacctgagaaactagatacctgctggggagggcagtggacagagctgggagcctggactcctgaatccttgtggaggtaaatgatgggggattggaaggtgagagcctgaggtcttgtttggagagagggttgaggcagacagcctcagtaaaagctggtgggcagtacggaagctggggtctgaactcctgggtccctgaggggataggagactgggaccaagacatttaggtccccaagtgggagtgtgaacagaagtcagagaactgcattgagaatcacattccgggtcccccaaaggaaaggagtcatggcgcctgagtccctcggggagcagatgctgggtgccaggaggctaagtctgtgtgtctgcagggcacagcggggttctaagcagagcaaacgctggggaacaggattcctaggtgctgacggggtgagggctaccacctggggccagcagaggtgtagacacggacaggcttcccgaacggggtgggagctgcatccccgggtgccatggtccccacggcgaccagaataggaaaattcagaagccctggatcctcagggagcagctggagtcccaggaacctggggtgccgaggacggggccacgagcctggccggcagaacccagaggctggggcgccctggtcggggagggcccgggtattcccgggtcaaaggcgcggcggggggatccccgcgccgcctgcgccccctccctggtggcggcggcaggaggtggggggaggcgaggctgccgagcgcgctgaccatggacagctccagagcgggcctgtgtccagggcggccgccgagcctgcctggaccgtgggacgcagccggctgtgcaagcccgaggctggcgacgggagacggagtgcgcgaagcggggacgatgcggacgcgtctggggagtctggcaccgccgcggcgggtgtctggagctcccaggacagggtcaggaagggggatctaggctctaggaggggtcccggggccggaccgggaaatccaagctcctgggccctggaggaggcgcgaggcggcggtgcgcccgggattctagggttcggtcggggactctgggcgccgggaggggcacgcctgagtccccggggttggggtgtgaaatctgggctcgggggtcccctgggatgaggaagggaatccgggatctcggggaggcgggggaggctcgccaaggggtccccagggtgggcgctgccaggagggccgggccgggctcttacctgcctggtccgcggcggctgcgggcggagctgggctgcaggagggacgtggggtggagtgggggggccgggcggggcccctggcagcggccggggcccggctctgtcgcttcggagccctggagccctgtctccgacgctcgcgcgggctccgcgtctctggctccggcttgggcgctggggacccccctccccctcacgctctcactgccttctacccccaaaatagccccctgcccctgtcaccgatcagcctccccccgcgaggccgcagccgccagatccaggggtgcccaccagcgccccccaaatcccaccttccccccaaaaaaattcctcctccctccccctccccccccacggctcccgggcggtcgtggcccctttaacaggagactgacagacggcgaagagcggccaatgggagagagcgtcggcgccggccggcgactagaccccgcctccacaccggccgggaggggtcgcgcgggcggagagcgagaggcggggcataaggcgcgtcgaccaataggcacgcggcgtgaggcggctggggcgggaggcggagcccggcagggggatgatgtcacctggagcgagtagcgcgcggcgtggaacgcgagtcgcgaccccggctcccggcagtggcgcgcactagccctcgcgccgcacgggacacgagggctgggcgggcagcgggatgaggctaaaggttggatttcaaggcgggggctgcttccggaaagacgcgctgtgtttggaaggtggagtgagcgcccggt

SEQ ID NO: 22195 - DNA, 2300 bp, Homo sapien
ttcactcatacgataccagggtcggccagctttggttcctttgagtgggctaggcttaggtttgctgccactgtctgttggagtctgacctcagttttcccaaatcctctcacccaggtagccaggactgttttcctaagagcaatggcacaggcacagtggcatactttgggatgctgaggcaggaggatcccttgagtccaggagtgagacctcatctccacaaaaaaaaaaaaaaaaaaaaaggtcaggcgcggtggctcacgtctgtaatcccagcactttgggaggccgaggcgggcagatcacgaggtcaggagttcgagaccagcctggccaacatggtgaaaccttgtctctactaaaaatacaaaaattagctgggcatggtggcgggttcctgtaatcccagctactcgggaggctgagggaggagaattgcttgaaccgggacccgggaggtggaggctgcagtgagccgagatcgcatcactgcactccagcctgggtgacagatcactccagctaaaaaaaaaaaaaaaaaaaaaaaagaaagtagggaaaggaaaagaaaagaaaagaaaagaaaaaaattagccaggtatgctggtgtgtgcctgtagtcgcagctactcaggaggctgagttgggaggactgctcgagtctgggtcgttcaggctgcagtgggccgtgatcgcgccactgaactccagcctgggtgacagagtgagaccctgttaaaaaaaaataataataataataggcctcagtttcccctggcagcacctggtggccaatctttggtttccccggtggagtgacagggtggcggtgcctgtttccctgtgtcatgatcacagtgcctgggcctcagtttcttctgtgcagtgcttggtttgcccccaactatttcccctacgtggtatccgagtggctgtgcctcagtttctctgttgtgccttgacaaggccggtctgttccttgccctccccgccccgcaggcccgcaccgccgccatgatgtgcgaggtgatgcccaccatcagcgaggatggccggcggggctcggcgctgggcccggacgaggcgggcggggagctggagcgcctcatggtcacgatgctcacggagcgcgagcgcctgctggagacgctgcgcgaggcacaggacgggttggctacagcgcagctgcggctgcgcgagctcggccacgagaaggactcgctgcagcgccagctcagcatcgcgctgccccaggtctgggcgggacaggggcggggcatgagggggcggggcctcggggggaagaaggcggtccggaaggggccgggcttggcgcctggaagggaggagtctgggcgaggcttgccgttaatgggcggggcctgagtggcaagggacagcgggacttagcagggagggcgggaccttcaaacttccagtcccagtgaatgaaggagacagggaaaggattgagccgaatgtccagatcctgccaatgtctggacaggagtttgcagctctgacgaaggagctgaacttatgtcgggagcagctgctggagagggaggaagagattgcagagctgaaggcggaacggaacaacacgcgggtgaggggtgttgagggcggggcctaagtgggggcggggcctcgtggtgttgaagtggggggcggggcctctcagtgttgcagcgtgacctatttttttcccccatctcgcctttctgtcttctcctcttccctgctcccacttcctggctggtctcccactctggtgccactccttcctccctgtctccataacttttctcttttctgtaccaccggttccttgaccccgacctcctctcttttcctgacctgtctcggtgctcctttatatggctccatcttttcctccatgtgtccgccctacctgtcaccctttttctcacatctgccccttttcccttgcctcttttccttgaccccatgccgtgtgcttgcagctgctcctggaacacctggagtgcctggtgtccaggcacgagaggtcactgcgcatgaccgtggtgaagcgccaggcccagtccccgggtggggtctcctcggaggtagaagtgctcaaagctctaaagtctctcttcgagcaccacaaggccctggatgagaaggtatgagaattagaagagcaggggtggagaatggaaacctatagttgactggggctgttctgagtgggagagattctggccgtgattggttggggatgttctgagttggaagaatgttgactgtgattgattgggacaggatac

SEQ ID NO: 22196 - DNA, 2300 bp, Homo sapien
gaccttgtgatctgcctgcctcagcctcccaaagtgctgggattacaggtgtgagccaccgtgcccagccacctattttttaaacagaggaagagggtggggcatcctcaaagcagggcaccttcctgtggtgtgctggagcccgctggcactggctcaggagatccgctatttcaggaattggctgacatcacactggtagcttgaaattggccatggtgggattatttacaccatggaaatgggcaaatgctacaaatcagggattcccttctgcctccccaaggagccggttgttaggcatttaccagcatacaactgccaccttaccaagggcatcccagtgcatccagccgtattttggggatgactccaattcatgggcgcttgtctgcctttatcacttcctcgatgtgccctcactcactactccctcagggcctctgcctttccggcattttcctcatcacctccagcatgaaagattctgcctcccccttgagattttccaaatttcgacccctccctgcctccagctggaacaccctcagatgagacactggccactgaccctctggggctagccaagctgacaggcccaggagacaaggaccgaaggaacaagaggaagtgagtgtgtgtgagtgtgagcgtgtgtgtgtgtatgtgaatgtgagagtgtgtgagggtgtgtgtgtgcgtgtatgtgtgtgtatgagtgtgtgtgtgtgtgagagggtgtgtgagtgtgtgtgtgcagcggtggtggtggtgaacagaaatgggaattcaatgctgggaggaggtgtccgtgatcctgaacttgcttgcctggaaacccaggagctcctagagtttttattttttctttctttttttaaaaattttttttgtattttttacatttatattatattttttgtttcttttgtttttcttattttgttctctcttttgataggggttggggggagaggatttacagattcacatgtattttttgaccttctgccgtgttttgtacattcataaaagctgcgtgtgcgtatgtgcatgtgtgtgtgtgtgtatgtgtgctgatgggggccatccacagagcagggggtctccatccctgacagcttctatcctggccccttcacccttacaggcatgaactcctggaggaggcctgccgccagggcctaccttttgctgcctgggacgggcccaccgtggtgtcctggctggaggtactggggcccagaaatgccctgactgttggtccccaacccctctgacagccccactggtaggggctgcctggtcctcctggcgcaccctgcttctagcccagaggtgggggtggccatgggcctggcaggtgaggacccaggagggctcgggcttcctgttcacctaaacagtttctttctccttctccttctgcccctgccactctggccttgcccacctgggtcatggtctcctgtcgttctctctactctctctttctggattctctgtctctatttttcggcaccattcccatctctgaccacgcttttgtcattccccatatttctcctcatgtctccgatcgccctgccgatgtctccctgtctccggcttcctgtctctccccaccctctatttctctctctctatttctttctctctctctctctttctctctccctctccctcttcccccacccgccccccgccccccgtttctctccctatttgtctccctcggactctccctcatctcgtccacgtctcttttccctgtcctgtttcttctccttgcgaactttcccacgtctctgtttcgctccccacccccttgcctttccccacctccctgttcccccatctctccgattttctcctcctctgtccctctgtcccctctgtccctctgtccctccgctgcagctgtgggtgggcatgcctgcctggtatgtggccgcctgccgggccaatgtcaagagcggtgccatcatggccaacctgtcagacacggagatccagcgcgagatcggcatcagcaacccgctgcaccgactcaagctacgcctcgccatccaggagatggtctcgctcacctcgccctcagcccccgcctcctcccgcactgtgagtgtccggcggccaattccagccttcgcttcctcagagccccgcctcttgccctcagtctagccaatcctgggcctgctcactcccctgtcccacgaccctgcttctcattggcttttacccccctcagcctcccctccactcctaacttggcctgtggtccgtccctgtggtac
